United States Patent Application Publication US 2011/0214205 A1 - sequence listing, part 2

SEQ ID NO: 3535 - DNA, 2827 bp, Setaria italica
  Peptide Sequence Number=SeqID_69509
tttttttttgtactcaaaagtggatttgattaatttgcaaaatggtacgatacatcagctataagtgcatacccttctcatttcaacatcattctgaacccacaaaacagaggctcagcttaccaccaacaatggttttactaatttcaaaaaaaaacaattgttttactcctgtctgctcccagaaaaagaatggctaaatacagagaccggacagtatacatcacttctattatttacacaaacactgagtcacaagttgatccagcaaccttgtactgtactgaacagccctcaaaaaacccgaagctattgtgcagtaccaacacgcagcttctcgtctccgatgatccacctcgtcagctggcttggatcctcggcgagcgctccgcatgaagggatgatgctgaggtccgaccctatgacctggtactcatccagtgcggcttgcatttccgccgctacacgtgcatcgtttgaaatgtcaagatccacgctgagggcctccgcatagtgccgttctttctcgggatcatgctcgaaaggatccatgacggctccctggcagagttcagaataatgcttgtaagccccactgttttcatcttggtcgtatataagtgtcccaccataccagccattctccacgtctgctgttgtgaaagcaagataccttctgaaaatgtcctcctcacatgattccgatgaggatagccaattcagctccccacaaagagagacattcaactcatctttgtttgcctcattcgcattttcaaccgggacaactcctgcagttggaattgtctctgtgtgctttctttgaccaaaataccagtttgggcttttaagctgtatctcagccgcatctggagccattccggaagttccagcacctccacttagttttagatcagcatcacagtgaaagcttacacttcttatcgaactacacgtcctttccataagcttctcaaatgaagtaagtttcatccttgagaaatcctctttacatgctggaacagggctcaatgtggatccaggaatcaatgcagctccagatcccagaaatgcattatttccaggtgtgcaactcgagtcgtagctatctgacgtaagatcatccccagctgttgttacatgaagatagtaatcagtatccagctcccaaagagctggttttccttcttgtggttgaaaatatccccgaaatagatttatagcatcttgtttctcaccatcagtgtaggcattactgtaataccgtttaattgatttcaggaactcccgagactgagtagtagccttccacttcccttgcctctcaggaaaaaccgtgttatgtgccgcagaccctccatactgatgagcaagagcatcacccatgctctggtacatttccatcaaagctgaagcaatgctagaggctcttgtttgttagcctcatttctcatatcctgaaagcctgtagaacatagtgcatcagcgttactcgagagccttgaaagatctccagaactagcccttatatcaagggaaccatcccttgcagtgctagttcgactaagctgagttgtcctttttttctgaacttttggctttccgctgtagtagaacccagtaaggtccagtgcttcgcccgcaacttttcctaaaacacccaatacatttgcagatttgcttttagcaaacttatgaaaatcccagtggatgaatctcaacttcttctcttccgggacattttgattaagatatccaactgcagcaaaatattcacgtctgagcatcatttcacgtggccttttttcaacagtctttattaaattgagtattattataggatgtccatatcgccgggcgagatcatcaaaatgtaatttggttgcttcatatgtgggatcatatctctgcacaaaaatgtcaggcttaggacttagtcgtgaagcctcctgtgaccaaaagagagggatggatcctcgcatctgtactacggcactcattcttcccttccaggaaccagcttcttcttcaaatactatctgctctgtttcaacatcattagcaacttttccatggtcattcacgcctcttttcaaataccgtgtcccagcaaagtgtcgggatcttctagagatgagaacgacatttatctccctgccaaaaaatgagagcttgacctgcttgaagtgcccatggacaagagctactgtccaaagagtattgcggcaccttgaacgtattggctcagtcaggaaagtgttccagacaaacaaattttcataaggcatttccttcatcccagcagaagtgacattctgctgcaggctctgcatgatgggatatgtgtagctatagaagaaatccttggtgagatcaacactagccaagagcttcttgtacctcagctcattcttagatgtggcgacatccgtctgcaccgatgagtgagggatggtgatcatctggctctcatctatacaatatatagcatgcccacaaatgcaaccgatttggcggcgcttggtgactaaaatcaggtaatatgactccaggaacttgatgcaacctgcgattccgtaggccttggtgacgaaggtgaggcccccggtggagcggttgccctcgtcgatgcgctggaggaggctcttgacctcctgcagcgcgtaccaaccggggtcctcgctgacgttgagctcggagggctcggagcggtcgatcttgagcacccggaaccagcgcttctacccgacgaagaactaacccgaaaataaacaaaacgtaaaagaaaaacctaaaaggaaaacgaaaacgaaaacgtaaactaaac

SEQ ID NO: 3536 - DNA, 800 bp, Setaria italica
  Peptide Sequence Number=SeqID_69510
acgataagtgtggatttttatttcacaagttaagtgcctcaaactcataaacatgcatgttggtcttgttaccatttgcacctgtgagccccatggatgatcttcctgcataacagcacgcatgtttagcaccttcactgctgaaataccatgaattgcagtgaatgcatggcccaatactttgtaatttttaaacattattattgccttctctagttttgagcaaccatgaagtgctataggaaccacatcccctttgtaattaaaatgagcaagaccaggaacatgaaaatcaaccatctggacacacatatttgaaagtagcaaatgtctaagtttatccagttggtgtggtataatcagatcagtcaagccagagcacgcgataagctctaaatcctcaagactagaacagtttaatagcaagcctgcaagatctccagtgatttgaacagaatgcaaaagaagccttctgagttttgtaaagccacatacatctgagtacggctctatagagacattggtgagaagcaaggactggataaaaggaccatctcgagcacctaaagcctcaagagggaagtgataatctcctttggttggtcttctgatacacccttttggcgacaggttaatgtctatggtctttgcccttgctgcagtggcaaagcaaatccacctatcaagatgatccgaggactccttctctatgccgcacctgatgcagaacctattgagccctactccactgtgctgctgaacaatagaattgactgtctcaatgaactctgctctttcta

SEQ ID NO: 3537 - DNA, 280 bp, Setaria italica
  Peptide Sequence Number=SeqID_69511
cttcgctggatctctctccaaaatgcatgccggcgtgttctggccatctcggcgacggcgagttgaccgatcagacctgcatgcactcgtgctccgggcaggacctcatcgcctcgacctcgccaacgcaacaggcgccgccgctggccttcgccggcacgaactgaggcgccgccgccgttggggaaggaagcggtggttgctgctgctgctgcggcggcggcttgaagtacgatggcctcttgcaggccgcggccggtggcggcggcaggccgaggag

SEQ ID NO: 3538 - DNA, 3270 bp, Setaria italica
  Peptide Sequence Number=SeqID_69512
gcagctgctcgttcccctctcttcttcctcagataaggaggccccaggcccgggaaaaaagctgcgatttttttccttaatcagtccgagcgctcagccgcttaccaggagcagcaggaggcggacaagctaggtttaactgcttccttgggcataaagatccactgactatcttgggaaaaatccaatctttttctgtactgttttcttcatgggaaaacctccttcgtggggtgcataaactgcgcggtcagaaggagtgcacgccgccttttccggaggagactgggaactactatcagtctctgctacgatccatgtcaagaaccatggctgttcacttgccatgaagctgcatgaactggaggcacctgaatgctgtggattgttcctatgcagatgattggatcagtggtgtcaggctttgggggttttgatcagatgttgtatgattaatagcaggattgtttgagagcccagagtttgcgtacagtttcttttctgttaactggtacggttttcaactgatctgcctgcgcaggaaggcattctcttttttgccgtgccatggatgtcacggaagttcagcagggcatgcgatctatggatgccagaggcggtgcgcctaatcttttccatgcccttggaccagcactcctgatatctatggggtacattgatcttggaaagtgggtggcagcagtggaagctggttctcggttcggattcgaccttgttctgctggctctcattttcaacttcactgccattgtatgccagtaccttgctgcttgcattggcactgtcacagggaagaatcttgcagagatatgccaccaagagtacagcaagccaacatgtgtcttcttgggtattcaagctggattatcattgttgacatcagaactgactatgatatttgggatagcacttggattcaacctcctctttgaatatgatgacctcgtcacaggggtatgctttgcgatggttgtacctaatctgctaccatatgctatatcccacctgggaaagaagatggcagggacagtaaatgcctgcatagcaggatttgcacttctttgttatgtgcttggcttattggttagccaaccacaaattcctctcacaatgaatgtaatgtttcccaagctgagtggtgaaagtgcttactctctgatggcgcttcttggtgcaaacgtaatggcacacaatttttacattcattcatcagttgtccagggtcagaaaaggtcatctgcagttggtcttggcgccttatttcatgaccatcttttttcgatcttatttatttttactgggatctttctggtgaattatgttctaatgaactctgcagcagctgaatccactaatactcttctcctcacctttcaagatgttgtggagctaatgaaccagatttttgtaaaccctctggcaccaacaatatttttagtggttcttctcttctccagccacatcatcacgttgacatctgttattggtagccaagtgatttcgcagcatttgtttggtgtaaacattccactttcagggcatcatctcatactgaagggttttgcaatagttcctactctgtactgggcaaaagtcgcaggtgctgaaggaatataccaattattaattatatgccagattattcaggccatgctccttccatcatcagtcatcccactttttcgtgttgcttcatcaagatcaataatgggtgcccatagagtgtctttgcatctggagatactggcttttcttgcatttctccttatgctattttcaaatatcatatttgtggcagaaatgctgtttggtgacagtggctggatgaacaatctgaaaggatatactggaagcccagtggtcctcccatattctgttttcattctagttgcctgtatatctgttgcctttatgctgtacctggctgtcacaccattaaaatctggaagtaatgaagctgaatcgcaggaatggtctgtacattctcagagagagctcttgtgtactcaaggaagggaagaggctaaagcggacaatgtttcatatgaagaagatcagagatcagatgttgatccttctcctagagatctggtggacaactatccacaatcagccatggaatatgctgatacctctgacactgctgttgaatctgatcatgactctcaacagtctactgcttttgcatccactattcctgaaacctgcccctccccatcatttactcctgaggagtcaaaaatctgtagttgcagtcaactggccagagcctttggagaaactttctacctctactgtgatagaggaaagtacagtagaaagtgtggactctagaagcacgactgaaagggatgttttagtagaaacagatgttctcgcggacaagtataaggaagatttaaatgtgttggagtctgagaagtctgttgttggtagcaccccttcttgtgtatctgatgatggccctccatcactgaccttcagggggaaaggttcagatgcaggcaatggtaacgggagtctgtcgaggttatctggtttgggtcgtgcagcaaggaggcagctagcagccattcttgatgagttctgggggcatctctttgattaccatggtaagctcactcaagaagctagcactaaaaagtttgatatcttacttgggctagaccttagagcacctagctcagctgcaagaacggataaacaagctattgaaatccccaagagtccgatggtgagagacacaatgcgagggccagctttcatgccaagctcagtggacctgatgtcccctaagaatgagatgtcgaacttagaacttacatatgggcttcagaggggcacaagcatgggatcgtcaacctggtctcagggtatgcagcttccaaatacacaactgcagagctcaagcaacagcctactcgagcaaagtgcaagactaaactcaaattttggtgcaccatcttactcggacaacaatcagttctaccagcctgcaacaattcatgggtatcagcttacttcttacttgaaacagatgaatgccaaccgaaatccttactctagcatgccactggatcctcagcggcttccaaaatcatctgcgcctgctgcaccaacctatgttgattccatgatgcattctcgtaaccagaatcttcttgcttcactgggtgctactccttcccagattgcagcaacatcccgcataggttcaatgatgacagaaagatcgtattatgatccttc

SEQ ID NO: 3539 - DNA, 402 bp, Setaria italica
  Peptide Sequence Number=SeqID_69513
tagtagttagtttcaacagtataatacctttgaatgcttcttaagttagattcttcctccagcaaattcctgttcggatgcatctgattctcaggcaaactatttttctacagtaaagccggcttgaaatggccttgagaaaggatctaagcaatgagccagagcatcactttcgtggggtccagagtaaaaaaaagatagctattttacggtgcacaatactaccacacggtggtatagagtataacaaagatctaaccgttgatcagtaagggtaatttagtaattattactgagatattaattggggaatgattagctttttgcgctggccgccagccgctgcctccccgttcgcccctgccgattttattcatgtttcctaggtattgttccgttctt

SEQ ID NO: 3540 - DNA, 949 bp, Setaria italica
  Peptide Sequence Number=SeqID_69514
gccggagtccaagttacggaagaagaagttacagtcctgcagcacgctctcccaggcgtcgtagtgtgtcaccagctccagctcgtggacgcagctatagcaggtcaccgcagtacaaccgtgcacgagaggcgtctccatatgataatgggtaccgccgcagcaggagctagagccagatacttgtctgatgagtgttctgtgacagatgttgctctttggcctgccagttatgatcagtaacctaccggaaagatgcttcgcgggctgcttgacttttggttaaggttctcataacttttatctatcttattatgattgtgtctactttacaatcagtagtaaaacatactggtgggtgtatttattgaactaagaccacctgtcttttcttgtgtggtataaaggcatcgtcctgcaccgcttaaacgactcggccgactacggctttcagttatgtcttcatggtttgttctgcgctcttcattcttcgcacgcccttcgctcttcattcggtcaaatgtgaacgctgcatgttagtctgcctacagcgcctcttcgcggtccatttgcttcgttgaagatgctgcgcgtctcaaagcagtaatgatcttccttctcataccatttggtaaggtttgattgtgctgacaaatgcagcatctggtaagtttctccgtgggctgggtctccatgaactgcacctgcttcaggagctgcagtatttagatggctgactcacccgtgtggtgtataatgccttcagaagacccaggtaagtgagcgcccaaaagtgaattgaccaggctgctacgttgactcgattcgacctttggccttgctccgcatccgctgctcgccccccccacatgttgccttcaacagaggaggaccgatagaccttacaagacaaaaggaagacttacctacgacctttttagaccttaca

SEQ ID NO: 3541 - DNA, 1728 bp, Setaria italica
  Peptide Sequence Number=SeqID_69515
cgcaattctcgtctcgccttctcgccgccccatccgccagcccgtcgccgcccggccgccgcatcctccccaccctcgatccaggccgccgttgcgctcccggaggaagcagatcggagaaggtgatcggctgcgatggcccgcttgtacgtcgggaacctggatccccgggtgacggctcgggagctcgaggacgagttccgcaccttcggagttcttcggagtgtttgggttgctcggaagccacctggctttgcatttattgactttgatgataagagagacgctgaggatgcaatccgtgatctagatggcaagaatggatggagggttgagatatcacgtaattccagcagtggtcgtggtggtcgtgatcggcaaggtgggtctgagtctaagtgctacgagtgtggtgagactgggcactttgctcgtgagtgtcgtttgaggattggttctggaggtctaggcagtggaaggcgccgaagcaggagtcgaagccgcagccgcagtcccagataccgccggagtccaagttacggaagaagaagttacagtcctgcagcacgctctcccaggcgtcgtagtgtgtcaccagctccagctcgtggacgcagctatagcaggtcaccgcagtacaaccgtgcacgagaggcgtctccatatgataatgggtaccgccgcagcaggagctagagccagatacttgtctgatgagtgttctgtgacagatgttgctctttggcctgccagttatgatcagtaacctaccggaaagatgcttcgcgggctgcttgacttttggttaaggcatcgtcctgcaccgcttaaacgactcggccgactacggctttcagttatgtcttcatggttttgttctgcgctcttcattcttcgcacgccctcgcacccttcattcggtcaaatgtgaacgctgcatgttagtctgcctacagcgcctcttcgcggtccatttgcttcgttgaagatgctgcgcgtctcaaagcagtaatgatcttccttctcataccatttggtaaggtttgattgtgctgacaaatgcagcatctggtaagtttctccgtgggctgggtctccatgaactgcacctgcttcaggagctgcagtatttagatggctgactcacccgtgtggtgtataatgccttcagaagacccaggtaagtgagcgcccaaaagtgaattgaccaggctgctacgttgactcgattcgacctttggccttgctccgcatccgctgctcgccccccccacatgttgccttcaacagaggaggaccgatgccttcagcaaaggagcttcctcgccttttgcctcctccaccgcatggtcctgattgatattcttcgtagatgccttctgagtgccttcctgattgatgttcttcatagagcctgcgatgaagccaagccttcctgattgatgttcttcatagagcctgcgatgaggctgaatcctcgacccgtcatatgctgccattttgtggttatttagcagatgatatgttctctttagcttgtagtcctgtttgataggttaaatgtgggactgaagatggtagaatgccagatgctattggatatacaatggtagatgcatgatggtaaccatcaggtttatggttagatatctactcctactccatagtttaaacttccaaatttgacgtgctgttgtattttggtcaacgattggttcttctatgtcg

SEQ ID NO: 3542 - DNA, 304 bp, Setaria italica
  Peptide Sequence Number=SeqID_69516
cccccagcccgttacgctgccgctgccgcttccgctgctcggcttcgtcgtcctcttccggtctccccggccaccgcttccaatcgccggcgtcttcctcagctgtcgcgtcctcacctctaccggtctacgtcatcctgctcctccgtcgagatccgcgtggccaccgcccccgcctcgttgcccctcagatccgcaggtgctcctcccccgcagcggccttgatcctccaccgtcgcgccggctcaaccgctgttcgctggtggcgatccgtctcctggagcgcctcgtcgcaccgtctcta

SEQ ID NO: 3543 - DNA, 172 bp, Setaria italica
  Peptide Sequence Number=SeqID_69517
gattcagtgcaacagtaataagagaggagcagaaaattacaagagctgaaaacgggagatttgccatatggttttgctagtaagtgtacagaacagttcacctcaaggcaatataaaagaacatgtataacaagcaaaggatcagttcacaagagattaaactggaaaattt

SEQ ID NO: 3544 - DNA, 264 bp, Setaria italica
  Peptide Sequence Number=SeqID_69518
cgttgaccaccgatgattctgctccatccggtacccaaggaggtggcgatgccgacgccgacagcgccaagggctcctccgccggttcctgtactcaagggaacttctcccaggacgggagctggtgctccgttgtgtccgagcaatccccggctggtgcttgcatggatcttgccggcacaaacaatagcagcagctctgaggagagtgccggtgatcatgattcagagaggcaacaccttgatgcatccagcggctgtagct

SEQ ID NO: 3545 - DNA, 908 bp, Setaria italica
  misc_feature (1)..(76): n is a, c, g, or t
  Peptide Sequence Number=SeqID_69519
nnnnnnnnnnnnnnnnnnnnnnnnnnnnnnnnnnnnnnnnnnnnnnnnnnnnnnnnnnnnnnnnnnnnnnnnnnnncttttaggcaagagataagactgattaactcatctggttggctactagcctagaaggctacacaaggtgtttctccattacctcctaaaatctgctatttgaagaggaggctgaagctctctcaattcatcaaagtctttacacgagaaaaaccgattaaaaaaaaagaaagacaggggaaacccaccatttctgttcctgctgcctgctgctgctgatcctgctgcttacttctagctgagagaaagggggaggtagaggatccatgtacattggttgcttcgtcagtggtgcttgaagggccttaagtcctcaacaccatcatcctcactgtcatcgccactgcccgacggatcatcatctctcttccgcttggtgccctgcgaggatgaaggctggtctgtggccccctcatcatcgtcatccacctcatccctgtcttcatcagcatcgtcaggatcagctgcatcaaagtcacttccaatggccatggcctgaggttgggcgattggttgaacaagatattctgtgtcttcatcctcatcatccgcatcctcatcatcatttccctcctcataaaccctatcaccctccagtccctcatcatcctcttctccaatctcaccattctcatcctcatcatccccttctccatgctcatgtccatctatctcttctcctccatcctcccctgtcatcatggcaaccctcccactgctctgtggctcagcctcctcgccttcatcctcaacctcctcttcatcatcctcttcatcctcatcctcctcaacaccatcttcctcctcatcactactcggtacatcatgaacct

SEQ ID NO: 3546 - DNA, 438 bp, Setaria italica
  Peptide Sequence Number=SeqID_69520
aacagtctcgctctctgctcgactgtcgtccagtcgtttgtcgctcgcaagaagctgctcaccaagaccaagaagccgatcgagctgggcgaccttgccaagcttgctgacgctgcaggtcttggcaccgccacggtcaaggctcttgatcgtgtcctggccatcggagctgcgacagcttcccaactcgagtcggcgcccgcctccaatgatgcttaagcttatgttaccggttgcgcctcctgctttgtctcctacctgcagcagagtggcgatcccctgctttagctttccttctgcgttcactcgtttagctttgttgtgcccctgttatcggctcttctgtacctctgtctcccagctttgcctgaaaactgctccccgtcggaagttgctggtgctcctttatccgtcatgaattcgaactgtgttgttttc

SEQ ID NO: 3547 - DNA, 320 bp, Setaria italica
  Peptide Sequence Number=SeqID_69521
aaaacacccccgggctcgcttcgcggattccacgagtccgcctccaatttctccgcacccgcaccgcacctccccaatccccaagcccaccaccccgagatctccccgaccgtcctcgagatccctgcggccatgtcgtcggcggcagccatggaggccatcgacgagctcgtccagctctccgagtccatgcggcaggccgcttcgctcctcgccgacgatgacccttccgacgagaccgcctcgcgccgcccctccaccttcctcaacgccgtcgcgctcggcaacgtcggtgctggcaagtcggccgtgctgaacag

SEQ ID NO: 3548 - DNA, 664 bp, Setaria italica
  Peptide Sequence Number=SeqID_69522
tggacctgtccttcatatccattgccgtgatagaactaaaggaggaggatctcaaaatcctcggaaggttgccagctctttgctatctaaatctgaaggtggaccatgagaatctcggaatcataaggagattcatcattggggcttttttcttcccatgccttgaagggtgcgtgttgtggggattcagaggaccggtggtgtttcatcaaggagctatgccgaagctcacaagtctccgattcacgctccatgcgcgggacacgagagaaatctctggtagcagcgatggtggttacgactttggctttcagaacctgccgtcgctccaggatgttacagttttgttgcgttgcggaggcaccagtgataaggaggtgaaggaagtgatggccgcgcttaggcatgcgactacaattcatcctaatcatcccacaatcgacatagtcggatatgaagacaaagatgaataatgatggacaggttcctatatcaatgtatgggaaatgctcttcctttgaatgcagtttcaactattgatttaccagaaattttagtgcttgctggcggacagtacctgcagccaacctgaccctgcgagttgagatgaatcaggcacgtatatgtgcatttctatgcaacccgtggaaaacccgtaaggaaa

SEQ ID NO: 3549 - DNA, 248 bp, Setaria italica
  Peptide Sequence Number=SeqID_69523
tccccagcactggaaagtggacaatccatcaagaggttcacatgagtgtcacaagcaaaaataaaaataaaaataacctgaagcttccgtgtccaattaggaagctagccattggcacatgacattgtatacgtgcaagtgcacaagggcccaacatagccattgcacatttaccggaatagaatgcaatattttagtttatctgaaggaaaaatcacatcaaagctagtcagattacctctggtgtg

SEQ ID NO: 3550 - DNA, 804 bp, Setaria italica
  Peptide Sequence Number=SeqID_69524
actcaattgtctcgccgttttatctgggattgtgtggcgatctggggattgcgcattaggatattgaggatttgacgtctacttttggctacaattcagttggttttataaggtatggttgttaattgagagcttctatggaaagctaaaatcgtcccgttgatttacctaatgtactgtaactgattaccatcagagcttgggcatagcgcattgtttggaatactggacataggagcgttaaggattgatgatctggattacggtggtacagtgactaggaatgtacttggagttcaatgcttggggaatgagtttcttcctacctcgggcacacttcagatggttgctgtagttcatacgcactgttggcattatgataccgcaactttacattattgcatggaactgaatgcttctatttttcgatgagcatttattgctttcgttcggctgggcgaggcgtcatggcttttggaatcaagttgttaaagctgcatttcggatattgaattcagtttctggaaccttttgcagatcaccagcaagatccaaatctcctaatgcttctgtaagtttccttcttcaattgaaataattttgttattcttttgcttagtttatctgctaaaatggctatgcagccggcgaatggtgaagcagcagcaagccccaagaagcagagcccaagcagaagcccatcaggctcccgctcccctgatgcgaagcctgagtagaactgccacaccgtcgaggcattgcagatggagtccagagctcgtcttgtctggacacttgatgtcc

SEQ ID NO: 3551 - DNA, 1206 bp, Setaria italica
  Peptide Sequence Number=SeqID_69525
gcggaaggctggaagtttagtttactctgaagtttaccgtgaaggcgttggcaccgtaggaattgtggactacacaaactatgatgacatgaaatatgcgataaagaagctggatgatactgaattcaggaacgcctttgggcgagcttatataagggtgaaggaatatgatggcaaacgtggtcgctccgactcacgtagccgaagcccaagtcgtagctacagcagaagcaggagcccgagcaaatcacccagggctcgccgctcagcatctagatcccggtctaggtctgtttcttcccgttcaaggtctccatcaaaaggccgttctccgtcaagactcaattgtctcgccgttttatctgggattgtgtggcgatctggggattgcgcattaggatattgaggatgggattttcgcaatttgctacaattcagttggttttataagagcttgggcatagcgcattgtttggaatactggacataggagcgttaaggattgatgatctggattacggtggtacagtgactaggaatgtacttggagttcaatgcttggggaatgagtttcttcctacctcgggcacacttcagatggttgctgtagttcatacgcactgttggcattatgataccgcaactttacattattgcatggaactgaatgcttctatttttcgatgagcatttattgctttcgttcggctgggcgaggcgtcatggcttttggaatcaagttgttaaagctgcatttcggatattgaattcagtttctggaaccttttgcagatcaccagcaagatccaaatctcctaatgcttctccggcgaatggtgaagcagcagcaagccccaagaagcagagcccaagcagaagcccatcaggctcccgctcccctgatgcgaagcctgagtagaactgccacaccgtcgaggcattgcagatggagtccagagctcgtcttgtctggacacttgatgtcctccatgttgttccagtaccatcactgtcttagcaactgtgcaacgagattggatattaactctcagtttgtatcgatggacccccgactttccactgttatgttgtctagcccgcggaagggctcatttacttcgactattagtgacttttgaatgctatgtggatttggactatgttgactgaatcatgttatggacctcatacattgttttttgcttt

SEQ ID NO: 3552 - DNA, 1151 bp, Setaria italica
  Peptide Sequence Number=SeqID_69526
ttaaggtaaaattaactaaaagtttaagtttaaaaagtacttagtactaatttttccctaagtaagtctagtagtccctaagtctagtaagtccctattctaggtcttcccgtcttccccttgtattgtcgtaagtccttgtagttagtaacttgtcctactaccgttcgtaggtctatttgctagtatggtggtcaaggcgcggtatcgtgttcttgtcactggactgccttcttctgcatcatggcaggatctgaaggatcatatgcggaaggctggagatgtttgtttctctgaagtttaccgtgaaggcggtggcaccgtaggaattgtggactacacaaactatgatgacatgaaatatgcgataaagaagctggatgatactgaattcaggaacgcctttgggcgagcttatataagggtgaaggaatatgatggcaaacgtggtcgctccgactcacgtagccgaagcccaagtcgtagctacagcagaagcaggagcccgagcaaatcacccagggctcgccgctcagcatctagatcccggtctaggtctgtttcttcccgttcaaggtctccatcaaaaggccgttctccgtcaagatcaccagcaagatccaaatctcctaatgcttctccggcgaatggtgaagcagcagcaagccccaagaagcagagcccaagcagaagcccatcaggctcccgctcccctgatgcgaagcctgagtagaactgccacaccgtcgaggcattgcagatggagtccagagctcgtcttgtctggacacttgatgtcctccatgttgttccagtaccatcactgtcttagcaactgtgcaacgagattggatattaactctcagtttgtatcgatggacccccgactttccactgttatgttgtctagcccgcggaagggctcatttacttcgactattagtgacttttgaatgctatgtggatttggactatgttgactgaatcatgttatggacctcatacatgtttttgcttcggtttcctggtttgcttagatagcatcgccccggatgatgcacaatttgcttgtgaacctcttgtgatgattagtgtagttgaacaccgatgaagcgttgtcctgatcttcatttgatattccatttgtctta

SEQ ID NO: 3553 - DNA, 1461 bp, Setaria italica
  Peptide Sequence Number=SeqID_69527
ctcatccccacaccacatctctcgagctcgcggccgcggcagccaaaccctagcctcgacccgcccttccggccaccgcgcgttcaggttgcagcggggggaagatgagcaggcgctggagccgcacgatctacgtcgggaaccttcccggcgacatccgggagcgggaggtggaggatctcttctacaagtatgggagaattgttgacattgacttgaaggtccccccgaggccacctggttatgcttttgttgagtttgaagatcctcgtgatgctgaggatgcaattgctgggcgggatggatacaattttgatggacaccgcctaagagtggaacctgctcatggtggtagaggtaatgcttcctcacatgatcgtggttcaggtggctttggtggtggggcacgccgtggtgtgtcaaggcactcggagtatcgtgttcttgtcactggactgccttcttctgcatcatggcaggatctgaaggatcatatgcggaaggctggagatgtttgtttctctgaagtttaccgtgaaggcggtggcaccgtaggaattgtggactacacaaactatgatgacatgaaatatgcgataaagaagctggatgatactgaattcaggaacgcctttgggcgagcttatataagggtgaaggaatatgatggcaaacgtggtcgctccgactcacgtagccgaagcccaagtcgtagctacagcagaagcaggagcccgagcaaatcacccagggctcgccgctcagcatctagatcccggtctaggtctgtttcttcccgttcaaggtctccatcaaaaggccgttctccgtcaagatcaccagcaagattaacatacaccaatccagcttttgagctttgaaacctgctatgttccgcaaaaaacaacagatagacaatatgataaatgcattagtatgcctacttttgtatcatcctaacttgttggcattgttgcaaagattgttgctattttatttgaaaacactggttaacaagctttattaaaataatagctttgttctatagatctttaatgtcctgaatggagtcctgttgacttacataggagatttcatctggtacctaaaatttgttaatgaacactgtaacattcttccatgtcagcaccctggtgccatcaattaagtgaacacagctacattcccaggcatgtatacaatgatggtggcttgctgtacagtctgattgcttgggattccttctcaagtgctcagtttctctaatgaactatatgaactgcttagtctgttctgttttgtttttgaagactcaattgtctcgccgttttatctgggattgtgtggcgatctggggattgcgcattaggatattgaggatgggattttcgcaatttgctacaattcagttggttttataagagcttgggcatagcgcatttgtttggaatactggacata

SEQ ID NO: 3554 - DNA, 327 bp, Setaria italica
  Peptide Sequence Number=SeqID_69528
tactagttgatgttgttggctgacatccaacttttccaaaataaaggttttgagttcgcccaggactctgcttatctcactagagctaaaaccttgtattgttcttatacaatatgttggatcttgttgtataattttattatattgaatacctaactgctgccttgcacaaattaaggtttgtggaagttattctactactagcttgttgagatggatacagaataacatgttaaactggaagcattagtatgagatattaccagtgggaaggggaggaagctgtaaatgggcatgttgttttttgtaccatgtctcacacctgaa

SEQ ID NO: 3555 - DNA, 1445 bp, Setaria italica
  Peptide Sequence Number=SeqID_69529
gttgtacaatttcttttctcctgttttatcatcttttttgtatcatcgcttccatgctcatcccaccagttgccactagatggtgtgaaaggctggacatcaacaagtggtgaaaagacatccatatcatcctttagattatagttactacgaggagcctgtagctttgataatggtcctccagataatgagcgagttctatatggagtttcgtccatggtagaagtgtttgctgtcaaagaagaccgaagacctgtagtcactactccagaagaaaaacttgtgggtgttgccgatggcaagggatctggcatgagaacagactcttcactagttccccccagaagagcaacttcagaagaactgttctcgttaacaataacaggcttcgaccgttgccaacataaaccaatcacagcctcagagctattatacgcacgaagaatggtcaatggctgaggttttccccgaacatcatagaataccacacgtccactatttgtgcctgctgctaatatagtaccgtcatcattatatgccaatgaggagaatggggcctcgtgaggaatagtgtgtgtcggtcttcttgaccctgaatctagtgtgtataacttcttgtccaggccaactgtagcaattatcttatcactggatggcgagatacaaacaccacttgtgggtgcagaatgttgcttcagccatgacatcttcggagcttttgcagttgcatcccaaagatgcacagaaccatcatctcctgctgttaccaataaatgcctactatttcgtgaataatcaagcaccctcagaacctgtccatttggatcactaagttcagcagcacgtgctccagaagcaagattatgaagaatgagatcccccttcatgctgatcgatgccaaatgttcatctttgcagttatacattacaccagtaattgtgtcagtgtgaccgctaagccatttgatacatctcttccgctgcaaatcccatattcttacaatatggccacttccaccagagcaaagatatctagaacctttgttactaaaactgatagagtaaatgcactcctctatgtcatcaccacgatcaatactggatgttggtagctgtcctacattatgacctttttttatgccacaatgagatctttttatcatccccagcacttgctacgatcagattcactggtgtggttccacttgacggcgttgacggggttgcctggcgagggggtgtaggcgaggacgcaggggtcgccggactccaccgtgacgtcgaagagcttcaccgtgtcgccgccacacgtcaccagcagcggcgccgctggatccacgaaccccatcgggccacgggcggcgatggcccgcggatttaggggtcgggagggagggagggcgacgggcctttcaccgcctgatggagaacggtggggagagacg

SEQ ID NO: 3556 - DNA, 329 bp, Setaria italica
  Peptide Sequence Number=SeqID_69530
aattgtccgaagacgatgagcgagatgaacgacgagaacactgtctgaaatgggctgaacatcgacacgaggacaggccccttgcgcccaatgcttgacacctggaacgtcgtgcacaggccgatcaccacgcctcccacaaagacaacaatttcaccaatgatcctggtgatgttgtctgaggtccctgcagtgagcttcccctccatcaagacctggatgatagcgctgaagatggaccccatcatggcggtgatcgagcagatggacaacggcgcagggatctcttcagggccgcagcctgcatgacagtgttgcaggcgaagatt

SEQ ID NO: 3557 - DNA, 240 bp, Setaria italica
  misc_feature (162)..(162): n is a, c, g, or t
  misc_feature (214)..(214): n is a, c, g, or t
  Peptide Sequence Number=SeqID_69531
tttctttacggggcttgttgatcgattgctccgctccgctcgttcagattcgattcgattggattcgctggggttaggtgggtagcggtctcttgaggcttcggatcctgtattgccctgatccgatttgctggccgagccggcggcgccggagctagggtnctcgcgcgggctgccggtagctttgcgcgtgtttggttgctgggtgcgccgngcgtggtagctggtacccgcgtcgtt

SEQ ID NO: 3558 - DNA, 413 bp, Setaria italica
  Peptide Sequence Number=SeqID_69532
caacaatgtctatgcagtccttggagctgtgcagctggcaggcactcagcaatgtcctccagacaaccggatcgggcttgaccggcacgtccatacaaaatcataagcttcctggaggtggccattgcgtcccaggacatccaccatggcactgtagtgcgtgatcatcggtttgatgccatagacatgctgcatttcatggaagaattggtggccctcgtcaaccaacccagcatggctgcatgcacagagcagcccaagaaatgtgacatagttgggtgtgatagatgcatccttcatcttatcaaacagctccagcgcttcccgtgccattccattctgcgaaaatcccacgatcattgcactccatgtccagacatttcgcaccgtcatcctcccaaacaatcgtgacg

SEQ ID NO: 3559 - DNA, 624 bp, Setaria italica
  Peptide Sequence Number=SeqID_69533
tacctcaaaaaatatgaagctttggggtggaactgttggaggatttcttttctttcctcatgtgttgttgttttttattttagatcaaggggttagggaacacatcttgaagcagcaaagctcagttctcactgggactaaattgtttctgtatgtcactgaatgatatggtcgcggaaccccttctcttagccttttgctgtgatggatgctccctccagccagtcatgtaaattacctgtacaaaaaaaattgctaatcagcgatccagtttgcatatcatatgggaattaattatttctagcccagattaattcagctttgcggagaaaaaaggatgttgctgaatcaattcaggttcagataaaggtaaagtttgatttgctttattccaacaagacaaatacagaacttgaaaggttgctggaatagatccgtcctctaacccaaacattgactggtaaattgctgcagtcgccaaggctgtatccctttttaacacaggatttctttgaaacagagcatttgtttcccccattgctctcagatgttcaacaagttccaaagctagttgacaaaagcagcaaaaccacagcacatttaagaacccataaatctccatag

SEQ ID NO: 3560 - DNA, 620 bp, Setaria italica
  Peptide Sequence Number=SeqID_69534
aaaaaactgaaagaaaatagaattttaaattttctcttcaattcgacaggtcatcacttcagtgtttctccaccaagaattgcagcaagaaaaaggccatcaggtttcaatgccagcctacactgtatcattgctccaggaagatcatttgtccaatgaagtccaagacagcttattatcaaatcctgtgagcttcagaaaccatgaaccacattaatgagtaaatgtagtaagattagcctgggtattgttgcttatacttctgaaactgcaaccgactcactcaagcatgagaaatcacccaagaatgaagaaatcacattgtttctcatgtatgctttaatttataagcaagataggagaggagtgggaaactgaactgcttgaacgaagtaaaacttaagttaactttaagttaaaaggtaaaaacaacctgttgtatttgacagtataggaatcaacatcaactcctggaagggtgaagcctgcccttgtcaaaaggtttcctgcatcacggaccttgaaaggagcaaaacataaagccgcagtcaagaaaaatagacacataaaggccaagcaaagcagtcacgtctcccagatctccccaccgttcgcccccc

SEQ ID NO: 3561 - DNA, 1731 bp, Setaria italica
  Peptide Sequence Number=SeqID_69535
taccatcacataatattgtaacgaaaagagaaatggaacaatacacagtactcatcagaaatttaagttttttttttgcggaaagggctggattatattagaaattcaagtacagtgccaccccttgtacatcaaggaccctgaaacaaaagataaaaacaacccagcacaagccggttggtactgccaaatatgcaaaaggaaacttgagcacgttctttttgttggtacacagatatatcacaacagtagtggtcatgtcctgtaacactgtagcaagctaggccatggacatggcagatggaataacacaacacaacagacgaagttcaagttctggattccatcaaactcagtatcaacctttcatacaacaggcagcatcggttgtacatgcgctgactattcacagcagaatcatggccaatacagattaagcggattcccacatcacattgacacaaccaacggaagcgcacctgctttccgcaaatgtgaaccctcaaaaatatgaagctttggggtggaactgttggaggatttcttttctttcctcatgtgttgttgttttttattttagatcaaggggttagggaacacatcttgaagcagcaaagctcagttctcactgggactaaattgtttctgtatgtcactgaatgatatggtcgcggaaccccttctcttagccttttgctgtgatggatgctccctccagccagtcatgtaaattacttgaaaggttgctggaatagatccgtcctctaacccaaacattgactggtaaattgctgcagtcgccaaggctgtatccctttttaacacaggatttctttgaaacagagcatttgtttcccccattgctctcagatgttcaacaagttccaaagcactgttgtatttgacagtataggaatcaacatcaactcctggaagggtgaagcctgcccttgtcaaaaggtttcctgcatcacggacttgtgctaaaggtgacattcgaggactgatgcccccctctcgttccatttgtgcaactgtgcatgcaattctaagctccttcagtgtttctccaccaagaattgcagcaagaaaaaggccatcaggtttcaatgccagcctacactgtatcattgctccaggaagatcatttgtccaatgaagtccaagacagcttattatcaaatcctgtgagctttctttgatcggaaggaactcctcgtcacaaacaacaaagtgcgtctccggtccgtcgtcggtagcattctctgactctcgccacttcctcaccatgtcggctgacatgtccatcatgatcagcttctcgattccaccgcgaccgcggagcaagcggcggacggcaccggcagaacccccgaggcagagcgcggaggggaacgccttcctgcagtcctcgaggcggtcgaggaggttatccgcgacggcgtccacgaacccgtcggcctcccgcatcgcccacgccgcgcggtcccggtgccggcgcttcaggtcgcggtcgaagatcttgacgcggccgccgcctccgccgccatcgtcaaggctgtcggctgcggacgaggaagagaggtggcgtttggggagcaggtggccgtggcggtggcggaggagtaggaggcggcgagcggcggcggcggcggccgaggaagccatcgcgagcaccggcgagcggcggaggagatggggccaccacggttgctacaaggaagctttttg

SEQ ID NO: 3562 - DNA, 334 bp, Setaria italica
  Peptide Sequence Number=SeqID_69536
cagttgattgttggcatagtgaaactgcagcttccttctcctcttcttgttgagcgagggactccttgaggcgaaggatctcacactcagccttgttgctgtgctctagcatggatgagatccgatccttgaggttttggttttcctccaacaagcttgctagctctttgtggagcctctcgtgatcttggtcatctttgttacgcttttttgaatcgctagcattgataaaagagaaggaatatggagacatgtctggattgtccatgtcagtttcaatggaagcagtttcagccgggaggtcatcatccaagtccattagaacctgatcagg

SEQ ID NO: 3563 - DNA, 905 bp, Setaria italica
  Peptide Sequence Number=SeqID_69537
ttcctacggtccgtcgggtccggtcggtagtctagtcggtcaccagctgcagcagaagcagaggcccaagacgctgccggacctgctcgccggcgtgaggagggccagcttccgctccgtcacccgacctcgtggtggcggcggtggcggcgagaccgggaggaggacgccgagcaaggtgctggtgagcgtcgcggtgcagcggagcatgtggccgctgcacgtcatggcgtcggcggagtggaccgtagccgacctggtggcggccgccgtggcgctctacgtcaaggaaggccggcggccgctgctgccgtccgccgacccggccgcctttggcctccactactcccagttcagcttggagagtctggacccaaaggagaaggtcatggaactgggctccaggagcttcttcctatgcccgaaatcttcagctgccggccaggctgcttcgtcgtcgtcctctgatggagtaagcggggtcagcacggtggcgtcagggaaagcaccggcttggctgaactacatgcagttctggccgatgatgtagttcacagctaccaaatcatctactgctatgtctgcgtccggtgctttcaggagtcaggcccccaaagaacctccaagttttgcatttgtgagacaagtaacaacaagaacattgtaaatttgttatatatataagcttcagaggatgagattgtagtgactagtgagtgtgttagcatcttgtaaggtgctggtgcgattgtgcaaaccgcctgtgccccatgttacatctctgattcagaaaataccaaatgtttatgtaattagaacagtttcaatggcaaaaatttgctgtgaacattgtgtaaatattgtaccttcaaacagtcaagaaagcagaggcatgggtacgtagt

SEQ ID NO: 3564 - DNA, 561 bp, Setaria italica
  Peptide Sequence Number=SeqID_69538
tgggccgcggcgctgatgatcctgggcaacgtcagcgtcatactcgtgctcttcccggcgcacgtctggtggacaatctactcgctcatcaagactgaccgcatcaacgcgggcttgaaattagccgtactcctcgcgctgccggttttgttcggcctctggttggggctcagcatcttcggcggcgcgctggtggcgctcggctacggcttcttcacgccgtggatctccaccttcgaggcgttccggcaggagagcgaggccaagaagttcgtgcacggcattgtggatgggacgtggggcacgatcaagggcagctgcacggtggttagggacttcgcggacatatgcttccactcctaccccgtctacctcaaggagctgcgcgagagctcccataatcgtgagcctcattcaataaggctgctggatgtgccttcatgtatagttgttgctctccttgggctagtcgtggacataccgctttacacggttatcgcgctgatcaagagcccctacatgctcttcaaaggctggcagaggctgctgcacgacctcatc

SEQ ID NO: 3565 - DNA, 461 bp, Setaria italica
  Peptide Sequence Number=SeqID_69539
tgggtcgttcttcctacgggttgggttttggggtttggttcggtcggtcggtcggtaggtcggtaggtcggtagggcggagttgggagggcggcctgcgacatccttcctgccgcgagcaagcggagtccgggcgcgcgctctgcggtcggagaggcgggggtgagatctacgcgcgcgggctgctgcggctttcccgcgggtcctgcgggagagatggggttcctatcggcgaagctcctgccgtcctgcgagagcatgtgcgtgtgctgccccgcgctgcgcccgagctcccgccgccccgtcaagcgttacaagaagctgctcgccgagatattccccaagacgccagatggtgctccgaatgagaggaaaattatgaagttgtgtgagtatgccgcgaagaaccctctgcgcataccaaagattgccaagtttctggaacagaggactcacaaggag

SEQ ID NO: 3566 - DNA, 3268 bp, Setaria italica
  Peptide Sequence Number=SeqID_69540
tttagtttttagttttagtttagttaagtttaatttagttaccgttacgttaaagttaacccttcttgtcgtctattaaccttgaagctgctcgccgagatattccccaagacgccagatggtgctccgaatgagaggaaaattatgaagttgtgtgagtatgccgcgaagaaccctctgcgcataccaaagattgccaagtttctggaacagaggactcacaaggagctgcgctcggctcatgtgagctttgtcagaatcatcaccgaagcttacagcaagctactcttcatctgtaaggagcagatggcatattttgccatcagcctaatgaacgtccttactgagcttctggaaagcaagcaagagaacatccacatcctcgggtgtcaaactttagcaaactttatcaacagccaggtagacaacacatatgcacgcaacattgaaagcttggttcgcaaagtatgtgggctttcacgtcaacagggcgaggagcacaggcttctgagggcagcaagtttgcagtgtttgtcagcaatgatctggtttatgaaggagcattcatacatatttgctgattttgatgaggtagtgcaatcggtcttggaaaattatagggcggaggaatctattggtggtggtgatgacagacatgcatcgcagcataattgggttgatgaaatagcaagatgtgagggtagacctggcttaggtggtggtaatgatgtgaatatcagcagtacaaccattaggctgcgtccagcaaggaattcatcagctcttaccagggaggaacgcgagtctccagaagtatggtcgcatatttgtgtgcagaagcttgctgagttggccaaagagagtacaactatgcgacgcatcctagatcctatgctttcatactttgataagaaaaaacagtggcccccccgacatggattggctttgcttgttttgtctgatatggcttatccggagaagatttcaggcaacgagcaattgattttaaccgctgtcatccggcatttggatcacaaaaatgtttcacatgatcctcagacaaaatcagatattattcagacagcaacatccttggcacggcagcttcgatcccgaggatttactgctgaacttgtagtagcaggtgacttgtgcaagcacttaaggaaaacactagaggctgtggagtcaggcagtgttgaagatctgaatttgaatgaatctcttcagaatttcttggaggaatgtcttatggaagttgttagaggaattaatgatgtgcggccactctatgatatgatggcaataacattggagaatttgccttcaataccaacagttgccagagcaacacttggaagtttgctgatcctttcgcacataatctcattgacatcagtatcgtccaatgctcctatggtctttccggaagcactcctccagcagatcctgaaggccatggtgcatcctgatattgacactcgtgtgggagcacaccacatgttttccgctattattacccgaggaccaagccatctgaggagtgagtcagagtacctatacgaaacaaaaaagcagtctcggactacatctgtatttgcttctgccaccgctctactggagaagctaaggagagaaaaggagagtttgagttcagataaacctcgaaatatcatcaatgatgatgtgaaggaaaggagcacacatgaagaggatcacaaacatgtttggtcacggaaaaattcagcttatttctcaaagttggttttctctttcatggaaagatgcgcaaagctaagcagccctgtacaggaggccaatatagccttgttaactgaagatcaaaccaaccaattgctgtctgcattctggattcaggccaatcaaacagataatattccttttaattatgaggcgattggtcattcatacagcctcacagttctttcttcccgccttaagaattcaagcaactgtaatatcatccagtttttccaattgccactgtccctgcgaagtattgctttaactccgggtggagttctgcctgcttcttgccaactctctatttttaccttagcaacgagcatgctggcatttactggaaaagtttgtcacatcactgaactgtcagacttgctaaggtgttttacatcttccaaagtcgacccttacctgagaattggtgaagacttgcaactctatgtaaggttgcaatcagatctaggcagctatggttctgaaaacgaccaggaggttgccaaatccatactttctgactgcaggatgaaagtagggacgaatgatcagcaactgcttgatgttattgcttctgcactttctagtgtcactgagatggaaaaggatgtactagtaaaggagctcactgagatgttcacacctgaagaaatgcctttgtttgggtcgaattcagcacttgactgggctaacttcaacgggcaggcgttttctgatgaatccctttcttttgatgaggaatgttcaagaacctcttcagtagattgcggcttgcacgaatcaccaattacgaacacagctagctccatctcaaagattactctaccacagtctgttccacatgttttaggtgttggtcaattgttggaatcagcgctacatgttgctggccaggttgcaggtgcatccgtttcaacctcacccctcccatatggcacaatgactagtcaatgtgaagcccttggattgggcacgaggaagaagctatcaagctggcttgtcagtggccacgaatcgactccagacaatcctatgccaagtcttcctactgcccatcattccatcattcccaaggtaaattcttgtggtttcgagagcatccaccgtgtgtcatcagagccatgttccatggtgaagcttccacccgccagccctttcgataacttcctgaaggctgcctatcgcacccagccggagctgtgataagccttgcggagcacctaaccaaccctcttcatgagggctagactgcagtacccaaagcatagagcagcgctaggttatctaatggaacacttggccactctgggcctaagcaatctgtagcgtggttttaatagtagtagcatatgtatttatgtatctatatgtaccaaatggctgtagtgtaagcccgcgagctctcttgtttgttcagactctgatgtaggagaatactgaatggttatgtttgtcactaatgttatgctctgttgtggtaatttttttaaaaaaataaaaaaaaaacgaa

SEQ ID NO: 3567 - DNA, 1419 bp, Setaria italica
  Peptide Sequence Number=SeqID_69541
tctgccgtcctccgcgcacgcgctcgacgggctcgcggacatcgtcgcgcagggcaaggacgcgctctcacaggtcgccgccgctgcggccgctccggtctccgcgcactccgacggcggtgagtgggagcaaagctccgcctccggggcccacgtccggtacagccgcttcgaggcgcagctgcgggcggctccaggcggatccgaccaccttcaccgccgatcccgaggatgctgaggacttcgcggcttggagtaaggggtttaatttggatgagaggaaggacgagatcgaggccctgtgctacgatagtgacgcgctggaagccatggtggacaggctagtgccgggcaccgtggagagcgaggtgttctggtcgaggtacttctaccgtgtccataagctgaagcagcaggaggacgcgagggcgaagcttgtgcagcgtgtgatcgctcaggaggaagatgaggatttgagctgggaagtggatgatgaggatgaggaggaagagcagcagaaagaggatgcaaaagagctagcagcaaggcaagagccaatcaaagaagaagtcaagcatgaagtggaagtgaaggaaaacgagagagtggtggaagaacggaaggttgaggcagtggaagaaccggctgctttggaggaacagaagaatgctgatgagccccaaccagtggttttaggtagctctttggtagtagtggatgaggaggagcagaagaatgctgatgagccacaaccagtggtttttggtagctctttggttgtagtggatgaggaagagaaggaagggcactccaagtcgagtgttgaagaatcaggtgacaagaaagaagcggtgaagcatgagaccagtgattcaagcaaggatagtgattactccatagtgtctagacagcgaacaatggaggaagaggatcttgaatgggatgagatcgaagatcttggagagcatgaagaaaagaagggcagcacccatgactcaagccctgctctgaaggaggagctgcgaaagaggctgagtgtggctgaagatgacgaagatttgagctgggatatcgaggatgacgatgataagtcttgaatacccatgcatgctggtatggaggtgccaattgcatttcaacatttacctttcattactcacgaggatacagttattcagccaataaatattggttaattatgctgcttatgcaatgaatacacgtgtaaactgtaaactctcaagtttgatgatatcaagtggcaattggttaagcgtcaatctactctgttgtctttggggtgttgtaaatatgttgtatttatttgacttgtgtgttatactgtgggtacattgtccgtgccagaatttcgagcaggctttggacaatttctttcagaaagactaccagttatgttca

SEQ ID NO: 3568 - DNA, 255 bp, Setaria italica
  Peptide Sequence Number=SeqID_69542
aacgtctttcagcccttggttgctttggatggccatcggcatcttcccctgctgtacctcaccttgttcctgcctagcagggttccacggattcgaaatgcccctgtccacgatcttgggcctgggaggaggtgatctctgggaacagcaggaaagtcccatgcacttttgctctgcttcttggctagtagcctctccgtttgagctctctaccgtgcctccattcattcctgtgggagaattggttaagctgat

SEQ ID NO: 3569 - DNA, 735 bp, Setaria italica
  Peptide Sequence Number=SeqID_69543
cctaatcatcgtaaaaatcctcatatatcgttcaggtaaactcggtataacaagcatttatatgtgaaattaagacatcgatcatcgaaagcacatgatgaacggcattctgaaaaaaaattaaaaaaaatgaaagcttgctcccagttagcactatttttcccggtttcgtgcaagcttatgttgatccggaagtccggtccacatgaacggcagtgtttgttgtgtgtttctcgatgctccgctgcaggtcgtccttgctgacgccgacgacgcgctccaagatggtgtcccttaccagcaggaacgtcggcagcgcctccacccgggtgttccgcgcaaacgtcttgaactgctcgacgtcgagggtgtagaagtcggcgtgctccttgaagcgggcggcgatctcctccatcgccggcctcatgaacttgcacggctccgaccacggcgccatgaactccagcaccaccagtttggagtttggctgcttcgcctgcctcagaacgtctttcagcccttggttgctttggatggccatcggcatcttcccctgctgtacctcaccttgttcctgcctagcagggttccacggattcgaaatgcccctgtccacgatcttgggcctgggaggaggtgatctctgggaacagcaggaaagtcctacagacagatacatacatgtacatacaacatatgttcagctggtaattgcgcaaaacggtacgtactaaa

SEQ ID NO: 3570 - DNA, 307 bp, Setaria italica
  Peptide Sequence Number=SeqID_69544
agaccacggcgggtgaagccgacggcgtagaggccagactgacccttcccacccgtgggggaagggcgatcttggggtatccgtccttggtgaagaagtcgtttccctggagccattggggcacgttgctgcggtagccggtcgcgaggataacggcgtcgaagttgaggacacggccgtcggcgagctcaacctgggtgcccttggcgaagcgcttcacggcgggcacgacggcgatgtcgcctgccctgatgcgcgcgagcgcgccgtagtcgagcaccggggtgcgcacgtgggtctccttgag

SEQ ID NO: 3571 - DNA, 446 bp, Setaria italica
  Peptide Sequence Number=SeqID_69545
gttgagcttgttggaggagaggtcgaggttgacgaggaaggggacccagtcgcagagcgcgggcgggatcgagccctcgatcgcgttctgggaaaggtcgagcgtggtggcggcgcggcagtactggagggaggaggggagggagccctggaggccgaacccggagagcgagagcgagatgacgcgggactcctgcgggttccagcaggtgatgccgttgaagttgcagatggcggccgccgaggtgttgctgaagtcccaggcgaggcggttgtccgggtcggcgaggtccttcttcacgccccggaggcagcgcaggtcgtcctcctgcggcgccgcctccgaccccggcgccggctgcggcgcggcgggcggggccaggaggaggaggggcagcagcaggaggaggaggcggggaggaggcatggcgggcggattggtgcgtc

SEQ ID NO: 3572 - DNA, 334 bp, Setaria italica
  Peptide Sequence Number=SeqID_69546
gggttagtacacacacagggcaagatatattaggggatagataaacgagtcacaacacgccagagtatcgaatttcttactaaacaagactactgatgtgtttactaaaccaatggtaacatggttaagatggttactgatgaatgctttggtagaatcagcatttcagggcagctcttgccatttccaacgctccctcataggtcttgttgcccccgatgaaaccactcatatggacaaacacacagccgggaatgccagtttctgcctgaccatgttatcattgacttgtagtgtagctgacacgagtactcatcttctgttatcctcatct

SEQ ID NO: 3573 - DNA, 1522 bp, Setaria italica
  misc_feature (1)..(55): n is a, c, g, or t
  Peptide Sequence Number=SeqID_69547
nnnnnnnnnnnnnnnnnnnnnnnnnnnnnnnnnnnnnnnnnnnnnnnnnnnnnnnttttttttttttttaaactataacaggttccaccatttttttaataaattgtcacattctagtcattataagattcaatgggaaaaaagatgaatcgacctcttctgtaagaagaggatagcagaatccgagtactctcaatgtcagctacgactatgagtcaatgagagcatggacgcccaatttcatactgtgtttgctgaaactctgatgtgtttactaaaccaatggtaacatggttaagatggttactgatgaatgctttggtagaatcagcatttcagggcagctcttgccatttccaacgctccctcataggtcttgttgcccccgatgaaaccactcatatggacaaacacacagccaggaatgccagtttctgcggacagttcatcgtctctcatacccctccacttctctggcagagcctttctactctcaaacctgtcaggggcaacagcaacagcttgcactcgccagctcttgctcctctcatcctgatacagcacatacgtggtcaaaggatcaaccttcagctcctcttcaagctcaaatagatgaagcttccacgggcagaatctatccagaaccatgatttcactacttgggtcgacctttgatcttgaaaacaaacactccaggacaatagatcttgcaggtaaccatgatttaacatgaaagcgaacactctccataaattcgcttccagctagcatcatggcctgttgaaatgcagcgttctccttctcaggtgactggtctggatcagtccagtccggattaagacgcccaacgcgtgaagacaagtgtgtattgttcacatactttggtggttggtctgtgtcatattgattgattccattgtcaattgcatcaagtgcctcaacaaagcttttatatattgcaagatacaggcggtgaacatcttcatgatcctcattaaccccaagctccttagcaattatctccttaccaaaatgcttgtagacaagtccagcgctgctaagcttagtgttgaatccatgtccaaacacctcattaaagcctttctggtgatgatcgtatcgatgccggctgggatcatagacaccaccgacatcaagcacggcatccagtgtatcaaggatctgggagtcgcgggtgcggacgacgtcggcgccggcgaactgggaggtgaggcggatgaggaagcagccgagcgcctcgtcgcagtggaagctgccgttgtgggtccccacgcgcttgccgctcccagcgccgtcgccgttgacgttggcggacgagtagaccctcagcctcttcggcgaggaggcggctgccggcgagagagacgccatggcggggaatgggttccggatttgggatcgcccgatgccgagaggagacgtgaacgtgacggctcgctgcgacagcctccaggcggcaagcagaccctaaccaaaggaacggaacggaacgaaagaacaa

SEQ ID NO: 3574 - DNA, 677 bp, Setaria italica
  misc_feature (1)..(36): n is a, c, g, or t
  Peptide Sequence Number=SeqID_69548
nnnnnnnnnnnnnnnnnnnnnnnnnnnnnnnnnnnngcgcgcttcgaggaggcaaaaccaatccacctgcgatttttgggagtacacacacagggcaagatatattaggggatagataaacgagtcacaacacgccagagtatcgaatttcttactaaacaagactactgatgtccttcagcaatggcacacggagagccagagcctcacaagttgcctctcgagacttctttagtttcactacggaggaaggtagagcgcacggcagcgctgcaaaaggaggccgcaacagggggcttctaagcgctaggcacgtagcctccggtctggtgaagcatggcgtcgatctcgtcgccgtcctccatctccagctcatcaggggtctgctcaccgcgaagcctgcggccatcaaaaaggaatgcaatggcattcatgtccacagactggcggtcgcaataggcattcatcagcttcttcagctgggtggacctcttgatgcggaagaacacctcgttgccatcctgtcccttaaccttgaggttgatgtgggcgccgccctccgccggcttcttgtcctcctctccgtttcccgacatcgtcgtcgaagggctccgagcgcagcggccgtcagatttcgcggcggattccggcgatcgattggtggcggccggagcggg

SEQ ID NO: 3575 - DNA, 638 bp, Setaria italica
  Peptide Sequence Number=SeqID_69549
cgagtgaagaatcaagactcaagagcagccatttaatatacgagtgaagaaaaaacctccaaaatggaacggatgtgctattatatactaattgattgcaattgaagcaatacttctatagtttgtatagtacacgcaaaatgtacaatacagacttcccagttgaagtcttggcttacagctcctcctagctgccacttctgcagttacttgggagggacaactatcgtatagattagtaatgtcaagacgatgataattgcccccaccaaggtaaactggggacttgtccacagcatcaagttagatctttcagttctcttgattggatcaacctcttctgccaatggatactcactgcgccgtgggttccaggtcacatacttgtttggtgagaaatccgaaaatagggtcctcttccctttgttcttaaatgtagaccaagccttgtcccagtccgtagaagtttcacctttgtcgctgccgcctttgtcaggcgtgcctcgagagcagcgagggacgagcgcgaggggcggccgtcgcgccaagaatctcccggatcctagcagtatatccatggctgcctccctttcaagatttactagcctggcaggcctcccgatcccagattctttcct

SEQ ID NO: 3576 - DNA, 331 bp, Setaria italica
  Peptide Sequence Number=SeqID_69550
ccgcccgcggaattccccgcggcgcgccgccggcccgccccgttcgtccccccaccggatccgagctcgccatctcttggtcaccctctgcgttcggtcgacccctggctgggattggggtccccccccgggcatccgttgctttcctcactctcgttgatttgagcctcacactggatattttcttatggcatctgatatgaaaccgcttagcgaccaaaaggatgagataccctcccgttccgtggagaactgtggagtttccaaacaagcttgtcatggcaaatcccaaagctgtgacagcgatgtaaaacctattttgtgctgaagt

SEQ ID NO: 3577 - DNA, 440 bp, Setaria italica
  misc_feature (406)..(406): n is a, c, g, or t
  misc_feature (431)..(431): n is a, c, g, or t
  Peptide Sequence Number=SeqID_69551
cgcggtggaacccccttgggctttgtggtgggcgggggcggggcgcctgaggtgcgaggcgcgggcgagcgaggcagcggccaggcgggagagcgggtggtggtgcgccgcctcggtggcgacgtgcgggaggtggcggtacagagggagtgtggtcgtggctgtcggcgcagcggcggtgagaagagggaggaggaggaggagcaacagtggaggagccatggcggcgctgttgctggatgccgacgaggggtttgggttgtaagcagcagcaggagcgtgtgctttgttgtctctgacggagggatatgtatgtgccttgcttgggttggaggggtgggcggtgggggccatggccacgatgatggccatggattgcctgggtcacgggcgcgacggcaccggnaggacgacgcgtgcgcggcggggtnaagtcatcg

SEQ ID NO: 3578 - DNA, 913 bp, Setaria italica
  misc_feature (1)..(86): n is a, c, g, or t
  Peptide Sequence Number=SeqID_69552
nnnnnnnnnnnnnnnnnnnnnnnnnnnnnnnnnnnnnnnnnnnnnnnnnnnnnnnnnnnnnnnnnnnnnnnnnnnnnnnnnnnnnnacctttaccgtcaagcaaatgaagcaaaaacagaacaatagaagctaccaaaaatacttgtgaaccacagcagcaactatatcaatgttgattttatcttaaaccactgagttaagcacaaagcaatcaactgaaacatcacatctggatgctacctactgaaggacacagggctgtgcaaatgccatcattaaggagcatgacagcaggaaacattatactgaaagcttctgtaactcgtggagcacagaattttcatgcataagcagcagcatatagacggttagattcagcagtatcactctcctcgccttccactcccaaaaactgagatgtctttccactcgagcagttcttctttgtacttatttgtcgaattggggatgccatttccatcaaaccatttaggagtaaaatttttctggctctttatctttccagtgtgctgcaaccattccaataataggcctgtcctcatccgaactcttagctgaatttgatctgtcacccgtcaaggcctcatctctgaatggcttcttaggatttggaggctttaaccaatgggataagcttgggagctccagttctaaatcattgttcttcagtaccttctttccggtggcatgaataattgactcagtttccagggacttctcaatagattttgtgttcacactgtctcttatcttgttagaggatgatatagaaccctcggagctctggaaaagggaacattcatcagatattgagatttccatggcgaccacattgtcattctttgcacacttcggatcctcctctgattgttcaggctgtaagaattcttt

SEQ ID NO: 3579 - DNA, 309 bp, Setaria italica
  Peptide Sequence Number=SeqID_69553
taaactttgtctagtagggtttctaacggggtcttgtcttcgtaatgtctgcaccgaagctggtatggctgcaattcgggcagaaagggactatgttgttcatgaagtctgtgcggaagctaaatgacgcaaagaagctggaatcaagtgcgcactacagcgccgacttcggcaaagagtaacatgggacgctgatgcaacgagcaatcttgctagaagtgcatatgccgtgtatcgtcagcttgataatcctcctagcaatgattatgaatcagctatatcagaaaaagaggactgtccaggagcctg

SEQ ID NO: 3580 - DNA, 1688 bp, Setaria italica
  Peptide Sequence Number=SeqID_69554
ttgcctgtttaaggaccgtgggagcggagagaggagcctgcgcgattctcttcttgcgacggaagccaaaaactagacgggccgagactgcgggaggacgagatggccgacggggaggacgccgccgccgcgcgccgccggtccgccatcaccgactaccgcaagaagctgctcaactgcagggagctcgagtcgcgcgtcggcaccgtgagagagagccttaaaaatgcaaagaaggactttgccaagactgaggacgacttgaaatcgctgcaaagtgtgggtcaaataattggagaggttctccggcctcttgataatgaacgatttatcgtgaaggccagcagtggtccccggtatgtggttggttgccgaagtaaagtagacaaggagaagttgacttctggaactcgtgttgtacttgacatgacgaccttgacaataatgcgaactctaccacgggaggttgatcctgtggtatataacatgcttcatgaagatccaggaaatgtcagttactctgctgtaggcggtttgtctgatcagattagagaactcagggagtccatcgagttaccgcttatgaaccctgaactctttcttcgggtgggaattaagcctcctaagggcgttctgctctacggtcctccagggaccgggaagacactattggcgagggctattgccagtaacatcgatgccaactttttgaagattgtttcaagcgctattattgacaagtacattggagaaagtgctcgtttgattagagaaatgtttggctatgcacgtgatcatcaaccatgcatcatcttcatggatgaaattgatgccattggtgggcgaagatttagtgagggaactagtgctgatcgtgagatccagcggacgctgatggagctccttaaccagctagacggatttgacgagcttgggaaggtaaagatgatcatggctacgaaccgacctgatgttctggaccctgcactgctgcgtcctggacgtttagacaggaagattgagattccactacccaacgagcaggcaagaatggaagttcttaaaattcatgctgccggtatcgccaagcatggggaaattgattacgaagctgtcgtgaaacttgcagagggtttcaacggggctgatcttcgtaatgtctgcaccgaagctggtatggctgcaattcgggcagaaagggactatgttgttcatgaagacttcatgaaggctgtgcggaagctaaatgacgcaaagaagctggaatcaagtgcgcactacagcgccgacttcggcaaagagtaacatgggacgctgatgcaacgagcaatcttgctagaagtgcatatgccgtgtatcgtcagggagctcagccatcgcaatgcagaagaaagaaatcagctatttatgttcaggctcctggacagtcctctttttctgatattcataatcattgctaggaggattatcaagctgaccactgggagaaaccattcgagaatttactaattttgaaccagtcgctctttgcttcagtgatcatacatcatcagcttccctgtgtattagtctggtaactctggttcgagctgtttcatttccatcattccatgtacttgactgtgtgcttgcctgctcggtaacagaaaacgaggctagttcatctttgaaaaaaaaaaaacaaaaaa

SEQ ID NO: 3581 - DNA, 858 bp, Setaria italica
  Peptide Sequence Number=SeqID_69555
agaaaaatagattgaagcaacggtaggatttctcacaagcttttctttaaatatatattagcaaagaacaaaggaacaaaaatgaaatcttttttgttgatttctctctctcatcctcacatctccaatctcatatccacaaagatctcccgcaaatgccttaggatagccgaaaaaaattaaataaaacaaagaacaaggtgaggtagggagttacaaaattgctagaggaagaagcttcctcctcacctcctctttcttcttagagatctgaagtcggtactaacttattactgcaatcatcctctgcttgttacaatgcttcactggatccttctgtaccactacttgttaccctgatgagctctgaggttaagatgatcacagcataaataagcgcacaatgcgacgctaccaatggatatatgtacggtatatgctctaatcagattggtgaagtgcttagccttctcctcttggaagctggagcagaaacctgattgttgtcactactgatatttgactgtgacgatcctagcgttgcatcttcactcctaaagctgaagcatgctgcatccagcacaccaatcgggctctgtggcactgaagagcttccattgatgtgccctctcttcttcaccaatgcccgctcttgcatcagctcatagcatttatcaaccatctccttatttacagggatttcagatgctgaaagaacactcccaaagccaacaacctcattcgcagaaaccgctgctagtgccgccgccgccgcaatctcagacggtctgaatgacaagaatgcagagcctttcagagtgccaactatgatatcggctgttatttatttcggttctt

SEQ ID NO: 3582 - DNA, 300 bp, Setaria italica
  Peptide Sequence Number=SeqID_69556
aaggggacgctgcggggagcgtggaggagccggagatggcgaagttggcgccgctggtgaagtcggagcccagcgcctccaggtacgggctcaggtagctcgtgttcaggctctcacagaggtagtcgatgacgaggcgtccgtcgcagagtcggccggtggcacggcggaagaaggcgcggccctcggggagcgggtagtagtagcccagccccgccgcgacgccgcccgtgtccgtgttggagtccccgaacgcgaacaccaccggcggccgcgcgcacccctccccggccgggtcgt

SEQ ID NO: 3583 - DNA, 1286 bp, Setaria italica
  Peptide Sequence Number=SeqID_69557
ccttaggccgttcaacggcaaaattacaattgatgagaacacaaccctgaaagacttggatctaagctattcatttttatgttgagccttcttgcgggacacactgcttaaggatgaacctttcaagtcaaacctccggtgaattctagcaggcatgcagaccatgtttcccatcactacaaaatggaacttttgaccgctggatggtttaactctgtggagaccgaaaaacttagttatgagtgtgttctcataggtccgcacatggtaataatactctggaagcattcgcagaagaacctgcaagagttttttcgtttttagttgatccaagtgtcaacaagtgaaccgtccaaaggttttaaagtataactctatatgacaagtcaagcaccaaagccagataagctaaaagctctggatcattgaatatatccaactctttactgattgctagaatttggtaaaagatggaaccattgtctccatgcctgctcccatttctatttaccaaaaaaccatatgatctaaacattataccaacccacatatcataatgtaatagaatatactttcaaaaggttcttaataggatatggtagtatatttttggataagaaaatttggtgtgaggcattgtttcccagcaaatttctaaatcattaaaatatatgaaacctgcacttcagacttccgtagagtcttgatcataaatcgatcatcctgtgataggaagaagacacttccactctttccaggagacgataactccctaagtgcatcacttccacaaatggaaaacatgtaatctgctgcatcgatcttgaacatctccctcaagtttctgaaaaccattgggcagtagtctttccatttaaaatcatcagcatgatgtgaaggagtaagccgtgatccatttttagggaagctcatccagaaacttgctctgggaccgtaatcagaagcccgcacttcacgcctcagaattggcgtaatctttccaactgtatacctgtcaattatgctttacaattacttttcaatgacagataataacttgtgcaaggtagaggcatccataacattttgttcaggctgattccaagctgaagactgagcattagatcatagctcctatgtcctttaattattgtctgcccaggcttcttgatatccttcactattttcttcttggcaatgtgatgatcttttgaatgaatgcgagaagcttgtatccaccaaaaacctcactgataagaacaccttgcatatattccctctccagt

SEQ ID NO: 3584 - DNA, 600 bp, Setaria italica
  Peptide Sequence Number=SeqID_69558
ttcctaaaatatcaataatagtgatttttctaagacttgaagcttgcattaatgtttaatttgcacttactataatcaactatatgcttaaccatcattcctgctcccctgttgtgaattctgtctaaaaaattctattatgaagatctttacacttccagaacaatgaagaatctacttctctttcactatattcagtcacgcaacatgaacaagataattgaccctatttttattatgtatcacttgctttattaaagcgcataaccaaaatatctgaagtcgtaactaccgatcagctatcaagttggtattccatatgtaagcctccaactccgtcactgctaatcttaagtaaaaagtacgggttgaaggaccatcggatggaaagacttagttccccagcagtaagtaattacctaacctgtcaattatgctttacaattacttttcaatgacagataataacttgtgcaaggtagaggcatccataacattttgttcaggctgcaagacaaaaattcattactgttttaggtaaataaagatagacaccgccagtacatgcacagtaggtatctgtatcttatgctatgacat

SEQ ID NO: 3585 - DNA, 3804 bp, Setaria italica
  Peptide Sequence Number=SeqID_69559
ggttccttaaacccttcacgtcattcctatgctctatacagttttgtgcaaaacatttccaccatattacactcacacatagtattaggatggccttggaaagcggaatttaaggcacagtttttccactaataatgcaaggaatcgctgaggtccgcgagtgcagcaagagaaatctggctgcttcaaaacttgccttgatcagacagcctaatgtgtacacggggaacaaaacccagggtgaatgcttgaaggaagcaacaagggatgtggcaggaaaaaaaataagagctgaataacgcttgttgcacaagatgaggaattactggttcttatgacctttcaggaaagatcgtacgaatgaatttcaggaagcgctccgagtagaaattaggttctactacagatattgataatgagttatatttgatggacttataagtatgctcaatcttcttccttaagttgtactcctgcaagatatcaattattcccaggtagagcaccacatcatacacctgaccaaacgactccctgtcatcttctttagtggtctgttctgcccttgcaggcatgttaacccctagctggatctggagccttgtggtgcctggaagcaagagatctacttcttcaaaacttgcacttgatcgaagacgggctccccttatatgaggaccaataacaacatcattttgatcactagctcgctggaccaaaaccagtccttcagaacagttcataatgtcctcctccagagcgccttcttctgaaagaacagcgagcctatctggtacgattgtatgattaaaagatgcctgtgtccgcagcttttgaggagctcgataatggacgccaagaagcaagctataatccattattgcatgattccttagaaatttgctatcagtctcaatttgcttaagcagtgtgtcccgccaagaaggctcaacataaaatgaatagcttagatccaagtctttcagggttgtgttctcatcaattgtaattttgtccgttgaacggcctaaggatgaacctttcaagtcaaacctccggtgaattctaagttccgtgcaaaacatgtttcccatcactacaaaatggaacttttgaccgctggatggtttaactctgtggagaccaaaaaacttagttatgagtgtgttctcataggtccgcacatggtaataatactctggaagcattcgcagaagaacctgcacttcagacttccgtagagtcttgatcataaatcgatcatcctgtgataggaagaagacacttccactctttccaggagacgataactccctaagtgcatcacttccacaaatggaaaccatgtaatctgctgcatcgatcttgaacatctccctcaagtttctgaaaaccattgggcagtagtctttccatttaaaatcatcagcatgatgtgaaggagtaagccgtgatccatttttagggaagctcatccagaaacttgctctgggaccgtaatcagaagcccgcacttcacgcctcagaattggcgtaatctttccaactgtatacctgattccaagctgaagactgagcattagatcatagctcctatgtcctttaattattgtctgcccaggcttcttgatatccttcactattttcttctggcaatgtgatgatcttttgaatgaatgcgagaagcttgtatccaccaaaacctcactgataagaacaccttgcatatattccctctccagtatagggaggttggaatcagtcttgttttcacagctttgggctgcagaactttcatttgtttcacgaccaatgaatttttcaatagccactccaagactccaccgtctttccagagatacattttttgagcgagtttcctcaaaagccaagcttctaatcgatgaaacacctgcagagtcctgatttcctctagccatcacatctgccatgtcaaacgaggaggagtgaagggtacgtgaaccatgaatctgactttcaacaccaggcagcacacctctctttcttaaagcatctatgcttagctcatcgggaagcagaatttcacgacatctcggatagaatgtgccttttccatccttcaccccccttgtccaggttcctacatagtagccacagtccttccatgtatagactccatgcccatgcatcacaccatctaaccagttgccttcaaatgaatctccatgcttccatgtgaaaattcctttgcctgacatgactccatttttcatggtgccgacataagtgttcccatttgcccaggtatacatgccatggccttgtacttgtccctgcgtccatgaaccttcaaatctgtctccgttgggatatgtctgtaaaccaaggccgtgcttaagattcaacttccagcctcccttgtaagtcgagttgtttagcccgatatatgttccttcaccgtagatgtagccaccagagtagtcaccctcataggtggcccctgtcggccatagcatctttccatgcccatgcctgaggcctcccctccactcaccctcataaacacaaccatcagaccagatataactacctgagccatctggcgtgttgcccaataatgtaccacgataaatatccccattgggtagtataagctccccaactctggagccaggatttattttagaagcatctgaatgttggcagttgggcagagcaagcaataatcccttgtgaagatttgaggaagcctccgttgtctgagagctcgtcatgcgtacggctcagcaggagcaagaaatatacgggaacaggctgcactcctgcgataatggacgatatgacgatgatgattgatccaagaaaaggagccgaggatgatagattggatcgtcggagcacgagcgagctagcacaccacatatatagcgcagccgtagcatttttttaattaaataatatagatcacacgcctttatatatatattttaaaataatacatgtatgtatgtgtaccactagccaatatatagagcgagaacaaaattaaaggttgtgtgtagttgaaaatataatcagattcttttattggctaaaatattttagcttcaaagatcacatacttttagctttgagaatgcctttttatttccatcaaatactaaacatgcatgcatccatccatccatttgtcaaatataataaagccatgtgaataaaggacgtgatacaactaaagttgcactcgacagtaaagatctatcgaatatcaatcacctaccgcatagctacaaaggtagtatacagctagtgggaattattgatgatagcgtcaaaagccgagagcatagtaacgactgatctgatccgatccgatcccccagagaaatgaacaagatgatgcagaagggcggcctcaccacaggcgccggctgccgcgccgccatctatgactatgagtagccgccttggtccttccgtgccaggacttgcattggagcattggagggggcgcgggtgaggcggccggcgagtcggcggcggcggaaggggaggtgttgaggtttgggctcggacctttttcccgctgggcttgggcaatatatgcgtatcaatatcttcacaaagtcatcagcccttttagacatgaagggtaaaaagataaaaataccattccactagaattttatcaatttttttcctacacccgctaagaatagaatggacttttaccaataaataagctaaaaattagctttgtccatccaaacaatagacccaacaaataacaatagacaataagtaataagaactagaagtaca

SEQ ID NO: 3586 - DNA, 1002 bp, Setaria italica
  Peptide Sequence Number=SeqID_69560
tatggtagcagcagcagacagatagcaatatgtcaatttctgccgagcaaattgtagttggtccagcttgttctccttcacccaactatcaagatgctgaagttcatcctggtaaacagattgagagaaactgaaatcttcaacagccaaagctagaaattcttgattgacacgaaaagacgagcattttgtcgataccatcagagaaccccaagcatcaaaatgttcgatgtttctcttgtgttctaaacgctctagtgtggcatagaagggaaacttaacaacatactccatctctccaaaaatcggggttttttgtgccctattagagtacagcttatcattcaataagttgcctgaccaggatcctatgctatctaagatcaaatcattttctgataagctgacttttgaagccttgtacaattccagtagagattttgtatcatttaaatatccttgaagtgaatcacagaaagtggaagcttcagcaacatgagacagctcatctgaggaaacatcgtaaccattcatccttaaaaggcgaaatgccattgcacatgttgcaatgtccatcatgatttcttcatctttctgtaaccagcgactgaatgtcatgtccaggatgctttttatttcactgacaaagcgctgagagattcccattttttcaagcgcatccaccattagaagctgccaatgatttttagaaggatacactgctggtactgcactgccaaattcactgacaagcaaatttaggtattgaagggcttgatcattgtatttgtggattaatgcaacagctgttgtggaagggcaactgaacaatgagccattcttcctctgaaacttcataatttcatcccaatccagcatgtttcctaacccctccgcgatataagccatatatgcttttcttctataagacaaaccgatgtccatggtattcttcacctccgggagatggaattgaaaagacagagaagaaaaagaacaaga

SEQ ID NO: 3587 - DNA, 2547 bp, Setaria italica
  Peptide Sequence Number=SeqID_69561
aaagatgaaatgaactttgcttttctggacactcccatcttgctaaatgaggatacaagtggagaaagttggacagataatgctggatgttctcgatgtattccggaaagcaatagaactcactctcttcatgatggcaaactagctttacctaggacatctgagagagctaatgttggtcttgaggaaagtctcatatctctagaccaggaaataaacctggaaatattttcgctatattccagatcatcttcatgtgtttcagaggtcaacatgaccaaactctcagaagtggcatacttcctgctctagaaaatgatgatgatttcagcttcgacgagatgacctccatgatgggtcccaatgttaagcatgcagagaattatacagacaatgcaaggtctgctgaatttgttccagaaatcaacatgacagaaactcttaatgttggtaaggaagcaactgctcgtctagaacatgaagtttcttcaaattttgacattagtttggaggctcctgatataggcaatggtgttgaaaaatttgataactccctggacttagtgttgtggccatttgaaccagtagttgatgcatctgaaggcatgcaagctgctcaagggttctctatgctgcaatctgaaaatgatttttctttgttaagactaatgttactactaaagatgtcaacaatgatggagatctaccaaaatagccaggaaacatcaattgatgctttgggatctgctcagccagggttatccaagtcagaggatgaaggtgtttcaactcttcgtgggacttgcaagtctcctgatgctgttggggttattgattctgataatgttttaatggctaattatgcttcggatcttcgcagtgcagtaggaaatcatttcttcagccaaaatgcatcacctgaagcacaaccccaggatcccttaatgttcaaggagtctttagtttatccagacgagctttctgtttctgagaacaattcagacaatgcaaagttattgttttgttctacaaaagtcaacttgattgaatctctggatggtgataagagaggaactgatcagcaacaagctgaaaccaatttggtttctgaagatacatacatggcttgccagggttccacttctgaaaagtaccttgacaatttcgggtatcaacatatttcagatgccaatatcaccaagactcttcaaagtactgacagattattgtccgagatgtttcatgatggcagcttctgcacagcagggacctctgtttctctagatggtggcactgatgcagacaattcttcagctaattcaggttctgaaatgcgtactgcacagaataacacagtaattctccttggtttccaaggacctgaaaaagcaattgtttcaatctcccagtatgaggttgatcgtgcagaaaaaaatggctccgattctatatgcgctgaagctaccatgactggagacatacaaggtttccttgaggaaaggaaagtttgtgagtggcgttgcacagataaggaaccaaaagaccttaaggttaaggatatggaagaggacgttcaaggcttagatgaggatcatgagaatagtccataggttttcttgggggctcagattgcacctgctcttgcacaagagccttttgcaaagctttatgctaaaggagtaccttggagagatttgccagtgattacagtcaatgattttgaagctgcatgactagctgtttcggcaagaggaaacaagaacctgctattcacaatcagcagtagcactgggagcagtaatgcgtgtgagctagcagacgtggtgcgctggacctctctataatgaaaccaatacacttagtgcccatctaccttcacctgttgatacttaaaacaggtcagataataagacttcatgcatttcagatgttcagtagaatgctcacctactgaacagcctcgcaaaacatctagaagcccgtgatggaagctggttcaattattttggcagcgaaaacttctagcaactaggatacaacagttaaagtttgagtaacagtggtgtagcaagactctggtcagagagtgggagcaaaaatggagcttttgtacagagtgatatgagaattcctaaaattgtcagctcgtggaaattatgtcaaatcacacctcttgattaagtcactcatgcagttgtggaagaatctcgagttttggaaagagaagcccatcctttggagtttctttttttgggagtacatttgtacatatcaatatattttggtaaatatgttgccatcagtagctcatgtgcaatctattaaaatgcctcatttcttcatgaggtgacaatagttttgatgagtgcttctcacgtagtcttttttgttcttttctctgagttgtagggtacaagtggtatgtgtttttctttgtgttttttcttttctggttttagaattactacttaactttttttggtaattaggtgcaaaagagagaagatttgcttgtgcatttcatgatggtactgcatatatgtattt

SEQ ID NO: 3588 - DNA, 1121 bp, Setaria italica
  Peptide Sequence Number=SeqID_69562
tgtccttgatctatcacataactacttcaatggcccgattccaccttgttttatagaaaatatccccttaagtgttttaaatttgagggagaatcgcttgaaagggatgctgccttccaatataacaagatgtcatttacagacgatagatttacatggcaataagatcgaagggaggcttcctaggggcctttctaactgtccagacttggaggttatagactttggaagcaacaaaatagctgatgtttttccttcttggttgagggggcttcccaagctttctgtactcgtcctgagatcaaaccaaatgtatggcaccataggtgatattgttggggacacaaaatgtgaggaatgtttccctagcttgcaaattatcgatcttgcctcaaacaacttctctggtactttgtggccacaatggttcaagcagttaaagtcaatgatggcagagtttaatagttctggaaaactctcgaaactctaagcacctcacacggagaagaacgtttctatcaatattctgttgagatcatgtacaagggtgcagatatgcaatttggaaggatgctgactaccgtaacagcaattgacttctcaaacaatagtttggagggtactattcctgaaacatttggaagccttgtatcactacgcgtactgagtctgtcacacaatgacttcactgggaaaattccagcccaacttggaagcatgactgatttggagtcactagacctgtcctgcaaccaactctcaggggacattccacaagagctaactgatctcacctttcttggctccctaaacttgtcatacaatcacttggtggggaagataccgcagtcacgtcagttctctacatttgacagcagctcatttgaagggaatgctggattgtgtgggctgcaattgccaaaatttccttgtggtagttcacctcactctccaggtgtggcacatggggacaagtcttctcgtcatattgatgtggttttgtttctcttcgttgggcttggcttcggcgttggctttgcagctgctattgtggtcaaatgggaccggtttggcagatgtttctattgcaactgcaagagtctcgcgtacttgatcaccac

SEQ ID NO: 3589 - DNA, 680 bp, Setaria italica
  Peptide Sequence Number=SeqID_69563
aggacccgccctctagtgatggttcagctctgcatgatcaacgtttaccagatatttgttttgcaaccttaggtgtactcttggacacgactcatgatttcctcaactatggcagatctccgctgctgttgtcaccaggtttgttatgatgcagaaatttgaaccatttccagtttgcgtacagtttagcttcgtcatcaaatggtagcgcttctcctggaaggctatcatctaatatggtgttctgagatataactggaagttgctccctgtatctcttcgccattgcctcagcttccgagaacactttctctctgtctgaaagaaacaaaccaggtgcactttcgaggtctgctatgctcaacgcaattttgtctgggacatttgacttgatcacgagaactttcacctcatcatctatctttaggatgtcgcttactgacaaaacacgacctctactaatgttcgatatgtgcaataatccacttctgtttgtcccagcaatcctaatttgtgcaccgtatggaaaaattttgcgaacactcccttgtaggagagttccttctctaagataagtcatttcccatgcttccatctcactaataatcaggtcattagtttcttcatcaaaccttgcaatgcacacgcgaatgttgctgccaaatttgttttcaagtctg

SEQ ID NO: 3590 - DNA, 284 bp, Setaria italica
  Peptide Sequence Number=SeqID_69564
agttgcatcagccaatctagccatctcaggataattgacccagtatggtgctggaatcaaaacctcatcaccaggggagcaaactgcaagcaccgcttgtgtaatgcactgcttagcgccattgctcactagcaccttgtcagggctatagggtatcccattctcctcctggagtttagcgcaaatagcctttctcagctccaaagtcctggcattaggagtgtaccttgtacaaccgtcctaattgcattcatacccagcctcggcgatcgcggacggcgccg

SEQ ID NO: 3591 - DNA, 428 bp, Setaria italica
  Peptide Sequence Number=SeqID_69565
cagggcagcaccgagtactgcaaggcccacggcggcgggaagcggtgcgtcttcggcggcggctgcgagaagttcgcgcgcggccggagcggcctctgcgcggctcacggcacgctggtggcctcgcagcagcaccgatgcggcggcgcgggcgcgggcatgatcgggccgggcctcttccacggcatcgtccggtccgccagcgccgccaacatgaacaacaacgagtactcgtcgtccggggtgagcactgtgtcggactgcggcgacggctcgcccgtgctggcggtggggaggctggagctgatccctccccaggtgctggtcccccactctatgaagtccttgacgccagccgcgccggcaccggagaggagcagagagggaggggtggtcgccgtccccgaggggagggtgcacggcggcgg

SEQ ID NO: 3592 - DNA, 1618 bp, Setaria italica
  Peptide Sequence Number=SeqID_69566
taagttagtaaagcgtccttctattgtatttccttctgcggcaagaagaatggatactctcaatgatttattggcagcgagtgatcttgtttcgcttcattgtgcattgacaaatgatacaacacacatacttaatgccgagcgcttgcagcacataaagcctggagctttcatagtcaatactggtagctgtcagctcatagatgattgtgccctcaaacaactcttgattgatggcaccatagctggatgtgcattagatggcgctgaaggtccacagtggatggaagcatgggtgcgtgagatgccaaatgtgttaattcttcctcgaagtgcagactacagtgaggaggtgtggatggagataagggagaaagcaatagcaatattgcagtcctttctctatgatggtgttgttccaaacaatgttatttctgatgaagatgaagagataagtgaagtgggatgtgaagatgatcaactaggtaaacaagaaaaagaacatgctttacaggttggtgatggtgagcagcatacagaagaaagccaattaactacagattatgacaagagaagagccatttcacagcctgaagagcctcaagcttctgcacaatctcatagtattggctccagatctgaagggagacgcagtcggtctggaaagaaagggaaaaagagacctgctcgccgcagaacacaacagaaaatggatgaattgttaactgtagaaggaggaagtaactattcttcacgcagagatgatgataaccaagtgctaagttctagttcacgatttgcatcacctgaggactccaaaaataagcagaaatcttctgctgaatctccaatggagataatttctgaaaataagttgcctgcagggcttggtagacaacctcctgagaagctaaaagaaggctttgttattgctctaaagacaagagataattcaggtttttatgtttcaagagagagggtggctggtggtggctggtatcttgatgtggtaccaaatgctacaaagagggatcctgctgctcagttcctagtcactttcagaaacaaggacactatgggattgcgatcttttgttgctggaggcaaactattgcaggctaataataagatggagttcgtcttcgcaaatcattcttttgatgtttgcgaaagctggatgctggaagggtccctgtcagaatgctgcaaactggttaatcgcaaaaattcttctgctgtactggaggtctattttgagatccttggagctccgagtgaagaagatggtgtcatcaggtggcttgattaatatatctgatttagggctatgatgtttttagaaaaaaagggctatgctgccaaaagcaactgacccaatgttgtcctcgggttaggtctgccccgtattttcctattgccaattgttcagctttggctgtgttgttctagacttctagtgcatgcgcctagcatagtgactgaaattttttagcagcctgcttgttttaggtcgcatctgtattttaattcttcagtatgacaaactaaattactgcagagtatttcccatgcagaattaaaataaagaactaatgcaaaagtagtggaattaactcaa

SEQ ID NO: 3593 - DNA, 302 bp, Setaria italica
  Peptide Sequence Number=SeqID_69567
gtggatatcaaaccacccgcagaagcagaacaactcggcgaagcctctcgaaccttccaaattccgtcgaatccttccccgagccctgattccctcgccgaaatcgcgtgatccgcctcgcgatctctttgttcccaccaatggccgacagggagaaggcggaggcggaggctggggaggagtatgagagcgacctcgacgatgcgcccctggccgctctgcggcggcgcgacgcggcgagcgacgacgagggggaggaagacgacgaggacggggggacgcccttgaggcggataaacggg

SEQ ID NO: 3594 - DNA, 327 bp, Setaria italica
  misc_feature (322)..(322): n is a, c, g, or t
  Peptide Sequence Number=SeqID_69568
atcaggtagtctggtggcactggcaccggggaatagaggagcatgcattgctagttgctacacgtgcaattttttcttgcaacgtgcatgcatggtgattgatggaatttgtgttgttttacatttgtgctttgtaatcgacgaggtaccgttgcactctctcggcatgtaatgtatggcgctgtcgcggcgtcgcagttgtgtgcaaacgaacattcttaaacaagatgttctatggaggggggactcgaacactaaaacaagatcagaacttcaacattttaacgcttctagttcgagctaacaaaaaaaaaaaaaaaanaaaaa

SEQ ID NO: 3595 - DNA, 270 bp, Setaria italica
  Peptide Sequence Number=SeqID_69569
tgcagctccagctacttgcatcagctaataagaagcaagcaaggtctcagcaccgagagccgagtcgatcgaagcaatggccgccaccaacagctggactctcgagatcgcgtcgccggtggccgcgccgcgcctgttccgcgccgcggtgatggactggcacaccctggcccccaagctcgtctccgacgtcgtcgccagcgcccaccctgtggagggcgagggcggcgtcggcagcgtcaggcagttcaacttcacctctgccatgcc

SEQ ID NO: 3596 - DNA, 262 bp, Setaria italica
  Peptide Sequence Number=SeqID_69570
aggtggactcgacgtacaagctgctgccgggggtggaggtgaaggacgagatcgccaaggccaaggagtcggtcaccgccatcttcaaggccgccgaggcgttcctcgtcgccaacccggacgcctacaactaaatcgctcgagtgggatcagatttctgatgtccaaatatgtgcacaaaaagctttgcgtatttgtgtcttgtttattttaaaataaaagctgctctaaagcagcgtggctgtgcgggggatgagagaga

SEQ ID NO: 3597 - DNA, 773 bp, Setaria italica
  Peptide Sequence Number=SeqID_69571
ttgcgtgcagcttcaaacttacagcagcactgccccgcactgagctgatcgtaagatcgtttctgctcggccgatcgctagtgcaccaatggcctccgccaacagctggaccctcgagatcgcgtccccggtggccgcgccgcgcctgttccgcgccgcggtgatggactggcacaccctggctcccaagctcgtctccctcgtcgtcgccagcgcccaccccgtggagggcgagggcggcgtcggcagcgtcaggcagttcaacttcacctcagccatgccgttcagcttcatgaaggagaagctcgagttcctggacgtggacaagtgcgagtgcaagtccaccctcgtcgagggcggcggcatcggcgtggccatcgagtccgcgacgtcgcacatcaaggtggagccggcggccggcggcggcagcgtggtgaaggtggagtcgacgtacaagccgctgccgagcgtggagatgaaggaggacgacgtcgccaaggccaaggagtccgtcaccgccatcttcaaggccgccgagggctacctcgtcgccaacccggacgcctacaactaaatcgatcgatggagtgggatgcgattgcgaccttggaatacgtgtgcggagctttggggtttccttttttttcatacgaaataaagcggttctatgcagtgcatggtgtgtggacgagatgttgaaagtggtatgtacgatgcttgtgttgtttggttatgtataccctcatggttttctatgggaacaaaaaggttat

SEQ ID NO: 3598 - DNA, 258 bp, Setaria italica
  Peptide Sequence Number=SeqID_69572
ccgccggcgatggcggcggcgtccgcaccatggcgacgagcggccgcgcgcacgacgcggttgctggcgctcctctagatcaggaggaggaggagcgcaggtgcagggcgatgctggtgtgccgggtgatcgcggggcgggtgaagcggccgacgcagctgggggaggaggaggaggcgtcgtcggaggagttcgactcggtggcggcgtcggcgggggtgtactccaacttggaggagctgcaggtgttcaaccccg

SEQ ID NO: 3599 - DNA, 378 bp, Setaria italica
  Peptide Sequence Number=SeqID_69573
gctgtgcgtgcgcattgggctgctgtgcgtgcaggccgacccgcggctgcggccggacatgaagcgcgtggtgatcatcctgtccaagaagcagagcacgctcgaggagccgacgcgcccaggggtgcccgggtcgcggtaccggcggaggccccacggcctgcgcggctcgcactactccgccgggtcgtcgtcggggaccagctcgccgtccacgtccgcgacatcgcacgcatcggcatccgcgtcgaacgcgatgacgacgtcgagcacgcacaccttgaggagtcatggcggtctgccgtcgcaccgagaggagcaggagtagcagaggcagcagggcgagtccaactgtacatttgcaattcttaccttctt

SEQ ID NO: 3600 - DNA, 3620 bp, Setaria italica
  Peptide Sequence Number=SeqID_69574
gacgtcagctcccaaggccagaaagttacaaatgaatcatgctgaggtctctggtttgttatgtgttagtatgaatgaaacggatgggggtgaagaatcatatggagctgaatatcctaaaatggatcaggatacttcccatgaaacagctaaatttgatgtagtcatggcgacttcagcattgtatactgataatatcaataccaatgcttgcttagatgaatatcacatgtcgggaattcaggcaatggaggaaattagatttggcagtgcacaaccctttgagattcaaccgaaaggaatggtaaccaattctgaggaagaaagcatgccatctagtcctgagacttcatctaccagtaattatgatatgcctggttacatggagcaaaatctgcagcatgtccataatgcctatgatgcgatggttgaaagagcaggaccagttgtgcttagtcctgcctttataatatgcgacgaaacttcgcatcttcagcctcgtctcactttctcattggatggggttaagattgagtatttgaatttagattcctttgaaggcgagaagatgatagccttacaatgggaaatatctaatattatttccatcagttgtaaatgggctcagagtgttggatatgccttcataacactccttgctggatctgaagtagaatccggaaatgcagctcctgttagagtacaattttgtcttgatgattcacaatggtcacggagacaacagaagatctgggaacttcaaccaagatatcaagaaatatggaaagacatcccatcagatgattttacatcggagaactggagcatcgagcccaatctgtttttccctaggcaatacttttcaagcactgaggactttgaagatattatctatccccaaggagatcctgatgctgtttccattagtaaaagagatgctgagctactgcttcctgaaacctttgtcaatgatacaataattgacttttatatcaaatacttgagcacaagaattgaatctaccgagaagcgcaggtaccacttctttaatagcttcttttttcgcaagctggcagatcttgacaaagatcaggggagagctccagaaggtagagcagccttcttgcgtgttcgcaaatggacccgcaaaataaatgtatttgagaaggattttctgttcattccagtcaatttcaacttgcattggagcttaattgttatttgctatcctggagaagtcgcgacatctaaagatggtgatgcgaagctcgcagctgaacttccatgtattttacacatggattcacttaaaggaagtcatactggactcaaggatatcattcaaagttatttatgggaagagtggaaggaaaggcaccctgaatcagcatcagatatttcagacaagttcttgaacttgagatttgtctcccttgagctcccccagcaggataattcatttgattgtgggttgttcttgctccattatgtggaactatttttgatggatgctccaagtaacttcaacccactgaagatcgatgtattttctgactttcttagtggtgattggtttgcaccagctgaagcttctctcaagcgttcggttgttcgaaagttaatccatgaggtggtgacaggatcttttcagaatcatcctaagctagcttgtggtagtgagcagcttgatgaaagacatcaaagatgctcaaacgctgagcaggaaccagctggagagtttcttgctcagaggcgctctgatgttgaacctgaaacagtttgcaaagttcgtgatggcactcatgaactacaaccatctgagtccatctgtttaaatgattccgaagaaaagagggtacctgcttctgggtgcatgttggacactggaagggtttcaattgttgatgtacagaatagacaagagtctgaggtgtgtgcagcagatgaggataccattgtttgcatgtcaaaccaggatgagaaaaatgagctacttatcgcagaatctaacaatcaacttaatatgagatcatgtgccccaaaagaagatgaagtgctcaagggatcaaattgtgtggtaacagataaggaacatggggaatctttgtttctttctttggacaataaccaaaaaattcctagtcaagcagaggtagaggttcaggatattatggtttccacgagctgtgcagacaatgaaattgctgctcaggtaattgcctgtcaagaacattcttttcaaagaagtgcagaagttggggatgggtgctttagaccttctcaggacatggattctgtcatgatgcttgactccagcaaagacgacgatggactaaatccagaaagaatgacagctgaaggtgattgtggtggccctcatgaagatatggattcagtcacgctccacaaagatgctgttgatacgaagtgtgaagatagtcttttggatcctatagcagaaaatgccatcatcgagaatgtgaacgaaatcagcacagctgattctgtaacagtagaaactgccataattgaaaatgtgaaggatgttagcacaactgcagacaatgttaatcatggtgagctgtatgtttcatctcagttggcagagggaaacactgacaatggtatgactggtgcaggaaacactgacaatggtacgactggtgttagcacagcttcccctggcttaaaagaggaaaatattgacaaagtagtggcagatgactgtacacatgaaagtgatataaatgccaagtatagctctgagttgaaagtgggaaatactgacattggtggtattacagtttcctctgatgtgaatgagggaaacactgaccaaataatagcaggtgattgtgcaaatgaaaccgatgtaaatgctgatggtgagggtgctgacaattgcaaacacttcgcaatggatggtgcagcaccttgtgcagatgccgcaacctgcactgatggcgtggttctatccatagatgtaccctgcagcacgatcaatgaaacagtttcggagaacatatcttctgatgctcaaagtcctctgcctgatggcaccagcaaacttgtagatagaccttgcagcccaaagaacgaaacgtctgagatcacttctcttgatggcaaacgacctgcgcctgatggcaccagtgaagagaatgatatagttatccccggtgacaagtgcacccagaaggatggtggtcagggtactgatgcaaaaatagagcggcattacaagcgacggaaggttttggccttggagaaacaacggagcttctcgggtgccacatctttagataaggttttggccttggagaaacaacggagcttctcgggtgccacatctttagattagatttggccggcgtggggcatagttttagcttgtgctatatataatatataacccgtctcgaccttaggcaacatgctgctatatttatgataatataggggactttcactaatgactgtagaaatggcaaaaccccatgtggaatcctgagctcctgatgtctgcttgacagtcattttatatatggtactgagagagcatcagaagatgggaatgaggaatattttgtgcatctgtacaagcaaattgcgctacgtgt

SEQ ID NO: 3601 - DNA, 332 bp, Setaria italica
  Peptide Sequence Number=SeqID_69575
tttttttttttttttaagtttttcctaaggtaattttctatcaccagtttgttacatggagtggatgttttaattgtaattctctattacgcctatatagacttgcctccgatgctcagtaaacacacacaacatattacaccagttcttccatgtctatacttcaacaaacaaaagaatcggaacaacgctgcaaaaatttctactacaactaaacatggtaactgactgtaaaatcatcggccacccttggtcttcccgcaccccatgatctcccgggggagctcggcgacacgctcaatcccttcctcgaagcgatgcccatccccata

SEQ ID NO: 3602 - DNA, 897 bp, Setaria italica
  Peptide Sequence Number=SeqID_69576
aagagtggtgtcctatttttatttaacacaggagaagaagagggacttgatggcgcccatagttttataactcagcaccattggagaaattcagtacgttttgcaattgatttggaagctatgggtatcagtgggaaatccactcttttccaggctactgaccattgggccttggagagctttgcagctgtagccaaatatccatctgctcagatagcctcacaggatgtttttcgttctggagcaataaaatctgctacagattttcaaatatatcaggaagttgctggtcttcctggacttgattttgcatacacagatacaacatctgtgtatcacacgaagaatgacaagatgaagcttctgaaaccggggtctcttcagcatattggagataacatgcttgctttcctactccactctgcagcatcgccaaattttttgaaaaatgcacaggaacagaagaaagagaacacagagcagaataaagttgttttctttgacattctgggcaagtacatggtggtctatccacagcgacttgctaccatgtttcataactcaatcatattgcagtcgcttctgatatggggaacatcattgcttatgggtggacgccctgggcttgtgtccttcggaatatcatgtttgagcattattctaatgttgatattttcaatctgcttacccgttgtggtagcatttattctgccccatatatgtccgtttcctgttccttatgttgcaaatccatggttaattattggcttatttggttcacctgcactgcttggagcattttatcggtcagcatgttgggtttattctcctgaagaggcatcttcgccatgtgtattctagaacaaaaccaagcctaaactcataacacaagggaat

SEQ ID NO: 3603 - DNA, 600 bp, Setaria italica
  misc_feature (522)..(522): n is a, c, g, or t
  misc_feature (532)..(600): n is a, c, g, or t
  Peptide Sequence Number=SeqID_69577
agcagcccgcacctcatgagtcaggacaatggcggcctcgcccgtggtcctccgatctagggttttagcccgcgccgtctcctcctcgctccgccgcagcatcctcggcgcccacccccaccctccttcctcgcccctcgccgcctcttcccgcccgtccgtggtccacaggttaccctctgtgtgcgggggtttgctcactgtgatgccgctgcacagcgccgtcgcctcaacgcgcctccggtctgcgatttctcccgagtcccagagctggggcgtcgtcccccaaggaaactcgatgcctttatgacagcattgcttggagtcagctgagaagctttttgaaaagtttcatatttgtcacaaagtacggacaagcttacatgtagccattaatggtttataaccggtacaaaacatgttccattttcttgtatggtggttacagtatccggttctgcaggctcatgttatgatttatgttgctaatgcttgtttctggaaatgtggactaggggggtnttttcttacnnnnnnnnnnnnnnnnnnnnnnnnnnnnnnnnnnnnnnnnnnnnnnnnnnnnnnnnnnnnnnnnnnnnn

SEQ ID NO: 3604 - DNA, 367 bp, Setaria italica
  Peptide Sequence Number=SeqID_69578
gagggcacaggggtgaggagaacctctattccttcagtggtcaaaacgatttcatccctcgggtttttttactttgacccgtaaggcaactaaggatcagatccttatagattggatccaccttacaactcaaactcttttctatctcctgattctatcttaacttatcctaaaccaaacctaactcttattttcctaactgaaactcttttcagtctcctgattctatcttaactattcctaaaccaaaccaaactcttattttcctaactgaaactcctaaagatgatacatcggtggacccagcatggatggcagaaggaaggggcagggccacccctagggtgcgcgtgcccgtggagtcggt

SEQ ID NO: 3605 - DNA, 509 bp, Setaria italica
  Peptide Sequence Number=SeqID_69579
gctatgggctctcaactcctgtcaaacttaatacaatttaatatgatgcggttgagtagagatctccacacgtcaattcttgaaggacgatttccagaattcgtgcggggattcttgagggcgcagttcccaaagggagatgttccgcagtgggtccgtaacgcgatggaggtcgccggcatcgacatatctgagtgctgtgcttccgccaaatgccacacgccaagcatccaagagccgcctatacctgttccagttgaagtaaacggagtcgtgcagcagaactaaggcgctggcgcttcagtccaaagatagaacacgacaggctttcgtcacgaagaaggtttgctgtcgccatacatgtagggtcgtctcagtctcaccggtttcgtcacggagggagtagaatagaattttccaacagtggcagtgttttgagggtgtcgtgtgcgtgcacgtgttttaagaaacagaaggggcatggtacgccatgcgttcatggttctggg

SEQ ID NO: 3606 - DNA, 626 bp, Setaria italica
  Peptide Sequence Number=SeqID_69580
ttttagtttagcttcgtaattaagttagatagtaattaatactaaatagaaccaacaatgctttatgggtgtgtgttctgttcaatgttcaattgtagctcacaagaaacctgatgtccagaacttatttgggattgtgcaaggaggattggatccagttcttagagatatctgcgtaaggggcttggttgagcggaatcttcctggatatgcaattggtggtcttgctggtggtgaagataaggactcattttggcgtgtcgttgcccagtgcactgctggattgcctgaaaataaccacgatatgttatgggtgttggctatccacttgatattgtagtatgcagtgctttgggtgcagacatgtatgactgtgtttatccaacacggacagctcgctttgggactgcacttgttcctgagggtctcctgaagttgaaacaaaatgcaatggcaactgatgaacgaccaattgatcctacctgttcatgcatggtctgcaaaaagtatacacgtgcttacttgcattgccttgtcacaaaagatgctatgggctctcaactcctgtcatatcacaacttatcatttatgatgcggttgagttagtagtattcttcctactacgt

SEQ ID NO: 3607 - DNA, 330 bp, Setaria italica
  Peptide Sequence Number=SeqID_69581
ttcatgtcgatcaagcacctgccgatctcacatgtggtgccggcagagaggttcctcttccggcaggttggcccgagggagcaccggatgttccggtgcgtggcaaggtacgggtacagcgactcgctggaggagcccaaggagtttgcagggttcctcgtggacaggctgaagatgttcatccaggaagaaattgctttcgctcagaatgacgcagagaatgaagaccacactgaggttccagatgcaccgaccaggccaaggcggtccacaaactctgtggtgcacagcgaggaggcgatcgaaccgcgggtgagcagcaactctggg

SEQ ID NO: 3608 - DNA, 346 bp, Setaria italica
  Peptide Sequence Number=SeqID_69582
agtgcaacaacttcatactatagtgctccatttacaatactcaatacttggctaatcagatcatccaatcaaccagcagactgaaggaaattgtcaagaaaaggaggacagaattagaagagatctgccaaaatgcacacatagaacctgatgtcagcacggcccctgaacaaactgatgctctgatcgattctggttgttgtttatgcatcttgctctgctactatattcaaatgttctcatgctttttacaaataatgacattcttgtgccggtgccatccaggcctcatcgacccctctgagctcctagcaaatattgagtcacagatataaaagcaaaagag

SEQ ID NO: 3609 - DNA, 456 bp, Setaria italica
  Peptide Sequence Number=SeqID_69583
aggaacaaggaataaaataaagtggattgctgcttgtgatgaggaggcttggcttgaagaatataaccaggacccaaagaggtatagcgctggaaggggtgcccacataaaccttaaacgggcagaaaaggcacggattttggtcataaaaatcccaagtatggtggacaacctgataaaccggacctttgcttgggaaaacgcaagaaacaaaccctttctctatgatggagtaagtataaaattggatgaccaatagtgtgcatgcttattcttagtttttttttgtacttgcatgctcttttaataggggcggctaatatctgtgcttgaagagtacagacttagccgacatcagaaagaagaggaaaaacgacgataccgggaccagaagaagttggagagcatcctactcgcagagaaagaagcgatttttggctctaaactaagcccaaa

SEQ ID NO: 3610 - DNA, 2597 bp, Setaria italica
  Peptide Sequence Number=SeqID_69584
acacagtctctttctcacccttctcttcctccattccgctatttctctcacctctgatcccttcatgtagcagccagaaaagcaacaaaaaacaaggcagagatggcttaaaactcgcaaaaccaccatgaaaaagagcttctttggcccctaggttgctggcatttggtgtctcctttttttttcatctcctgctggtattgctttctctcatcccaaggcgacgagggaataggaagctagaaagctcaggccgtagctgaacgcctatgggtcagggagtctgaatctcgtccggtcctttcgcttctctctcctcgctcttctttgcggaattgtggtgtcttgctggtctctggagagtggagagcgaaggtctcctgcacttgttcttcaatggtgggcgtaggtgctggcctgggcttgggcatggaaggtaccagctgcggtgctctgctcaaagagcttcagcaaatctgggcagaggtaggagaaagtgagagcgagaagaacaaggtgttgttggacatcgaaagagagtgcttggaagtctaccgcaggaaggtggacgatgccaatcggactagggtccagctgcaccagtcagtggctgccaaagagtctgaagttgcatctctgatggcaactctaggggagcacaagctgtacttgaagaaagacaagggcgttgtgtcgctcaaggaacaacttgctgctgtcgttccagtactggagaacttgaaatgcaagaaagaggaaaggatcaagcagttgtctgatgtccgatcgcagattgagaaaatccgctttgagttaagcgaattcaatgaccagggtgataacgcgagcagtcttgctgcggatgaacatgacttgtccacaaggacgctcaacagttaccaagcacagcttcgtgcccttcagaaagataagtctgagcgccttcgcaaggttctggagtatataaatgaagtgcactctttatgtggagtccttggaatcgattttggaagtactgtaaatgaagttcatcctagtttacatcagaatggtgttgagcaatccagaaacatcagcaatagcacactggagggccttgctagtactatatccaagctaaaagcagaacggaagtctcgaatccacaagatgagagaaaccatggaatcactgtgccaactgtggaagcttatggattcgcctgaagaagagaagcggcaatttagcaaagtaatgagcagtctcatattaccagaggagggaatcacatcacctggcgttctctcccaggaaaaaattgagaagatggaagctgaagttgagaggttaacaaaactaaaaaccagcagactgaaggaaattgtcaagaaaaggaggacagaattagaagagatctgccaaaatgcacacatagaacctgatgtcagcacggcccctgaacaaactgatgctctgatcgattctggcctcatcgacccctctgagctcctagcaaatattgagtcacagatattaaaagcaaaagaagaatcccttagccgaaaagatataatggacaggataaataagtggattgctgcttgtgatgaggaggcttggcttgaagaatataaccaggacccaaagaggtatagcgctggaaggggtgcccacataaaccttaaacgggcagaaaaggcacggattttggtcataaaaatcccaagtatggtggacaacctgataaaccggacctttgcttgggaaaacgcaagaaacaaaccctttctctatgatggagggcggctaatatctgtgcttgaagagtacagacttagccgacatcagaaagaagaggaaaaacgacgataccgggaccagaagaagttggagagcatcctactcgcagagaaagaagcgatttttggctctaaactaagcccaaagaggacgaacagcttaaataggaagacaaatgggtatcggccaaatggaaacactaatggactcaagactcctactccgcggcgatcatctcttggcagtgctacctctgagctcttgacgcccagatcatactctggccataatagatactttggtgatttgaggcggctatcgacttcccatttgaactttggtgatgattcgctgtcaacatttacatccatcagtggctctgaaccggaatcccctcctcttggatgaacttcatactgctgggtgattggatgatctgattagccaagtattgagtattgtaaatggagcactatagtatgaagttgttgcactagtatgtacatttctgatgtaatacatttagctcgtactccgtatttgactggattggtagacttggtttgggttgggtttggagttcaattgtttcgagctgtttgctttgtagattgacgattaggcaaaagatgtagcgagtgatttggatttcaggatctgggcagtcagctccccagctgtaacatatcataatttatgcgattggtttgcgtagttgtgtgctgcagccttgtacaagtgctatgaaaaatctatgtacagattctactgctaccaaaagtaaaaaaaaaaaaaaactaaaaaagaagaactagacc

SEQ ID NO: 3611 - DNA, 426 bp, Setaria italica
  Peptide Sequence Number=SeqID_69585
gaatgtttaaatactacaatttgaagtaactgtggttgagtatttacaatttgaagtaatcaactagagctttgctcgcaaggtctcgtctaaagaaggcccccagaaactcaggcatggtaaaattcctgtattttgaggggttatctgaagaaaccaactctggtaatggtccataaaaatctgagtcccctctcttcccaggattgaaaaatattccaattgaaactcttgcttcttcacgtgtattcataatcacccgatggtcgacactcttgtacttatcattagacatgatctgcaaaaggtccccgacgttgattacaagcgcaccgggcacaggcttcacatccacccagtagctcgccccatcatcatccgtttgcttcacctgcagaccacccacacaatcctgcgcgaggacgg

SEQ ID NO: 3612 - DNA, 698 bp, Setaria italica
  Peptide Sequence Number=SeqID_69586
cattataatttgtagacatcacacgtgtttacgcaagtttgaatgtttaaatactacaatttgaagtaactgtggttgagtatttacaatttgaagtaatcaactagagctttgctcgcaaggtctcgtctaaagaaggcccccagaaactcaggcatggtaaaattcctgtattttgaggggttatctgaagaaaccaactctggtaatggtccataaaaatctgagtcccctctcttcccaggattgaaaaatattccaattgaaactcttgcttcttcacgtgtattcataatcacccgatggtcgacactcttgtacttatcattagacatgatctatggatacttgtagtcatatcaaagactaatgcctaaagctatacactcccttcttgaagccaaacatgttctgagtttttgcttggaagctaataggcatttctatacatggtatctgcaaaaggtccccgacgttgattacaagcgcaccgggcacaggcttcacatccacccagtagctcgccccatcatcatgcgtttgcttcacctgcagaccacccacacaatcctgcgcgaggacggtgagcccgccggggtctgtgtgcgggacgatgcccatggtgcgctcgggctcggggcacaccgggtagtagtggcagaccatgaccctgccctcgaggcaggaagcctcctcca

SEQ ID NO: 3613 - DNA, 1006 bp, Setaria italica
  Peptide Sequence Number=SeqID_69587
ataaggtttcgctgtaatttgaggtgcagtctccactaatatgccctttcctttatctttcacagcagttggtgtgagtttttcttgtggcatctcttccaatgaagtatccagagctagaagatcttgatgaagtgttccttctaatatcctttggataacttcctcagggttcaggttgtaggcttccaggcaagcagcaaggaaacccttcccataatcagggaaaaggtcccttatctgactaatcttggactcaatcatcgcagtttcctcatccttttgttgtaattcaccaccatgagaagagactggcaaatcaggtacactattccaagagtgagtagatccacacaaacgtgatatgaactggaattgctcatcatccatgtatatccatcctttgttccgaatgttgtcaatctgactcattaactgaaattcactttctagtgattggaggaaagtacttccatggttcagttgagaagagtatgcggcttctctatttatatcttttagtgtttgaaccaagatatctcccctgatcatagggtcttcaacattagctggaaacatcttagtagaagtttgagcatcgtgctccttaagttgatcatttaaatagcagtagtgcaacaatctccaaccgaatttgattgttctctttgacaacatccttataccaagagcagtgtcactaagcatgctgtcaggtgatgcctctctattgctctgggacttggacataactttaaaaccctgaagcaatgatggtaacaatgaatcgtacaaccttgaaagagtattcagtaattcctcaacaccatagttcatttcaaaattagtacagaacaataaagcagcaggttgataagcaccaacaaaggaatccagagtaacaattgcatcatttataaaatctaacacctccaagaaatctttataaagttgaacatatccattatcaattgatccggttgaagtgagcacctgtaaggatgcc

SEQ ID NO: 3614 - DNA, 430 bp, Setaria italica
  Peptide Sequence Number=SeqID_69588
aattgcacactatgaagtctcataagagcatctatgacaaggatgtgacctttgaaggacacaatctgatggatgcgttcacgatcaagatcaaaaggatgcactgaccaggagtttgttccaacctgccactcaaacatggaagccctcgagaaaaggaggaggcacgagttgggtgagcttaatggagccgtaaggatgcctatgccagaagtgaagccaagttcgttgtcgcatgggagattgggggtcttcaccttggcaccagtgtatgcatcgacaaggaggcagtcctcctcataggtgaagataagatacccatatgagcagcccaaatagtgcattgtatctggagtattttgaggcactgaacagcaacaggataagtttttcttgcaaggatcacttagctgccatttgcaattagatg

SEQ ID NO: 3615 - DNA, 1596 bp, Setaria italica
  misc_feature (1585)..(1596): n is a, c, g, or t
  Peptide Sequence Number=SeqID_69589
gttctcctcctcctcctcctcccccgccctcaccaccatggaggccttcctcgccggcttcttcagggcccctcccccgctgcggccccgccgctcgcgctgctccgaccttctccggccttcctctcttccacggcaggcggcgcaggcggccctcctcctccgtggtctgcatggcggagccgtatctcatagcgaagctggattctgcggagaaggcctggaaagaaatgtcggttaggttagcagatcctgacattgtctcagatcctagcgagtaccaaaaacttgcgcagtctgttgctgaactggatcaggttgtgactacatacaggcagtttaaggattgtgagaggaacctcgaagagacaaaagctttgcaaaaggagaatgaagaggaccctgatatggctgagatgatagcttcagagctagaggctctatctaaccagcttgcagggcttgaggaaaaattgaagttactactgattcccagcgatcctctagatgcacgcaacatcttacttgaagtaagagcaggcgctggtggtgatgaagctggaatttgggctggtgaccttgtacgcatgtatcagagatattgtgagcggaataactggaagttcaagccagtttcttgctcggaagcagagatgggtggatacaagacatatgtgatggaggtcaagggaaaacaagtctatagtaaattgaagtttgagtcaggcgtgcaccgtgttcagcgtgttcctcagacagagactatgggacgtgttcatacatcaacagcaactgtagctattatgccagaggctgatgaagttgatgtggttattgatccaaaagatattgagcttaaaacggcaagatctggtggagctggagggcagaatgttaacaaggtggaaacggctgttgatcttattcacaaacctacgggaatacgtatattctgtacagaagagagatcacaacttcaaaacagggagcgggcatttcaattgttgcgagcaaaactctacgagataaaattaagggagcaacaagagtcaataagaaaccagagaaaattgcaggttggtactggtgctcgatctgagaagataaggacgtacaattacaaggacaaccgagtgacagaccatcggttgaagatgaattttgaactgactagcttccttttaggagacatcgaatcggctgttcagtcttgtgctacattggagcagcaggagctcttggaggaaatggccagttctgtgggcgtggcgaaggtatgatctgcggaattggcccctgagaaataggtcatcaaactgatggtgtgtttaaacggatgaaggttggtgtataagctgtagatgaagaaatccgacaaaactccacataggcacattttttcagtagttcatgatcatggtcatgactaatgtgacagaacatagcaatgcatctcagcttccctgctggtggcaggtttttgagtagtagaaaatagacatgcttgtaccgactgctccggttttcataattcaatatacttcaaatatgctgttcgtgtagaaaaaaaaaaaaaaaaaaaaannnnnnnnnnnn

SEQ ID NO: 3616 - DNA, 548 bp, Setaria italica
  Peptide Sequence Number=SeqID_69590
cggagatgagggtgaggcagcagtggccaagctcttgctccagtgggcgaggctgagcttcttgttctccccagtccatcgatgcgccgccgcctcctcctcggctcgccggatcagcggagctccatggctgctgtccagcgcggtgctgcggattgagaggcagtacttgggtcttttgctacagcttggttggcgtacttgtgttttgcctttcttggtgctagaatgatggcgctgctgttctcgccatgatggatgatccctctagtaaaagttctaactcctctctgatagcaccttctgtacttctctgtaaatttaatgatgcatagttgagtttgagtgctcagatatgttactgcaaatctgtccagtttctgcaactcttcatacgccaaatctttctgttttaacctgcttcacccttccattttgttgctttgggatacagctaggagaacggctgggaattttggttctggaatgggttcctttgggatggactggagccagaagggctccgtgttgtgggattgggagaattt

SEQ ID NO: 3617 - DNA, 281 bp, Setaria italica
  Peptide Sequence Number=SeqID_69591
tttcaggcccgggtgcagctgggtggtcggctggttgttaccagcatcggccgaattgtttgacagaagagagagagcacgctgaagatccgggtttccatttgagtcggaggcgaccacagaagcttcaacgccttgattgaggacctttgcactggttcctttgaaagccatgaacccagcaaaatcttgatgcgcggtttcaggctctcgatcccatgggcaacggcagtgccattgcagcagctcacgagctccagctcccgagaccgccctcgtac

SEQ ID NO: 3618 - DNA, 2003 bp, Setaria italica
  Peptide Sequence Number=SeqID_69592
taagtaaataaataagaatactacagtaagccggagatgagggtgaggcagcagtggccaagctcttgctccagtgggcgaggctgagcttcttgttctccccagtccatcgatgcgccgccgcctcctcctcggctcgccggatcagcggagctccatggctgctgtccagcgcggtgctgcggattgagaggcagtacttgggtcttttgctacagcttggttggcgtacttgtgtttttgcctttcttggtgctagaatgatggcgctgctgttctcgccatgatggatgatccctctactaggagaacggctgggatttttggttctggaatgggttcctttgggatggactggagccagaagggctccgtgttgtgggattgggagaatttgccaccgataggtgcaaatgggaaccttgtgccgcaggctgaggccaagtttgctggcgttgagatcacaaggcatggatcagtgcattcttcctgcggtactttttcgtccagctcggagatggggtatggttcatctaagagttccatatccgcgtcgattgattcttcgcccaaggcggggaacaacatggagctcaattttgcacctgccagagtgcctgacaagtacatacgcaagaacactgatttgagaacctccccgtcatcagtgatagctgtaagcagtggagagccggtgcttagtctgaaacttggcaagagaacctattttgaagatgcctgtggagggcagagtgtcaagagttcaccgtcagattcgagtatagtgactcctcctgctgctccggtgaagaaggcaaaggcggctcaaaacgtgcagaactcatactgtcaggttgaaggttgcaagattgatctctcttctgctaaagattaccatcgaaagcacaaagtctgtgaagctcattctaaggctcccaaggttgttgttgctggtctggagcggcgcttttgtcaacagtgtagccggttccatggtttagatgtctttgaccagaaaaaagaagctgccgtaggcgtctcaatgatcacaatgcccgcagacggaagccacaacctgaagcaatttcgtttggttcatcaaggctccccgcaatgttctatggtactgatccaaggcaacagacaagtcttctgtttggtcaagctccttatggtcaaataagaagccgtgcaagttcttcatgggataaccctggaggagccttcaaatttgcagaaactaaagcttcttggttaaagccagcaggagctactggtcttgatgccttgcacctatcaagtcagcaggtatggaacaacattatgccacatggtgcacatcaagattttgctgggttcatggctttcaaaggaaccagtgcaaaggtcctcaatcaaggcgttgaagcttctgtggtcgcctccgactcaaatggaaacccggatcttcagcgtgctctctctcttctgtcaaacaattcggccgatgctggtaacaaccagccgaccacccagctgcacccgggcctgagcgccctcgccagcacatccaacgcagtgatgcaacaagcctcaccaccagggctctggcaagacggcacggcccttgatcttcatgcgcggtttcaggctctcgatcccatgggcaacggcagtgccattgcagcagctcacgagctccagctcccgagaccgccctcgtacaacggctcctcttcccactatgacctgacgcgctgatgcttccttcggttagcgcctccgtggtcgggttgcaaggaatcagactggtttctgatgtctgaaactctgaattttgaattgctatgttgttctgaaaaaaataaaggccctcgcaaactgaggctcgacctgatccgagccttgctgacatggaaatccctggcgttgccagtagctgtgtgcttgaataatccatcatacttgtaatgctgttttgtgtaactcgattgcttcagcgaagtgatcatggacgctttttt

SEQ ID NO: 3619 - DNA, 768 bp, Setaria italica
  Peptide Sequence Number=SeqID_69593
ggattgccagcggcgcccaagccccaatctcctccgcctttgtcattcttaaccgaaaccctagaactgctccgccgagcttccgatccccagagtcgccgcctcggggaaaagcggaaggccgaggaagccggtagccacacctcaactatggatctggagatagtgggtcggcacgccctactgttcgacgacgacgcgacggcggaggtcgtcaactccggcggctccctcgtcccttgggcggccatcggcgcggcggacctccttctcgaccgccacgatgtccgccacctcctagattgtgtgccccctcgaccgcgccgtgcctactccgcggccatcctatacgtcccctcctccgacggcgtctcggaggcggagctcgatcgcgagcgctacctcgacctccccgacgccgatggcgacggcgaagacgagggttccggagatgcggccccctcaggaaatgggacagataccagacagagtgattgtagttctgttcctttctcatatgggagttctgctggttcagacgatccaaattcattgggatcgtattatcgcccatcattttatgtgccagacagcttgttgaataagctggttagtatatgctttggtctctcacttttaacttctcttttttcccacaaatatgatagaaatttatttcttcgacccttctattaattttcttcagttgatccagcaataattgtccaaggtgcatatgttcttctaaggattaaatgcctgtttcag

SEQ ID NO: 3620 - DNA, 627 bp, Setaria italica
  Peptide Sequence Number=SeqID_69594
cgacagtgatgaagactttgtggtcataaggaggccgctcctcgttgcccaagctcctccgccttatcttcccaccacagttgataccagaggttttcgtccagacctctggagctcaagaatgagacagaagtatggattgaacacaagtgactacacctacaacacagtggatgcaaatgcagcaccgcctcagtgagcagagcagtcacgtgacagatgaagaagcatgtgtccgttccaagcacctggtatgtacaggcatcgtatcttgtaacctttcctgtctgcttgtaaccttttcgaatattggttgatcttccatcgcattgtaccgtgtcaccttgttgtcgatgatatgcgtgtactggtggttatgtggccgccgtgtatctgtatagttctagtcctgcacagctgcttttgggggtgttgccattgcttgtacagcatgcattatgtggccgccgtgtatctggattgcaaaatcatgaaagatgttatcacaagatgaagtgaatctgttgtgctcgactcgtgtatcctatcaatagaaaagaatagttaatacaacaaagaatagaaagtagaaatactagttagtagactaacgtaaaaaaaaaaaaa

SEQ ID NO: 3621 - DNA, 1134 bp, Setaria italica
  Peptide Sequence Number=SeqID_69595
aaaaccgaaaaagaacgaaaaaaagacgaaaaatccaggcaaggccaagcagccggggagggaaggggatccaaatccagatccgccgccgccgccgagagccgagatgatgatgatgggtcgccggagcggagaaggcggccgtagcagacagggcctgggctgggctgcgtgttgcctgggattcctgctcaagctgctcgccttcctccaggccttcgccgccgtctccgccatcctctacgccgcctggatcctctcccgctgggcgcgtcaccaccacctccacctccaggacctcctccccggcctctggtttccatcgcttgtcatggcggcgggactcttctactgcatcctgctcctcgcgggctacctggcggccgagatcaacaccggatgctgcctctgcttctacaccatcccggccatggctatgatgctgctcgaagctgccctcgccgctcatctcaccatcaacgagcactggatccaggacctgcccgatgaccgcaccggcgaactccacaacttgctctccttcatccacaataacctcgacctatgcaaatgggttgctcttgccatcttcgccacgcaggcactctcactgttcttggccatgattttacgagccatgctgtctgcccggaccatggactacgacagtgatgaagactttgtggtcataaggaggccgctcctcgttgcccaagctcctccgccttatcttcccaccacagttgataccagaggttttcgtccagacctctggagctcaagaatgagacagaagtatggattgaacacaagtgactacacctacaacacagtggatgcaaatgcagcaccgcctcagtgagcagagcagtcacgtgacagatgaagaagcatgtgtccgttccaagcacctggtatgtacaggcatcgtatcttgtaacctttcctgtctgcttgtaaccttttcgaatattggttgatcttccatcgcattgtaccgtgtcaccttgttgtcgatgatatgcgtgtactggtggttatgtggccgccgtgtatctgtatagttctagtcctgcacagcgattgcaaaatcatgaaagatgttatcacaagatgaagtgaatctgttgtgct

SEQ ID NO: 3622 - DNA, 610 bp, Setaria italica
  Peptide Sequence Number=SeqID_69596
ccccaacgccgtgggcgacccggcctcggtcccgcccgtggaggagagcttcctcgccatgcgcccgggcgtggcgctggaggtcgcgaggatgatcttcctcggcgaccagcgggaggccctcggcgccgtgaccgcgccgtgcacgatcgtccaggtggagggcgacttcgcggcgccgccgggcgtggcggagcacatgaggcgcctgatggcgcgcgccgcggcgacggacgtggtgatcatcgactccgtgggccacttcccgcagctcgtcgcgccccagcagctgctcggcgtgctcgagggcgtgctgcgccgccacggcggcggcgaggatgggcgcgcgcacggcggtgctgtggaggagcaggtggccgacggtggcatcaatattattacggcctagccggaggaaggcgaatcgatacacgtacatctgtgatcagcatatcccgtcccttgctttaccgtacgtgatgcacgttgtatatgcgcttgtttgtgcctcgccgtgtgttgggtcgcacgcttgtgaaaaagattaggtggtcagaggattacagatggccatgtaaattactaaaaaaaaaactaaaagagactagcc

SEQ ID NO: 3623 - DNA, 660 bp, Setaria italica
  Peptide Sequence Number=SeqID_69597
aagcttggtagcaatgcggtggtacgcgaacgtgcgggaggtggtcggcggcggcggcgccacggtggtgctcgcccatggctacggggccaaccaggcgctctgggacaagctcctgcccgcgctctcgcagcgcaacagggtcatcctcttcgactgggacttcaccggcggcggcgagcagcagccggaggaggagggccggtacacgttcggcagattcgccgacgacctgatcgcgctgctggacaacaagggggtgcggggcgccgtgatggtggggcactccatgtccgccatggccgcctgcatcgcctccgtcaggaggcccgacctcttttcccacctcgtcctcctctgcgcgtcccctaggtacatcaactcgccggaggagggctacgtcggcggcttcgagaaggcgggcatcgacggcatgctggacgccatgtcgtctgacttcgtctcctgggtgaagggcttcgtccccaacgccgtgggcgacccggcctcggtcccgcccgtggaggagagcttcctcgccatgcgcccgggcgtggcgctggaggtcgcgaggatgatcttcctcggcgaccagcgggaggccctcggcgccgtgaccgcgccgtgcacgatcgtccaggtggcctccatctcaaattc

SEQ ID NO: 3624 - DNA, 534 bp, Setaria italica
  misc_feature (517)..(517): n is a, c, g, or t
  Peptide Sequence Number=SeqID_69598
gtatcttgatccccaactgaacaacagtattaaaagttattttacgttttgtcagtacagtttgttgctcatcatcatttctacattcaggcttctttcttcttaaaataccgaatagtctaataaaagaacactggatgagggatttattgatttaaatttttctattttcaatcaatgatggtaagcctaattttgcttgtagctaacagccacgtcataagctcaataaatagaatggtagccaggttgttgtggatttatgtaagataccatccatgacctctaagtggagccttagggatgactaagataaccagctgccccttagaagagtaaaggagttatcaagcatacatgtgtctactgtatacatatatgggtgtaacaactcatgctatttgatcttctgtgcgcagaagatatatgcagtcaatgagttcatgacacagcatgtctcctaatccaaactctaattgtaatgtaatgagttggtaatattgaaccttcaaaaacncatggtacttcttttac

SEQ ID NO: 3625 - DNA, 431 bp, Setaria italica
  Peptide Sequence Number=SeqID_69599
gcaacagaattaataaatcatgtggtagtgattcatctctattgtgatcataaaaggtgattactaaatgaagctagcataacttaaagctcacgaatgtatggtccagatagtctaagggcaaatactaatggaactggtagtggtagcaagtcagctcaaggtacacctcggacttgtactccactgcacctcacaattctgtcattcagattggatgcaacaacctccagcctgcatgcagatgaatgacctgagttcagagcttgacacaagcatatcaaaataaaaatatctgatttaaaggagcagatgcaagaacttgactaagtacctggagaggatgaatgatcttatgatttgttgcggacgctcactcccttgatcatgatggctattcctggaacccaaaattttcccaaaagtaatca

SEQ ID NO: 3626 - DNA, 265 bp, Setaria italica
  Peptide Sequence Number=SeqID_69600
cgggcagcgacgacgggaaggcgatctccttgaggtcgtagcgcacgtagtcgtacagcttcctgcatacaactctgaacttcatcttgattcttgctttctactgcaacttgttccttatggtgggtggttcaagatgaatacccgtgctaaaacgaacctatagagggtcagcgcatatgcgcacggggaaggagctcgaggtctgaccttcaccgcttcgccgttgatgatcgccggcgggcgaggcaccgcagtacattca

SEQ ID NO: 3627 - DNA, 2810 bp, Setaria italica
  Peptide Sequence Number=SeqID_69601
cttagcatgtatcatgaccggtggattgcacaacaaattcaaggatgtgctgcaagcaaaaacttgtgatggcattgatcatctgctgaaataaagccgatgatgatatcatgatgaagatggcggcggcggcggtttcagcatcgcctcatcaccctgctgcggttgctgacgaccagcctccccatcagcagccttctcctgcagctggtccttgagtccctcctgatacgtttccacaaaattcttcatggcgtccgtgtacgtcgcggcgcgggtcatgtaaatccgccttagcgtaggcttcagagtctctgcaccgccccttgccgccaccgcaaggtcctccagcacactgggctcgctgctcttccctttcttgccattgtcagagatgggcttgccattggatggctcctccgcatcgttttcgactgccttcttgtagtcgtttggcctgaggtcggggccgatgtccctgacccaggacgcgccgtacagccgagtgacctccttgaggatgcaccagtggtcgtgccatgtgagcttaggcctcttcttgatgtgtggaggatcgggcagcgacgacgggaaggcgatctccttgaggtcatagcgcacgactagcactaactactaccagcttcatgattgtgagctgatacaaaatgataacactattctaactaaaatactctatgacatatttatacaatatgtttggtaaatatactcctccagcaaatctctctccaatattgaactggctgaatcatactaacactaactttaagaaagtaattattgcaatttccaggagataatttctaaaccaactaattatgtcttgcaaaacagaggtcacaagaggaatgggaaaatggtcaaacttaaagggaaatcgctgtttttgagagaataaagcaaatcatcactattctaaggcaacagaattaataaatcatgtggtagtgattcatctctattgtgatcataaaaggtgattactaaatgaagctagcataacttaaagctcaagaatgtatggtccagatagtctaagggcaaatactaacggaactggtagtggtagcaagtcagctcaaggtacagctgggacttgtactccactgcacctcacaattctgtcattcagattggatgcaacaacctccagcctggagaggatgaatgatcttatgatttgttgcggacgctcactcccttgatcatgatggctattcctggaacccaaaattttcccaaaagtaatcagttagcaaccatccagttccaaccaccacatcaggtatgctcacttcagaattcagatcacaacacatctagtcatagcaatgcaaagctatagagtaacaataaatttccttctcacggtcattgtatcagtgaaagaagtaggtcacaaacaatcaatcgcacatgagttctgtcagaatctaagcaacaaggatatttcaccaaatgcatatagtttagctcagggaaagctcaagctatgtgacaagtaattggtaatcaaagattgaaagaaaaagatacctagcataagacgtgtagacaaaatgttctggcaccaaatatttagtcagaataatgtaaaaagacctgctatgcaagttactcgagcagtaagttgacttaataagcaatactctagaagggatctaatggatatttaaatgcatgaaaaaagcagcatgtggcatttcattctatgcaatattggatctgacaagcaatgtcacatgcatattaaatagacacaagcaggtacaagtaaatagttgtcgagcattgaggcatttaatcaaacagattctctttcagtctttcttgattgtaggcaaaataatatgttggttcgacatgaagaaattaatctacctcatcttaaatgcacttgtttttagacactgaacttttggctcaccaattcgctcaaaatcaaagacatctatgtctgtaagcagtattacttgtgatggcatctatatcaagtctgtctatgcacaataagttttctaaaaaaattgacaacttataactaaaaaccagtaatattcagcacaagaaaaagaagaggtgaaattatattatgtcatgctagttacaaatatttgctccctatatactcacaatctaatagaaatagcaatggagtcataagaaatatgcatataattaaatgtacgcttgggaaggtcattaagcaatgtcctttcaaatctggaaggcaaaggaactgaagggcaatcatttaaatgataaaaagtaccaaattggagatatcagaatgacaaggacatcttaaatcaaattgaagatacagtgttatcctgctacacatataggtaccgagtttactttgcactctttatggcactctttatggcagtgtcaattttgaaccacctagggatagtcacagacatattatcgtcttctaggaacaggtgctctgctttctcacttaagatgggcaagagtaattacatgttgtcatattaaggagacaaggtaaggagaaaacctaaaaataaagagtaaccaggacaaaccgattcatctttcattctctagcataattatcaaattatattagtggattctttatgtgcttgcgcaactggacatatatctacttcacatgaagatcctaggcatcaaactctgaacattaggcacagatgttggagaggagctctcagcgctgatgtttgaataagcgcaaacgacagggggaggagagaagggagagagcccggatccggccatcgcggctcagatct

SEQ ID NO: 3628 - DNA, 711 bp, Setaria italica
  Peptide Sequence Number=SeqID_69602
ctttagggcagcctcaagctcttcagctgaggaaaacgaaaggaacccatacacacggtttctccctcctttgcgatccgtgagcagccttgtactaacaacggttccacactgggtaaagagctctctcaagtcttgaggctgaacagaccagagaaggttgccataatataacttgtgtgggctttcgaagatgtggtcctttgtgggcgttatatgagtcaggtttacgtttttcctattggaaatgacatcagatgctagttttacaaaaatttcacgcccatctaagtcaaatccatccagggcattgatggctgttcttgcttctgctagagaacgcattgtgacaaaagcagttcctcggctaattcccgtctcggtatcgcgtgaaacctcgacggagaggacggtgccatggggcctgaagagctggagcaggtcctcgacgtcgcagcggcgcgggaggttgcacacgaagagctcccgcgggcgcggccactgccgcgtccagccgctcaggtcctcgccggcgtccgcgccccggtcctccccgcgcgccgcgccgttgccgcccgcccactcctgctcatcctccaccccgtcactgaactccgcctccgcgtccgaccactcacgctcctcctcctcctcctccaccgtctcgaaaaccggcggcggtggcggtcccgagctcgctctcgccctgga

SEQ ID NO: 3629 - DNA, 552 bp, Setaria italica
  Peptide Sequence Number=SeqID_69603
cgcatgtcgagcgccggcaggggcagcgggtactgctccggcggctggtgctggtgctgggtcgccggcgcggcggcctcgccgacgcgccgcccggcacgaccccgaactcaatcccttgcgggtgggggcttcttgccggcgtggcgcgcggtgtcgacgacgtcgacgctggagtgggagcggcagccggaggagaaggggatggcgatgaaccgccgcggcggctggtccctgctcatggcaggcactgctgctggattatccacgtttggacagccgcgcggcgccgaacccaaccggaactgccccttgacctgctgttggagcaagcaccaagccgagcagatagcagcagcggcagccgggcaggtagtgagcctttactccagcgaaaagggcgcgttaggtccgcacgcgcgcgccgcagcactggccccgccggccactggtcgcccgccaagttcgttgcagcgcagcgcagcaggggaagaggcgagcggagcggagcagggcagccgaatactataggcgtagtaggcgtagaagtgg

SEQ ID NO: 3630 - DNA, 626 bp, Setaria italica
  Peptide Sequence Number=SeqID_69604
tcgtcggcttccatcgcctctgcgactcgagcagtgggggaagaagggaagcagccgtcgtctcttcccgggaccggacgcacgcagcgcgcagcggggtaggaggcgaggtcgatcgcgaggaggagagagggggcgaagagaagagcgggacgagggggaagatgagtgaggagaggccggtgccgcggagggagagcccgtggggtttgccggagggcgacacgcggcagcccaaggcgcatcgctgcaacgaccgcgccgaggacgtcgtccaggctgtctttgaagggaatccatttaagacagttccaggtccattcaagctcttcttgcaatgcatgcgatcgaaacctggggaggaaccaaccgagccctatacttacctgcagttggatcctccgagaagagtggaagtcaatgtggagcaaacggcatctgaatcttgaagaagcgtgtgcctagtttatctcatagatatttcccttcacctttcaagcagcattttgctcgtttggttcgtaccatacgagcaaaaagcagctttctatttggatgtgttttacaatctaataaaatctgatctccagagctgcctttccaggcggcgaactccttgaaaaaaa

SEQ ID NO: 3631 - DNA, 610 bp, Setaria italica
  Peptide Sequence Number=SeqID_69605
tagggaagcagccgtcgtctcttcccgggaccggacgcacgcagcgcgcagcggggtaggaggcgaggtcgatcgcgaggaggagagagggggcgaagagaagagcgggacgagggggaagatgagtgaggagaggccggtgccgcggagggagagcccgtggggtttgccggagggcgacacgcggcagcccaaggcgcatcgctgcaacgaccgcgccgaggacgtcgtccaggctgtctttgaagggaatccatttaagacagttccaggtccattcaagctcttcttgcaatgcatgcgatcgaaacctgggtatgtgtaccttctcatcatttatgtgtttgatgcttttggcatatcttatctggtctgcaaatctgtgatacaatgtgaaggcctgttggatagttctaatgcattaaagctctaaattgattgataatactaatagaattagaaataggcaagctctgattgaggggaatctaaactagcatttacagactacagtgtacttaatggtaaggcgggccactttatcttgtttatatccttgctatttatttattgaggaggatatcaactagtaactgcagagatccgcagg

SEQ ID NO: 3632 - DNA, 808 bp, Setaria italica
  Peptide Sequence Number=SeqID_69606
ataaagtacaaattctacactgtcactctacttcttgtgatgattattgtaactgggaatctatttctgtggaaggttgagaagctgagccttgttgattccttctactgtgtatgtgccacgatgactaccctgggttatgttgataaatgcttctcatccaaattggggcccattttcgcaatattttgggtaatcatgagcactatcctcttggctcagttcttccagtacgtagctgagctcgcagaaaatgctcgccaaatgggtgctcatcaggaggataacaaccatggaccttgaggcagctgatctggatggcgatcatcaagtcggtgctgctgaatttgtactttacaagctaaaaaagctgggcaagatcagccaagaggagatatcttctttcctggaggagtttgacaaactcgatgtcgaccagtctggcacaatctcaacgtacgaccttactctggcacaacaaatcagtctataactgctgtacgtatctgtattagattttgctgcttgaatggttttggttgatgttgttagcattctgttgtccatatgtacactgtaatcttgtaataaatatacaaagaacctttcttgaatcaagcttgtaagaaacacctccatccctgtagctgccgtgtttctagtatatatgttaaaattgctatggtcctgtgatgctcacctggataggtgcagatttttggacttgttactattggctccagagctgtcagcaagcagcaaatctgatgcccagaaatgatacaggaataaatgttagaaataagct

SEQ ID NO: 3633 - DNA, 1410 bp, Setaria italica
  Peptide Sequence Number=SeqID_69607
ttaaaataagcacgcgacaggcacgcgcagctcacgtcggcgtcgatcttgccggcctagctcgagttgacaaaaaggcgaggccgggataaccggagacggtggatgagccgaggcttgaggccctgatggagagctagaggaggcgggcgaagagctccccttgcctgcaggatccaatccggcttacccgatctgactctcccacaaggtcctcaaacacgatcgtagcagatccaggccaagctgatggctgacgatagcattcatcaagcattcatagaggatcctcctaatgtgccaaaagagaagccatctgaaggagctaaacggtttcgacgatgcaggtcaactcccgcagatcccactgatcaaaaaccctcagagcgcggttctgcacttcaagccaaggaattattcaaggatatacggccaagcttcaggcttgtaggactcctcctatttatctacctgctattgggtgtcatcatcttttaccttttcatggatcagatatctgggaagagaactaatagagtgcttgatgccatgtactttgttattgtcacaatgacctcagttggctatggggatcttgtcccaaaaagtgacacgacaaagctgcttgcttgtgctttcgtcttcacaggcatggcggtaattgctctcttcatcagcaaagctgcagattatcttgttgagaaacaggaagtgttgttcttcaaagcaatgcacatgaatatgaagggtggtgaggccaaaatgctaagagcaatggagacaaatcggataaagtacaaattctacactgtcgctctacttcttgtgatgattattgtcactgggactctatttctgtggaaggttgagaagctgagctttgttgattccttctactgcgtatgtgccacgatcactaccctgggttatggggataaaagcttctcgtccaaattggggcgtgtttttgcgatattttggataatcatgagcactatcctcatggctcagttcttcctgtaccttgctgagctctataccgagcgacggcagaaaatgctcgccaaatgggtgcttaacaggaggataacaaccatggaccttgaggcagcggatctggatggcgaccgtcaagttggtgctgctgaatttgtactttacaagctaaaagagctgggcaagatcagccaagaggagatatcttctttcctggaggagtttgacaaactcgatgtcgaccagtctggcacaatctcaacgtacgaccttactctggcacaaaccagtcaatgactgttgtatgcatatgcatttgaatttgattttgctttgtaaagatacaaagcaacttgactcaagcctgtaagaaacaaatattgctggaagtttatctgagctttcacacagacg

SEQ ID NO: 3634 - DNA, 523 bp, Setaria italica
  Peptide Sequence Number=SeqID_69608
gtccctactctacgccaagcgctaccatcgcctgcgatttccagtgcctggccttctcgaacccgttggcgtagcgctcgaagtcgtcgacggtcatgtcgatctcctcctcggtgttcatgacgaagggccccagctgcgccacgggctccccgatgggctcgccgccgatgagcaggaaccgaagcggcctgtccgacttgttccacacctcgaggccgtcgccctggccaaggaggagcaggtggtgggcgccgacgggcgcgcaccgctcggtcccgaacacgccctcgccctccagcacgtacgcgaaggcgttccacgacgggagcacgggctgccgcacggcggcgcgcgggcgcaccgtgaagtcgaggtacatggtcggcgtccgcgtgcacaccggcgaccgcacccccatggcgtgcccggcgatcacgcgcaccgtgacgccgtccgcggacgtgcacgcgatgtccttgctctggatctcctggtacccgggctcgaccattttgttgcc

SEQ ID NO: 3635 - DNA, 387 bp, Setaria italica
  misc_feature (1)..(63): n is a, c, g, or t
  Peptide Sequence Number=SeqID_69609
nnnnnnnnnnnnnnnnnnnnnnnnnnnnnnnnnnnnnnnnnnnnnnnnnnnnnnnnnnnnnnnattgttaaaattaatttataccagatatatgtacacaaccccgatcttgggggaaagaaagaaaagcaatgatacctactagtagtaccgtatattacgatgataataggaaaaaacgaaaataatctgttgatttttttccccttcgctgtgtactctgctcgtgtttgtccctactctacgccaagcgctaccatcgcctgcgatttccagtgcctggccttctcgaacccgttggcgtagcgctcgaagtcgtcgacggtcatgtcgagaatactacctacctacggtagttacaatagaacgaaagggaccccaagacta

SEQ ID NO: 3636 - DNA, 677 bp, Setaria italica
  misc_feature (1)..(45): n is a, c, g, or t
  Peptide Sequence Number=SeqID_69610
nnnnnnnnnnnnnnnnnnnnnnnnnnnnnnnnnnnnnnnnnnnnngttctcaggaacaacgaacaaacatgactgaatttagattttccatgtgctcagcagtaacgaacaaacatgactgaacattgctactacatcctcaatatttgattgcttccttatctggggttcccatgctctggcatacatgccatgctcaagtatattttggcatcagctacccacatattctctcacgcttaaggccgcagcttgggttgggagaaccatgcgccagttcagttcagttcagttcagcatttcacatctgctccaacaatgcaaaatcaatacaaaacaagtgagaaaaaaagccaagcacttttattgatcaaacactgaagtaagcgtggctttatcaacagacaagttgtgttctaaagatccccgattcttcgactcctctccgagaagaaacttggcttgaattttactagcacggtcctgtctgtaccagctctcttctgacacatggcaaggtttctgcacaagctaaagccacatcgcataaccgactagagttcctcaaatccttcttcatcggcatcctcctctattctttcgaaatgcaaccggaagctctccatctgggcatctgaaaacctcagttgttctgcaacaaaaagcactccgccacg

SEQ ID NO: 3637 - DNA, 510 bp, Setaria italica
  Peptide Sequence Number=SeqID_69611
agcaaagccggcaggcgtccacgaggcgtacgtccagccgccgcgtcacgggcggccgggggctcgatcggccggcaccctgtggccaagccgccagagaacctgcaggcctcaggaaaaccgcacaccgcaaccgtgccggcgccagcgacaagggagccacatgaagggttcgcctcacctccactgtgccccattaaaaactgaaaggcaggggggattacttaatgggcatccacattccatttgcacctgcttttcagcgacctccttggcagtaaacgtggccggatacatgctactgttgcctagtacatgttataatgatgtgctcgtactatagcatcctcttgtccgtggctggacgctggtgttgaagaatgtactagccatgcagggccagccagtcacaggatcaggccaaacgaggacagagcacgagaggatgtgatgcggtgagcagcacatcggtggcgccgggtgcacggacatggcgccacgggagctagg

SEQ ID NO: 3638 - DNA, 264 bp, Setaria italica
  Peptide Sequence Number=SeqID_69612
ctcgtatgaatccgtacttcaaactaagcccttgctcccgttccggcggggcggcggcgccgaggactgtagccgctcgtgaccactccgtccaggcaaggatatggcggcgcctgcagagaccagaccccacgcttgccggatgccaccgccggaaacgagcttccaggcccagcctctcgtcatcgtgaggctgcgaggtgcgagctccctctgctctgtgattctctgaacagcgttgcagcctgcattcagcagaggaag

SEQ ID NO: 3639 - DNA, 2377 bp, Setaria italica
  Peptide Sequence Number=SeqID_69613
cccgtgcgcccccgcggtctccgcctcccaccccgccgcttttccaaatagaaacggccccatccatagtccaaatccgaaagacaagggtggccggatttcatccgctgcggtgcggctggtgcccgacgagcccgatcgatccccttccttcgtccccacaccaagtcaccaaccggctccatctccgaaccaaatcccctcctcccctttcccaaatcgagcaggcggcggcgggggagacctggctcggggccgacggtcccagattcaattccatccaaattctcgccgccggcgtcgctaccacggatcgacgcgtagccgcccagggtttgccgcgggttccggcatgctctagccgccgccctgccgcggtgatcctctcgtggccgggcttgccatgtcgtgggggcggttcagcaacttcaaccccttccaggggcccacccggaccgtgcggagctgcccggtggcgcctcgcaacgtggtggtcatcgacgaggacgacgatggtggcgacgatgcctcggaaccggaggttttcattattggtggcgcagctccgccaccgacgcctgcggcggcgcctgggtgccaggccaggaaagggaacggcttgtctggtaacgtgatcaccatagacgatgatgaagacgtgggggaaggtgctgggtgggataaggcaggccccagcacctcccgtgcgtcgtctgggtctccggcatcgatgacaccggggcggggttccccggggaacagatacgggttcgatagcacatcggacagtgatttgtccgaggggtgggactttgacactgatgatggtggcagctcggattgcgagattctggatgatacgtctgggacggcccgagagatgtgggagacggctgcttcaaggaagaagatgcctcatggtgtccatgagcgtgaggatggttgggctgctgcatttgaatcatgtgccaggtcggaggcacaaccatataaggattcagagggtttctttggtgcgggatgcaatctggatgagacttattttagcaccgcatggaagggtgactcacacaacgatactggtggtacaaaggagggttctgaacacgttcaaagtagtgccaacggtgtgaaggatggccaaggtccttcggtgccaaatgccaaaaaatgttctaatggaaatgttggagaaggaacagaaggcatgcaggatacaaatagcagtgcaaaggatgtccatgcagaaccccatcccgatgagaacatatttcagagttctagtgatgcttgtaagggaggtgtgcaaaataatactggcgtttcaaaggatcaccatggcccttcttcagcgcctagtgccaaggaatgttcaaatgaagaaggggttgttcctcaaaaaacttcagaagggtttcaaactcctcgcgcagatggaacctttgtctataaatttgtctctgcgaatatggtgtttcccggaaactcctcagcagatcggaaagatggaagtcctccaatgtctgtcagtactcctgataagattgatgagaaaatacctgatggtgaatattcacaaaaggatcagtcaccaccggaaccatcacatgcttcagtgattggtgaacgtgaaagacacaaagaatcaattgagtacaaacgggcagcagaggaggagtgggcttccagacagcggcagctacaaatacaggctgaggaagcaaagaaattgcgaaagagaaagaaagctgaggctcaacgattgcttgacatggagaagagacaaaaacaaagattgcaagaagtccgtgaatcacagagaaagaatgaagaagctatacagctaaaggagcagtatcggggcgtagtaagaaaggaacttgaagatctggaaaggagatattgggatatgacttcaatattgcgtgcgctaggcatccccgttgaaggtggtgaggttaaagcctataagcaagcacttctgaaattccatcctgatagggtatcaagaaatgatatgtatcaacaggtcaaagcagaggagacattcaagttcatttcacgcctgaaggagaaactgccaaggttttaagaatagcatattccaatacccagttcgcacaaaaccatctcaaacccatctcctttgtgtgtgcgtcgtagtcacatccttctccaaggcagaaatctcacctgcaggctcaagatccatagttcagaagatatttattatcctccttagaagcaactagggcttagaattcattaaactcgactactctccttgaagtggtagggattcttgttagtcgtgacccttggtttgggatcgagaattggttgtacaggtactgatagcagaacataattcctcttg

SEQ ID NO: 3640 - DNA, 1244 bp, Setaria italica
  Peptide Sequence Number=SeqID_69614
cccaactaagaaagaggttagcctcttgaatcaagagcgtattattgaaattattaaaaatactattgaggaaaagctgaggagttctaataccacaaggatattccaaactcaggcaataaacccctcggcacttactcaagctaacacgcagaaggaaaagggtactgaggtcaaaatggcatctggaatgaaatctcaaaagactcctgttagccaaatggtcagaactgatccacgtgatccatcaggaaggttgcacacttactggcacgggcaatcttcaaatcttgaaaagaatctgaccttgtttctgtaagaaatgtagtaagatcaaggagaaatccaaaagatgcttgtgatttatccagtcgtcatgagcttcttacagaagttgattctcaatgccatcccggtctgttagaggttgttaagaattgcacatatgttggactgactgatgaagttttcgctttgatacagcacaatactcgcttataccttgtcaatgttgtaaatgttagtaaagaactcatgtaccagcaagcactttgccgttttggaaacttcaatgctatacagcttagcgaaccagctcctcttcgggagctgctactgatggcactgaaggatgatgaactaatgggtgatgaaaatgatgaggagaaaatggaaattgcagaagtaaactccgagatactgaaagaaaacgccgagatgattaatgagtacttctctattcacgttgacaaagatggaaacctgaccaggcttccagttgtacttgatcagtacacccctgatatggaccatctcccagaatttgtgctgactatggcgaatgatgttacttgggatgatgaaaaagagtgcttccggacggcagctgctgctattgggaatttttacgctctccatcctcccatccttccaaatccatatgggagtggcattcagttgtacaagaaaaataaagattgcatggcaagtggtaaatgtgttgataatacagatgaagatgatattgatcaagaactacttgcggaagcagaaacagcatggtctcaacgagagtggaccattcagcatgtcttgtttccatccatgcgacttttcctaaagcccccaaagtcaatggcaacagatggaacatttgttcaggttgcttctctggagaaactttacaagatttttgagagatgttagctcacgcaagtgcaacttacgtagaggacgaagtaaca

SEQ ID NO: 3641 - DNA, 302 bp, Setaria italica
  Peptide Sequence Number=SeqID_69615
gaggagttcgagctccgcgaggtcggcacgggccggcagctcaccatggaggagtttgttgacctctgcgtcggccgctcgcccatcgtccaggagctcatgcgacgcgagaatgttgccaacgctggctcgaacaacgactcgtccacccccatccagaggtccaactccgactccagcaacggagcaacgcgacaccggcggcgtagcagctggcttcggagcatccggaacatcgctggctccatggtggtcacctcccgcgaccgccgcagcagcgacgagaaggcacgtgctacggg

SEQ ID NO: 3642 - DNA, 402 bp, Setaria italica
  Peptide Sequence Number=SeqID_69616
accaagtaccgtttcaagaaggcctcttcctcctccactagagctgtaaattctgtctcttcgtctatggcgtcaacaactgcaggatcatccatcaaatcatcttcagcgatgtgcagcacaccatccttatcctgcacaaaacatgtggcaccattctcagacatcatgtacaaaattgaatgttgcaacaagaagttcgacaacagccgactaaccttgactgcgacgaataaaagaggatcaactggtgtgtaaatcatatagtgagcaccatcctgcaaatacaaagtgtcagcaatcacaagcgtgccaatgaaggcccaagattggatatttatcaattacttatttggggacttgtacgtcaactgtgaagactcacgatagcagtagcagcat

SEQ ID NO: 3643 - DNA, 1407 bp, Setaria italica
  misc_feature (1)..(66): n is a, c, g, or t
  Peptide Sequence Number=SeqID_69617
nnnnnnnnnnnnnnnnnnnnnnnnnnnnnnnnnnnnnnnnnnnnnnnnnnnnnnnnnnnnnnnnnnatttctagaatagattggggcaattttatttggtactcccaaattataggtcgtatgcatacaaacacctatgaattttctagatgcatacaaacaccttggaacagagggagcaattcagtttatcagcggaccagcaatagctttggttgtcctaatcatttgattaggaaaaaaggactccttgcagctccttcagtaatctatactacactagttgacacagacgacgattaacagcagcagcggtatgtgacgattaacattacatcatcatccatcctagggttggcagctcaaatgccctgcgctgcacatctaatcatactggtatatttcaccagcttcttcttcttcattctactgcttgatggagtggattcaggtctcctcatcctcctcttcctatacaagtaccccctccttgccattcatcacctttcaccaagtaccgtttcaagaagggcctcttcctcctccactagagctgtaaattctgtctcttcgtctatggcgtcaacaactgcaggatcatccatcaaatcatcttcagcgatgtgcagcacaccatccttatccttgactgcgacgaataaaagaggatcaactggtgtgtaaatcatatagtgagcaccatccaaattgaagcagcaaatctctacaccctcgaaaggtaccccgtcgccaccatcaccggaatcatgaaactcttgaatggcttcttcagggaagcagaagccaccccttgctgtataacagaatccgctttcgacaaagtgcatatgcactctcgcaagggcataggcaacggaaggaatgatttgcttgagttggtcgtcgtcaacagctatccatccactgaaatttgtgctcttgaggacctgcacaggcatgtcaacggggcagagaagcatgcagtcgtggtcctgggagctccggaagactctcctgattatgcactccaaggggcggttggtggcgtcatcgatgatggtgacgatgcgcttggatgctgcggcgatgcacctgcccttgtcatccagcacgaagccggccggcggcttgggcatggcggcggcccgggtgccaccagcgaacctccccacctcatcctcctggtcgtcgtcctcgtcgtcgtcgtagtccagaggaggggctctgggcggacggcgggcgggccggtcgacccgcttgttgttcctgggaggggggcgcgggcgggcgcggtgttgctgttgctggcggggcggcgcggcgcggacggagacggcgcggcgcgcgacatggggcaggggaggcttggtcccctgcttgcacaggaagaccaccgggggcacgaga

SEQ ID NO: 3644 - DNA, 458 bp, Setaria italica
  Peptide Sequence Number=SeqID_69618
accccgtcgccaccatcaccggaatctggaatctttaaatgagataccaaagaggatgttgcaaatggtagttcatactagtaatcaaataggtaattcatactagtaagcaaataggtagtttgtgacattgtctacaaacattttgtactgacaagatagatattgtcaaaaccttggcactgactctctcaaaagcaaatacagttgtttaatgaatttggctagatgataaggtacgttgcccaaaacaaaatgcacgcctgtagttttggttaccatgaaactcttgaatggcttcttcagggaagcagaagccaccccttgctgtataacagaatctgaaacatagagcaagatgcttgatattttggttacagcagcaaggtactggaccatttttttgcatttctgagtccttacccgctttcgacaaagtgcatattagacaattaatt

SEQ ID NO: 3645 - DNA, 626 bp, Setaria italica
  Peptide Sequence Number=SeqID_69619
aatcctcgcggagctctgaccgcctccgctgccgccgctgacatttgtctcccccagccaaagaggaccgttgctgctggatcgccgtttatctacagcactaccgttgctccctccctccctctgttctcagggtctctttgctctgcctctgtccgtattggtctcacgatcttggagagctcacggccgtttcttcaggcccagcgaaggttccatctcgcacttactctgacaaattcttgagccccatcggttgcacttgcaccatcaggagatggccgaggtgaagccggaggacatggtccatcacatgcccatggaccagctccagggcttcgagtactgcatcgactccaatccttcctggggggaagggattgctttgggtttccagcactacatactgtccctgggcactgctgtcatgatccccacaatgctggttccgctcatgggtggaaacgatcatgataaggccaaggtggttcaaactctgctgtttgtcactgggatcaagacgctgctccagacgctatttggcactcgccttcctacaatcatgggaggttcatatgcatatgtggttccagtcctctccataatccgcgacccctcgatcgcac

SEQ ID NO: 3646 - DNA, 386 bp, Setaria italica
  Peptide Sequence Number=SeqID_69620
agctcacgtacaccaccgaccgcggcggctgcgcgtcgagccacgccctgtaattcccctgttcttccgctgcctcccgaaggttcaacggcataagtggccccacggcgaacaccggcgggaggctggcgacaacggagccgcccagcagagcagcgacggcctccggctccatggcctcgaaggcgttgaccaggaggccgtcggctgccacgagcgcccggccgttcgcgacgaactgccgggtgaagatgtcgtcgggatcgtgaagcgcctgcggaatggaggatctggggacgcggcacacgccggggacgtcgacgtcgccgacgctgtgtccggcgccgccgttggcgtcgaggtaggtggggaataggctttgaagg

SEQ ID NO: 3647 - DNA, 886 bp, Setaria italica
  Peptide Sequence Number=SeqID_69621
gttttctccttcagatactcaaaccgtgcttttctgtcaaccggatatatttgaaggtccatgactctgagatcaacacctggaggagggccctgaacatatgcagtaactttggatggctgtttttcaagcttgaatgctcctttaatttcataccattgatccccatcagcttccacttgcccgccattaacccattggttatccacggcaagacaaacatttacatggtgacgtccatgtcctccagaaccagctcgtacccaagcagatactctgtaagtgacatgcaaccttagcttgtcagttattacctgagaaggacccatccaaacttctgtacggtttgtagcaaggatataacgaccactgatatgtttctgacttgcacggtccttcaagatagaagatagcatatggggtccttcagtctggatactcaatcgacatgaacccatgggactccacccagcaagcccacgagtgaaagcactattatgtagtagattagctccataaacaacattctcaacttttgggcatggtgcagcctcgagctttcttgctggagataagacaagaccatctacaagaatgtcaattcctgcaggaggcccttctataaaaataacagctttggtaaagggagcatgaaggaggaaccttcctttcaaatgtgtccattgcttatcagaagcttggttctttgcaaggcctacatatctgtcacgaccatattcttgtacccacaaagtagcacgaacttcagtatcatttgcactcccaaatattcgaacagcagaactaatctcataaagaactttccgctgaaccctgccagtgatttcttgctggataccattccaattgtggacccttccagttg

SEQ ID NO: 3648 - DNA, 257 bp, Setaria italica
  Peptide Sequence Number=SeqID_69622
tttctctgtgatactccctatacgagcttcccccgcaaaagacaaaacacccacaacaaccaccagtccttgattattccatggctctttccggcacgttcaagaacgattgccagtaacacgcacatactctgacgttaaccacatatctaagtatctaacacacccagaacctgagaacctcatcaagatcacccaaacaaaggatccagcaacaaaaacatgctctatgacgacggtgcaatggacggcgggtg

SEQ ID NO: 3649 - DNA, 333 bp, Setaria italica
  misc_feature (96)..(96): n is a, c, g, or t
  Peptide Sequence Number=SeqID_69623
gccggaactggagcagaggtgggtggcgccgttgaggccgagctcgcaggccagggtggcgcagtggaagcggagcagctcgttgccgtcggcggngcagcgcgggtgcttcgtcgtcttggccgccggctgctgctgctgctgggccgccgccttggccttcacggcgtcgcggtactcctcgaagcgggccagcgtccgggccgtgttgtgcaccttgaggatgcgctccaccttgcacacggggctctgcttcttgagccagctcgactggaagatgatctcgatgatgttccggctcgtgtcatccgcgccaagctcgctcactgcgtg

SEQ ID NO: 3650 - DNA, 660 bp, Setaria italica
  Peptide Sequence Number=SeqID_69624
aaagctgaatgctactagctgtaagactcaactttggagcttaatgcactagcttatgtggcaattttaagcaaggctgaaaatttccctcggtcaagtaggtgctaatcatttagatcttactgttggattagcggaaactttttctatgttgctaacagactagcatggttagtgttacttaagtttgaaatggcatagttagctaaccttttattctatttctgtctaaccttgcaggttgggttaatcgctttgccaatgctggtgatactgccgtggttgttgctgagaacacagcagttaaggtacatttagtctatttgtttatggttgtgcattttctttattttcaatagcaagatcaccttgtggcatgggccacatggctgttattttattatcaacagctgctgtgttacactatattgtatactatgtacttgactgttatctgttaagtctgagatgttgatgcattgcatcatctaaaattcttgagagcaccatattattatctgaactcagtaaagcagttagtggcatattgagttgcataggaaattatgagatgcagttttccccattaatttgaagaataagtgagtatcaacattgaaaacgtgatacgatgtcagcttgaatttacttaatcctagt

SEQ ID NO: 3651 - DNA, 1155 bp, Setaria italica
  Peptide Sequence Number=SeqID_69625
ctcgctttcccgtctccccaaaccccatcgcgcggccgcaggcccgcagcagcagcaacctccaccgccaccgccgctgccgccggagggccgggccgtgggggggctgagatgaaggaggtggtgctccacgtgtacgacgtgaccaacagcgactccgagaagacgaacaacaccatcctccagatcaaccgcatcttcaaggaccgcatcggcctcggcggcatcttccacagcgccatccaggtctatggcgaggatgagtggtcgttcgggttctgcgagaccggcagcggcgtcttcagctgccccatcgggaagaaccccatgtacacgtaccgggagcgcatcgtgctcggggagacggagtgcggcatcgccgccgtgaaccggatcctgcgggagctcagccgcgagtggccgggccactcctacgacctcctctccaggaactgcaaccatttctgcgacgtgctctgcgagaggctcggcgtccccaagctcccaggttgggttaatcgctttgccaatgctggtgatactgccgtggttgttgctgagaacacagcagttaagttcaggcaggctaaaacagaaattgtgaatgccagtagagtagcatacagatttatggcaggtctggcttcaaaaaatcaagcctcgccggagtctccaggtaacaaccaaaacagaggcagccctatccagggagcttggttcaagaacatcatctcagctggagctaagccatcttcgagtggatcaactccctcgcaggacactgacgatggatcccctctgtggcgccaaaattcaacagaacaatcaacgcgccaaaattcaacagaacaatcgacacggttgtagccacttttcccggcagaccaaccgactgttgaattgaatctgtagtgtaacattagctaatatttgttcaaaacctgttgttaaattggatcagtagtgtgacagttgctgatatttgttcaaaaccgctatttgcccgtgaatctatatattctccccagcattgtttgaacgaacatcagccacttttcccggcagaccaaccgactgttgaattgaatctgtagtggtaaacagttagctaatatttgttcaaaaccgctatttgcccgtgaatctatatattct

SEQ ID NO: 3652 - DNA, 965 bp, Setaria italica
  Peptide Sequence Number=SeqID_69626
acgtaaaacctaaacccaaaggacgaatagccggcgccgcgggggcgggggcggagccggggccggggcgaccgccggatcgacgcggccatcgaccacttcgccgccatgggctacgccgcgcgcgacatccgcgacgccatcgctgatcttctcaaggtatacggcggcccttccgcgtggcccttgctggaggaaggctcctaccaagtcgtccaagacaagctctttgagaaggaggacgaggagaagcagaagcaggagcaggagcaggagcaggaccagaccctgctgctggagggccagcaagtggaggaggaggaggaggagcctcctcagcaccaagaaccagcagtagacgaggcaccaccagaaaacaacaagttaatcttactacatgatgaggtaccagttgagactgagtctgcagacgaagtggaagatcctatgttcattgaaccatccccccttgaagccatagtgccacttactgcggctgtagggattggttgcaaaaggaaaccatgctatggatggcttactgagtctgatgatgaggaacagcccaccattcaacatcatgaggtgcatattccaacttcaggaggaggcttgctttgtaaaagaaatcaagtccagtagatgcggcagatttcaacctgacaaagccagtgatgtgctgcctgaagaagtgacttactgaagccttgcacctgagcttagtatagtctagtagtagtagtagtatatcgatatagaagagaggtaactgtgataagcgctaccttcaattgggagactaacggagcttcgccgattgaataagcaccaacttagattgtagtatcatgattttagaagcaagaggtgatgtttaaactaggtggtggaatgctcgcgtttttgaacacttccatgatcagagaacgattgcagtgctggtagtgtggtactaaggatgactt

SEQ ID NO: 3653 - DNA, 779 bp, Setaria italica
  Peptide Sequence Number=SeqID_69627
tgaaagctttgccgctgttcaattcaatacgctgatgggttttggaaatgatgattgtagttataatgagtgtgtggatgctgctgatatggtagcgatgggcatttctcccccagataaaacaaggggcgtggatgatgctacttgcagggctccagttgattatactagcttttaccttcaaaatagaccatcagattcagagaatgagtgcagctctgcctcttgcatggtgacaggatatgaatgtactgataatcaagaactaccagtaggtcttctgaatttaatggatattggttcaccaggcaattcagatgacttatccagaccatcactgaacacaaaaaacatcgtgcttgtgctggatttggatgaaacccttgttcattcaaagctacaaccctgtgataattttgacttcacccttcaagttttctttaatatggaagatcatacagtatacgtgaggcagaggcctcacctcgagatgttcctcaaccgagttgctcagatgtttgaggttgtcgttttcacagctagtgagagtgtttatgctgagcctctactagataaactcgatccagatcggaaactgatttcacgccgtttttaccgtgaatcgtgtacattttccaatggtagctacacaaaggacctaacaattttcggagttgacttggcaaaagttgtgatagttgacaatactccacaggtcttccagctgcaggtcgacaacggcatacccataaagagctggtttgatgacccccccttgt

SEQ ID NO: 3654 - DNA, 1114 bp, Setaria italica
  Peptide Sequence Number=SeqID_69628
ccggagatcggctccatctcctccatggtcgcctcctccgccgcctccgccgcggcggccgccgctgacttcacccgctgggccgagaccttcagcaccgagaaggccgacgccgccaaggctgccctagcctccgccgccaccattgccacctcgtccgcctgcgcggcggcttccgcttcctccacggccgcctcctcagcctacgcggcagcatccgacctcaccctcatcgcaaaggaggagttggaatgggtaaagaaggagtactccactcacgaacagatggtgtttggcaagatcaaagagggcgtcatcatggcgataatgcatccaggcattgctgcaggctctgcaacccttgcagggattgtgctgttcaaaaggccaaggagctaccttattcagcgagttcggcgcatgtttgttagcaaggagaccctactttctggcatacaagctgaagtgaatcacatgcggcaaactgtgaatcttgtgtccaatgaaagccaaaaattgatggatagagcagcaaccgcagagaaaagatttcagaaaggatggaatacactcagggaagaagggcgtgctattcaacatgagttgaacgagattagtgatattgaacaacaggcagtaggtctgaagggcattcttgatcagcttcccagagcacatgcatccgaatttcaatcagagatatctggcctagcttctcaggttaagaaggagaagcgagtgcttaacgccgcgctctcaaagattgtaaattacggtgtccccatctaactgcctctctagtttgttctgaggaagaggagtcccatgtcagtggtgaatgttatactgcccacttggttttggaggaagggggaaaaaataagttttgtctctcgcgcagacctgtaaatgtgctgccgccaaatgttgcggaaccttagtaacaggaacacattttgtaatgttttgcctatcgacatgttcacatccatgatccatcagatggcttgtgaatttttgttttctacatgatgtcacatttccggtggatgacagaaaaaaacgataaatgctttgttgcttcgtccgtgttgtggaatcaaatctttgaact

SEQ ID NO: 3655 - DNA, 279 bp, Setaria italica
  Peptide Sequence Number=SeqID_69629
gcgggaaggtgaagtggtcggggggcgaggggcagggagagcatgagtgccaggagccgcgcggcgtggcgcggtgggagggcggagaggagcgggttgaagagcgccgggtgcgggtccgggtggtgcgccaggaggcgggcggcgtaggggaagtgggagtcggggtcgcgggcgaggaaggagaggaggcggcgcgcgtgggaagggtgggaggcgaggccgaggcggacgagctgcgagtggtgctgccgcagctcggcgatggtggttagcggg

SEQ ID NO: 3656 - DNA, 441 bp, Setaria italica
  Peptide Sequence Number=SeqID_69630
gccattgctgttggggggttttttggtatggcttcttcccacttcctgtcacaacttcataaatagtgggaagattactgatcatcgtaaagagccttctcctgcaattcaaattcagatgtaatggccaacatcaaatttcgcaataaccagtaacttgcaagcacaacaatgtactaccttagaaagcaagttttcttcacaaacaataatttaaacatgatcatgcaaataaaccagaatctagtattggcacttcgactttggaaaatgaaaaacagctgaaaggtggtcccaattcttcactgctatgaaagaattaagttgatggcaatgatggtggtcttcatctcgtgcgatctttcatagatagatctgtgcaattgtgcatacatttgcatcctagtatggatcatatattcatatggatatataccacat

SEQ ID NO: 3657 - DNA, 964 bp, Setaria italica
  Peptide Sequence Number=SeqID_69631
ttttttttttttttaggtactaaagaaaatgggtcattacccactactaccccacttcgttactctcaaggagagtgttggcaatccattaacataacacgtctagtgcactaggagagcagagcagcagcggttactacagtactaacaactacgtccaatgtttagatgcgactaatacaactgccggggccactggcggtccggcgctgccgaaacagcaggaagcaacacaaggatcccccggcacaagctctaccaatcctaactacatcagccaggagcgtcccacgctcactccctgctcctcttgttactgcaagccgggcacttgtactgcttgatgtgctctgccttggcaggagtgatgcgcacacagtcgccatggtaccagttctcgcaaatgtcacagcctatccagaagtcaccattattagaatagctccctccacatgtgccgcacaggtaagcttgatccttgtcacctccctcttctttgagggtctgttcctcctgctttggcacgggctgcttcgctggcttgctgtttgaattaggtttcttggatggtttagagcccgacttgcttttgccattgctgttgggggtttttgatggcttcttcccacttcctgtcacaacttcataaatagtgggaagattactgatcatcgtaaagagccttctcctggcatctttatcaaatccaaagcgagccccaaagtaaaatgccacagcaattaaccatgcatcactgtgtacagcaaccagcatgagccaatctttctcagccattccatcacgagcaaagtttattcccagtgctggctctggaagttcaggaggaacttcctcagctggaagggtcacttcccaggtttcattagatagtccatagaggcacaagttctccttttctgggtcgcacatcttgtagaacttctccacatcggtggtgagcgcc

SEQ ID NO: 3658 - DNA, 346 bp, Setaria italica
  Peptide Sequence Number=SeqID_69632
gaagagtgacgcagcactgataaaggtagctgggacaacaatccatttgcattcagcccagagtatcactgggagcgtaaggtgccagagaacaaggaatctggaagtgagtctggtgtatgacacaggaataggaatcccaatgagctgttcgcacacgccgattccttcaagaaaacaagacagtttagactccatgatgccccgcttctgttggtcgagatctagcatctgaagactttgtgagatgaactcaatgatgcaacggggtcggtgtttggatgccagaacaacattgaggtcatcttcggcgagcaagccctcaaggtccgttttcacgtcggag

SEQ ID NO: 3659 - DNA, 1075 bp, Setaria italica
  misc_feature (1)..(49): n is a, c, g, or t
  Peptide Sequence Number=SeqID_69633
nnnnnnnnnnnnnnnnnnnnnnnnnnnnnnnnnnnnnnnnnnnnnnnnntttttttttttttttttttaagtaagagattggtaatcacatatatcaggttaatataaacatatcatactatctatgtacacaggtaggatatacagacagaataatctgctctactcacagaaccacactacactgcagcagttcctcacttcattctaattcagcccagctcatctcatctcaagaccagtcccagattttcccccaagaaaaccatacactcatgagtggattattgtacatatacaggaggtagtgatgtagacatacggtaccaggaagaaactggggcattggtatcatcggattgcctcgattgcttgcagtgttgtcacccaattcagtagtaattcacagctgatctgcgtgctcaatcaatcttggcttcttctcttttggagctaggccacccattgtctgtgcgccggctgcccccacggcccttggccttgccaactagccgtgtgtgaaccgagctctgcaccgctatcacatccttgatgccgtcatggagctgcttgcatagagcatcaagagctagcatggggaacggctcctcaataagaacaccaacttcctcaatgcagaagagtgacgcagcactgataaaggtagctgggacaacaatccatttgcattcagcccagagtatcactgggagcgtaaggtgccagagaacaaggaatctggaagtgagtctggtgtatgacacaggaataggaatcccaatgagctgttcgcacacgccgattccatgatgccccgcttctgttggtcgagatctagcatctgaagactttgtgagatgaactcaatgatgcaacggggtcggtgtttggatgccagaacaacattgaggtcatcttcggcgagcaagccctcaaggtccgttttcacgtcggagtcgcaaagtatgtgacacttgagcgcgacggggaaggcgaggatgtagttgaggagcgcgcgcctgagcggctcgtcgtcggcggctgcagcaggaggaggtggaaggatggcattacc

SEQ ID NO: 3660 - DNA, 487 bp, Setaria italica
  Peptide Sequence Number=SeqID_69634
tgcagaccctgccaagctccagcacagggagaaagcttggttcgcaagctctgtaaagtcaagattgcagtacttaggacctcagccaggtattcctgttgtagatgaggagcaagctaaggatgttcatcttgaaccatcagctggcccagtagatgccttttgccttcttgttcttgatccagaaaaggttgattatttgaacctaaaaagcaaccaaaggttgatattcacaagaaggcaaaaggaaaatggctccagtgattggatggctgaaaaagttagcccgtaatctgctgttagaagtttgtttgcgaacttctcgaagtaagaaaaaaaactaatcatgattcctttttttatttgcgagtgtcatttatacatttgagatcttttggatgctcatacatttgagatatcaggaatgctttgttaaaatcatggtgatttgttatttattatacctgaacatacaggtagaatgtaa

SEQ ID NO: 3661 - DNA, 509 bp, Setaria italica
  Peptide Sequence Number=SeqID_69635
cgttccaattaatttattcgattgttcttcgtcatcatctctgtttggtactacattacattggtaccttcaggggttcatcatctggggtactgcccccgttttcagcagcatttaaagagtctgagatcaacgggtttgactcactctccttcccctgaatgacttgcggagagacttctgcaggtttttgctgggtctctctagtgcagaagtatgaatacaaaaccatcccaatcacagcaattaggattcccagtatatttctccagctaaatggatcatgaagcagtacatagccaaaggtgagaaccaagcatgttttcaaatgcccaaggacttggtaagttacaggagatgtcttcccaatcacaaggaaggtgctgaagtttactgagactgaaatcaggcatgacagcacaatgaaaaacagaacttgaagtaagtagtaaatacgaaaagacaaaagaacaattttaggttaagtacaaaaataccaatacaaagga

SEQ ID NO: 3662 - DNA, 910 bp, Setaria italica
  Peptide Sequence Number=SeqID_69636
tgaaatcaggcatgacagcacaatgaaaaacagaacttgagtagtgtaatcgaaagcaaagacattttggttagtcaaaaatccatcaaggaatggaccaacaaggaacaaggtcaatgcttggtacgggcatgattgatacagaagctgggttgaagacaccttgaacttcttctgtattgtatttgtcatctgatagcttgttaaggaatcaatatatgcatcacagaaatatgcacatcaccacattaaaatgaatgtaacgatgaacgatgagtggatgtcaaccaccatagcatggcacaaagctaatcttacaatcatcaaaatgataatgctaaacaagacacagtgcataaaatgtttgaaattttatgttcaaccagtatactaaataatatactagaggaagaagtagcttctcttgtttaacattaggactttacctttctgtaatattaacagcctcaaaatatgttgcaagatttacgtgaagtttgcattttgcaaatgctttgatgacaatgaaaggatacaatttgagcaatacaggttgtgatgattgccagcagggacagtacagatcccacagtgttgagttgcaaatcagtcacagttgcgacaccaacaccaagaaggagcacgctaagtgagagtttgatattccggctaaatttcttcctgaagaaaagggtctccaatataacagtacagggaataatagccagctttgtcatctgatagaaaccaacagaattgaaacctagacttaagttgagaagtccaattgagatgccattgagcactccaaatcccatgacagtcttgcatcgaaaggtttgtgctcaaagagcttcatacataacgccacatggagagagcagaacgtaaccaggagatgccagctcgt

SEQ ID NO: 3663 - DNA, 1701 bp, Setaria italica
  misc_feature (1)..(21): n is a, c, g, or t
  Peptide Sequence Number=SeqID_69637
nnnnnnnnnnnnnnnnnnnnnaaaaaagttaattttaccgatctcagcataaatcatctaaaagaactctgcggaccccaactctttggtagcacaaaagaatgtaaactactttctgtatcatgtccagctgcaaagttacagcatgtagcgcattcattcagatcaatcgtctggaatagaggaagcaatagtatcctctcactagtgagatccatttaccaacagtacatataatataacccagacaaaaaatgccaaaaatgcaacaggaacagggttgccttccaaccctggtatctgcctactaaactgaattctgtataataccatacactaacgacagagcaatcttcacgcccttgagtacttcgagctccacattggtaccttcaggggttcatcatctggggtactgcccccgttttcagcagcatttaaagagtctgagatcaacgggtttgactcactctccttcccctgaatgacttgcggagagacttctgcaggtttttgctgggtctctctagtgcagaagtatgaatacaaaaccatcccaatcacagcaattaggattcccagtatatttctccagctaaatggatcatgaagcagtacatagccaaaggtgagaaccaagcatgttttcaaatgcccaaggacttggtaagttacaggagatgtcttcccaatcacaaggaaggtgctgaagtttactgagactgaaatcaggcatgacagcacaatgaaaaacagaacttgagtagtgtaatcgaaagcaaagacattttggttagtcaaaaatccatcaaggaatggaccaacaaggaacaaggtcaatgcttggtacgggcatgattgatacagaagctgggttgaagacaccttgaacttcttctgtattgtatttgtcataatttgagcaatacaggttgtgatgattgccagcagggacagtacagatcccacagtgttgagttgcaaatcagtcacagttgcgacaccaacaccaagaaggagcacgctaagtgagagtttgatattccggctaaatttcttcctgaagaaaagggtctccaatataacagtacagggaataatagccagctttgtcatctgatagaaaccaacagaattgaaacctagacttaagttgagaagtccaattgagatgccattgagcactccaaatcccatgacagttcttgcatcgaaaggtttgtgctcaaagagcttcatacataacgccacatggagagagcagaacgtaaccaggagatgccagctcgtcaaagtagtggcaaagttgaagccgagggagctcatgagggccttgttgcagatgacgatggagaccgaggacaccaccgacaggctcagcgcccccaccgtccccagctggaacttctcccccgcaccccatctccaccgccgcaccaggaaaacaagtcggaggagaaccagaaactccccggcgcaaccaaccgaaccacgacgccgaccagcacctctttgctcccaataaacagaattcgggcgggcgaagctggatctgggagacaagctcgtgaatctgagagcagaactggcaatggtgcggggacctgagaggcaagcagcgaccggatcggccgggctttggctccgcggctgcttgagctgctgcggttctcggcctcctctcctccctcccctccgctc

SEQ ID NO: 3664 - DNA, 259 bp, Setaria italica
  Peptide Sequence Number=SeqID_69638
cgccggcgccgcggccactagggactcgcacggcgcgtcgcgcccagctactgcggcaaagtcagcggagcagactaccaccggccgctcgtctaatcaggcgcctctgccggtgctgtcagctggttcccttccgtctttcggcttggctttcggggattggggatccggcacatcaccgccggaaagggctagccagccatggcggcgaggcagccggcgccgtcgtccgcctccgcgcagcccgcggcggggctct

SEQ ID NO: 3665 - DNA, 647 bp, Setaria italica
  Peptide Sequence Number=SeqID_69639
ccttatgtggttcttcatgtaaccaacccctgtcggtatcatggaggctgccatttttggttttcataacctgtctcttggatataaatgggaaggttcccataggcttcattcagatactccaccaaaagttgcaatccttcgggatcagccggaatagatgttgggcggccctgcagtaaaaatgaaaagtctgtatttatcacagctttgaaaaagtttccaaatagtactcatttaaaaaagaggacaccttcagtgttttctttctagtctctcgtgttggatatctagcttcatagcataatatctgaaacaggtgaagtcattaatgtttcgaatagttgttgatgagtaactttacctgaccaattggcggatcaattcttgaacctgcttgagagaatggtttcgttaaatgcaccacttggcttgacgatttcataacaatacaagtatgtttcagaagcatcagactccactatgtatgtgaacaaaaaatcctagggatataacagattgtgagcaatcctgtattgatgaacaaattgatttacctctacactcaacagagatgtcaagtgcgaagtcgtgaatgcctttttctaaagggtggtcgttgacatacaaagaataatagtagttta

SEQ ID NO: 3666 - DNA, 473 bp, Setaria italica
  Peptide Sequence Number=SeqID_69640
gcgaagtagcctttgacattggctccgttccttagtgcagtcaatgtgctccttatgtggttcttcatgtaaccaaccctgtcggtatcatggaggctgccatttttggtttcataacctgtctcttggatataaatgggaaggttcccataggcttcattcagatactccaccaaaagttgcaatccttcgggatcagccggaatagatgttggcggcccttcagtgtttttcttttctagtctctcgtgttggatatctagcttcatagcataatatctgaaacaggtgaagtcattaatgtttcgaatagttgttgatgagtaactttacctgaccaattggcggatcaattcttgaacctctacactcaacagagatgtcaagtgcgaagtcgtgaatgcctttttctaaagggtggtcgttgacatacaaagaataatagtagtttattccaatgaaatctagagtat

SEQ ID NO: 3667 - DNA, 560 bp, Setaria italica
  Peptide Sequence Number=SeqID_69641
ctacacatgactcattgctgagcgtgtgatcctgcaccgtcgagctcgttctcttcactgatctggatctccttggttcttgaggaactcggagtaccagcgagcagagagcctggcttgccttggaagcgcctcgtcctcgaagtcgacgcggtacaggccgtattgcgacctgaatcctgacccgaactcgaacatgtccgtgaaggaccacgcgaagtagcctttgacattggctccgttccttagtgcagtcaatgtgctccttatgtggttcttcatgtaaccaaccctgtcggtatcatggaggctgccatttttggtttcataacctgtctcttggatataaatgggaaggttcccataggcttcattcagatactccaccaaaagttgcaatccttcgggatcagccggaatagatgttgggcggccctagaccaattggcggatcaattcttgaacctgcttgagagaatggtttcgttaaatgcaccacttggctctacactcaacagagatgtcaagtgcgaagtcgtgaatgcctttttctaaagggt

SEQ ID NO: 3668 - DNA, 1181 bp, Setaria italica
  misc_feature (1172)..(1181): n is a, c, g, or t
  Peptide Sequence Number=SeqID_69642
cacgcgctcgtccgcgtccaggcgcgtgcccgcgcctgccgcgcaattcgctcgcagcaggcccctgctcatccggatccgccgacgccggagaagtacgatcatgctggtgcccccaggcacggccgttctggttctctaaaggggagctcatcgaagacaccgggcagtgagaggctgggcagggagaggtcggaatcttgcgggaggaactggctggaccggtgggtggaggagaggttcatggacgacgagaagaacgcaaagattctcgaggtggacaacggcaagccagggcggcacgcttccaagaggcgcggcggcggcggcaaccatcaccattcaccgtgctcgacgatgacgtctgaccagaacagccggagctacgcgaccatgccggagtcgccgtccaaggactccacgacggcgcaacagtccgtgccgagcccgccgtcggtgagcatgggcgaggccctgagcccgctgcgcctgcccgtggacattgccgagctctgcgacagcccgcagttcttctcggcgacgtcgcggccggggagctcgcggcggggcccgttcacgccgaccaagagcgagtgctcccgcagcctcttcgggggctactccgactaccccaactacatggccaacaccgagtcgttccgcgccaaggcgcgctcccagagcgcgcccaagcagaggccgcaatacgagaagtccagctcccttcgcaaggcgtcggcggcgaacgccttcgcgacggggccgtacgcgccgacggcggccgcagcgcagaggtcggcggcctcgctgcacgccaagttcaccaacaaggcgtacccgggctccggcaggttggatcgactcggcatgcccgtgaagtactgatcgtctcatctgatcctaccaaagttgcttcaggatagagtggtgttgctccttgatcgatcagtgtctgaaagtagggacgatgaagtgaatctagtagtggtcgttaggtgctattaccgtcaacagttttccgtttcttgctcgagtagccaagtgtaagttggtactagctgcctgtaatactatgtgtggtttaactgtttaactgctaacaactcccgtctgcctttccgttatatacagtatgtgctgtcaatctaaggttaaaaaaaaaaaaaaaaaannnnnnnnnn

SEQ ID NO: 3669 - DNA, 496 bp, Setaria italica
  Peptide Sequence Number=SeqID_69643
gactaggagcagtggagaagaaaaggggctattgctgggtctaatgatccctttgtcaagccactcttggatctgtttctctatttcatctttgagagttggtgggtatctgtaaggcctgataaagacaggtttagctccaggaactaatggtatagagtgatcaaaggacctgggagggggcaagccttccacaggagcaaagactacttcaaattcagagagtaatgcagcaagttgtggagggaggtcttagatcttgggagtcttgctgagaggaagctaaagggcagacctgaaccatgagagtatcaggatcagaggaggaaatgccatgcaacacaactgcagaaccttggtatggaatggacatccatttaagtttccagtgaaccttcattggactaaacctctcgagccaatccattcccaatatgagatcatagtggtctagagggatgattttgattattctagtaagtaaattaaaaagtaa

SEQ ID NO: 3670 - DNA, 1847 bp, Setaria italica
  Peptide Sequence Number=SeqID_69644
cttcaactactggctgatgacaagtggcaagtcaaactgtcaaagtatttttttgctaagaggcaaatttcttatctgggtcgcattgttagttcagagggtatttctaccgacaacagcaagatcacttcaattacaaattggccaacaccaactaatgccaaagaattgagaagtttcttaggccttgcaggctattacaggaagttcgtcagacattttgcaaccattgctaagcccttaacttcattgctcaagaaacacaccattttggtgtggacttcactacatcaagatgccttcgatgctctcaagaatgcacttagcacagctcctgtcctggcagcaccagacttttctaaaccattttgcttggaaactgatgcttgtgcttataaaattggagcagttcttgtttagaatgggcacccattagcatatatcagcaaaccacttgggcccaaaacagctggcttatctacatatgagaaagaatacctggcaatcttgatggtagtagaatagtggaggtcttacctgcagcatggagaatttgtgatctacactgaccaaagaagcctgatacacttgtctaatcaaagattgggtactccatggcagcaaaaaaatttaccaaactactgggtttgcagtacaaaatagtgtataagcaaggtgcttccaatagggtggctgatgccttgtctagaaggccacattctatccctcaactgtgtgttgtttccatttgtgaaccatcatggacttcttctgttatacaaggctactccaatgacagttacacacaagacattcttactaaacttgctatctccaaggattttgtgactaacttcactttgcaagatggagttctcaagttcaagggaaggttgtggattggcaataaccctccccttcaattgcaaatcttgtctgctctccattgtgctcctgttggtggtcattctaggttcccagtatacaggcgtatcaaacagttgtttgcttggaagaatatgaaagcagctgtcaaagagtatgtgtcacactgccacatttgtcagcaagctaagcctgatagatccaagtatgctggcctcctgcaacctctcccagtcccttcttcagcatggcaagccattactatggattttgtagaaggacttcctccatctccaaaacaaaaactgcatattggtggtgatggacaaattcactaaatatggtcacttcattcctcttgcacaccccttcactgctgctattatggcaaggactttctttgacaacatatacaagctccatggcctgccagactctattgtttcaaaccgtgataagatctttacaagcaacttctggcaagagctcttcaaacttgtcaatgtttctctcaacatgagcgctagttatcatccgcagatagaaggtcaaacagaaagagtgaatcaatgactggaaaccttcctcaggtgttatgctcatgcctgtccatcaaagtggttagactggctgagccacgcggggttctggtacaacacttcttcccattcagctctcgattgttcaccatttgaggcactatatggttacactccaaaaactttgggtatccttccttcatcacaccagcaagctcttgacctcatctcctggatggaagacaagaagctcatgtatgctctcttgcaacaacatttgcatcgggctcaacaacgcatgaaacatcaagttgacaaaaacaggcaagagcgtacattccaagtgggtgattctgtatttctaaagctacagccatatgtgcaatcatcataagcacccagtgaaagaacgaaaccatcatt

SEQ ID NO: 3671 - DNA, 1464 bp, Setaria italica
  Peptide Sequence Number=SeqID_69645
cctccgtctggctctcctgaatggcaaacgccagacctgtttaccaagttcagccatgtttacgaccttggctttccgccgaacagtgactgatatggcctcgtattcatcccggcttccaccttcaagaaatgcacctgcaattcggcctttattcacccaatatgcaccaaaccttgggctgctgcttgtgaagtctccaaagtgaaccacttccccaacattatccccatagaactgccaggacaatgtgaagactctggagtagaagaatggtaggtaatcaatgtccctggcttttgaagcctccaagatggatgcaactgcatgcctagcagttctacgagctgaatcaacatgctcaagccgtcggatatcaccatcaaaaagcttgatcgggaatgcggcaacatctccaacagcatatacagagctgtcacttgtctgcaactgtccatttacctttatcccaccattctccattgacatcaccagctgaccttcaaacagactagtgttcgcacggatacctataccgatcactaccatatcagcaggaaggtgcctaccatctttcaggattacggcagtcaccttccctgtggtgtctttttcaaaggatgtaagcacagttcctttaacaaaggtgaccccttttgaggtgtagtagttttcataatattctgcaatttttggtgtaaatagacggcccatgcagtgtttttcaggaaagaccatggtgacccttatcttgttagtaaccaatgccgctgcacattccattccgatgtagccaccaccaatgacaacagcatttccaccaggacatgatttcatcgcattcactaacttatccgcatcatcaacattgcgtaaatagcatatgttcgaagcatctgaaccttgtattccgaattcttgcaacttcaaagcccgagcacctgtcgcaataataagagttttgtagctgatagtttctccggtgcctgtaagcaatgtcttgcgcctcacatcagcagaaatcacttttgttccaagaacaagttcaatgccttgttcttcgtaccattttgttgtcagtaactcatcattagcaccaacgcaagtatgaaatcctggaagacaagaagcaccttctgggagtaaatatcctttgcttaatgcaggacgttcataaggagcagcggcctcttcggagatgatgcagagctcgccgcgggagtacccgccgcggcgggcgaactcgagcgcggcgtagcccgcggccacgccgccgcccaggatcacgtacacgaacgcgcgccccatccggtcccttctggcgccctcctagatgcgggccatgactactagtcgaaggtctgacctcctcggtgagagggaggagatgacggcgcgttgccttgccttgccggtctctcctcctccgcttcctgcgggtcccactccgttatcttctttcgc

SEQ ID NO: 3672 - DNA, 776 bp, Setaria italica
  misc_feature (1)..(18): n is a, c, g, or t
  Peptide Sequence Number=SeqID_69646
nnnnnnnnnnnnnnnnnngtggccagcaagttactagaattatgcatctcatttgggaaagaattgtgattttacaacaagagtgctcctgatgagactttagtagcagaactttgctcattaaacagtacatgatggtgtttgtaactttgtatactatactttcatacatgctacacatgacttgttgcatcagctgaccacaagatccagcgaaattgttgctgtaggcacaacagatggcacacaaaataaaacggtggccctgaattcaccacctgcggcgcttcctgccataccaataaccaatcgccgcgattgacactgctgcaaccacaccagctgtggcatgccatgcataagtaggttttccaaccacggcaagcccactgtcaggcgcctccgtctggctctcctgaatggcaaacgccagaccttgttttccaagttcagccatgtttacgaccttggctttccgccgaacagtgactgatatggcctcgtattcatcccggcttccaccttcaagaaatgcacctgcaattcggcctttattcacccaatatgcaccaaaccttgggctgctgcttgtgaagtctccaaagtgaaccacttccccaacattatccccatagaactgccaggacaatgtgaactagtacaaggacgacctaccgtactaggactactacctagaaataggacaaaacgaccaagaaccttagttttaccaaagttacaagaccaatagtttaacgaaccttaggactttaccg

SEQ ID NO: 3673 - DNA, 732 bp, Setaria italica
  Peptide Sequence Number=SeqID_69647
acccgaacggacggacgtaccaacgccttctcctcgcggggaccgccccgtcccggcggcggcgctcactcgcttctcctccctgcgccggcgcccgcctgtcccgcccccttcgccggagggttttgtattagctactgtttttcactggatggtggtaatggggtcagaagagtgggagctgtatccttcttacattggttcacaggtcatggaatacagaccgatctctgaagacagcgatgatgattggaatggggatgtggcagtgccattggacgctgtcctccctgatgatctcttggagaaggttctttccttcttgccggttgcaagtatcataagatctgggtctgtctgcaagaaggtggcacgagattgtgcatgcccaaaggcagacatggagtaaaatggtgcctcagaagccatggtacttcatgtttacttgtagtgaggaggcagtttcaggttttgcctatgacccaagcctccgcaagtggtatgggttcgattttccttgcattgagaagagcaactggtctacatcctcatcggctgggttggtgtgcctgatggacagtgagaacaggcgccgcattatggtgtgcaaccccatcactaaggactggaagcggcttcttgatgctcctggaggcaaaaccggctgattacagtgctcttgccttttcagtggacaggagttctcatcagtacaccgtggctattgcaagg

SEQ ID NO: 3674 - DNA, 244 bp, Setaria italica
  Peptide Sequence Number=SeqID_69648
gcctggtagtgccaagaaatggctagctgctagcaagcacatccggttgtctgttcagggtccgggacttgttctgcaaccgtcttgaagcaaatgtcctggtcatgctcatgcgccaaagcaagcttggcaatgcatagaaaagcagtatcaacattgtggtcctcttttgcagaggtttcaaaatacgggatatcgcctttggaggcacaccattcccttgctttcttctcagaaaccattt

SEQ ID NO: 3675 - DNA, 942 bp, Setaria italica
  Peptide Sequence Number=SeqID_69649
ttaagtaatttgggttgtcgtcctattctattagggttaattctaagtccttgtcttttcgtcctattggtaatcgtgaagtacagatgatgacaacaacgatgttggcttgtgctcaaagcatgatcaaggagttggaaaataaagcatgccaaagcaagaatggagaaatagaagtggatttcgacatagagttgagagagctcacagctgatgttatatcccatgccgcctttggaagcagttacaagttagggaaacaagtattccagacacaacatgccctgatggcaatctacttggaaagtctccttgatgttcagataccaggattaaagtaaaatctctacttcatttaatctagaactttgtagtatgagcattgacaactttcgtacaccttttcccatatgcactgttatgtatccttttcatttcaggtaccttcctactgagaggaatcggcgcaaatggatgcttgaaaagaagcttaggagctcgcttctgcaaatcatacaaccacgattagcgtctacctgccgtgactacggaaacgatctgctcggtttgatgcttgagtcttgcattgcaacagagcaaggaggaaagaaaggcgatctcagcatgagcatcgatgagataatacatgagtgcaagatgttcttctttgctggtcatgacaccacatcgcttcttctaacatgggcaatcttcttgctcagcgcataccccgaatggcaagaaaggctccggaaggaggttttcagggaaattggaagggaacagcccagtgccgatgcccttagcaaactgaaagaggcaagaaacaagagaaaattttacctttttacttgaatgtttgtgttttctccttgtagtgtatctgattcgatttgagatttcaggctgtagctgactagccatatcttgcagacgacgatg

SEQ ID NO: 3676 - DNA, 839 bp, Setaria italica
  misc_feature (450)..(450): n is a, c, g, or t
  misc_feature (473)..(473): n is a, c, g, or t
  Peptide Sequence Number=SeqID_69650
acaatagggacctaccctaacaagttcgtcagaggcagcaacgacgacatcaaggccatgaaggaggaggcggagggcttggtactggatgttcacgaccacaaccacctcccaaggatcgcgccgcactacctcaggtggagggctcagtatggagaaccgtttctatactggtttgggacgaagccccgaatttgcatcttcgactacgagctggctaggcaaattctttcaagcaagtctgggcatttcttgaagactgatccaccctctaccctgctggatgtggtgggcaagggactagccttgttggacggcatagattgggtgcgccatcatagggtaatcaagcctgctttcgccatggataagctcaagcatgatcaatgagttggaaaatgcatgccgcaagaatgaaatagaagtgacatagagttgagagagctcacnccttgatgttccagataccaggnttaaagaccttcctactgagaggagacaagtattccagacacaacatgccctgatggcaatctacttggaaagtctccttgatgttcagataccaggattaaagtaccttcctactgagaggaatcgacgctaatcgtggttgtatgatttgcagaagcttaggagctcgcttctgcaaatcatacaaccacgattagcgtctacctgccgtgactacggaaacgatctgctcggtttgatgcttgagtcttgcattgcaacagagcaaggaggaaagaaaggcgatctcagcaatagaagacaatacgaatagaagaataaataacaataagaaagtaagtaactaaaagtaaattaaagtttaa

SEQ ID NO: 3677 - DNA, 1904 bp, Setaria italica
  Peptide Sequence Number=SeqID_69651
taattagtaagttagtacctaacgtaacgatgagtgccacgacggccgattgctgtccacaacagtgagccatatcacacacacacacatcccctccttcccctgctctacccgtggcagccatggccttcctcgtacccctggcggctctcgtcgcgctgctagcggccgccgccattgcatggctgtgggattacgccgtcgtgcgcctcgtgtggaggccctacgccataggcaaggagctcaggggccaagggatccatgggcctccctacaagttcgtcagaggcagcaacgacgacatcaaggccatgaaggaggaggcggagggcttggtactggatgttcacgaccacaaccacctcccaaggatcgcgccgcactacctcaggtggagggctcagtatggagaaccgtttctatactggtttgggacgaagccccgaatttgcatcttcgactacgagctggctaggcaaattctttcaagcaagtctgggcatttcttgaagactgatccaccctctaccctgctggatgtggtgggcaagggactagccttgttggacggcatagattgggtgcgccatcatagggtaatcaagcctgctttcgccatggataagctcaagatgatgacaacaacgatgttggcttgtgctcaaagcatgatcaaggagttggaaaataaagcatgccaaagcaagaatggagaaatagaagtggatttcgacatagagttgagagagctcacagctgatgttatatcccatgccgcctttggaagcagttacaagttagggaaacaagtattccagacacaacatgccctgatggcaatctacttggaaagtctccttgatgttcagataccaggattaaagtaccttcctactgagaggaatcggcgcaaatggatgcttgaaaagaagcttaggagctcgcttctgcaaatcatacaaccacgattagcgtctacctgccgtgactacggaaacgatctgctcggtttgatgcttgagtcttgcattgcaacagagcaaggaggaaagaaaggcgatctcagcatgagcatcgatgagataatacatgagtgcaagatgttcttctttgctggtcatgacaccacatcgcttcttctaacatgggcaatcttcttgctcagcgcataccccgaatggcaagaaaggctccggaaggaggttttcagggaaattggaagggaacagcccagtgccgatgcccttagcaaactgaaagagacgacgatggttctcctcgagacattgaggctctatggccctgctcttttcatgcaaagaaagcccgtcactgatatcacagtgggagcaacaaaactgcccaagggcgtaacggttgtcatacccattcctattatgcaccgagagaaggaggtctggggtgacgatgcgggtgaattcaatccactgagatttgagaatggggtgacaagagcaggaaaggttccgcacgccatgatagcgttctcaatgggaccgaggtcatgcatcggccagaactttgcaatgttggaagccaagtcgacgctggccctgcttctccagaagttctcgttcactctttcccctgactatgtgcatgcccctgcagacgtgttttcgctgaaacccaagtttggccttcccgtcatcgtgaggcggctggatgcatgagcttacaatatttgacatgtaaaatgtcatactttcttagaatttgcgaacctggtgagttaccttagatggtatgtggtgtatgtagagaacgtacaaatccaacataaagaaaataatggaatattctcactagaagcactttgttgtaaagtcattcagaatggagtcacaaaagcagcaagggttacctacaataacaaaaaaaaa

SEQ ID NO: 3678 - DNA, 348 bp, Setaria italica
  Peptide Sequence Number=SeqID_69652
ggtctgtggccgcaaatgatagaagaggaacgtgtagctcattaacaacatgggagatgacatggcctatcccggaggattgtgggccaataacagtaacaacatttttttccattagctgcaatgcttcgatggtcccgagaaagccgctgcagttggtgtcctgggtgatcaacttgagctgtgtccccgcgagcaccgtgcggtcggcgttgacgtcgtcgacggcgagctcgatggcgagccgcgccgcgcggccaatggtggagtcgtaggtgaagagcgcgcccacggccacctcgctcggccgcgcccccgccgctgcgaccgccctcgccgcggcggcga

SEQ ID NO: 3679 - DNA, 748 bp, Setaria italica
  Peptide Sequence Number=SeqID_69653
gtggagctccaggcgttctggacggaggtgcgcacgaagggccacgccgacaagcgggacgagccgtggtggccggtgctggacggccacgagagcctggtccaggtcctgagcaccatcatctgggtcgcgtcggggcaccacgccgccgtcaacttcccccagtacccctacgccggctacttccccaaccgcccgaccaccgcccgccggaacgtgccgacggaggccggcggcgaggacatgcgggcgttcttggaggacccggtcaaggtgctcctggacacgtacccgtcgcagtaccagaccacgctggccctgcccgtgctcaacctcctgtcgtcgcactcggccggggaggagtacctcggcgtgcagtcggagccggcgtggatggcggatgcggagatgagggcggcgttcgtgaagtttaacaagaggatgatggagatcgcggagacgatcgatagtaggaacaaggaccccgagctgaggaaccggaagggcccgggcgtggttccgtacgtgcagctcaagcccaactacggcgacttcaaggacatgacgtcggtgatggagatgggcatcccgaccagcatctccatttgagctgatccaatgatgaagagccgtgtgtctagttaataatttcggactgattcttctctcgagaaggttgaagctggaactacatgtaataatttcggactgattcttctctctcagtgtagcaagtaatgctactaca

SEQ ID NO: 3680 - DNA, 827 bp, Setaria italica
  Peptide Sequence Number=SeqID_69654
gcttcggggggcgaagctcgggcgaagaagatggcagaggtggagtagaaagactagctgcacatctatgatctcagccaggggatggcccgggagctctcggcaacgatcctcggcaaggccatcgaggcgatttggcacaccggcgtggtcgtctacgggtgcgagtactacttcggcggcggcatccagcatggccagcccggccggacgccgtacggcactcccgtccgggtggaggacctcggcgtgacccacgtcccccgggaggtgttcgaggacttcctccgggagatcggcccgcgctacaccccggccacctacagcctcctcagccacaactgcaacaacttcagcaacgaggccgcgcagttcctcgccggcgccaaggtccccagctacatcctcgagctgccgaaccaagtgatgaacagccccgtcggcgctctgatactgccgatgatccaggggctggagacgagcttgcgggccggggcggtgccgcagccgccgcaaatcaggtcggctcccgcaccggtcgccaccgccaccatgacgccgccgtcggcggatgacgtcgagcaaagatcgactgctgctgctgataaaccggacgaggagacggcgggcaatggcagtgacaatggcagcacggccgttccaccggcggtggagcccgcggcgccaccggcggccgccactcaggtgagcgcggcacctgcggcagcggtggagacgaaggcggcgcctccggaccccctggcggaggcgaagagccgggtgcaggaggagataaagcgggagttcgcggccatcatggcggccgg

SEQ ID NO: 3681 - DNA, 263 bp, Setaria italica
  Peptide Sequence Number=SeqID_69655
gttcgtcgtcatggttcccttcacaatcccgaactcttcgtccaagaccttgacgaatggggcgaggcagttggtcgtgcaggaagcattgctgataatgtcggccacgccgtggtcgtagtcgacctcgttgacaccgacgacataggtcgggatgtcggcgcccttcgccggagcagtgatgatgaccttcttcgcgccggcctggatgtgcttcccggcgccggggccgtcgacgaacactccggtaccctcgatgacaa

SEQ ID NO: 3682 - DNA, 266 bp, Setaria italica
  Peptide Sequence Number=SeqID_69656
caggagtccggggccgacggcttcaccggcggcgaggaggaggaggagaacggcggcggaggtgaggagccagaggaggtggaggaggagttaggcggcgacgacgagctggagctggaggaggaggggggggactctgggatggggtccgacgaattggaggtcacggagctcggggagcctggcgccgagatgtgtcaggtcggggaccagagcttcgcagtgccgctggagctctacgacctcgccagcctccgcgacgtgct

SEQ ID NO: 3683 - DNA, 529 bp, Setaria italica
  Peptide Sequence Number=SeqID_69657
ttacacactacgtacctctgcaatacatgaaactaaggaaccatgcaatgtcatggcagtgactatggcttgtgcggttgtgccgtcatacctgtaactactaacatatcatgaacattatgtgtcgattctatacctaattacccaagaggccaagaataacctgaacccagaatgacctggacgcagaaatggaggttcaaatgttttggaaaaaagaaatgggggttctcaaacaaagagggaacaaacattactttatctaatccgatcctatcaattgaggtttgttgttgaagttcttggagattattggtcgaacatccttggcatcaacgagggtcgcaaggaattgaagcagttccatcaactcaacatctgtggggtcatcaaaccagctctttatgggtatgccgttgtcgacctgcagctggaagacctgttgaatatgtgagcatttcacagtcctaacaccatgtaaaacatcttagaattaggcaagagaaactacaatcagcatgcacagcca

SEQ ID NO: 3684 - DNA, 805 bp, Setaria italica
  misc_feature (779)..(805): n is a, c, g, or t
  Peptide Sequence Number=SeqID_69658
agcaggacggacacagagaatcgccaagtgaacagaccagattccaccacaccctcttccttcttcgctccggtccggcgggtgagtcgtcgcgtcgccggcatccatggcggcggtggtgcgcggcgtgctgaggggcatcaaggagaagggcctcaccaacttcctccgcgacgtccgcgaagaaggatacctgaattgccttctggatgggaaccttttgcaaacaaaaattcacaatattggcgcaacacttgtaggggtagacaagtttggaaacaagtactatgagaaactgcatgacactcagtatggaaggcacaggtgggtagaatatgcagagaaagggcgctacaatgcatcccaagtgcctgctgaatggcatggatggctgcatcacatcacagataacactggtgatcagctgctggcccagaagactgctaggtaccttgtggagcacaagcagaactactctggtgagggtgaggagctgatctaccactccaaggggcacgccctgaacccgggtcagagggactggacgaggtaccagccctgggagccaaagaaagagcaatcctagtaaaatgtctgtgtccaatcggggaggaccaccctgtttgtgttttcttgcttttattgccttgggttcttaacgatcctgaataatgttgtactggacaacaatactgtataattcgatcatctccgtttgatttttgaaaggtggtggttgttactgctgtaaaagcagatttgccggaaaaaaaaaaaannnnnnnnnnnnnnnnnnnnnnnnnnn

SEQ ID NO: 3685 - DNA, 818 bp, Setaria italica
  misc_feature (777)..(818): n is a, c, g, or t
  Peptide Sequence Number=SeqID_69659
ctttcgtcttcgttcccctctctcctcgccgtcgtcgccgtccgtgcgagccatggatccagtcgctccccgacgcggacgcttaccgatccacctcctggtggtgctgctcaccgtactcgtggccctcaccgtgcggtcccgcgccgaggttatcaccctcaccgaggagaccttctccgacaagataaaggaaaaggacacagtatggtttgtgcaattttgcgtcccctggtgtaaacactgtaagagtcttggaacactttgggaggacctgggaaaagttatggaaggtgaggatgaaattgagatagggcaggtcgactgtggtgtcagcaaaccagtatgctccaaggtggatatccattcctacccaacattcaaggtgttttatgaaggcgaagaagtagcaaaatataaaggaccaagggatgtggaatcactgaagaactttgtgttgaatgaagctgagaaagcgggtgaggcgaagcttcaagctgactaggccaggggtgttacagcaagcacatggacgtagacaaggaacagtatgcgtagaactactttatcttgcaaccttgtcctgtatcctggtatttgatagagtacacgggcagttcctggaaaagaatatacctgtactttttgagttttgagtttcccttttcgaaaagacctgctagtccgaatcgctgtggaactaaggaggttgtactccagacaatgataaacttcactaatgattaaaatgcaacgacacaaagggctgcttatatnnnnnnnnnnnnnnnnnnnnnnnnnnnnnnnnnnnnnnnnnn

SEQ ID NO: 3686 - DNA, 1605 bp, Setaria italica
  Peptide Sequence Number=SeqID_69660
cttcatagtttggtagtgtcgccgacaccaccaccctatgaatatgttccttggtcgtctcaatctgcctgacagtcctggcaacaatgctctccagaacaggccctctgttatcatgtagcagatggatctcatcaatgattaacagctttaccatttgggtataggttctgtcccctgatttcctagtcacaatatcccatttctcaggtgtcgtgacaataatctgtgtttcatcaatctgttgcttggtcaggttctggtctccgctgagttccctaacagtaacattgaaaggtgccaaacgctttgatagatttccaacaacttcagcgaccaaagccttcatcggggccacatagacaattttgtacttggtattgtcaaactctccatccttcatatgcagaccaatctgttgaaggatcgtaagaacagccacgtttgttttaccagcaccagtcggagcacatagaaggatattatccggcttgaaaagagcagtatcatagaccctgctctgaactctgttcagcgcagacatcccttcaaaagctggctgcgcccactctggcaagtcagatatcttcacaatcttctccccggtttcatatggcttagctttcaatgctggcacatgaacctcctcgtatcccttgtgaggggttctaaacgacccagcaggaagttcacatttcttgttagccatgaagagaccaccctggtgaaaagcgaggctgtcaagatcaagcagctgcctctgtcctttcaaccatccactctccatatccctctcggctgccctgcgatccctcggaccatcggcgccagcaccatcattgttgaggagcctcttggcctcatccctgatgcttttctcgaggttcttctgcctctcctttgcagatgctctggttgcatgtagctgctccaatattggagccaagctcgggtcactagccatctcttcctctatcttggtcctctgttcctgatcttcagccctggccaagcgggtgcaccaaacaatcttgagacggttgcgcagcagcaacttaatgagatcaaacttgtcatagtccaggagcatgacaaggcgattctcgacatctctgtcatcaccctcagcaatgatcttcaagatctcctccgcaagcttctggctctgctgggcgtcaatgttcccgtccccatatgcttgggatatcttcctctggagccagtaagcatcaatgtcctgaacattgatggccagtccctggttggcgttctgcatgtcatcgtcatccaactcgccacccatctgcatgcctccaggaccattcaactccgttgcttcgtcctcatcatcctcatccaagtcatcttgcacctgatcaaaatcactctcctcgtcttcatctgactcttcaaactcgacagcaacaccgacatcatcatccagggtggtgtccatggcatcgccagatggcccaccggcagcgtcgccagctgccgcatcgtggaagtcggtgatgagcttgccaatggagacgagctggtcaaagagctggttggagatggggttgaggagctgctcaatgtccttcttcttgtcagggttct

SEQ ID NO: 3687 - DNA, 262 bp, Setaria italica
  Peptide Sequence Number=SeqID_69661
gtggggagggacacctgcttgttgtcgttgaggacgacgatcatgttggcgtcgaggtagccggagttgttcatggcctcgtaggcctggccggcggtcatggccccgtcgccgatgacggagatgacgtggttgttgcggccgaggaggtcccgcgccaccgccatgcccagcgccgccgagatgctggtggagctgtggccggcgccgaacgcgtcgtgcgggctctcgtcgcgcttcgggaatcccgccaggccggagt

SEQ ID NO: 3688 - DNA, 522 bp, Setaria italica
  Peptide Sequence Number=SeqID_69662
atcgagcgagccccctcgcctcgcgactcggtggcccccctcctctcccggcgacgctgctcctggcggcgcccgctcccggcgtctgcggagcccatgcgcggcggcgccaggcgactcctgcagcagaaaacgcatcggcccctctcttcctttcttccctggcagcgacaactgggcgagcggtgacatcctacgccggggtcttcctggggcccagcgccggcgatgagtatcgaccagtgaatcgtgaatagtttgttgaagatggcaaatgcggagaatttgttcaagatggtaaatgcagatacagatacagatactgctgcgctgcacaaggagtgggatgatgctctttgcccgatatgcatggaccatccgcacaatgctgtccttctgttgtgcagctcccatgacaaaggatgccgaccctacatatgtgatacaagctataggcattcaaattgcctagacaggttcaaagaaaatgaaagtgaatgatggagacagtccttcacagcc

SEQ ID NO: 3689 - DNA, 280 bp, Setaria italica
  Peptide Sequence Number=SeqID_69663
ctctcccggtctcctcctcattcagatctcgcatcccctccagatctcgcgccctcttccatcccatgcccactcttcctcctcggatctaaccactccgcccctctacctcgtctccgcggccggagctgagatccgcggccatggcgggcgccgcgggcgggttcgtcacgcgggccttcgaggccatgctcaaggagtgcgccgccaaccgcggcaagttcgccgcgctccagcaatccatccagtcgtacctcgatagcatcaagggcgccaccgg

SEQ ID NO: 3690 - DNA, 374 bp, Setaria italica
  Peptide Sequence Number=SeqID_69664
tcgttgcacactgatgttttttattttgtattgtttgatatgttttctcaaggttatcatttggatctttgccttaatatgttgagatcattatgctttataccacgtatgcttttatatggttgatttgagattgcattttcatttgcagcccctttgcagatcagatccaatgctggttttagaatcttccttgtacgtccttgaacgcaatccatctgaaactattgagcttctttttgtctgaaaatgttccagcagatttggtaaattcatatctgaagcaacatgctccaaatttgcagtcaacatacttagaattaatgctctcaatgagtgaaactgggatcaatacctaaacttaagaacaaaaa

SEQ ID NO: 3691 - DNA, 691 bp, Setaria italica
  Peptide Sequence Number=SeqID_69665
cccaggatgctcttttcgaggagcgtgccatattgtatgggaaaatgaatcagcacctccgtgcactctctctgtatgttcacaaggtaaaaaggtcgttgagattgaaggggctgatgacatacgctttagccccagtgggacagatagtggccgaagtgatggtgatggagatgatgcaagtgagggaggccctataatgttgaatgaagcactggaactgttaagccaacggtgggacagataaatggtgctcaggctcttaggctgttaccaagagacactaaactccaggatctcgtatcatttcttgagccactattgcggaactctagtgaacatctacgcaattatttggttatcaaaaacttgatttcccgtgcaaatttgcaggtaaaggaggatctgtacaaacggcgtcaagctgttgtcaagattgatggaaatagcatgtgttctctttgccataagcgcattgcaaatagtgcttttgcaatttatccaaatggacagacattggtgcattttgtctgctttagagaatcacagcaaattaaggctgttagaggagcaaactcagtgaaacgtcgctaatatggccatgatgcaggtcagagcgtcaatcatacaaggaaattaacaaataaagttaaaacgaaaacaaaaaacctaaaaaggaaaaaacaaaaaa

SEQ ID NO: 3692 - DNA, 1327 bp, Setaria italica
  Peptide Sequence Number=SeqID_69666
gaagggaatatatgataataaacagcatgaccggtgcactaacagaagtgttttcttctgggaggatcgctcctcctttagttgtacctcttcctactggggagctgctccttggcaaggataacattggggtattcgttgatcaaaatggcaaacttattcaagatggcaggataatttggtcagatacgccggcttctgtcgttatacatagaccatatgctgtggcacgcctgccacggcatgttgagatacggtctcttagagcacccaatgcattggttcagacacttctgctccgtgatgttcaaaagcttgtccagactgacaactgtatacttgctgcgctatctaactctgtttatggtttcttgcctgttcctattggtgctcagatagtgcaattgaccgcttctggagaatttgaggaggcactagcgttgtgtaagctacttccaccagaggattcaaatttacgagctgcaaaggaaagctcaatacacataagatatggacactttttgtttgatagtgggagctatgaggaggcaatggaacagttttcggattcacatgtggacattacttatgtgttatcgctgtacccatctattgttctgcctcaaacacatattataggtgaacatgacaagctgctggacatgcccgaattagcaagggaatcatctgatgtgacagatgagatggaatcatactctttacagctccatgaatcagatgataaatctccattggaggtaaagaaaatgagtcacaatgctctagttgcccttgtcaagtatttgcagaagaaaagaagtgggataattgagagagcaacggctgaagtaacagaggaagtggtctctggagctgtgcaccacagcttaatattgtctgagccatataaaccaaagaagccgaacaagaaacgagctcagacacatactagctctattgctagagaaatggcaactgtactggatacttctttgcttcaagcccttcttcttactgggcagtcatcaagggcaatagtaatttcgctgaaaggactcaattattgcgacctgaagatatgcgaagagtttttgaaggagaggagcgaatatatggtgttactcgaactctataaaagcaatgaaatgcaccgcgaagctctccaactgctcaatcagttagttgaagaatcaaaatctgagatggagaatacagattttaacaaaaaatttaaccctcaaatgatcatcgaatatctcagggtatcatttgtttttcctttgctatgatttaattgatatcgcttgtgtcacatatataaacctat

SEQ ID NO: 3693 - DNA, 2206 bp, Setaria italica
  misc_feature (7)..(7): n is a, c, g, or t
  misc_feature (15)..(15): n is a, c, g, or t
  Peptide Sequence Number=SeqID_69667
tatattntaagggtnttgtattgtactattacgtcttttagtcccctagttgggtactagtattagttggtccgtaagttgtattggttgtattggtagtattgtattggtctaagttgagggtctctggagctgtgcaccacagcttaatattgtctgagccatataaaccaaagaagccgaacaagaaacgagctcagacacatactagctctattgctagagaaatggcaactgtactggatacttctttgcttcaagcccttcttcttactgggcagtcatcaggggcaatagaattgctgaaaggactcaattattgcgacctgaagatatgcgaagagtttttgaaggagaggagcgaatatatggtgttactcgaactctataaaagcaatgaaatgcaccgcgaagctctccaactgctcaatcagttagttgaagaatcaaaatctgagatggagaatacagattttaacaaaaaatttaaccctcaaatgatcatcgaatatctcaggcccctttgcagatcagatccaatgctggttttagaatcttccttgtacgtccttgaacgcaatccatctgaaactattgagctctttttgtctgaaaatgttccagcagatttggtaaattcatatctgaagcaacatgctccaaatttgcagtcaacatacttagaattaatgctctcaatgagtgaaactgggatcaatcctaacttgcaaaatgagctggtgcaactgtacctttctgaagttcttgactggtataagcttctgaaggaagaggaaagctggacagagaaaacatattccccaacacggaagaagttaatatctacattagagagtaattcaggttacaatacagacttactcctaaagcgccttccccaggatgctcttttcgaggagcgtgccatattgtatgggaaaatgaatcagcacctccgtgcactctctctgtatgttcacaagctccaaatgccagagcgagcagttgcatattgtgaccgtgtttacgaggaaggagcgcaacaaccatccaagtcaaatatctattttaatcttctacaaatttatctgaatccaagaaaagctgaaaaggaatttgaacagaaaattattccagtaacatcacaataccctggaatccaaaagtctagttctactactaagttcagagggggtcgcacaggtaaaaaggtcgttgagattgaaggggctgatgacatacgctttagccccagtgggacagatagtggccgaagtgatggtgatggagatgatgcaagtgagggaggccctataatgttgaatgaagcactggaactgttaagccaacggtgggacagaataaatggtgctcaggctcttaggctgttaccaagagacactaaactccaggatctcgtatcatttcttgagccactattgcggaactctagtgaacatctacgcaattatttggttatcaaaaacttgatttcccgtgcaaatttgcaggtaaaggaggatctgtacaaacggcgtcaagctgttgtcaagattgatggaaatagcatgtgttctctttgccataagcgcattgcaaatagtgcttttgcaatttatccaaatggacagacattggtgcattttgtctgctttagagaatcacagcaaattaaggctgttagaggagcaaactcagtgaaacgtcgctaatatggccatgatgcaggtcagagcgtcaatcatcaggaattcatgttacgcacctgggcaagagcaacctaacaagcttagcagaatttgattatgcttggagaaagctgttctgaatgtggctgcctactctccagctatgccaatatgctttgcttaagatacagtgataacataacatgatgcctttggtcaaatctgctgtcctctctgccaaatcagatttcgttgattcccccttagggaattcctaattcccaattccctttgttgttctccgctggattttagtggaccgcttcagaagtttttactggagtgctcttcactctcttcagagcctgactgcctgagtgtatgtatcgtgcgtgtgcccgctcgctctcctatgttttcagctgagagagcttttctttttggtttctatttgtgtaatgtacatgagtacatgatactgtaaagtttcagtcagcagatggccgggattatagagt

SEQ ID NO: 3694 - DNA, 605 bp, Setaria italica
  Peptide Sequence Number=SeqID_69668
tccatcaccgccacgccggcggcgaggccccgaggagaggcggcggtgggaggactggcggcgggtacagcgtcgagcagtcgccggtgcacccgtacagctccgagagcggggggtacggcctcgtcgcgaactccgtcgagcggtcccgggccaagggtggcttgcgcggcaatgagacggtgaggctctgctctctgtccctttgtgctctgccttgacatgcgcttggaagttcatcgcttactgatcgatgcagccgacgaggggctcggcggtgcccaagttcggcgactgggactcgaacccggcgtcggcggacggctacacgcacatcttcgacaaggtgagggaggagaagcagacccaggccggaaagccagcggcgtccggcaaagacgccgcgcgtggcaacggcaacaagcattacgacgacggctacgtctcatcatcggtgagtggcaggcacaatcatacgcagataacacaactactgtctttcggcgacctccttgcttgctcattctgtgttctcattgagctttgcatttggttggattgcagaagttctcatgctttggatggtgcaaatagagatggcatgg

SEQ ID NO: 3695 - DNA, 905 bp, Setaria italica
  misc_feature (905)..(905): n is a, c, g, or t
  Peptide Sequence Number=SeqID_69669
ccccgccgagaacccggaggccttctccatcgcggcgccgtcgccgaaccgctccgacgccgggaggtcgtcgtcgccggcaccaccgccggcctcgcggcacgagcgccggcctagcagcgacgcgccgccgctgtcccccaacccctacgccgggtccccctaccaccgccacgccggcggcgaggccccgaggagaggcggcggtgggaggactggcggcgggtacagcgtcgagcagtcgccggtgcacccgtacagctccgagagcggggggtacggcctcgtcgcgaactccgtcgagcggtcccgggccaagggtggcttgcgcggcaatgagacgccgacgaggggctcggcggtgcccaagttcggcgactgggactcgaacccggcgtcggcggacggctacacgcacatcttcgacaaggtgagggaggagaagcagacccaggccggaaagccagcggcgtccggcaaagacgccgcgcgtggcaacggcaacaagcattacgacgacggctacgtctcatcatcgaagttctcatgctttggatggtgcaaatagagatggcatggcatgatggatggtgatggatacaaatgccggttcctttggggactccgaatttggagaaagagcgattgtgattcagcctagacttcatgctccataatctttttgtgatagctttattttttggaagtgatatatagagctgtccatggtaactgttatgctagagtaagcattgcattgtttgtgttggttattcagtactggatttacagtgaatgtatgatattggtgtgtgattttgttcttggtactctcaaagcttagtgttgcattatcagaaaacaaaacgtatatagcttcaatgtttgcccttagtaaaaaaaan

SEQ ID NO: 3696 - DNA, 1246 bp, Setaria italica
  Peptide Sequence Number=SeqID_69670
taaagcacttccttgctacgaactatgtaattgacatctttaaggaagagctccttagctttgattgcatttagaacgtatgaagcccattgttcacgaggatcatacagatcatttatatccagtatttcttcagcgtccgcatagccttgctctgtaagtaaaacatttcgctgcttttcatcaacagtgtaatgaatgtctcgctcaaaagcttcagctatttttgctgctttgtaataccgatcacttggcttttcagctaggcctgatattataagcggggtccttgcttcatcaataaggattgaatcaacttcatctatcacacagtaattgaagttcctcaagacaagctcatctatagtcattgcaaggttatctcttagatagtcaaagccaagctcactgtttgtgacgtaagtaatatcacatgagtaattttccctcctttgctcaggtgtcatgttctgttgaattaagccaacctgcagtcctaggaatcggggaacttgaccaacccattcacaatcacgtcttgcaagataatcatttacagtgacaacatgcactcccttcccactcaaagcatttaagtatgctggcagaatggccacaagtgtcttcccctctccagtcttcatttctgcgatctcccccttgtgtagaaccatgccaccaatcaactgaacatcaaaggggcgaaggcctagaactctcttggaagcctccctcacaacagcaaacgcttcggggaggagggagtcgagggactctccggagcgcgcccgctcctggagcgctgcagtgcgagcgcgcaggtcggcgtcggagagcgccgagacctcgggctccatggagttgatgcgcgccacggtgtcggcgtacttcttccgcgtcgcctccccgtcgtcgcggccgcccccgccgaacatgcctcccagcagaccccccacgcgcgccacgtgggagccaccttcccgccacccctgtataccccagccccgccgggtggggtggaactgaaccctgaacccgccgcagcccccagcgtgacgaggcgaggcgaggccggtggcggacaaagggtggggaaagcgcagcgcgggggtggcggctgcggcggccgccgaggcgtgaggcgccgtggccatggcgcgcgctggatggcttctctccggcgcttcgtgtggcgcgcacggcgacaagccgccgcgtgctctgggtggtgggcaacggctctggc

SEQ ID NO: 3697 - DNA, 503 bp, Setaria italica
  Peptide Sequence Number=SeqID_69671
ctaaagcctcagcataatggttgatgatcaaggtcttcatttttagtcctcgcaaggttactgtctcccacaagtggtcttgtccctcagttaaaacgcttcctccatgaatccaattgctccctggctgtcagtcttaatgcaacaacagacgaggttagaaactggataatgcccataaacagaaagtacaatcttaacttgcttcttggcaccttaagggaggaagtttgcctcagaaagaattacagagttctatttgaatatgtcatgctttctggagtgaacgacagtatggatgatgcgaagaggcttatagagcttgtccaagggatcccttgcaagatcaacctcatttctttcaatccccacagtggttcccaattcaagcccacacccgatgagaagatactcgagttccgcaatgttttaattcaaggtggccttatagtttttggttgcggtcttctagtctagtaggggtatttgttattttctttaaa

SEQ ID NO: 3698 - DNA, 712 bp, Setaria italica
  Peptide Sequence Number=SeqID_69672
ttttttaattgagcgagccaatctaagctaattcattgtttcgtcgcagagcaaaaatttaatcaccatctacaccatcttttcctcctaaaagatcgactaaccagtcgaattcacaagacgctataacacagagaacagaacattcatgttgaatcagaggcttttcattcatttcccgcgctcgcctgccctgcaacaatggagggcatataggctcacctgttggagaagatggcttccaggtcgttgtagaggcccctgacttggccttccactccccactcctcgacttggtgccactggtggacgcctcctcctccccaccggtggtggcggcggcgccgccctccttgctgaagctcgccttggccatctcccgcagctgccgaagccaccaccgctcgttcgaggatcccctggaaccctcgctctcgcccctggccccctctccgggggtcgacgtcgacacgctctccccggctccgccaccgtccggcggcggcgtgtcctgcgggtggttcaccgccacccggtcgccgagcaccgacgacggcagcaccagcagcagcagccccaggctcgccgtcttggcgccgtccaggagcgagctccggtccgcgctcaggagccgcacctgccggagcagcgcggcccactcgttgcacgcctgcgccgcgaaccccagcgcgaaggcgcccagcatcgccag

SEQ ID NO: 3699 - DNA, 334 bp, Setaria italica
  misc_feature (29)..(29): n is a, c, g, or t
  Peptide Sequence Number=SeqID_69673
ctcccataccaccgcgcgcgcacacgcanggccgccaccgccgctgccgccgccaccacaccctcctcccctctcctccgccgcgccgctgcggcgccgaccaccggccaccactaccagctcaggtgctctgccaagccgtccccgctcgagctgcggcactgcgccgcgcgcctcgccccggcgcgggccctgttcccggaccgcgtcacgccgttctccttcgacgcggacggcgatgaccacccccgcgaggagtgcggcgtgttcggtgtcatcggcgacccggacgcgtcgtcgctgtgctacctcggcctgcagaagctgcagcacc

SEQ ID NO: 3700 - DNA, 2638 bp, Setaria italica
  Peptide Sequence Number=SeqID_69674
ggttcaacaactgtagtctgtagaaccatgtccttttcccctttgattatccatgacggtttgcacaaattacagtcatttgttggtgaagacacaacttcaccaatttcttcagcaaatggaaacaagttacagcctacttcaatggttcttaaatccttatgctaccatacaggtgattacaaaccaaactagttcaggctaaagttacaagttagatcttcatggcggcaataacgcccttgctgctggatgttttcaggtcagtgcatacacatgtccaaagcagcttcctcaatcagcaacgacaggatgtcctccccagcatctctgatgaagcattctgtttcttccgtgcaaatcagatcctgccagcccatgtcccacacaccattgatggacgcgcctgagcacctgagatccctctccagcttcaagtctaggctatcctttgtgcaacctgcgtcgtctctggcggaatagccattcagctttctgattccattactgatatctcttagcaattcctccagtgagaaatatgctcttgctctgcatttctggccctgaaatccagtgtagcacagactattttgctggtgatgttttcgttccagttgctccgctgcggtgtccaaatagatcttgtgttccttcatttcaaccttggaaattacatcatattggttgcgcagatgctcatacacgtcgatgcctatgagtttggatgctttgccaaggaaagatttatcacttaggagaagcaaaatgatttcatcttttatctcagcttcctttatatgtgttattatgtctgttgatgatgggtgaatagcatctccatcagttgaaccagttctttcagcatggctggtaaatagcgaagcttcatcggattcgcaaaagtctttctgaatatcatccacagaagattctgcctcccaatcagcatttggatagctttcatcgctaggtgttgcactatgttcagtggatgggccatcaatttgatctagtgcatgaaagatttccctttgtatctcatacgccactaactcatcaatagttgaactcttgacatttctcctggatactgtcttctgtctggaattgttatgtgttcttctctgtaagacgggcttcaccgagtcacaagagcgactgctacttgacactgattttctatcaggattttttgccactttagcagtacgagatgctgatactgctttagcctttgcatcctccctccctcctctgttccgtgaagttaaattagatttttgcttctccctagttctcctattgatctcagtggtctccttgatctgctgctttctgcttgtaggagcagcaatctttatttcttttggagattttggtcgagcctgctcaatgtttatctctctgagacttgatttcatcggtctgatctcattagtcgctacagtattattagaaggagtgatgcccttctgtgaactagtataatctgtccgaacattgtaatgttctggtgctagcttttctgagctaggcatctctgcatcaaaaccagactcctctccaaataattgcgtctgtagcctttgtgatttgggcatctcaatatcaaaccgtgctcttggtgaactcactgtcttaatcttctcatctttcattttagagttatcttttgtgagggcaatccatcaaggcccatgagcttggctaccaaacttggggctttagacttgcccggttgcactgctgcacaagatggaagtgatctcggcgccactttcttctgttgagaaatcttggaaatcaaataattgttcggcaagtaccgtgctgactggctcaaagaggcctgctcattattggaggacaccgacaggaggttcttcctgtagaaactatccttgacagcattcttcaactcatcagtagaattgcttagctgcccgtgcaatccattgttaacagttcttggtagtgccttcttggcatttgacggaggacttcacggattatggtatctatttctggagatttttcaccagtttttggtcttctcttcttgttggatagtctcatgctctgcgatgcagtttggaatttctcaagcattgcaagggactcctggagatccatggcgccccttaggaggtcctcggcaaaatgtttggatagtgaggacgccataagatagtccccattgaatgacatggatctctcctcccggtagctttgcgacgtgctgcgttcctggccttgacagtttcgacaaaccgaaggttgcagtgtaacaacacaaggaacagcacattggactgtttcaggatagcttccatctttgcttctggggggaaggttctttgaaagggatctgcaaaccactgatctgaaactgtcttgatgcatattgtattttttttattatgttgagacagtacaatttgtgcaggggaaaggagatgccaacttagaagcttgtttccttgaggaaattgtgtctgtctgaactctgaagcctcaatgaggacacagagtcaagaggaaacttttgcctcttggaagtgctgcaagcctcctgccgcacctagtctggccgttcgtggttgctgctgcctggcctgaggtggttgcgcaggca

SEQ ID NO: 3701 - DNA, 262 bp, Setaria italica
  Peptide Sequence Number=SeqID_69675
aaggtgctccagcgcatcgcgcagagcggcagcgtggtggttatgtccatccaccagccgagctaccgcatcctcggcctcctcgaccgcctcctgttcctctcccgcggccagacggtgtactacggcccgccgggcgcgctgccgtccttcttcgacgacttcggcaagcccatcccgggcaacgagaacccgaccgagttcgcgctcgacctcatcagggagctggagaccatgccggacggggccagggacctcgtcg

SEQ ID NO: 3702 - DNA, 440 bp, Setaria italica
  Peptide Sequence Number=SeqID_69676
gccggagaaagggaagcggcgtccgtcgcgtccgctgtcgccgcggacctcgattccgcggtgccggcgctcctctccttcgcgaagggcggggcgggcgccgacgcgcgcgtggacgccgtgaggatcctggctaccgtggccccggagctggtcgcttatctcacgggggatggaaaggagaagcctgggagggtcagtatggcggtggaggctctggccgcagtcttgtccgcggacggagttgcggaagaggctaaggatgccgtcgtcgttactctcgtcgccgaggacctgggccgcatcgcgacgacgctgctcggcgcgggctcgaacggcgccgcggtcctggaggcgatcctgacgttgcccgcggcggacgccgacgccaagaccgccatcgccgacaggccggagctgttcccggacctcgtgcggat

SEQ ID NO: 3703 - DNA, 285 bp, Setaria italica
  Peptide Sequence Number=SeqID_69677
cgagagcaacaagcctacaaggacgacagcaagaataatccttgccgcccccgatcaagtccgtcgatcaagacaaactctaagcaccggcgtcaaagcgagctagcggcggcgatcccgatcgacgaccgatggcgtcgccctccggcaacgaaccccttttggcggctgcgccgccggtgccggcgccggtggtggtggtgtcaccccagttctgcgcgaaggaggtggtgccgctgacggtgaccaagaaggtcaagagcctcaccggcggcgacttcaccg

SEQ ID NO: 3704 - DNA, 276 bp, Setaria italica
  Peptide Sequence Number=SeqID_69678
tcggagcgcgcgaaccccgccgcgtccatggcgcgcgcgaacgcctcgaccacccgcgcgtgcgtctcgccgggcagcatggtgaacgtcgtgcccgagtccaccaccatcccaccgttcccggcgcggtccacgcgcccgagctccgggcgggccgggatcctcgtcgcgcccaccgagaccgcctccagcgccaccgagtagaagtacgggtgcctcgggttgtggagcagcggcgtgtacacgaagccgccgccgccgcccgcctcggcggcg

SEQ ID NO: 3705 - DNA, 760 bp, Setaria italica
  misc_feature (221)..(221): n is a, c, g, or t
  Peptide Sequence Number=SeqID_69679
tttgtctagttgtctaaggttattaaatttctttggttgtctagtagtcgttggttcgttctagtgtatggcttgttagccaagtacataacctcgcaaatgttcgtgaaagaagtgggtaatgtggttgaggaggtgaagttgaaggttgcttatgtgatgccacctgaaccacaatcagagattgcagaggaacacgatggtttagagagagttttaangcctatgcagcagattgtggataatggaaggagtacttcagagctgtcgagtggctctgcgtctttgagatcagctgaggagggaggatcgtgatcacctgttgggcgaattgtgaagagtgaggagttcctgaaggctgcaacacctgctctggaaacaaaaacatatgcaggacgtgctgaacaatcccatcagctgtcagctataattgcaaaaactgaccgaagaaaagaattctgcacttgagcaaaatagaaagcttcgagatgaattgatggttgtctgtcattgtgacatgcaggaacttgtaaggcgcgaagccagtaaacagcaaggcagcttctcgctggttctcttactagctctcggggtcctgtgcgtcattctgggtcatcttgtaaagaaatgagaatttcatagtctaatcaagtactcggtacggtaaataaaaggtgacatatagtgtgattcttagattcgtagaagaccaattaacaacaaacccaacttagaacgactacgacgactagttagacga

SEQ ID NO: 3706 - DNA, 1039 bp, Setaria italica
  misc_feature (1018)..(1039): n is a, c, g, or t
  Peptide Sequence Number=SeqID_69680
gccggagctccagttcccgtcgtgctcgacaagcagatctcctgcccccctgcggctcaccaaccgcccttgtgatacctgtgggtagaaggtcaagacgacgagccccaggaagtattgcgtgcgtcccaacaatggcgtggtgcccccacgatcctcctgcacagttgtagttacgatgcaagcgcagaaggtggtgcctccggatttgcagtgcaaggataaattcttggtgcagagcgtggtcgtcagtgatggcttgttagccaagtacataacctcgcaaatgttcgtgaaagaagtgggtaatgtggttgaggaggtgaagttgaaggttgcttatgtgatgccacctgaaccacaatcagagattgcagaggaacacgatggtttagagagagttttaatgcctatgcagcagattgtggataatggaaggagtacttcagagctgtcgagtggctctgcgtctttgagatcagctgaggaggtaggatcacctgttgggcgaattgtgaagagtgaggagttcctgaaggctgcaacacctgctctggaaacaaaaacatatgcaggacgtgctgaacaatcccatcagctgtcagctataattgcaaaactgaccgaagaaaagaattctgcacttgagcaaaatagaaagcttcgagatgaattggaacttgtaaggcgcgaagccagtaaacagcaaggcagcttctcgctggttctcttactagctctcggggtcctgtgcgtcattctgggtcatcttgtaaagaaatgagaatttcatagtctaatcaagtactcggtacggtaaataaaaggtgacatatagtgtgattcttagattcgtgagccagctgccaatgctagcgagccgcgcaacagcgcgagcgtcaagtgggttgtgtaatggcatctagttcgatccataatgtattttaactaatcactggaaagtgattgctactttggtgtttgatttctgtatctatccccttcaatttatcacctnnnnnnnnnnnnnnnnnnnnnn

SEQ ID NO: 3707 - DNA, 1076 bp, Setaria italica
  misc_feature (1)..(88): n is a, c, g, or t
  Peptide Sequence Number=SeqID_69681
nnnnnnnnnnnnnnnnnnnnnnnnnnnnnnnnnnnnnnnnnnnnnnnnnnnnnnnnnnnnnnnnnnnnnnnnnnnnnnnnnnnnnnnnagttactagacaccaggatttcattagcttattgttctgcttcaaggtcgcatacagctccaagccatcaaaaattctttttgtcgctgaatccgacagaccgtggcgagtcaataggtgtctcggactcccggtggcgctaggcgctagatcgtgtaacagtaacgcactttacataagcagtcactgcatctagatcacctaagaaaccatcgtcgtctaccttctccttcatcttcttctaccaagagctacacctaacagcctagtacctgcaggctccagcttcggccgaggcgcgccggcagttcagttcagctcagctcacttgcggctggctgccgtagaacgggtaggcgccgtaagccggagcagcgtacatgccagggtcagggaatggcgccgcagggtagccatagccgttgtagaacggggacgccgcgtagtacatcccgttgttccactggttgccgttgtcgcccctaaactgcttgtttgctgggttgcggccccatgaaaggcgcacggtctgtttgccaatggtgcttccatttagtccttgcaatgcatcttctgcattctttctctgagcaaattgcacgaagccacattgtttcccgactggaatctttacggaagatatttctccatactgggagaaggtctgcctaaggtcctcttcactaacatttgggtcgagcccgccgacaaatacagttgtgtttgtcaagtctcctccatctgatcgagcagatgaaccatttgatccagtagtacctgatgattttctgggagttgcagggcctattctcatgggcctagaagagcaatacacaccattcatctcagtcatggcatgtgtcttctcactgtcatctccaaacctcacaaaaccatagcccttggatctgccagtgttagcatcaataacaactttggcacctttgacagaggagtacctgctggagaaagtctccagtaatgtggc

SEQ ID NO: 3708 - DNA, 1620 bp, Setaria italica
  Peptide Sequence Number=SeqID_69682
cagggagaatgtttccacttttgtcagtcatatcacgccttccgtgaacctcagggaaaagccttgtgtgatgccttttctggacaactacgaaggtgactggaggtaaatatccctcctccaaagaagcacaagcctttcttatggcatccatttcatgaagcagtacatggctgaattgaccttcacttacaccatccctgtagaatattatcctctcaggcctgcggtttgtcttcctgcggaaagcaatcagtagctccctgatcatgccaccgttaacattgtgccccttctgtggatctttactgacggtaaacaggtcttctattatctcttgtcggtgtggttgagcagaaacaagacctctgtacttggtgatttctggccagtccattgatgccaccacagcagcaatggatgatgcagagtcctctcctggtggggggtgtgtgacatcagcgccaaagattattgttgggacttctgacacaaagggtatgccattgcgtacaaaggctcgctcaagaactgtgttgcgccctccaaccttgacattgattttgagtgcaacattttccagatattgcttgtttggcctgctagcatgctttggcaggcaacactgggatacaattccgatgtcagtctcacagactcttttaatttttccataggaaccactaacgtcaggcagaattacaattagaagctgtagctgatttcgtgctccctgttgggcagccatttgtgtggccctcctgtgtacatctctcaaagcattctcgatatggttaggagcagctgacttgacttcaacaaatggccttggattgacattcattcctgtggcattgcacatatgggtcagatccatacagaacctctgtacctcctcaggacgcatgcgtgaaaagttcaaacaagtccagttatcaatagttccaccgttgatcattttcttgttaatcatgttccattgtccaacacttggggcacaagttttctccctaccagagtcatgatatttcaacaagggtggaggcagcacacgggctggaacagacacaaggtcgctgcagactttgatgccaaattcctgagcaaacttatcctcagcatagttgttatgcagaaccatatcacggatgctctgctctctctcctggggacgtttacaggtcgctctaagtatgttcgtcacttgtctgtcattaagcttcttagagtatctctgcccttctacgatcttgcaaacctccataggcaaatatacgggacgcgaatcactgccagcctgaagacagggccaagaaccaaacttcaatctgtagttatatttgtcccaaaagtactgcacaacagtctgtcttgttcccttctcatcaacaggaaatatcagctggctcatagggatgggagtgattccagttatcttgtatcttctgatctggtcctgttggtgacttgtttcaatgcgaactccacgtaatgccttctttatcttcacacgatctctgtctgacgaaggacgagaggtatcacgtatgctcaggaactcttccacaaacttgatcactgtcacaggcttaaaaaaggaattgttaggtacttaagtta

SEQ ID NO: 3709 - DNA, 1373 bp, Setaria italica
  Peptide Sequence Number=SeqID_69683
tttttatcgccatcaacacacacggttattttccaaattgccgggatgctacatgctgatcaatggcatgcgtgcttttctacctgatggcaataccaatgactgctcacaatggccaatctaatagtataagaaatatatgaatatcgaggcgctcccatggcccccaacccatgctgtcaccttaatctacagccaccgtccatcccttgttgtcctcggtcaggcccatctggatggacgtcagagtcgtgtacagctcctgcgccaacgtgtccgagccggttctgaatgcgtgcctctgccccttgtacgtaaccgtcgacaccggcgccaccaccaccgccgtcccggtgcagaacacctcgtcggcgtcgatcaggtcgtcgatggagacgaggcgctcctcaaccttgtagccgcggtcccgggctagctcgatgacgctcttgcgcgtgatccccggcaggatggtgcccatggtggccggcgtggcgacgacgccgcccttgacgacgaacacgttgcacgaagagacctcctccaggtagcgcttgtgcaccgagtcgaggtacagcacgtccgtgaagcccttgctcttggcgtccagctgcgccctgagcaccggcgcgtagttggcgatggtcttgacgccgccggtgccgcccggcatcgcgcggtggaactcatcgtccacgaccaggttgatcggcgccaggccctccttgaagtagtttccgacgggcgcggcatagatgaggaacgtgtactcgggggccggagccagcccgaggatcgggccgctccccatgagcaggggccggaggtacagggccccctttccctgcggcggcacccagcgcctgttggcgaggacggtctccttgacggcgcgaacgaactggtccacggacggcgccggcatgcacatgcgctcggctccgtgctgcatccgccgcgcgttctcctccggccggaacagcgtgtacccggcgcggcctggccgccggtacgccttcatcccctcgaacaggccctgggcgtagttgaggacgccggaggaggggctgagctcgatgttgccgtagcggcagagctcgccgcggggaagccgccgaggtcctccggcgaggaccgcatgacgtacatgtagtccgtcggggtgaggccgaagccgaggttgtcccagtcgatctcgccgcagctctcctcgtcggacctgtcggtgtggtccagctgcggcagcgacgactgccaccggcgcgggcagctgcctcctcctcctccggccgttagcaacgccccgcccagcaggaccctcgcgaggccgccatggccgccgcgggcccacggaagaagagcgcccttcgcag

SEQ ID NO: 3710 - DNA, 336 bp, Setaria italica
  Peptide Sequence Number=SeqID_69684
tgcgaggggacgcttgagcggcgagtggccggaggggagaggggtgtagtggccggtgcggacgttgaggcggtcgtagttcttgaggaggagcggccatgtggaggcgtcgagggacggaaccagggactggggcttgattaggtagccatcggtcttctcctcggcctcggcgagcgatggcggatcgatggcggcagcggcgtccttcgacttgtgcttcttcttcttggatttggcttgctcggaagcgggggacgcgacggccggcggcgtggacgacatggcggcggggcgggggattgggggacttggggaattgggggtaccttctag

SEQ ID NO: 3711 - DNA, 681 bp, Setaria italica
  Peptide Sequence Number=SeqID_69685
atgagcggcgggcggctggaagacggcgcccgtgagagcctccagcgcgcgcgccacgcgggccgtgtcaggcacggcggcgtggaagcgcgcgacgcagacgtactccttcccggcgccctgctgcgacttgacgaggcgcgtggcgcggtcgacgcagacgatgaggttgcctgtgaccttgggatcgagcgtgccgctgtggccggtcttctcggcgcggaggatgcgcttgatccaggcgaccacctcgtgggaggacgggttcgacggcttgtcgaggttgatgatgccgtagcggaggtgctcggcgagggggcgcttgagcggcgagtggccggaggggagtggggtgtagtggccggtgcggacgttgaggcggtcgtagttcttgaggaggagcggccaggtggaggcgtcgagggacggcaccagggcctggggcttgatgaggtagccatcggtcttctcctcggcctcagcgagcgacggcgggtcggccgcggcggcggcggcagggtcgtccttcgacttgtgcttcttcttcttcgatttggcttgctcggagggcgggggacgcgacggccggcgtcgcggacgacatggcggcggggccggggggttgggtagtttctagggttttcgcggcggaggggaaaggtgggcggcggcggcgtggac

SEQ ID NO: 3712 - DNA, 652 bp, Setaria italica
  Peptide Sequence Number=SeqID_69686
gtctcgggtttgagcaatctctggatccgtgacatcgcttccttccttgctcttcttcttcttctttttcttttcgcttccatccttctcgtcagccacatcaaccttctcctccttcagttccgccgatcctgattcagccttatctttcttcttcttcttcttcttcttctcactcttttccccttccactacctcagcagcttcctcaaccttgatcttcttcacaggaatggaagcatcaccatcatcattctcctcatccttcttcctcttcttctccttgacctcttcaccgccgacagcatcttgttccacctttgccttctctggctcaggagcagctgcaatgctagcaatcgatacatcaccgccagtgggaagcaccacattccggagccactcagctggggtcttctcatttggcttcccatgcttatcaaggaggccctcagcaatcagctttttcttcttgagggccactgggccaagcccccacttcctcgggtatgtgtctctgtccatcacaaccctcttgatctttgcgaccgcaccatggtcacaagtcgccatgacagcagtggtcatctcagcaatacctatagcaatcggctcccctttgttgtctattctagtaaactaaaccttccta

SEQ ID NO: 3713 - DNA, 1653 bp, Setaria italica
  Peptide Sequence Number=SeqID_69687
ttttttttttttctttttgttcaacaaggtatcacagttacttgagctctttaacacagcagagtatcacagtttggcaagctcgaaagttatcgacccaatggacagctaagctgtgaagagatcaaaacctcactgcattgtatgataacagaaacaacaatacagccaccgtttttcaagagttccaatgaaaacatcagcaccgccccctgcaacttcaaaaaagtaaacaaccagccgcggtagagtatagttgtacctactgcgcctcctctgcatctcgactcttcttctttttcttctcctttttcttctcgctcttctcagattccgcgctgtctcgggtttgagcaatctctggatccgtgacatcgcttccttccttgctcttcttcttcttctttttcttttcgcttccatccttctcgtcagccacatcaaccttctcctccttcagttccgccgatcctgattcagccttatctttcttcttcttcttcttcttcttctcactcttttccccttccactgtctcagcagcttcctcaaccttgatcttctttgaaggaacagaagcatcagcatcattgtcctcctcatccttctgcctcttctttttcttctccttgacctcgtcagtcacagctgcctccagttccaccttcaccttctctggctcaggagcagctgcaatgctggcaattgcaacatcaccaccagttggaagcaccacattcctaagccactcagctggggtcttctcatttggcttcccatgcttgtcaaggagaccttcagaaatcagcttcttcttcttgagtgccaccgggccaagcccccacttcctcgggtatgtgtctctgtccatcactaccctcttgatctttgcaactgcaccatggtcacaggtggccatcacagcagtagtcatctcagcaataccaattgcaatcgcctcaccctttgtcgtcatgagaaccacctcctccccattctcaatatcattctcaaatcggagcaacccagggatcataagcttagcaccatagcatatagcattcacggcagagtccttcaccacaagccttttgtagctagtaagcagtacctcaagcggcatcacaacacgcctcaagtaggactcatccttgtggttgtcaagcgaccacatcgagtccatcacatcatgcatggtcaccatgttgtcctgctccccgaggatccccgacctgacacggcgcagctcctgcatatgggcgccgacaccaagaagcaacccaaggtgcacacagagagtccggacataggtacctgcctcgcaagagatccagaacacggcgagatggcgctcgggatcgtgctccaggagcttgctctcgtagatggtccgcaccctgagctgacgcttgaccgcagagatgagcggcggacgctggaagacggcgccggtgagagcctccagcgcgcgcgccacgcgtgcggtgtccggcacggcggcgtggaagcgggcgacgcagacgtactccttgccggcgccctgctgcgacttgacgaggcgcgtggcgcggtcgatgcagacgatgaggatttagttaaggttttagtttaccggttttaaaccttttttaggggttttacgtttaagtttta

SEQ ID NO: 3714 - DNA, 356 bp, Setaria italica
  Peptide Sequence Number=SeqID_69688
cgtcgccgggtgcgcactcgtcgccgctgcggccggtgcactcgtcgccgtcgtcgacgctgtcggaggcgtcgaacgcgtcgtcgtcggcgacgtccgtgtcgctgaagcgggcgcgcgcgccgcggaagcggccgaaccaggcgtacaatgaggccgccgcgctgctcgcgtccatccacccctccgtcttccccgtcaagaagagccccaagacggcgacgcgcccgccggtgcggcagctctccggcctcgccgcagcgttcgacgcctcctccgacctcctcccgccgctccccgtcctcgcggacaccgcattcctgctccgggacgtgcccgcgccgccgccgccgctg

SEQ ID NO: 3715 - DNA, 321 bp, Setaria italica
  Peptide Sequence Number=SeqID_69689
tttgatgttggaagccatcttccacatttttgcatctgcaaacaccttcatcattgtactatatgtgaaaacatctaactttaaaagaccatcacactcctttttcttcatttcctcataaatctcttgagccaagttgaattctctggcattgcaacatgtcttcagaagaatgttatacgaagtcaaatcaggagcaacaccaagattctatgaacagcaacaataaggtagaagatgcattacttgcatatgcttgtagactgaaaggttgtagctcaaactatgggcatttacgttcataaggctgttgaagacgta

SEQ ID NO: 3716 - DNA, 354 bp, Setaria italica
  Peptide Sequence Number=SeqID_69690
cctagaatgtggactaggttattttgttttatttctgcaaaatgaggccaagtctcatgcacgcacatatcagcagtgtgtgctgtagtaaaacttccctgttaagctcatcttatttctgctaacatggacgagtgttcctcttgctatgtcaccaagggcgtgctatgctgtagagaacttcattgattacacttacactgtctgcaatttataactccaaatggcagcagttaaatagatattcttttatggatcatgtttctgaaagtcttcagtaaatagtgtacctattaatatgcttcttgtgtttaatcatgtgtcttgtatgcacagtggcaatgcaaaagaaga

SEQ ID NO: 3717 - DNA, 1454 bp, Setaria italica
  Peptide Sequence Number=SeqID_69691
ccgctacatcgcctccagccctccaccatgatgtccccggcggcctcctcaacggccccggccgttgccttcctctctgcggcgcccacctcctcctcctgcagccgccgcagacgcagccgcctccgctccatctccgcatccctctcgccgtcagcttcgtccgaggagccgctgttggtgcgcgcggcgcggggcgaggacggcctcccgcgcccacctgcatggatgatgcggcaggcggggcggtatatggcggagtaccaggcgctggccaagcgccacccctcgttccgggagcggtccgagaacacggacctcatcgtcgagatcactctgcagccctggcgcgccttcgcgcccgacggcgtcatcctgttctcggacatactcacgccgctgccggccatcggggtgccgttcgatatctccgattccaagggcccggtgatccaatcgcccgtgcggtccgaggatcaggtcaagcagctcgtacctatcgacctcgataagctccatttcgtcggggagtcgctcaggattctgcgaaatgagattgatggaaaagctgctttgctaggatttgtgggggccccatggacaattgcaacttatgttgttgaaggagggatgaccaacacatacacaaatataaagagcatgtgccatacagctccaaatgtcttgaggggccttctctcacaccttgcacaagcaatatctgactatatcatttaccaagtaaactctggggctcagtgtatacagatatttgattcatggggtggacaacttccacctcatgtgtgggagcagtggtcaaaaccatatatcaaacagattgtgagtaggattaagaaagagtgccctcatgtaccccttgtgctgtatataaatggaaatggaggtttacttgagcgcatgaaggatacaggagttgatgttattgggcttgactggacagtggacatggctgatggaaggaggcgccttggtaatggaattggtgtacaagggaacgtggatccagcatttctattttcaccgttaccagtattgactgatgaaattcatagggttgtgaaatcagctggtccaaaaggtcacattcttaatttgggtcacggtgtgctacaaaaaacacctgaagaagctgtagcacatttctttgatgtcactaggagcttgagatatgacacccttttccaaggttcagttgctgaagaattgcagcctgttgcatgacaacggcaatccattcttgttttcatcaaatgtctatttgatccgttgtgtatcatcctcgattcctagtgttgtctagctcaataccttctgccttctaagaggcactccttttgcgagaacctggatatgttttgtagagatatagacagaaaattgatgctattttattcattgccaaacagcttcattattacaaaaaaaaaaaa

SEQ ID NO: 3718 - DNA, 1915 bp, Setaria italica
  misc_feature (1871)..(1871): n is a, c, g, or t
  Peptide Sequence Number=SeqID_69692
cggccgcattgtcctgcccctccaagcagcaatgccgcggcacgaccattttggcaagcccgtggagccacgctggtacaacctcatgcgccccagcgatgatcctgagaagaaggaaatgaagttcgcgagcaagatacagatccggatgtcgcttgattttgggtaccacgtccttgacgagtccacttactacagtagcgatctccagccatcgtcaaagccagcaaggaaaccaagcattgggatgcttgagctgggggttctgggtgcccggaacctcataccaatgaagcccaaggatggacgcaccacggatgcctattgtgtggccaaatatggaccaaagtgggtgcgcacaaggaccattcttgacacgctgaatccacaatggaatgagcagtatacatgggaggtgttcgatccttgcaccgtgatcacagtggtggtgttcgacaatggccaaattgggagcaagaatggtggtggcccagatcagcggattggaaaggtcaggatccggctgtcaacactggagactgacagggtgtacacacatttctaccctttgctggttttacatccaagtggactcaagaagaccggtgagctgcatttggctgtgcggtttacctgcatggcttgggtgaacatgatggcgctgtatggtcgtccactgctaccgaaaatgcactacacacagccgatcccagtgatgcaattggactacctgaggcaccaggcaatgcagattgttgcagcaaggcttagtcgtgctgagcccccactacgcagggaagttgttgaatacatgctcgatgtggactcgcacatgtttagtctccgacgcagcaaggctaatttttatcgtattacctcactgttctatggttttctggcaatgctcaagtggtatgaaggcatcaggagctggcggaacccaattacgacaatgctagtgcacatgctgttcctgatactgatctgctacccggagctcatcctgcccaccttcttcctctacatgttcatgattgggctgtggaactatcgttacaggccaaggcacccgtcacacatggataccaagctatcccatgctgagatgacacaccctgatgagcttgatgaggagtttgacacattccccacatccagaccagctgacattgtaagaatgcgctacgacaggctgaggagcgtcggaggtcgtgtgcagacagttgtcggggacctggcgacacaaggtgagagagcacacgccctgctgagttggagggaccctcgggccaccggcaatcttcatattcttgtccctggtggtcgccattgtgctctatgtgacgccattccaggttttgatggtgatcaccatgctttacctgctgcgacatccccggttccgcagcaggatgccctccgtgcctttcaacttctacaggagactgcctgccaagtccgatatgctcctttgagctcacagcattcagcgtacgagaaatgggtgaaagttgtaacttatttatgtctgggtgaaagttgtaacttatttatgtctgttccactcggttccttctgattagcatcaggtctgatgtgaatatgcctgatgagttcgtatattagacggcaatagtggcccaggaataaggtgttggtttaatggtttatttccttggttatgccaaagaaagggaacaactgatcccttttgagttttgggacagtgagaagaggtttttgggtgctaaaatgtaatattagcttcaggttactagcgtagaactaaaggcaggaacaatattgtccccagtgtattttgtttgcatttgtgtcagtttttgtttgtgtttaacaaaaaaaaaaaaaanaaaaaaaaaaactaaaagagaactagaccaaggacacacaggga

SEQ ID NO: 3719 - DNA, 677 bp, Setaria italica
  misc_feature (550)..(550): n is a, c, g, or t
  Peptide Sequence Number=SeqID_69693
gttcagatgctcagccagggagtggaagtggaagtggcgatgcaagccatgaatcagctggaagttctagttcagtgaagagcaatgccggagatggcggaggtgagcacaatagtagcagtgtgagtgctgttccaactagtaaccaaactggtagtagtgcattggcaggggagaaagaagttggatctcccagtaagaacaacatggttgtagcatccccggctgtaaagaatacaggaaacagacaagaaaaaacaaaaaagtaaaaggaaagttgcttccggtggaagcagtggtgcagtgaataagcagaagggagatgctactcagggaagcgctggctcatcaaaagaccattcggcccaagcagtcacctcaaaatctggaaacgacagtaagggtaacgtgtcgacaacaaaacaggatggtggttctagtggaaacaaggaagttgattggttcaagcaggtggccagttgtgatatgttccatgggcattgggttagggatgactcataccctctctacccggagggatcgtgccctnacattgatgaaccctttgactgctatctcaatggtcggcgagatctagcttatcagaagctccgttggcaacccagtggatgcagtatcccaagattgaaccgaccgacatgttggagaggctaggg

SEQ ID NO: 3720 - DNA, 411 bp, Setaria italica
  Peptide Sequence Number=SeqID_69694
tcaaggagataaatcaggcaacttgaaagaaaagataccgcttacaatgtgcctaatggaagttaactaattacatcatcaggcccatatgaatcagcaaagtgatatagaagcgggcccaagtttatccagaccccaccatccttaagaacttttgatatgatctcaatatattcaacaatattgtgtgccgtatccaggaagaagcaagttacacagcatcccatgcagattcttggctctcctcactgtagacctctacaaaatccccagcacacattgaaaatccatccgtgatacctgcacttgagggatggatatcaggaaatgaaacaggccgaagttgatcattgtctgaaagagaattgcagttactgtgtatccaaggataatatagtccattcattagcc

SEQ ID NO: 3721 - DNA, 1798 bp, Setaria italica
  misc_feature (1)..(97): n is a, c, g, or t
  misc_feature (1787)..(1787): n is a, c, g, or t
  Peptide Sequence Number=SeqID_69695
nnnnnnnnnnnnnnnnnnnnnnnnnnnnnnnnnnnnnnnnnnnnnnnnnnnnnnnnnnnnnnnnnnnnnnnnnnnnnnnnnnnnnnnnnnnnnnnnngtcagaaaaatttcagcttcagcgctgagaaatgtataatggacagagttcaagaaatcatggtacagtttcaattcacaaattatacacctttggagttactgcctatagatcacaagacaagcgtcacgattttgacaatagtgcatctcgttgtgctatcccggtctccaaaccaactaacggtctaacaccttgtacgctagctagctcatccttttctcctatgtagtccgagcagagacatcgccctttcctatgtgatgccaattatattctatgtgaatcaggcagctaatctgatatatggctatctaaagttgtcatggcgcagtttctgtagagtttgaatacaatggtgaaaaaaatgatggcacgaactgatcatcccatttgcgccagcctggataaacacgccatggactgatcagcctattagttgtataccgcagatcacactgcatagatgattatcttcacttcaacgaggcttctgagcctttgcccgagatgcattcttcctcattgtccagaatgctgcacggtatcgattctgcatcattgctctcatatttgcagtgtaagtagtttctatcattttctccacctccatcacaaatccgtaatggtaagcaacctttttcacatcttccagacttagttcaatagacatatcatcatcaggcccatatgaatcagcaaagtgatatagaagcgggcccaagtttatccagaccccaccatccttaagaacttttgatatgatctcaatatattcaacaatattgtgtgccgtatccaggaagaagcaagttacaacagcatcccatgcagattcttggctctcctcactgtagacctctacaaaatccccagcacacattgaaaatccatccgtgatacctgcacttgagggatggatatcaggaaatgaaacaggccgaagttgatcattgtctgaaagagaattgcagttactgtgtatccaaggatatatagtccattcattagcctcttgggtgtggttcaggatgaaacttgaacaaatcagcatgtaatatgagaactcattcccctggcttacaaaacccagagaagatatctccagcgccaatctcccaagcccagcaccagggactagacatgaaggaggcctttcattgctccggttaggaaaaagacgattaagctcctcgagaataggcttgtagcactcatcacgttccttttgaccctcttcagcccaatctctcactatatttcttatgatgcatcgtaccttgtcaacatcaattggaggaacattcaacttgaacaatgaacctgcgcaatgccgtggtgttacattatcaacagcagaagatgcagagacatctttatcttgacaataagctgtgctcgtatctgtatcaccattacacgatacatgtacaccttgggatgttcccaagttgctgccaacaggctgcgagcagcgtgccgtgtggtcttcctcatcctttttattgacagtttcacttgaagaaccatgggccttggcatcttcttgggggttatcatgctgctcatccaatgatgtattgcttctggaagtagaaattgttgagcaatcacccctccatggaatgatgagtgcaatccacatgaatgtggtcatgcatgttcgatggatgatcatccgccaccaacntctagataacg

SEQ ID NO: 3722 - DNA, 1493 bp, Setaria italica
  Peptide Sequence Number=SeqID_69696
aacagttatccttcaactctaacaaataaggcttcttataacactacttcgagttcacacataagacctcacatagaacccccagatttcacaggtttcatggcaagcctacactctaccaacacaacctaagaacagacctggcattataacatccctaaagacgtgtaaaaacatcagtccttgcttctatgcaacattcataagaaagaacagacgactgctaaaacctagtgcctcctgaagctttcattcagcgaaggctgcagctacgcggctgccgacttggtggtactccttgcgggagtcctcttggggtgctcctgtcttggcaagatggcgctgtcagatgaatccgagctgctgcgctccccagcctgtcctttgctcgacatcatcttccccagcgccttcttcggcgttgcaccgcctttcgccctgccattggccgctttgttgcctccatggttcttctcagcgtcagtaccagcggtgtcacatttgtcgagctttgtggtcttggacaggctgaggtcttccacggccatgactccgtcccactcgtcttcagtgttcgttgtggcacctgatcttgagctctcgtaggaaccaatgccgatgctgtcagctcggatggtggctgctgcagaagcccttgtctgctcgtggtatagaacctgcaccacaatcctcagaggtaggcgctcgttctgcacagcatgagcacatgcatcaggcgacaacttcttgcagtccatgagggcgcagagcctcttcttatcgctcttgcccaagcttgggtgctccttcagatacatatcaatggcacggtatagcccatcatgaactggccttgaattgcctgaaactgtctcagctagactgaaaaacttataaacaggtatgtttgggtcctttgcaacctctgcaagatatccatcgacaattttggccaccgtaatcattgatgcactaggagctgaaacatgatcattcacttccccaccattatgcttctgggcatgcttagaatcttgtctgacaaattcctcaacaatgctaagaatcaggtcaatgtcataaacagtggtatcaccgtccactgtagggatcagaagatcagacactgatgcttcttccagttgtcgggcaatacgcttcataagctctttcctgcacatctctccacacttcagcagatttgttgccttcagtagctttaaaaggaagctgcatgagactgaacctttctcagatggcaacaggcatgtgatggtaactagcattgcccgaacctttgcatcaccatggatcattgataccttgctcaatgatggaagcttcttgtaagtataggctttgattgcctcaccaataacatccttggataccatacatttggctttgattgctgttatgacttgcttgtaggcatcaatgtcaagatcagtcagatcttcaacccaccaatcctttggaactaactgctgctt

SEQ ID NO: 3723 - DNA, 244 bp, Setaria italica
  Peptide Sequence Number=SeqID_69697
cctgcatcataaatatctctagctctccacacgcgcgcagacgaagcgcgaagccaccgaacgagccgaggacgaccacgatcgaagggacccatcatcgcctgacaggagggcagctcgccgctagaggagccgtcgccgtcgtcgaccgccggcgccgcgccgtccagcaatggcccggccgcagcagcggtaccgcggcgtgcggcagcgccactggggctcctgggtctccgagatcccg

SEQ ID NO: 3724 - DNA, 292 bp, Setaria italica
  misc_feature (278)..(278): n is a, c, g, or t
  Peptide Sequence Number=SeqID_69698
gcaggcagcagtatttctcgacgccacccccgttcagtcgcagcagcccaagcccagagacggcagacgccgccgctccgcccgccgccctccttctccgccgccgccgctgcgctcccgtcccagcgtgtgaatatgtcagcgagcgctttgaaagatctcaatatttctcagccagcggacctggagaacggaaaagacaggtctatgaaatcctgcatcagcaagcctgtgttgaatggcagcaaatgtgccaacaaggaagaaaatgctccgtntgcttgccctgatg

SEQ ID NO: 3725 - DNA, 1283 bp, Setaria italica
  Peptide Sequence Number=SeqID_69699
ctatttcatccatacctgttaggaggggactgaattttggttgtgtttgttcttaagtgccttttctgtcaataatccgtgcagcgtgtgaatatgtcagcgagcgctttgaaagatctcaatatttctcagccagcggacctggagaacggaaaagacaggtctatgaaatcctgcatcagcaagcctgtgttgaatggcagcaaatgtgccaacaaggaagaaaatgctccgtctgcttgccctgatgctgtgactaatggaaatgaggctggaaatgcagacgtagagtacattgattctgagaatctagtagatctcccagatgctgatgcaactctcagtaccttagttaaaaggttggattcaaaggactgggttatgacatgtgaagcactcaacaacgttcgtcaattggcaatatatcacaaggaaagattgcaggagctgctggagcctctagttcctcttattgtgaaatctgtgaagaatccaagaagtgctgtctgcaaaacagcactaatgacttgtgctgacatctttaaggcctatggtgacctaattgttgattcaattgatccactgctagtgcaattgtttctaaaagcgtcacaagataaacgctttgtctgtgaagcggctgaggcagctcttatatcgttgacaagttggatctccccttcagtactgttaccgagaatgcagccctacctcaagaacaggaatccacggattcgagcaaaagcatcagtgtgtttcagcaagagtgtacctcgccttgatgtggagggaatcaaagagtacggaatggataagctcatccagattgcagctacccaacttagtgaccagcttccggaatcaagggaggctgctcgcaacctggcactggaactacaggtgctctacgagaaatcccaggcctcaacttctggcgaaaatgatggcgaaccttctgcctcaccagatgctgaatcatgggaggctttctgccagtccaagctttctgccttaagcgcccaagccatcctccgtgtcacctctactactccaaaagagggtgcccctgctggtgtcacttctgctccaaaagaaggcgtggctgtgggttgctagcacaaggacttagtagatgcaacgagaatgcgattttccatccagatcacctttttttttgctgtacatgcttatggttggtcctttgttacatccaatcgggaatttgttgatcgtcggtttgagagtgtttgtttgtgaccccccgcggtgttaatatcggtgcg

SEQ ID NO: 3726 - DNA, 197 bp, Setaria italica
  Peptide Sequence Number=SeqID_69700
catccagaaggaatccactcttcatcttgtcttgcgcctccgtggtggccttgttaactaagggatcaagacaagatgaagagtggattccttctggatgttgtaatctgccaaagtacggccgtcctccagctgcttaccagcgaagatgagcctctgctgatctggaggaatcccctccttgtcctggatcttgg

SEQ ID NO: 3727 - DNA, 920 bp, Setaria italica
  Peptide Sequence Number=SeqID_69701
cgccccaccaccacccgcaccctccgcaccatccccatccccacccgccgcaccaccacccacacccgccgcaccaccatcaccaccccgaccccgccgcggcagccatacaggagccacgcgtcgatggggctggattcggcgctacagtcgagctgcagttctgcgcctcctgctcctacagaggaactgcaatgaccatgaagcgcatgctggaaacctcatttcctggcatccatgttatcttgcataattatcctccacccttccccaagcgtgtacttagcaaagctatcccaattgttcaagttggagccgttgcaacaataatggctggtgaccagattttccccagacttggaatggttccacctccatggtactactcgctacgtgccaatagatttggaactatggcgacaatatggctatttggcaattttgctcagtccttcctacaaagctccggcgcctttgaagtttactgcaatggagagctggtattctcaaaattgactgagcagaggttcccaagtgagtttgagctgcgtgatctcatcggcagcagattgcccgagtcgccatttgggaggaatctggggaaaacatttacttgatgatcccagaaatcaaagctcagaatgccacattttcgtctgttgctatttaggtattgagtagacggtaactttcagaattcagttgttgatctattgaagctgcacagcttttctgtaaacacaacttccggatgtatggctataatgggtcgcctgagtacctgacacacgatgatcaaccgttatgaaacatacatatgccgctggaatgttggggggcattatgatcgcctgataacttctgggacatttgtaatatgctggagtcacactgagtcatgcatcgacgtaaaaaaaaaa

SEQ ID NO: 3728 - DNA, 540 bp, Setaria italica
  Peptide Sequence Number=SeqID_69702
acagagatagaggatcagagtatcggagcaattcctacagaaatgggagggattctgaaagaggaggccacagatacaggagtggtgatatgacaaatgaccgagggagaatgaggagcaggtcacgttctccaagcaggcatggctatggaagatctagaagtccagatcattagctgaacatttagatagttttattcacagttgggactcatgaggtagaccgttcccttttgctatttattactgtacaatgggttttattgaagtgtcgcacttgttttaagtctctgctctgctgtaacagctctgttggaaccctacagtcttcctttttacatgggaaaaaaatctcaggtaggtattgattgtccttcccacaatttttgtgactttgatattctatatgtatgctgaagctttgtttcgatattggaatcgaaattctaaaagctgaaaaatagtacaatgagaccagtactggacttcatgtatggatgctgatatttacagcctatggcaggtaaaccttgaaacaaa

SEQ ID NO: 3729 - DNA, 2015 bp, Setaria italica
  Peptide Sequence Number=SeqID_69703
aggaggaaagcaaagtcggagccgcaggctagggtttctcgacggcttcaccgccctcgccgccatggacgcgcagcgagccctcctcgacgagctcatgggcacagctcgcaacttgacggaggaggagaagaaggggcacaaggagctgaagtgggacgatcccgacgtgtgcggtccctacatggtccggttctgccctcacgacctcttcgtcaacaccaagagcaacctcgggacgtgctcgagaatccatgatccgaagctcaaggagagctttgagaagtctccccggcatgatagttatatgcgaaggtttgaggcagagcttgcacaacaatgtgagaaattggtagtggatttggatagaaaaataaggcgtggtcgagaaagattggctcatgattctgctgtgccaatgccaatccctggaaaaatagctgagcagctctcagcacgagaagaacaggtcaagaagctgctggagcaaatcgaggagcttggtgaggctggtaaagtggatgaggctgaggcacttatgaggagggttgacattctaaatgctgagaagacagctttagctaaccaagcggacaacaaagtggccatgcttgagaagaagatggaactttgcgaaacatgcggatcattcttagttgctgatgatgctcttgagaggacacagtcccatgtgactgggaaacagcacataggttatggcatggttagagattttctagcagagtacaaggctgcaaaagagaaggctaaagaggaagagaggcttgcaagggagcagaaagcagaggaacgtcggaaacagaggggtaaagagtacgacagtgggggcagggacagtggtaccagaagggagaggtctggggagcgtgactatgatcgtgatcgtcagtatgagcgaagccgtggaagagataggtcctatgattacagagatagaggatcagagtatcggagcaattcctacagaaatgggagggattctgaaagaggaggccacagatacaggagtggtgatatgacaaatgaccgagggagaatgaggagcaggtcacgttctccaagcaggcatggctatggaagatctagaagtccagatcattagctgaacatttagatagttttattcacagttgggactcatgagctctgttggaaccctacagtcttcctttttacatgggaaaaaaatctcaggtaggtattgattgtccttcccacaatttttgtgactttgatattctatatgtatgctgaagctttgtttcgatattggaatcgaaattctaaaagctgaaaaatagtacaatgagaccagtactggacttcatgtatggatgctgatatttacagcctatggcaggtaaaccttgaacattaatgtttcatgttacacactttttgtttcccttcataactttgctagaaagccttttggttttgctgtgttgtgattggtcgctctttgccttagattttacaccactcaggccaggtctctattactgtcaaaaattatgtataattgtgacttttgtagctgtaattgttatgaggtaatgtcttcgggaagaacaatcaggcaaaatgatccaggaacagttctagtcaccaacatatttgttttgtggaaccattgtaataactcttcaagagatcaggttttggttgtacataactgtaccctgctaagaaccactgggaccgcagagttcttgactctggttattggctccaagtctagttcaaagaaggttctatttctactgcaaaatatgagataacttcctacggttgtggagcctctaatgggtgtgccattatggtagatatggtgtattctaaatatgcaatactaatagatgatctgcttgagtgtatctgacaagttatactttggatcaattgacgttttatgatttccttggagcaatgtctactgatgccatgatgttggtgtgacgttcggaaacggttatgttcacctgatatcgttt

SEQ ID NO: 3730 - DNA, 2053 bp, Setaria italica
  Peptide Sequence Number=SeqID_69704
cggccgccgtctcggtggcgcgctcttctccgccgccgcagcaggcggtggtggagccagcccccgccccctcccctgaggccgccgaagaggagaaggcggacccggaaccgaccggcatatctatggaggaagcggaggaggtggaggtggcggagggggaaggggaagaggaagaggaagagggaggggaggagttgcctccagatgtcgctgagcagctgtgggcaatggtgttcggcgcaggggtttcgaaggccgttttggcgcagtggagcaatcagggcatcaggtttagctccgactcagaaacaactatgggacttgtacaacatgaaggaggtccctgcggtgttttagcaaccgtacaggcttatgtccttaaatatcttctgtttttctctgatgacttgaggaacccagaggtcagtaacccactgtatactctgggacaaagacgcttttatcagagttcttttgctgcgggggatgatttttcgtctctgactgatggtagaaagacaagagcattggttcatgctatggtggagattctatttttatgtggaactgggaaaagagctgttgtagcatccattgcacgtgtcaatcgtggaaaaaccaatgcagttttggaaggtctttctgttgaatcagcaacggatctgcagaaaattcttagaacaagtacatttacctcaaggaaggatgcatttgacatccttttggctaacattcctttgtttgaaagtcgattgggagccatgctatttcttatatctgctttgctctcgcgcggattggaatatatccaggcagacagggatgatccaagccagccattggtcaccgctccatttggccatgcttcacaggaaattgtgaatttattactttgtggagaggctgttccaaatgtatttgatggcaagatggaccttggtggtggcatgtccttgaagggcataccaaacaatgttgaagtcgggtttcttaccctcctcgaatcactaaatttgtgcaaggttggtcagtacctgaagtgcccaaagtggccgatatgggttgtgggaagtgaaagccactacactgtccttttcgccctaaaccccaacgttcaagaggaaaatgagctggaagagcgcgaatccagaataaggcgggcttttgatgcacaagatcaaagtggaggtggaggctttatcagcatcgagggcttccaacaagttctcagggatactgacataaattttccttcagataagcttgaggacctatgtaatgctggcattatagtatggagtgaattctggcaggcattgctgcagttggataaaagggccggaggcatgaaggatccaactggccttatggggaagaagcaatttaacatcttccacttcaatggaattgccaagtctgtgctgaatgggaatgcaagtgcaggtggctcagttcctatacagagacccaggttatgcaagctaaatgtcactgttcccccaaggtggaatcaggatgagtatctagccgatgttgtaagtgcatcaaccagcagcagtaaggatgacaatattctttctctagctccgccagttcagacatctcagcacgcgccattagtggactgcattaggacacggtggccgcgagcagtttgtagctgggctggagatatgccaagtattgtctgacacagtgaaccttgtgccagtcactctagctatattgctcataatcccattcagaagaatctactcagagcaggctgcttgagcttccaggactgttcatgccctgcgataaggaggaagatgggctggtgttgtaattgctccgagttgatgagtataaggttttgttctttgaaatgagtgatattttgatgtgtgtttttatcaggtacctgaatattctttttccttctgttgacattagatgtatacttgatttatgaatatgtttcaggcttggggtaattcttttctgtacacagatagttttgttaagttttcatttatctgacacattgcgttgcccctttcatgccgtt

SEQ ID NO: 3731 - DNA, 474 bp, Setaria italica
  Peptide Sequence Number=SeqID_69705
aaattaacgaattgataccttctttcacgttatactgttatagtgcgcacacagaacagttaaggaattggggatctaatgggtctctcgtagctgtagcttacagctgctgtgagcacctagttatcccatgctcctataagcttggggcatgttcttatataatctgccttcacaaattttatgaaagcgtatggcaccagctattgaaaagaaaggagtttgttattgtgtttatcactaaagcttttccaagatatggcggacgggttacaaaattagcaccctacttatcccgaatggtagatttgcgaaatacgatatccttaactgttgctggaggccctagagaatacactaggaatgggaagtcttccttgtgaattgggatctatatctgttaactcgagttatgtatgctatgcttcatttttttttcacgacaggcttaagtttgcgacattctatttaaca

SEQ ID NO: 3732 - DNA, 213 bp, Setaria italica
  Peptide Sequence Number=SeqID_69706
cctgtcaccagctataaattgtgcggcctattgggggtttcttgccagcataaaagcccaagcagcgatgctcaacaagcatggatcaagctgatgttgcaaggttgagctgtgggaagcgccttatttcccccactgtatcggaggacttcaagaggacgagttcttccgatacagtgtgggaagcgccttatttcccccatgtatcggagg

SEQ ID NO: 3733 - DNA, 463 bp, Setaria italica
  Peptide Sequence Number=SeqID_69707
tgcagaaaaaggaacccagtcaaggtaagtccattatcattcacgccttcaggcatcttctcctgaacaactctcttcacgcctgaaatttcagtaggctggagaggagcactgaaacatcggacctggaattcattttatgtgatagtgacaaggatgttgctctcagtgatgtggagctcaatgaattccaggtccgatgtttcaatgaaggctactccactttctgattatacacattttttattttatggttatgttgctgctttacaggtccgatatttcagtgctcctctccagtcttactgaaatttcaggcgtgaagagagttgttcaggagaaaatgcttgaaggcgtgaatgaaaaatgcataaaccccattccctaggaagaggaggtagctacaacaagcatcagtggtcaaaatgtttttgtaccatctcccacttaagctatcttctgc

SEQ ID NO: 3734 - DNA, 1778 bp, Setaria italica
  misc_feature (47)..(47): n is a, c, g, or t
  Peptide Sequence Number=SeqID_69708
aaatggcacagaactgttcaaaaaagatctgaggataaaacccaggngcttgttgacacaatagaaccaatttcagatagaacagcctttagtttgggtaagttactgtgttactagagctaccacaaaactaaataaaaaataaagttctgcaaggcccttttttgctgcataaatgtggcactagcacagacgtatcattctaatgctcatttttctatgattcatatgggttttttggtaaaccaaatacctaggagaacattacaagtcacataatacctaggataaaattacaatggagtacaatgaataagtaagaaactgatcccaatatctaatctgggttcaactggccaactatgcctatagaattaaatgctaaaacacttactctagttgactcttgtagagcttgtggacattggtcaagatcatctttcgaagcaactatcaggcaaggaacttcatagccagtattttctccatgtgtagccacctgcacaagcaagtctcttgctctatgccaagaatattcatcacagctgccaatacagcaagttatgagtcaggctatttagcaataagtacagtaggtaaatttatgtaattcaagtctgatgtagcagtataaacaagattatttgtcaaacttttggaagtcctcaaatgttgtgttacattctacaatcagatttcaagtcaagagtgacaataatggctgtcacaagagtttcaaggctggcctgttaattatgatctcaattaccaactttcagaagtagggctcacataacctgtaattaatagccaaaccaaagagcatatctggcagtcaaaaagagtcagtttgcctaagaatccacttgcaacaatgaattgatatagatagaaaaatattctatttcgtttacatgaaataagatatatagcatgcctaactcaagtaactttctcaaaataataataaactgtgagaaagatttggttttcttggcaaattggtcatgaaaacaacacaatctcagccaactaccaccagttaaaaatataggcaaaataagacaccatgcagagaatggtaaaacagacactgaggcaaccaaagtgaaccttttaaaaacattagaactttcatggactacaagttatcaccacaatactcgccgtctatctaaccagcttagcacaaacgtacaattggaaaaatatatgctatttaacttataaagaagaaaatatatgtgatttaaacttactcgatgaaatgaacataccaccgatagagttatgaataaataaaagaatagcttctagaagagtgtgtacctatcgtaaacaaagactgctacatcgcagggcgccaatgattccttatcagacagtaaggatctcacatcaccttcaggaatttctcgcagtattagtgtctttctagttccatcaggcagttcaacagaatttgttgcaaaccgttcagtgttagatggcagagcatcagaaggttgccttccaatgaaggattgtagcaatgacgtctttccagaacctctggcaccgaaaacataacactggaatacatttctctgtgtctgttgcttcttacgatccactcgtcttttccttgtgacagtaaacgctgaactaaactcgcccggatagccaacatatacaaggttggcataactatttgtcggatctagaagtgtcataagagcccacttagaaagaaacccttcgtagttgtactagtacctaccctaagtactatttctttt

SEQ ID NO: 3735 - DNA, 2073 bp, Setaria italica
  misc_feature (1)..(44): n is a, c, g, or t
  Peptide Sequence Number=SeqID_69709
nnnnnnnnnnnnnnnnnnnnnnnnnnnnnnnnnnnnnnnnnnnntctaagtacgagtgtaacgtgttaccatttacttgatcaaattcgaaccaaacggaaacttggtacaacaccaactcatgctgtttcaactaaaagttcaagaaatcagcatgtttgaaatgaaaccgaattccatcagcagactagtgcaagtaccaagagaacaaaaaattatagtagaaagaatatttagctgagctaatttagccacaacagagtgtcagatatggcattttatggagccagatgaagtcgtgtatctgaaacccccaataggccgcacaatttatagctggtgacaggtctgtacaaaatgttggtttcttgccagcataaaagcccaagcagcgatgctcaacaagcatggatcaagctgatgttgcaaggttgagctgtgggaagcgccttatttcccccactgtatcggaggacttcaagaggacgagttcttccgagctgcataaaccctgtacgcagctactcccacaactgcaacagcagctccaacagagacaaccatgagggaacggtttagaagttgacgatattgccggcgtgtttttccagcttcagtctctggaatgctcaaatggggctgttgggctgcatgaactactctgcagaaaatgttgttcaaatctctcaacctcacactgatcggaattggtgtttcaattcccatgtcctggctcactctagttgactcttgtagagcttgtggacattggtcaagatcatctttcgaagcaactatcaggcaaggaacttcatagccagtattttctccatgtgtagccacctgcacaagcaagtctcttgctctatgccaagaatattcatcacagctatcgtaaacaaagactgctacatcgcagggcgccaatgattccttatcagacagtaaggatctcacatcaccttcaggaatttctcgcagtattagtgtctttctagttccatcaggcagttcaacagaatttgttgcaaaccgttcagtgttagatggcagagcatcagaaggttgccttccaatgaaggattgtagcaatgacgtctttccagaacctctggcaccgaaaacataacactggaatacatttctctgtgtctgttgcttcttacgatccactcgtcttttccttgtgacagtaaacgctgaactaaactcgcccggatagccaacatatacaaggttggcataactatttgtcggatctagaagtgtcataagagcccacttagaaagaaacccttcgagtgacagaccacccaagacattcttttcagcacagtctttatatggatcagaagaccatgggttttcaggtgctgtcgaaaaaaggtcctccagctcagtaggtagtaaagcaccatcattatcgatgtcaaacatgttgaatatccctctcaagaaatcaaccacttcacctgtcagttccagtgtttgatcaggagctcttctaattggcattgcaatgagttcatccctaagcttgatgtcattgtcataaccaaattttctcaatacagtccatgtagtttccagacgacctttttcaataaagagggcatgcagaaaaaggaacccagtcaaggtaagtccattatcattcacgccttcaggcatcttctcctgaacaactctcttcacgcctgaaatttcagtaggctggagaggagcactgaaacatcggacctggaattcattgagctccacatcactgagagcaccatccttgtcactatcacataaaatgaatatccgctttaacgctctcacacagcgaggctttagagattgtgcctcttgatcaaagagaggagcagttgggtgaagcactgccttctgggcatagtagaagacctcaggcacctggatctgacgaagagcagagcactcaatgcaggtctcaatctcgcggaaggactgcatgatgggcgccataacctgctcaaggctaacctgctgctcgtccctcaggtccaatttgcaccccaccacgattactggagtcttcaactggagccg

SEQ ID NO: 3736 - DNA, 1011 bp, Setaria italica
  Peptide Sequence Number=SeqID_69710
cacagccgcaccagctcccaacgcaaaaccctaagccgaggggggcgcgaggccgcgagagagggagagagaggaggcgcgcagcatggcgggtgcgacgtccccggcggcggccgcgaatctggcgggcaagtcgggcgtccgcgtcgtcgtgatcggcgaccccggcaccggcaagtccagcctcatcgtcgccctcgccaccgagcagttccccgagaacgtgcccaaggtcatgccccccacccgcctccccgctgacttcttcccggaccgcgtccccatcaccatcatcgacacgtcgtccagcccggagcagaagccgaagttgatcgcggagtgccaggcagccgatgcggtggtgctcacgtacgcctgcgaccggcccgccacgctggaacggctcagttcgttctggctccccgagctccggcggctccagttgaagactccagtaatcgtggtggggtgcaaattggacctgagggacgagcagcaggttagccttgagcaggttatggcgcccatcatgcagtccttccgcgagattgagacctgcattgagtgctctgctcttcgtcagatccaggtgcctgaggtcttctactatgcccagaaggcagtgcttcacccaactgctcctctctttgatcaagaggcacaatctctaaagcctcgctgtgtgagagcgttaaagcggatattcattttatgtgatagtgacaaggatggtgctctcagtgatgtggagctcaatgaattccaggtccgatgtttcagtgctcctctccagcctactgaaatttcaggcgtgaagagagttgttcaggagaaaatgcttgaaggcgtgaatgaaaaatgcataaaccccattccctaggaagaggaggtagctacaacaagcatcagtggtcaaaatgtttttgtaccatctcccacttaagctatcttctgcttgcatccctccggtttgattttccaagcgttggaggaagaaactctctagtagcg

SEQ ID NO: 3737 - DNA, 1061 bp, Setaria italica
  misc_feature (1)..(17): n is a, c, g, or t
  Peptide Sequence Number=SeqID_69711
nnnnnnnnnnnnnnnnnagtttggtttaaacctaacaatttgcaacaagtccaaggcaatccactgttacaaacgaagcattaatggatcaagcatgctgaacataaaattaaaacacataattctcggatatcttagttcagacaacagaagcataagtgcttaaaccatagctaagagcagtaataggcatcacaggccacagcaaaccagccattatgcctccggcgctggctgcgtgaggccggacttggcaagcagcttccccagcgcctcaggggagcacacctggtactgcacctccccggtgccaggctgcaggaacacctcggccagctccagcttctcagcagtcaagctggtggagtccatggtcttgctgaggaccttgagcgcgagcgcaacggcctcctcgcgggtcaagccgtccttgtagtcttgcttgagcatggattgcgcagcctggctgttggccccaacagcggcagccttccacccaccgtagttgccagatgggtcgctcatgtagagctggaagccgtggtgcttgtcccacccggcgaagaggaaggagaccccgaaggggcggaggcctccgaactgggtgtagccctgcttggtgtcgcagagggactggacgagctgctcgacggggatgggctcctggtaggagagggcgtagcgctgggcgtggaggcgggcggtgttgatgaggatgttggcgtcggacatgatccccgcgacggcgcaggcgaggtgggagtcgatcttgtacatcttctcggcggatcgggaggtctggaggagcttggaggtcaccttcttctcgccgacgaggacaacgccgtcggccgccaggatcccgagggccgacccggcgttgccgatcgcctccatcgcgtactccacctggtagagacgcccctccggcgagaagatcgtcgtgcggctgtcatagcggcgagacatcgcggcggtggctcggcggcggcggcgagattggggtttgcgtttgtgagattggggggattcgggggtggcgactcgggagaagttaacgc

SEQ ID NO: 3738 - DNA, 822 bp, Setaria italica
  Peptide Sequence Number=SeqID_69712
agaagacaaggacgaagacaacaaactacaaaacactaacccctgctgccctgcagaccacccgtcgtctgtctcgccggctcgccgcctcctaaaccccccgccaccgcctcccccgccgcctctcccgctccgcccgggagccatgtcggtgacgctgcacacgaacctgggcgacatcaagtgcgaggtgttctgcgaccaggtgccccgcacggcggagaacttccttgccctctgcgccagcggctactacgacggcaccgtcttccaccgcaacatcaagggcttcatgatccagggcggcgaccccaccggcaccggcaagggcggcgcatccatctggggcgccaagttcgccgacgagttcagggagtccctcaagcacaacgcaagggggatcatgtcgatggccaacagcgggccaaacaccaacggcagccagttcttcatcacctacgccaagcagccgcacctcaacggacactacaccatcttcgccaaggtcatccacggattcgaggtcctcgacctcatggagaaggcgcagaccggaccgggggacaggccgctcgccgagatcaggctcaaccgcgtcaccatccacgccaacccactcgccggctgatccaccagcaccgacctggagagctcatcctgcatctttgtggttgctaatccatggtttggtctgcctgaacctatcctttggtactgcaagcacatcgtgttgcaaattgaaatggtggatgtaaccgcgatttgcgtagcgatttcttgcccatcctgaattatgaattttgatgtggattgcaatttcac

SEQ ID NO: 3739 - DNA, 761 bp, Setaria italica
  misc_feature (695)..(761): n is a, c, g, or t
  Peptide Sequence Number=SeqID_69713
cgccgccgctgcccgccgagtacttcggcaactgcctgcgcccctgcttcgtggaggccgccacggcagacctcctctccggcgacacggccgacggcgtggccgctgcggcgtcggcgatcgggagcgcgatccgggagatggagcagggcgtgctggagggcgcggaggggtggctgggcagggtgctgtcggtgctcccggagcggcccatgtcggtgggcggggtcacccaggcacggcgtgtacgagaccacggacttcgggtgggggcggccggcgagggtggagatggtgtcggtggagaagacgccagggacggtggcgctggcggacagcccggagggtgacggcggcatcgagctcggggtcgtgttgccgcccgacgccatggacgccttcgcatcctgctttgccgatgccctcggcggcgccaccatctgactggcattgccgacccgaggtgcagctacattcttcagcaacacaaaaccgagattgcatccaagcagcgcagtaccagcatctttgagttttgtatttaatttgctttgctggttgagtgagcttgatctggaagtagtacagcatgcactgcgaagtggagtaataagctgtttgtaagctgatcgaattgttcgaaatcaatcgaacacacattatgaatgaattgtttgcaatgttcttgagaattnnnnnnnnnnnnnnnnnnnnnnnnnnnnnnnnnnnnnnnnnnnnnnnnnnnnnnnnnnnnnnnnnnn

SEQ ID NO: 3740 - DNA, 799 bp, Setaria italica
  Peptide Sequence Number=SeqID_69714
attctttgtcctacttcttcctaaccttcctttccttttgtctttgcatcaatgggatcgctcaaaggtgtcttatgagtacttctatgcaagcttccttcaattttatttttcatcttatcacccaccactactcgtgctaactgcttcccttcactttgtgagagttttcccttcatcttctcatcagaactattccttggtgtagatttttcatcaacattttgctgcaggttcccatcttgttcggtacctacaaaatcatctggaacctggaccctaatgtgagccttgctatgtccttcatttgtcattctcttgccttccaatttctcattagaaacatctagtgctgatgtcagagaagtagcccctcctgaaaccggaattgctgctgcggcatcaacgttgatgataggtgtggcttctaacggcaacccctcctcatctccactgcctgtggtagtaagagcagacttcccactgccaggaggaaatgtgcgtatgggtgagacctccaaaactctactgtctgtggtggtaacagcattcctcccacagccaggaggagatgtgcatacaggtgagatctccaaaactccattgccctcttctttggtggtaacagtcctcccgtctgcaaccaccctcttcttaggcggcgaattcacagcagatgtcaaccatctcttcatcctgcttcctgcaactccattttgcttcctctccaactcaccatcccctgctctgtttcccatctccatgacatctccatctgcaaccccctccctccccacct

SEQ ID NO: 3741 - DNA, 393 bp, Setaria italica
  Peptide Sequence Number=SeqID_69715
gctcgcggccgcggcgcgcgacctggtgcgggagggtgggtgggccgcgtgctaccgtgggctcgggccgaggtgggcgtccatgtcgctgtcggcggccaccatggtcaccgcctacgaattcttgaagcggctctcggccaaggaaggctcactctaagctctcattgaccatgtatgtatccatagacacaatcatggaagctaacggatgatccttgtacatgtcgaaatgcattaatcctgctctgatctcttgatgagattttaggatgcaaggtttctgtcagctccctgtgtcgacggcgacgacgatagtaaaaattttgtaaaagaaagaatcgtttgcacttctttgaaatcttgtgatgcgtctcgttcctacaaaaaaaa

SEQ ID NO: 3742 - DNA, 445 bp, Setaria italica
  Peptide Sequence Number=SeqID_69716
accaacaataccttagttacaataataccaccctacctcctgcccagcagcgtcctcgatcgatcgatcgatccgtgttcttccctgaacatcacctagctcagttgcttattcttcttctcctgctgctaattaatttatttcttcctcgctgcggccttagctattaggaagttgagtagtaggaggtggtgcaaagattattgcggcgaaggatatatagagagcttcagattagcagtctgttgttgttgattgcgcgatcgatcgatcgaggatgtgcaccaggggccactggagaccatcggaggacgagaagctgaaggagctcgtcgcgctatacgggccgcacaactggaacgccatcgccgagaagcttcaagggagatcagggaaaagctgcaggctgaggtggttcaatcagctggacccgaggataaaccgg

SEQ ID NO: 3743 - DNA, 774 bp, Setaria italica
  Peptide Sequence Number=SeqID_69717
cacacgcgcctggtggatgggcaattggttctcgagatcgggggcgtcgtcgtcaactacgatcagccgattgcggcggggcctcagggggagaaggataagcagcgggggatagagacggccgttccttccccggggaaaggggtcggtattggggcagggagggatgaggatgaagtggtctccagtgctccggcgacagctgttccggagcagtacgcgtgcgattggcgtgcggatccatcaccagggcgtgaggtgaaggagaaggatgccggagacgagggcctgttagatgcagcggatgcaggcacgatgaagggcgtgtattgggaggcgagctcaagcgatggccgtcgtgccagacgccgtacaaactcgggggaaaaggtagaacaggaactaggtattatatggccaacccatattacccgaaggccagattcagatttcaagcgtagattgatcgaggcccttactaagccagttgctcggaaagagtattatagattgtttgacaccgttactatccgtactccattaatgaagctgcggcagatccgcaatgaaacgaaattctatcctacagaagcaatgggcagttcatatttggatcactacccagatctggctgaacaaattatgaacagtggacgttgcaatggtctagctctgatgcgtgggtttcttttctggttgcagaacaatgctcatgacgatcagttcaagccatgggtagatgattccaaagctcgagaggtttatttccttgtt

SEQ ID NO: 3744 - DNA, 264 bp, Setaria italica
  Peptide Sequence Number=SeqID_69718
gcaataagagttcctttcctgaataaacttctcaaggaagcttcttgccagtgtagcaagttgtgtgaaagcctcccaaacattagtggttgcggtgttgaggatccctaatcctaaacggttgccaaggtgatgggagatcctgaatactagtggcaacggaaggaattgtgatggatccaggaaaacacaatgggatgagcctgatggacaagagacaactagtatacgaagttgcaagatggccgcaaggtgccgtggaga

SEQ ID NO: 3745 - DNA, 295 bp, Setaria italica
  Peptide Sequence Number=SeqID_69719
tccgttacgtcccctccggcgccgcctcctgcccccggcgccttcttcgcctactcctccgtggcatttgcggcgattaattagtgggaaagggggcgaatgcagccgccgccgcagccacagggagcaatggccaccggcgccgccatcctcaccgtcccatgctccgcgtgccgccgcccgaagcggagcagccagcgccgcggctccggctccggctccctctccgtccgtgcgtcctccgacgcaaacacggtgacgctactggactacggcggcggggaacgtgcgcagc

SEQ ID NO: 3746 - DNA, 630 bp, Setaria italica
  Peptide Sequence Number=SeqID_69720
gccaagccaatttatcagatattcatcagaagcaaccaattttgagccgccaagccaattttatcagattcattcatcagaagcaaccaattttgagccgccaagacatatcaagaagcaaccaagctctacaggccgtgtaagtcttcctccctgctatcaaatcatggtttccctgacacaatagatttgtcatagtttaatagcagtgcaaatcgtttcccagtgctatggtgcttagctaacctgatataattagcatatagtactttactgaagaccaacattctgaagataatctgtgctaaccttgtatgcttgcatgcattaacacaggctgtaattggaccaaacttaacacatgcatggggtgaactggcagtaacttcacatttaaaagaaaggaagcaacgatagaaaaattctgaagcattgaaggctaaagtacttttgaatcaatcacatagaacatgacacaagcataatcaaattggatcattagagttcacaaggaccttagacaaaataatcccacaaaccagcacacacatcatgcaactaagaaactaagactcaaaaatgaagcaatcgtaagccaacgagacacatcaacctacaactctagcgcat

SEQ ID NO: 3747 - DNA, 570 bp, Setaria italica
  Peptide Sequence Number=SeqID_69721
ttccttgatggcatgatctccacttatgggttatggcaaaatcttcatatggttgctacatattttaattcaatgatgtggtttaaccttgtatgcttgcatgcattaacacaggctgtaattggaccaaacttaacacatgcatggggtgaactggcagtaacttcacatttaaaagaaaggaagcaacgatagaaaaattctgaagcattgaaggctaaagtacttttgaatcaatcacatagaacatgacacaagcataatcaaattggatcattagagttcacaaggaccttagacaaaataatcccacaaaccagcacacacatcatgcaactaagaaactaagactcaaaaatgaagcaatcgtaagccaacgagacacatcaacctacaactctagcgcatgggtaacgcgttcatcgcagcacaattcggcaagatctggacaaaaaccaccgtgttaaagagcaaatcacttgcgctgcaggaggtggcggatccttctgcaggtccttcaactccttcaggatcctcttcgacgccatggatcaacccgatcgatgccga

SEQ ID NO: 3748 - DNA, 1306 bp, Setaria italica
  Peptide Sequence Number=SeqID_69722
ttttttttttgagttaacatatataatggatagaccaaatcgtctggcattacatttctgttcctttttaccttacaattgtaggcacttccaacgagctgtagaaattcagaacagtcccgtttacctataaatgatgtacactttgcaggagcataaaatcgacaatgtactgtaacttgtaatactgcagtcttcatcaacttgaatgaatttacatttgtatgcatttccaattaattaccatgcttgagctgacaggccatagctcacatcacatccatgcgcgccgtgcagtgcagttcacccttcagctgcagcctccggctgcgaagccgatcctggactgcgcgacgtcgtagacgacgctgaacgtctgctgctgcgtgttgccgatgatggcagtgctgtccgtgggcgcgaacgccaggcacgtggtggagtcatcgacgttgatgaggacgttcctcgtcgccagtttcagtgacgcgccgccggcgaacgccatgctcaccgccggcacgcgcagctgcgacgcctggccctcgaagcacgtgtccaggatggagaacgcgggggcgcgcggcgccccgcccatggccgcggccaccgccttgctcagcgccgtgtacacgcccgtcggcaggcgcgtgatcaccgtgccggagtcgatgatcgtcggcaggctgccgtactccgactgcgacaccgccagtgggctcccgccgaccgacatcccggagagggtgacgaagtagagtgagccgtcgagggagctcgacgccatgggcgtgtacgtgtactggcccgggttgtaggacccgatggtgaggtaccccgtcgatgctgacgtcgggaggcagtatgagaaggagtagccgaggctgggcgcgagctggtagagcagggagagcttgttgcgcgcgaggccgatgagccccgccgagcggccgaagaggccttcgttgtcctggccgcacccgtagtagaagtcggggaagctgccggagccgaaggagacggtgtccctgctgagatagccgacggagaacgagctgtcgccgtagctggcctggtagacgcagacgccagagacggagcaggcggacgggttgagcgtggcggcctggagctcgccgcactgtgacgccgagcacggcacggaggcgtaggtgctggaggacctggggtcgaagagcgggccggcctggcggtggcacgacacgacgcacggcgagcactgcagccacgtgagcgacgaccccgtgtcgacgaccatggcgtaggaagtggccggcgtgccgag

SEQ ID NO: 3749 - DNA, 273 bp, Setaria italica
  Peptide Sequence Number=SeqID_69723
cggcgaggtgggagttggtgttggggataaagcggttggagagcctggaggcgtgaagtcatgcacactgcctttcccttggcatctagagggagctctgttatggaaggaagtggtttacagaatggagtaccttggatggagaggtcctcggggcatcgagaaggaagagagaactggatcctcttggaactgttaaagaagctccatgcccttgaagtcagcatatccaagaaatgatgctgcttgtaacacgtacatataggttctgct

SEQ ID NO: 3750 - DNA, 444 bp, Setaria italica
  Peptide Sequence Number=SeqID_69724
gcttcttcatgctcaactgtgaaggtcatggagaatggcattgtatacttagtctcattagagggtcagaagacaggattttatgcagatcaacgggagaaccgccattttatatcattgctttcaaaggaccaaagggtccttgacatttgctgctacagtggtggttttgctctaaatgcagccaagggtggcgctgataatgtcattggtaaaatactgtaagctaatgagcctttatatttttagtcatctgttcatgtggttttcaagctacatacaattgggttttggtggaataacatcgttaatttggaaatttcacactaagatctaatcttttatatccttataacattctgctggttttacagacagaatatttcaaccaccgtagtcattttcaggcattgattcatcgggatcagcactagaccttgccaa

SEQ ID NO: 3751 - DNA, 1202 bp, Setaria italica
  Peptide Sequence Number=SeqID_69725
cctgttccatgacaagtaattgttatctcccaatttccttggtttaattaagtagagcaaggtgaatgcaaatgccaagaagaagcagagcccaccaacagtgagatatgcaagaccaagaaaatcgttctttccaccaagccaggttgtggtagaaagcaccaacttcttcttgccaccaaagctataggtgttgtaattgttctccaaatggactgtaatggtgtcgtttactttgagatcaacatagatcctaccatacagcttcctgaatgtaggaagtgctgcagttcgcatccaaacaataaggtcctcttgcttacttaacgataaatttggattaagtatttttccaccttgaagaggtcctttctgaaagtttgatgggaagacatcactcccaaatttgtgctctctgtcactcttccaagagatgtctttcttgtccactgtcaagttttcattgttacggatgaggttatatgtatcattgaacaggctccatgcaataagaccacaagggacgattggctttccatctactgtggcctcaggatcacaattgctagtgtcactcgccttacttctgtctcttagctgtgcatcattacgactcttgacatacctcctatgattctggtaaaagttatccagctgatagtacacaaaaattggctgcttcatatcctttgtaatcgtcaggttccttgtgcaggtttttggtatagctttgttgcggatgtaagcaagcttgtcagtcacattagcagggacacatgcatcatcataccgatcaacaatctcgacaacctgttgtgaagctcgcagcgaagcaacaccaattgggacaaaaatcacgccaacaagaacaaatactgaaataacccattttggagtaagaattggcttgcaagctgggagctcctgctgcgtgaacttggagtacttgggctttctcgtgttcctcctgggcgcggcgccgccgtccccggatccgccggagctcgacccggcggcgtggctatccatcccaccaaccgccaagaaacgcctctacctgtcgcccgaaacgaaccacgccaaaatcgccggccgctggcaccgataacccaggaagcactgcgaaacgatcgccgtccccggctcccctgccttgagatttgttggcgcctggaaggcgaagggggggaaagaagtagaac

SEQ ID NO: 3752 - DNA, 2232 bp, Setaria italica
  Peptide Sequence Number=SeqID_69726
gaaactcaaccaggcgatgcttcgcgcttgcggcggcacggcgccggcggcggtgcccgcgcttgtcagggcgcgcctggctcggcgcgcctcctccgcagcctacgccgcggccaccgtcgccgatgcttcctccgcctcgtccgccctggaagagctcgccgccgagcgcaaaggtttcgcaaaagtagtattaaagaagggcaagacccaaatattccgtgatgggagcccaatggtgtatagtggtgccgttgatagaataattggacgacctcctccgaaatctggtgatgttgttctggtagctgatggaacagagaaacctatcggatggggtctctataactctgtgtccatgttttgtgttaggctgatgcaactggaagaagaggcaagaagagatcccacttgtgcacttaatatggaaacactgcttgaagcaaggatttcatctgctgtgaatttgcggaaaagtttgggtctcccttcagctaacacaaatgcttatcgcctcatcaacagtgaaggggacagattgtctggtctaatcgtggacatctttgctgacgttgctgtgattgcttcatctgctgcttgggttgagaaatatagggaagaaatccagtttcttgttagcaaagttaatggcatcagccatataaagtggaggccttcagcagatattttgaaagaagaaggattggatatattagaaaaggagcctgcttcttcatgctcaactgtgaaggtcatggagaatggcattgtatacttagtctcattagagggtcagaagacaggattttatgcagatcaacgggagaaccgccattttatatcattgctttcaaaggaccaaagggtccttgacatttgctgctacagtggtggttttgctctaaatgcagccaagggtggcgctgataatgtcattggcattgattcatcgggatcagcactagaccttgccaatgagaatatcattctcaatgagctaaatcctggaaggatctcatttgtaaaaggagatgcaactgcattcatgaaaggagctatctcaaaaaatgaactgtgggacttggtaatccttgaccctccaaagttggcacctcgaaagaaggtgctacaaagtgcatctggtatgtatagaaacttgaatgctcttgcaatgcaagtagtgaagccggggggattactcatgacatgctcttgttctggagctatgactcaaagtggcatgttccttaaaaccattcagggtgctgcatcaatggcaggcagaaaggtcacagtcttacgccaagctggggcagcttgtgatcatcccatcgaccctggataccctgagggccagtatctcagcaattacttgctacgagtggcatgaaaaaggaaataagaaacagatataaaagcagcaaaaattatagttgtagcagcctgacaagccctgtactgatcacttctgaagagcttaagttaatctgtcatagtttagttgtgcaggttagatgtagtcctttatttatgaagaaaaattgcatccattatgttcgttttacagaatctcttaggacacggtccttagatgatgggtatttttattgagatccccaagtggtggctagaaaggaagatgcaaatcacataaatggaatttcacaacagttccaaatatcaaaaccggcattcacttctgacttctaagtatacaatttggagaacagaaaggtgttttgtgtcaatgtaatgtacaatctgtgcacgggttgatccaaagctatcgctcgtacacagcctaccttgtatgtattctagtccaattctcacaaataaaatttctatgtagtacacgatacatttgaatcataagctgaattatttgattctgcttgtataacattaacttccaaagagtatcagcggcctacagggggcctgttccatgacaagtaattgttatctcccaatttccttggtttaattaagtagagcaaggtgaatgcaaatgccaagaagaagcagagcccaccaacagtgagatatgcaagaccaagaaaatcgttctttccaccaagccaggttgtggtagaaagcaccaacttcttcttgccaccaaagctataggtgttgtaattgttctccaaatggactgtaatggtgtcgtttactttgagagatatataacaataagaattctaaacaaacaaactagtctttccttgttaa

SEQ ID NO: 3753 - DNA, 479 bp, Setaria italica
  Peptide Sequence Number=SeqID_69727
gaggagattctcaactccttgtaaactgtgtcaaatgtgaattgcaataacagctgcactttatgttggagagagaaacctatgcaaagatcccaaacacaaaagactctgttgtcaataattatgtactatgacctaataatgaaaactgaaattcatttttttgatattctgaagtccatgtgttgtgattatttacgtttgagttatgatataaagttgatggaatagctcacagagttattcttttatcagggacctcactctgattttgctgggccacatgtgggagtacagcatgtgtagcactaataagaaataaccaacttgttgtggcaaatgctggtgattcacggtgtgttatttcaagggctggaaaggtatgctactcttgctctttcattagttggcaaaatggatatccttgactgcctgagtttgtgttctatgtctcatctatgataggcatacaatctttc

SEQ ID NO: 3754 - DNA, 348 bp, Setaria italica
  Peptide Sequence Number=SeqID_69728
cacccatcacaggcaggcagcattctctcgctttcctttctcctcttctcctcctctcctcctcccgcatcctcctctgttcgttccgatcgccgccgttctccccgtgagaggccgttgagccacccccgcccgatgcggcggccggcgcttcgagtgacgagttgacgggtccagtggcggcgggatcttgccgccagcggcagcggcactcggccgacgcaggacttcgtgagtacactggtctaacttgtcaagttcttgacgttgcctgattaattcctgcttgtaagtatgggaatttacctcagtactccaaaaaccgataagctatctgaaaacggggaa

SEQ ID NO: 3755 - DNA, 521 bp, Setaria italica
  Peptide Sequence Number=SeqID_69729
cttctgaggagattctcaactccttgtaaactgtgtcaaatgtgaattgcaataacagctgcactttatgttggagagagaaacctatgcaaagatcccaaacacaaaagactctgttgtcaataattatggacctcactctgattttgctgggccgacatgtgggagtacagcatgtgtagcactaataagaaataaccaacttgttgtggcaaatgctggtgattcacggtgtgttatttcaagggctggaaaggcatacaatctttcaagggaccacaaacctgagcttgcagttgagagagaaagaataatgaaggcagcaggtttcatccatatgggacgagtaaatgggagtttaaatttgtcaagagcaattggtgatgtggaatttaaacagaacaaatttctgcctcctgagaagcaaattgtgacagcaaatcctgacattaatgttgtggagctctgcgatgacgatgctgagacacgcaacaggggatacaaggcacacaggggatagg

SEQ ID NO: 3756 - DNA, 1865 bp, Setaria italica
  misc_feature (1810)..(1865): n is a, c, g, or t
  Peptide Sequence Number=SeqID_69730
tttgttttttctttaattttcctttattttaattttgggtttacgtttaagttttaaattttgggttagtttttaaatttttgtttcttaagttagttcttaatttggttgtattgttggtaattttaaactagtaactaaatttcttgtccttcttttcctgcttgtaagtatgggaatttacctcagtactccaaaaaccgataagctatctgaaaacggggaaaatgataggcttaaatttggtctttcgtctatgcaaggatggcgtgcaagcatggaagatgctcattcagcattgctagatcttgatagtgagacagcattctttggtgtttttgatggtcatggaggaagagtggttgccaaattctgtgcaaaatatctgcacagtcaagttctcaaaactgaagcttattcagctggtgacctaggcagtgctgtgcatagagctttcttcagaatggatgaaatgatgcgaggacagagaggttggcgagaactatctgcacttggagataagataaacaagtttagtggtatgatagaggggttgatttggtccccaagaggcagtgattcgaataatcaacaagatgattgggcttctgaggagggacctcactctgattttgctgggccgacatgtgggagtacagcatgtgtagcactaataagaaataaccaacttgttgtggcaaatgctggtgattcacggtgtgttatttcaagggctggaaaggcatacaatctttcaagggaccacaaacctgagcttgcagttgagagagaaagaataatgaaggcagcaggtttcatccatatgggacgagtaaatgggagtttaaatttgtcaagagcaattggtgatgtggaatttaaacagaacaaatttctgcctcctgagaagcaaattgtgacagcaaatcctgacattaatgttgtggagctctgcgatgacgatgactttgttgttgtagcatgtgatggcatttgggattgcatgtcaagccaacagctggtgaacttcatccatgagcatataaacaaggagagcagcctatctgctgtgtgtgaaagagtgcttgatagatgcctggctccatcaacaatcactggagaggggtgtgataacatgaccatgatcctggtgcagttcaaaaaaccagtcgatcggaggaagaagtccgaagtggctgagcaatctagcagcagcgcggatggaactgagattcatgttgccgaggagtaaaaagagctcgacactcgcaagggcgcaatgcaaccgtctggattgagaagagctggaaaggcaaagaaatgtgtagtgtgcatatcccaactatatgaggcactcacgcacatccttcctgaaaggaccctcagataatggtgtcggctgctgcaaatggtgaatctccagagcacgaccattctccattcgtcgtcgagcatccaggttgcagtttttcggtcatcgtgcggcgaagtcggtgtattctgtggtgtgagattccaagtgtgctgtaaaaaggtttggttacgtgcctgcctcactaggttgcgctttctttctgaatgatatgcgtcgaatctgaatccgaatctggatcctgggctgtgtatgttgtttgttggatgggaagcggttaggatgaaccccctggccttaccgtattccggttacagtcagcggcgattgtgaagtgccagtgtgctgatttgttgatggttgatgcagtttgttttttggagtattcaataaatacatttgccgttgccttctttgaccaaaaaaaaaaaaaaaaannnnnnnnnnnnnnnnnnnnnnnnnnnnnnnnnnnnnnnnnnnnnnnnnnnnnnnn

SEQ ID NO: 3757 - DNA, 285 bp, Setaria italica
  Peptide Sequence Number=SeqID_69731
tatgcgtcgaatgcgagagagagtgaaaggaggcctggttccctttatataggctagggaccgggcaacaacgttgagaaatggagggggtccccgacctcagaggttgggggttgtggcgtggtcaggtcttccttgcaccaagaggcctccttgtcctgtcccgttggctggtcgtgggtttcgcacgccttgtacggtggcttctgcgccgcgtggggtgcttacgcacggcccgacctactccgtggcgtgctcctgtcctatccgtcaactccgtggtag

SEQ ID NO: 3758 - DNA, 1291 bp, Setaria italica
  Peptide Sequence Number=SeqID_69732
ccttcaaacatggtgagtcttattacacatatgacttcggacaaaaaacaagtttaacaagtaacaggagtaaaaaaatgaaaatacgaagtttgactccaccatatagctaggttgactgagaagaaggaaaacatatcacttcttcttgagtgggaaggaagggcggatggcgatgccgcacagtccctccggcttacgggcgatgttcttcttcatcttgatgaagcccttgtctccccacttgcccccccacgagttcttgacgatccagtacttgtccctgccctgctgtccgtacccgacgacggtgacggcgtggttgagcttggtcccgcagggcccgttgtagatgcccttcttgtagtgctggaagttgctgcccccggcctcgatggacacgcagacgggctgcatcgctaccgcgttctgcagcgacgcctcgctccgggtggccacccgccggaacccggagatggtggcggcgcggtgcttcagcttggagcggtcgcacttgccctgccgggccttgtacgggtagtccttctccgtggtgatgccgccgttcttggtgatccactgcagcgcgcggtagtgcatgccgcccttgcagcctttgtccagcgtgtcgcagtccacgagctcctgctccgacagggacaagagcttccccgtccggatcttgttgatcccttccactgcggccaccgccgcgaaggcccaacacgacccgcacgcgccctggttctttgccggcgtcacggcgcctttcgtgcgccagtccacactcgccggcgcggcggacaggttcgtgtacgccgccgcgtggccggtggcatcgaccgacccggcgcgcgtcgtgatcaccgccatgccctcgtcgtcgtcttcttcagctagctgcgtctgcgggggcaccgtgtacagggccatgaactcctcgttggtgaggtcggtgtactccgtctcgccgagctcgtacgtgagcccggccgcctcggcgtcggcgttggtgctctcgatgtagcgcacgttgctggcgtacacctggaaacggtgaagctcctcctcggcggttgcgtacgacttgtcgtactccgccttccactgctggaaccttgctagcatcagatcgtcattgttgtcagccacgccatcgtcggcgaggctgtgggctgacaagcagccgttgagggagacggccacgaggaggagtacgcatggcaggaagcgtttggtggaggaggccgccatggattagctcaacgtgtggagaatgtagatgtttcag

SEQ ID NO: 3759 - DNA, 381 bp, Setaria italica
  Peptide Sequence Number=SeqID_69733
gagaaatgaattcccatacatagtggttttgtatgtttcttttgaaacttacttggttcttcgttttcagctgtccgcacagattctgatcaataaaggtgctacggtgacctgggctgttcggattgagaaattatctgatttgatggtccatcttgagatcactccatttcaagggatgaggaatgcagtggatctctgcatagacagcctgaaaatctttagttatcctccacaaagttatatattaaaaaaaattgaatttttatatggaaggtagaaaagtcatatacaacataaaggtaatctgttcttgcgagctgttgtacctggaatctgctatttagcagcttgatagtacggtcagtgctgaagaataaa

SEQ ID NO: 3760 - DNA, 649 bp, Setaria italica
  Peptide Sequence Number=SeqID_69734
agtcttcctccatctccaccctcacgcagcggcggcgcgaagggagcggcggaacgcgacgatgtcggcgacgacggcggcggtgcccttctggcgcgcggctgggatgacctacatcggctactccaacatctgcgccgcgctggtgcgcaactgcctcaaggagcccttcaagtccgaggccgcctcccgcgagaaggtccacttctccgtcgccaagtgggcggacggcaagcaggagaagcccactgtccgcacagattctgatcaataaaggtgctacggtgacctgggctgttcggattgagaaattatctgatttgatggtccatcttgagatcactccatttcaagggatgaggaatgcagtggatctctgcatagacagcctgaaaattcttttagtttatcctccacaaagttatatattaaaaaaattgaatttttatatggaaggtagaaaagtcatatacaacataaaggtaatctgttcttgcgagctgttgtacctggaatctgctatttagcagcttgatagtacggtcagtgctgaagaataaattctttgttacaatggatcctttttgaacaatcttgagttattatcaatgttgctaattgctcttaaagttaaaaaaaaaaaaaaaaa

SEQ ID NO: 3761 - DNA, 577 bp, Setaria italica
  Peptide Sequence Number=SeqID_69735
ttagtaagtgtgtatattagttgagtgactcggtcgcagctccccccattcccattcccattctccattcacccacctgcggcggcgcaaggcgaagcggaggcgacgagatgtcagcgacgacggcggcggtgcccttctggcgcgcggcggggatgacctacatcggctactccaacatctgcgctgcgctggtgcggagctgcctcaaggagcccttcaagtccgaggccgcgtcccgcgagaaggtccacttctccgtcgccaagtgggcggacggcaagcaggagaagcccactgtccgcacagattcggatgaataaagatctggtgccatggtgacttagtcctttctacaggtgttttgaagtgttgtgcaagctctggaacttgctgtttagctggcttgattttatggtcaacgctgaagaataaatacttttgcgacaattgatctttttgaacaatgccatgttattattgttgctaattgggctttgctctgcttatcaatcatgtcaacttcatggaagtttgtgcaattggtatcaactatagtcttggcttctcaaagttg

SEQ ID NO: 3762 - DNA, 832 bp, Setaria italica
  Peptide Sequence Number=SeqID_69736
ccccgacggcctcgtaccgacgcatgggatcctcagctggaccaccacgagcaaggagaccgcgtcggcgccgtcgcaggcgctcacccactcctccggcggcacggcggtgtccaggaggtgcttggcctgcgtcttctccggcgacacctcgaacggggcctgctcttcgaccatgccggcctggaccttgagcgcctcgatggccatcgtctctatcttctgcagcgcgaacgccaggatctcgtcgacggccaccggcgcttcctgggcgttccagatgcccgtagcgatcctgtcctggcgcccgtggctcattgccaccgacatcgtccggagcagcgagacggagtgggcggcgctggtgatcgcgacgagctccttgctccgcgcgctgatgatcgccgatgccatgccctcgaacgcgatctgctcggccgtcttgccgacgacgtcgtccatggcaatgagcgcgcctagcttcgcgcacaacgcctcggacccgccgccggcgcacaggcgctggaacacctcggcgccgccgccgggaagcttctggccgcggaggatgaacggcttggacagctgcatggcgagcttggggagctccttccgctccacggggatgtcgaacgggttcatggcggccaggtagccgccatcccgggtctgcacgatggggccgagccccttgccgaggtcggagacgtggcacgtggcgtcggcgccggaggcaggcttcttgccggacttgagcgacgacacttgcggagccgacgacgacttggccgccgccccgtcctcgtcctctccctgttccatcagcatcaag

SEQ ID NO: 3763 - DNA, 435 bp, Setaria italica
  Peptide Sequence Number=SeqID_69737
ggtcgggggaggctccgcggcgaggcggaggcaccacgcgtgcgggcccggccagcgcccggaccccaggcagaagaacccgccgccggcgccgccgccgtggaagtaggcgacgatggggatctgcgcgtcgttggccgcgccgaggtggcgcgggcggtagaggcgcgcgttcaggtcgtgctcccgctgccacgtcacgtccttccactccacgccgctgtcgtcgtcgccgtcgctgccgctgccgccgccgccgtccgggtcggcgtccaccaccgggtacgacgccggatcggcgctgcgccgcaccgtgccgtcgctcatcagctgcaccaggccgcggatgtcttccaccacgtgcggctctgacgacggcggcggcgacatggttggctaacacacttgattcgtctgcgtctgcgagctctggtg

SEQ ID NO: 3764 - DNA, 472 bp, Setaria italica
  Peptide Sequence Number=SeqID_69738
accttggacagggatatgccaatcagaacatacacacttcatcttgatgatggtgtgacaatcaaactctgcgatgcaagccgcatgcagaccccagaagacaagacgttctacaccgaagatgacctccgagatttccttgcacggcgtggttggacactcctcagggagtatggtggctacagaaatgttgatagcctggatgatctccgccctggtgtgatttatcaagggttgcggtcccttggggattaattttgcaacatctgcctgggcaaggcatgtaatgtgtgccaaagaagcatagtatattactaccatttagtgtaatctaagtcagccatctttgttctctgatatatgtaaatgtagctgatgacactgttaactagaatgtatagccgattatatgcaattggagtgtgcagtaagtggttttcgaattcactgtgtatcaatgtatcttcccttg

SEQ ID NO: 3765 - DNA, 1192 bp, Setaria italica
  Peptide Sequence Number=SeqID_69739
aacgaggcgcgtggagacgtgggtccgggagggaggatcctctgcctcatcgctctgcgccgcgagtgtctccgactcagtgacgtatgtaagtccaacaagcacctctgggaggccatctccgcccggatgcgggaccaagggttcgatcgctcccctaccatgtgcacggacaagtggcgcaacctcctcaaggagttcaagaaggcgcgcagccacgcgcggagcagcggcggcggcggctccggcgccggagggaacggcaacgccaagatggcgtactacaaggagatcgacgacctgctcaagcgccgtgggaaggcgagcggcagcggcggcggcgttggcagcggcagcggcagtggtgccgggaagagccccacatccaactccaagatcgagtcctacctgcagttcgcgacagataacggctttgaagatgctagcattccctttggacctgttgaagcaaatggtagatcattgctgagtattgatgatcgtttggaggacgacaggcatccacttccgttgacggctgctgatgcggttgcaaccaatggtgtgaaccaatggaattggagagatacctcaactaatggtggagataatcagggcacttttggtggaagagtcattttagtcaaatggggcgattacactaaaagaataggtattgatggtacagctgaagcaattaaggaagccatcaaatcagcatttggacttagaacaagacgagctttctggcttgaagatgaagatgaggttgtccgtaccttggacagggatatgccaatcagaacatacacacttcatcttgatgatggtgtgacaatcaaactctgcgatgcaagccgcatgcagaccccagaagacaagacgttctacaccgaagatgacctccgagatttccttgcacggcgtggttggacactcctcagggagtatggtggatataggaacgttgaaagcctggacgatctccgttctggtgtgatttaccaggggttgaggtcacttggggattgattttgcgacatcctcctgggcaaaggaggcattgtactgtgtatgtcgaagtggaagcgtagcatggtactaccattcagtgtaattcgagtcaagccatcctttattctcagatgacgtgtaaatatagctgatgacactgtaactagaatgtatagcc

SEQ ID NO: 3766 - DNA, 368 bp, Setaria italica
  Peptide Sequence Number=SeqID_69740
gcctcggcactggccacatccccttccgcgcggcggccacggtggcggtggtgtcggaggcggacgagctgggggcggctggacggaggcagggacggcggcggaatcttcgtcggcgacggcgagggcttgatcgtcctgacgtgtcggcgcgggacatggacggtgccgtaggggtcacccggcggccagttgccgtcgtatacgacctcgtagcctccgtgtgtgggcgacacgatcgtcgctctgaaccagaacacgagaacctccccggtcttcagcgtcgtggtcctcgtgcggacgccgacctcactgccaggtctcaggtgctcgccagcgccgagggtggatgggcttgcggaccccgc

SEQ ID NO: 3767 - DNA, 782 bp, Setaria italica
  Peptide Sequence Number=SeqID_69741
tcgaactttcatccgccaccggcgacaatgaagagcccgggatagctcgggagcggagcccgcccgcatgtaatgttcatcccgagcgccggcatgggccacctgctccccttcctccgcgtcatcgccgccctcgcgcgccacgacgacgttgacgtctccgtggtgaccgtccttcccaccgtgtctgccgccgaggccgaccacctcgccggcctcttcgcggccttcccccgcgtccgccgcgccgacctccacctcctgccgttcgacgcgtccgagttcccgggacacgacccgttcctgctccggtgggaggccctgcgccgctccgcgcacctcctccgcccgctcattgcatgcggcgccgcgccgcgcgtctcagccatcgtcacggacgtcaccctggcctcgcacgtcatccccatctccaaggagctcaacgtccagtgccacgtccacttcatctcctgcgcgaccatgctctcgctcctcgcgtacatcccggtccacctcgacagcaaggccgagctgggcccgggcgtcggcgacgtcgacatccccggcgtccgacgcataccggagtcctacctcccgcagccgcttcgcgacctcaacaatgtattcaccaagcagttcatcgacaacggccgcgagatcatcaacgccgacggcatcctcgtcaacacgttcgacgccctggaaccggcggcgctcgccgccctgagagacggcaaggtcgtacccggttttccgccggtgaacgccatcggtccactcga

SEQ ID NO: 3768 - DNA, 1355 bp, Setaria italica
  Peptide Sequence Number=SeqID_69742
tacgcgtccgagttcccgggaacaacgaacccgttacctagactaccggtagggaaggaccctagacgaccgagttccgcgcacctcctccgcccgctcattgcatgcggcgccgcgccgcgcgtctcagccatcgtcacggacgtcaccctggcctcgcacgtcatccccatctccaaggagctcaacgtccagtgccacgtccacttcatctcctgcgcgaccatgctctcgctcctcgcgtacatcccggtccacctcgacagcaaggccgagctgggcccgggcgtcggcgacgtcgacatccccggcgtccgacgcataccggagtcctacctcccgcagccgcttcgcgacctcaacaatgtattcaccaagcagttcatcgacaacggccgcgagatcatcaacgccgacggcatcctcgtcaacacgttcgacgccctggaaccggcggcgctcgccgccctgagagacggcaaggtcgtacccggttttccgccggtgaacgccatcggtccactcgattcgcacacggcctccacggcgaatgccaagcagtcagaaccagcgggctcccccgttgcctggctcggcgagcagccggcgcgatcggtggtgtacgtcgcgttcggcaaccgcagcgccgtgagccgcgaccagctccggcagatcgccgccgggctggaggcgagcggctgccggttcctttgggtgctgaagaccacgacggtggacaaggatgacaacaccgaggtggaggacgtgctcggctgcgggttcctggagcgcgtgcgggggcgcggcctcgtgacgaaggcgtgggtggaccaggaggccctgctgaagcaccctgccgtggggctgttcctgagccacagcgggtggaactcggtggtggaggcggccgccgccgggatgcccctgctggcgtggccgcgcggcggcgatcaacgtgtgaacgccatggtggtggcgagcggcggcttcggggtgtggatggagcactggagctgggacggggaggacaggttggtcaccggggaggagatcagggagaaggtgaaggaggtcatgtccgacgcagcggtgagggtgagggccatgaagacaggagaggaggcggccaaggccgtcgccgagggcggcacgagctaccggagcatgcaggagtttattggcaagctcagggcaacttaggactccctgccgacgtaatccttctgtccctttcttggttaccctcgtcgagaggtgcatgtaacatcgtggttgggctcttctaccgtcactttgctctatttcgtattgatttttattcaggaagcacttgttctcatttttccaaaaaaaaa

SEQ ID NO: 3769 - DNA, 340 bp, Setaria italica
  Peptide Sequence Number=SeqID_69743
ccagatggcttggtgaggcttggacagaaaaccggacaagtcagaaatcggcaatggtgagctcctacaggagcctaccagtttaagttttccctcttcctgttgttcctcgttttccttcattccttcttttttttttcctttttacctttagagttgtatctagtgagagcagaagatttcagtagaagtcttgctttctggagacaatgttttttctgtttgttttggaatatcctactttgaactgctcgtggttacccttataaagatggcgtgtaacctattctgttgttggttctgcaaccttgtttgatctccttttgaaggatacggttgt

SEQ ID NO: 3770 - DNA, 1240 bp, Setaria italica
  misc_feature (1170)..(1240): n is a, c, g, or t
  Peptide Sequence Number=SeqID_69744
ggacctctctcctcacttcctgctcctctcattccgatccatctgagctcccggctcttccgtttgctcatcgatttcgcttttttttaaaaaaaccgaaaacccgagcttcctagggttccgccgccatgccgcagggagaccacatagagctgcaccagaagcgccatgggcggcgcctggactacgaggagcgcaagcgcaagcgcgaggcgcgcaaggtgcacagactttcgaaggatgcccagaagttgcttggtgctaagggtaagaggttcgccaagaaacggtatgccgagaaggcgcagatgaagaagaccctgaaaatgcacgatgaatcaacttcacggcagaaggctgatgatgtccaagagggtgcccttcctccgtatctgctggatcgtgatcagacacagcgtgccaaggttcttagcaacacaatcaagcaaaagaggaaggaaaaggctggcaaatgggatgttcccttgccaaaggtcagacctgtagctgaagaagagatgtttaaggttctgcgaactggcaagcgaaaaaccaagcagtggaagagaatggttactaaagccacctttgttggagctgggtttacaaggaagccgccaaagtatgaacggttcatccggccaactggtctgcgtttcactaaagctcatgtgactcacccagaactgaaatgtactttcaacctggacattatttctgtgaagaaaaacccaaatggtccaatgtacacttctcttggtgttatgacaaggggaacaatcattgaggtgaatgttagtgaacttggtctggtaactcctgctggaaaagttgtttggggtaaatacgctcaagtaacaaacaacccagagaatgatgggtgtatcaatgctgtcttgttagtgtagagccatagtgaaattccgttttgcttgttcatcttaccatttgtatccgctctgatgaagatgcatttttgaccgatgttgtggcaattcaggtagtctgttgtgcaccatgggcataacatgtggcagattccagtagcttattgtgcaccatgaacataacatatctgtattgtggcttcacaacaaatggcttcacaatttatagcccgctgtaaaatttgaggaaattcagattagcaacgttttctaggaaaacttnnnnnnnnnnnnnnnnnnnnnnnnnnnnnnnnnnnnnnnnnnnnnnnnnnnnnnnnnnnnnnnnnnnnnnn

SEQ ID NO: 3771 - DNA, 261 bp, Setaria italica
  Peptide Sequence Number=SeqID_69745
gtcgccaacctcgcgcacttcgccgccaactacgcgctcgtcgtcctggccgtcgtcttcgcctccctgctctggtaccccgtctccctgctcgtcttcctcgcctgcttcgccggctggctcttcctctacttcctccgcgaccgcgacgtcgaccaggcgctgctcatctgcggccgccccgtcggggacggcgtcgtcatcgccttcctctccgcggtcacgctcgtcctgctgctgctcaccggcgccacgtcaaac

SEQ ID NO: 3772 - DNA, 353 bp, Setaria italica
  Peptide Sequence Number=SeqID_69746
tattatagtatctgctcctgatcaattgatcatggccatgaatgagactatgacacatgtaggtctttgaggtgttgagatccttagttagttagttaggtatcagcttcaacaagaacggccatcgtactctgttttcactaaaattaatgttcttgatgcttctgtctagcataacacttgtcagcatcctacaccgaaaggacggatacagctgcattttgttaacttattcatggtcgtcgtgatcattcttggtatgcatgaagcaattgatggttcttgttggtgaccttgcaggatgccgatggaaacgtcccattctactggggagtcgactccgatggccgtct

SEQ ID NO: 3773 - DNA, 787 bp, Setaria italica
  misc_feature (742)..(742): n is a, c, g, or t
  Peptide Sequence Number=SeqID_69747
cgctaatgaggtcaacatcgtcattgaggcttacaggacgttgagggacaggggtccttatccggctgatcaagtcgtgagagacataagcggaaaatttgcatttgttctgtatgattgctgattgcaaagtacggtcgttacaattggctgccgatgccgatggaaacgtcccattctactggggagtcgactccgatggccgtcttgtggtgtctgacgacgatgaaatggtgaagaaggcctgcggaaaatcctctgccccgttccctaaaggcttcttcttcaccacgtccggtgggctgcagagctacgagcacccgatgaacgaggtgaagccggtgccgagggtggacagcaagggcgaggtgtgcggcacgacgtacacggtggatgccaaggccaagaaggacaccagcatccccagggtcggcagcgctgcagactggtctgcgcaatactgatttggttatctgtgtgttgagcagctcaggtagcatcatatccccggggtgtttgtcgtagtagaccgatgttcatatggaagccatcagtcttgttctagtgtttacctgaataaactgttcgttctctgccgctgtttataattcaagacagaggtttctaatgtttaaatgagcatgactagctgttgctttggtgtaagaacttgaatgaagatgggttgctgtctactactgatcactaataaaggggtgtttggttacaaaaaaaaaaaaanaaaaaaaaactaaaaagaagaactagaccaaaggcacacagggga

SEQ ID NO: 3774 - DNA, 567 bp, Setaria italica
  Peptide Sequence Number=SeqID_69748
cgctctttggcactctcaaaatgttcccctatgaaaggcaaagaaaggcttcgatccaagttttggtgcgagcttcttatcataaacgtaagattccatcgatttgtagttctcaacacctacttcaacaaggtcatatatgtggtggtcatatgtccttcccaaaaatcaaattgttgggcctcttctttgaatgagaaccatacactataaggctgcagtctgtcttgagggagaaaaaactccagagaagattctccaccactttcaaacggcctaatgttgtcattcttcttggtgtacttcacagcattatcacgcttcaggtggtagatatctgacagcacagagttcaacactgcactagtctttgtaccatggaggataagtgtcttcttgccagtttcaacgagcttgggcgcgtgcttgaggagctcccgcctggcgcgctgggtcttgggtaccctgatcgccgcaaccatcttcgtctccctcggccgccgcggagaagaagctgaaggggggaaaggaggcggcgcagcgttcgggaggccagagccctaaaag

SEQ ID NO: 3775 - DNA, 505 bp, Setaria italica
  Peptide Sequence Number=SeqID_69749
tttttgtaagaatgactgtaacataacattgctcaaaatttccatgcttatgtctggcataacgagttggtgcacaataatgttgtgctagtcaccaccaaggtctttagcctacaaagatggcactaaactatttaccacccaatctaacagcaagtggcttacacttggctagcacagcagcttgcaacagttacaagcagaagtccttagtctgaccagtacccaagacaaaaacaaaactatgtgttctttactcagggttgaccttttgcttctttgagtgctccttgtttttcttggcctcgcggcgctccctcttcagtcccttaatgtcgttcgataaggtcaactttccaacctgttggtctggcatgtagaccttgcccaacctgccctgaactggatccttggtgacatttttcaccttcttagcatgttcagcagttctttctattagtcttttctttttctttttctttaagttttctttttttctttttaa

SEQ ID NO: 3776 - DNA, 1555 bp, Setaria italica
  misc_feature (1)..(24): n is a, c, g, or t
  Peptide Sequence Number=SeqID_69750
nnnnnnnnnnnnnnnnnnnnnnnnttttttaagttaaattaaatttagttaaaaattaacattgtaaaatactatcactgctcaaaatttccacacttctgtccgacagatgaggtggtggcgcggtacacaatattcttgtgaaagccaccacaaaggttcttagcctaagaagatggcactaaactactttccaccaatctaacagcaagttgcttccgcttcgcctaacacaacaactgggaacagttacaagcaaagcccttgatctgactgtatcaattctaacagcaagtggcttccacttggctaacacagacaactgggagcaattacaagcaaaagcccttgatctgaccatatccaaagacaaaaataaatcaacaagcactctttactcagggttgaccttttgcttctttgagtgctccttgtttttcttggcctcacggcgctccctcttcagtccctttatgtcgttcgataaggccaactttccaacctgctggtctggcatgtagaccttgcccagcctgccctgcactggatccttggtgacattcttcaccttcttagcatggtcagcagtcttcatagcttctttcttcaaactttcaactggaagcctatgtctccttacaaccagatccatcgaaggcccaacttcaactaactccattctaggaatagatgtgcctgacctttttagacacagagcacagtgcatcatgtagacagtagtaggagaggttgctgtgcacacatagatccgatctacaccagcaaggtttagattctctacaacctctcctctgaaaagatcaagcagcacttctttcaaatgcttgagctcttcggcactctcaaaatgttcccctatgaaggcaaagaaaggcttcgatccaagttttggtgcgagcttcttatcataaacgtaagattccatcgatttgtagttctcaacacctacttcaacaaggtcatatatgtggtggtcatatgtccttcccaaaatcaaattgttgggcctcttctttgaatgagaaccatacactataaggctgcagtctgtcttgagggagaaaaactccagagaagattctccaccactttcaaaaggcctgatgttgtcattcttcttggtgtacttcacagcattatcacgcttcaggtggtaaatatcggacaacacagagttcaacacagcactagtcttggtaccatggaggatcagcgtcttcttgccagtctcaacgagcttgggcgcgtgcttgaggagctcccgcctggcgcgcttggtcttgggcaccctaatcgccgccaccatcttctcgctccgctccgctccaagccgccgccgccgcggagaacaagctgaagacgtgtagaggaggctacctgacagcacggcagtacggcacccggccactaaaccctagaaaccccgcgccgccccgattttgttcaggaggagaggaatcgcgccaggcaaaggccagacagagaggacaacttactttacaaaataagaacttaactaaagtaacttaactaa

SEQ ID NO: 3777 - DNA, 237 bp, Setaria italica
  Peptide Sequence Number=SeqID_69751
gctggcagcacagcaagaggacagggtgttggcacaattgcacctctgtttctgttgttgcttgtagaccatggttactgttgtattcctgtgacattggccagcgtgatggcatgagggtagtcaatgacaagagctggaggcacctgggaaattatgttggggtgggccggtgggctacctagctgcttacgagtcatgactcatcttttccttataatattcggtagctttcct

SEQ ID NO: 3778 - DNA, 882 bp, Setaria italica
  Peptide Sequence Number=SeqID_69752
aaggaaagaaaccaaatacaacctagaaccaataatatcagttggttcagcaccaaaaaatctagtacttcatcacgaggtcgacaccgtaatttctcatcatcgacatgcaaagattttctccggaagtttgtggacaatgaacttttaacttcaagcctagaggattggttctctggtcacagtgaagattatggtttcaggaagccagcatttgatgttcctttcgaccttactgaattacagaattttgattatgctctggagggtgttacttttcagcaactagtacggatgccaaatgctctttatgcatcaacatcagatgtttttgaagctactgcatatcttgctttggaggatttccttcatgcaggcattaaaggactctgggagactttctggggtcctgatgaagcgatgcctttctcagttgcctgtatacatagcacaagctccaaattttatcctgctgagaaggctattagcagtggaaaactcgatggtgtttgtgcaacggctgtactgctgaagaatttgaagcattcacaaggaagatgggatcatattgttgtgttggctttgttgagacctgatattggaatggtttccgcgcagggtgaccaggagccatctcctgctgtcttgggggaggcactgttctttgctttgcgtgttctactatctcgaagccttagcagatcttccaccgttcttcgcaattcagattgtgtttacttgcttcttgtggattcacagtttggaggagtggtaaaggtcgaaggtgatctgaacaagctggattttgatctgaacaatgtttatgactgtgctgctgagtggataaagaaacatgccagagtttcagtttcatccatagat

SEQ ID NO: 3779 - DNA, 2160 bp, Setaria italica
  Peptide Sequence Number=SeqID_69753
atctaagcacaccagtagcaggatacgagtttgagcaactgaataaacatcatttacaggaccttgatcactttggacattgcacccaacaaataatttagtcagagcttcaaaatgctactatgccacaccacctctaatcacaaatctatcctggagcaattacaaaaaaagcgccaaaaaatcgatcaactataccacacactcaggtccatgtttacctactgactaacagtttaaacactgaccatgagaaaatattatccaaaagcctagcagtaccgaataagatgggcccagaatctcggagggcaaccagagttgagcacagctcaccaatttcccaaagatcattcacaaaacgaatcatgttgctagtatcctcaaggatcgttacacggcactttgtgtgaaagtgaaaccacggaacagtaaacagtgacagtgatccgattgaggatagcagcagcagattgctattttggaaatacccttgttgaagaaatggcacaagacgaagacaatactatgagctatggacctttcacaagtaaattatctacaacaacaaaaggtaatgggctgatcactcttgatcttccacattttggatttgcaagaagatgtgctgcggtattaacttgatgatgtatcgacctccttcccatgatcttcatttattgttcttcgcaatcttttcaaccatatctcatagtccattgggtatggggtcccacaaaggctgtcaacataatccgcaaaggcttttaacagtgctgagacgtcacccaacttctgctgtataactcttctagaccatgacgtctccctccattgaagtgcactttcaactgagtcaagctctgggcaaactccaccacaagagaaatatagaagataaattaaactttctgcatcagatgctgcacatagcttgccttcctggagcgcaaatgtagatgagaagaacagattcatcacaggtcgatccctatcttctaggatagcatgaccccatccaataagcacaaaatatggatgccttgaaccattactcacacgaatcacattctctggccggatatcaccatgacggattcctgcagatgctgatgcagcaagagcagataaacaatcatggcaacatctcagagcctcctcaacaccgaacaatccattccgtatcagatttgaaatggtctcaccaactggtgaggtgacaaggattggagtactgcaccatggatgaccacaacttccacttgagttaggcttgttacatggacctggatggatggcacgcccagaagataccatctgtggtatatatctgctagaaatgcctctttgcttcatcaaagtcagtactttggtctgcctttgtacttggtaccaggaattcatatcctcccacgcaggctccagatgagaagggctggagcctacatacaacaaataggttttggtaggctcttccacaggagtagaactataaataggaggatcactgtctgttagaatgtcattgatctggaaacctttctggctgtaagcatcatccatcaatacaacagatccaatttcaagcttcaagatttcctgtggtttcacatcaacagctgtttcctcctgtacttcgacaatttcaggagagtgacttcgctgctggtatcgagataaaccattaccattagcttgtctgtcaaccagatgtctttccgatcttcgactttgtagccgtgaactatgttccgttgctagttcattaagagaatacttagggtctccataaaattggatcattgagtggaatattgcaataagaacttgaagagtcccaatgtctccccagttagcattcccaagtttgttccatactcgatctatggatgaaactgaaactctggcatgtttctttatccactcagcagcacagtcataaacattgttcagatcaaaatccagcttgttcagatcaccttcgacctttaccactcctccaaactgtgaatccacaagaagcaagtaaacacaatctgaattgcgaagaacggtggaagatctgctaaggcttcgagatagtagaacacgcaaagcaaagaacagtgcctcccccaagacagcaggagatggctcctggtcaccctgcgcggaaaccat

SEQ ID NO: 3780 - DNA, 630 bp, Setaria italica
  Peptide Sequence Number=SeqID_69754
tttttaagaatacttgcaaatcctgacagagtgaccagctctttgttgactttgagttacacaacaaaaacctgaatctgtacatggttacaagagtaagttgaccaccaacatttcaacaacagtaaacaacattgttgccccccttccattaccattttccacctaacctactgactaacgacatttgccacgacatgccaatgcacgttgggttacagtatatacacgtgtgcgcattagtcaaatacatgcaacaaggtgttgggacattatacagaaaagcttggcttagcaatgagaaggatttcctctcctccaaatgaataatcaaatgagagagcatgatattaaatactgaccctaaaaacactctactctttcacctacactgcaataattttacaacagcagcgaaaagatgacagccacatctgacgagaaatgttaggcccacgatagcccataccttctcaacttccattgtggctgctgctcatccagcagctttcttgcctttccatcagatccattgagctcaagagttgagactcaggtgatcgcaaatggagtccacggacaaactttgtgcacctatggaaacacaattgctcaggggggcttcacaat

SEQ ID NO: 3781 - DNA, 1158 bp, Setaria italica
  misc_feature (1)..(42): n is a, c, g, or t
  Peptide Sequence Number=SeqID_69755
nnnnnnnnnnnnnnnnnnnnnnnnnnnnnnnnnnnnnnnnnntttttttttttggtttctatcactgaactgaacgtgcccagaccatccgaagatcatgttcatagaatgtcgttttcagcatggctcacaagaattacggtgctctagaaaagtaaagaaaaaaaaacacaactacactaactaattgcagaacaatattaagtcattcggatgcacattgtcaaataaaagaattatcagtactcggccccaccacactttttcaaaactgtctgccgtaaatccaattttaccagctacatccttggagagcctggctgctgtacctttcacgcacgagctcatgcttgcaagtctcatcaacactcccgttacaaatcaagggcttggtcccgttggtggcgtggactttgatcggtctctctagaacaagagctagtgcttccttctccaactgcaagcagtagcttctgaaagtctctaagttgactttgagcctgaagtccagactgaacaacaaatccagttcaagcctattcatctctctcgtgctaattcctccaactcttccatagtatgcattgttgaaaaacgaatcatctatgaatttggcagcaacaacaacacttgtaatcagcaagcgatgaacactaaatgacgtcatgtaaatgtttggttgttgtagatatctctccatgtagatgagtgccaacacaaagcaagatgggctgcactgtgcatacttgaaaatgcgttctgcatagagctttatactaagttctggcaccctctgaccatgaaagatagtggttgactcctttactttactggaatctagtaactcttcattctgctgaactgtcttatcaagatacgtcgacagaagcaacagaacctttggaaattctgcgttgcctttctgtgagtgtggtactgtcaaacccaaggacgagtagctctccagttcatcaccagcgtcagttgtaggtggtgccattgccataggcagacattagtgatcttgctctagctcgggaggaggcatccgggcttgaggtccagctccacccccctggaggagccaggtgagtcgaggagcagccgctccgcagatgctgctgaagcaaagcacagatgcacaagaacaccactaac

SEQ ID NO: 3782 - DNA, 1188 bp, Setaria italica
  Peptide Sequence Number=SeqID_69756
ggtgcagaatcatcgcatcacgttctgtcacaccaatgccctcaaatgtccacaaggaaacagtggcagtgcctttgaggcccaaggagtaccatccaaggccagaaacagcgatgtccatactgttgacatcccagctcgccccagacacctcaatttgtctttctgtccagtgacccaattcattgactcgctctgggccaattggcggctgaagtctgatgccaaaatgtcggtctcgcaattcatcagcattatcagtctttccaagatggaggggaacattcgaagatgcccaaacagttatatagatggtctgcgctgaagattttagcacatccagacgcgttaagcctccaatatggacggattgtcctactttcaccctgaaggaccgtggccgcaattctttccttatttcaatcatctttcgttcctcattatttaatctcattgccattatgtatggatgcaacaagccaggagtgtcatacatttttgcctttgcaggtaaaacacctgttaccctcagtatgcctaatgtagttcctgggacagcagcttcagtcaatcttgtgattttaacaccttgtttctttgcaattgcattgatcagcgtagatttcccagcattctgtgcaccaatcacccaaacgttgctacgaggtcctgctgattcctttatgtatgaaattaggtttctaacagccaaatctctgtggacgctgatcaagaaaacagcatctagctttggtgctccaaaagccttagcacggccacgaacccacctatcgaaccgcactcccatttgctgccatggaagcaaatctacctttgtaccaacaagaacaagccttggtgtttcactcaccttagaatttctccttccttcaagtgccttgaacaatgacttggcagctcgcttcggaaatgacccatcaaagtctgcacaatccaccaccatgacaataaccggggcgctagtcgacctcttcatcaaccgagacgaaatgaaccgatcaaaatcaaagtccgggatcaagttctcggccttgtcattcttcacaagcccataatttctcagcgagtggcaccgggcacagaccacggccaggttctcctcagcctcagctctcttggcctcccctccgtcccggcgtcctttccctttcacgtacgttggacagt

SEQ ID NO: 3783 - DNA, 274 bp, Setaria italica
  Peptide Sequence Number=SeqID_69757
gttggcacatggaaacaaaggtaaagaatcgcagatcacattttgaacaaagccgcaaccggccgaaactgaaaagggacgactcgaaccacccatctgactatctcccttcttttttctcgcttacttttttttcccccgcagaaacaaaaagcagtatgaaaggatatgaaaagtagcatcttcaaatttgtggtgcaagtgagagaggctctctgatcttgtcagcgctcccacgaccacaagtggcctcgccgccgccgcagttgaaaag

SEQ ID NO: 3784 - DNA, 420 bp, Setaria italica
  Peptide Sequence Number=SeqID_69758
aaacccaaataaagaaaaataaactaaaaataactaagaacgaagtagaaaataactttaagggacaacaatacaattaaccttcatcgcacaatggttctgaaggatcagccacgaaaattaagtgaagcgtatcagggtaccctgagactagaaccataataccttggatgaccaggtgaggcatggacaagagtggttaaccaaacatccttcgtcgacttatgcaaatgactgattagcttgagcagaccaatagagggaatgaggtcaaaaggcagcttcttttatgacatacactggggtactgggaaagtaaaacttctaagctgagtgcttgaaaatactcggaaacattattgaaagtaagacaatacaacaattaccaaaagggacgacggacaacaagaagggaccgga

SEQ ID NO: 3785 - DNA, 1546 bp, Setaria italica
  misc_feature (1)..(33): n is a, c, g, or t
  Peptide Sequence Number=SeqID_69759
nnnnnnnnnnnnnnnnnnnnnnnnnnnnnnnnncacagacagctctttagcgactgatctctcagtactaagctaccaggaaaatgattattcatgctacgaattgacagagcagcaaccacacacaatgcaccagagttaaggtccacaaaggcaacacagcttaaaacataacattgatcttacatactcacacgacctaggcaggcgactgcaaccaaggctcgcgatagagctacaaaggtcatgcaggagctcagttagagatacataattggtacattaaagctgaaagaccttcccatgaatctaaatctgcgagtgaaatactttagggcacatcattaccttcatcgcacaatggttctgaaggatcagccacgaaaattaagtgaagcgtatcagggtaccctgagactagaaccataataccttggatgaccaggtgaggcatggacaagagtggttaaccaaacatccttcgtcgacttatgcaaatgactgattagcttgagcagaccaatagagggaatgaggtcaaaaggcagcttcttttatgacatacactggggtactgggaaagtaaaacttctaagctgagtgcttgaaaatactcggaaacattattgaagtagcatcacattccaaagggcgcggcacagagggccggaagagcagcattcggggtggagcggttgtacccaaacaagtccagcatccgtggattctggcactcagcctcataactcacttccttcacgctatcatcatcagctggcaagatcttctcagtcaaggagaaaccaaaaagcctgcagctagttttgcgaacctccctcccaccagacccagttttagcagcatctcctggtgctgaagctctcctagtctcaaactgatccaagctaatttgaccaggccttccatgctgtgacctggtctgagcttcccacagcatctcaaatgggcgaggctgactgctatttccaacttcgccagcagtcttgcttgccaatccaagctgtgaagccacagtttggttaaacatgtgattgggatgcggggagtgcacttgtgctgctggtggagtagatagtgtgagagaacattcttgagctgtggctgataatccatcaacagtagttggggtacgcatataaccacgcaacccatatccacctttcactgaacatgcctcagacatcattccttggaacataggaactgcctgagaaatttcttgaccttgcaagacctctgagaatccaatagattcattgaagcctacagattggtaggtaaagctggtgttctgcactgcaagtctgcttgttggaccactcaacatgcagcttcgtgcattagtaaggaacctactagcatcagaagattgaaattttgcaacctcagctgtttgaggagcacacgtaacacgatgagtcctaaaacccatcaattcttgaccttgcaagaccctgggtaactttccagtttccacggagtcagtacaaccattccacattgttggaacatccaaatttccctg

SEQ ID NO: 3786 - DNA, 2134 bp, Setaria italica
  Peptide Sequence Number=SeqID_69760
agacggcgatttagttgccaaagagggcgactcagctgccaaagaggggattcgctgcccaaaaattgcaaaattcatgagggtcttgataacaacggagtaatggcagagccacatggggccaaccctggcgacctgcctggtttaaaatgcaatggcactgccgagcagcgcgattccgtgggggaagattgcagtttgcagtttctcatgaatggtgatggtaccataccgggtttacggaaggggcgcaaggcagtggcccaatggaggttccagactgggtacaaacccaaatgggcacgagatttattatcagggaatagatcaggagaaattgaagggccagtgtccatggtcggagatggatcgagcaagagtgctcctgtcatggcatacaatcgctctcatatcaaaggttcagctactggtggacatcattcaaaagttcagaaaggaactggctcagcaccgaagaagaggaaagttcatgaggatgatcacaggacttccttggtgcgagaaaatatgttgactaagttgcgggagtttcggataatttacaagaagctcctggaggaggaagaggtcaagtggagtggaagagggcatggtgtgagacctgatattgcagctttcaatattttccgggagaaattcggtgctgatcatgatgacatgaggtacgatggaagcattccaggggttcgtattggtgacgtgttcaattctatcatggaactttccattgttggcatacaccgtgcacaatcgttgtcagttgatcacatcaaaaagaaggatgggacatgtctagctgttagtgttgtgtcgtatgcacaaccttctgcctctgatagtttggatttcctgttacatgttggatcagtggctgccacatatgatcagaagttaggaggcactgacgtggcactcatggagagtatggaaactgatacgcctgtccgtgttattcatgcatttgtaactgagctaggtaatgactgtggacccaaacagcttactacttacgtatatggtggtttgtacttggttgagaaattccatagagaaaaaacaacaggagatcagtatgttaatacgtttcatctaagaagaatggcagagcagcaacaaattgacatacaagttctgaaaactaaaaagccggaatcatttgatggcactttcactgtagacatatccggaggtcttgagaaggtccctatttctgctattaactctatatcaaatgagcacctgatgacatttcgctacatttcgcaaatacagtatcccctaaattttaggccagatcctccatcaggttgtgattgtgttggtggatgttcagtctctcaaaaatgtgcatgcacagtgaaaaatggaggggagttcccttacgatgataatggtgaaaatatagaagaaaagcctcttatttatgagtgtgggccatcttgcaagtgccctcctacttgtcgcaatagagttagccagcgtggaatcaagttccgcctccaggtcttcaaaaccaactcaatggggtggggagtaagaactcttgacttcattccgaatggaagttttgtatgtgaatacataggagagctattggaggaagaagaggcacagaaaaggaagagtgacgaatacctatttgctattgggaacaagtatcatgatgtacctcgttggaaggcccagatcaagactattccctcccttcagaatgtccctagtgaagatgatgaaattggttttgctattgatgcactgaaccagggaaattttgcaaggttcatcaaccatagttgcacccccaacctttacacacagaatgtcctccatgaccatgacaacataagtatgcctcatgtcatgctttttgcttctgaggatattcctccccttaaagagctatcatatgattacaattatgagatagacaaggtttatgattctgatggtaacatcaagatgaaaccatgtttttgtggatctgttgaatgcactggacggttgtattaaatttagtcccttggaaatcatttgttgtcgttctattgaatgtaccttctttgtttaggtgagggtttctctttctgcatgttacttgtcttgtaactttagt

SEQ ID NO: 3787 - DNA, 230 bp, Setaria italica
  Peptide Sequence Number=SeqID_69761
ccgagcttggtttggccactcattttgcatgaggctgtttgttgatggatctgcagcggtgtaagatgtgcttcgtccataaggcagtccatgagataaaccagacatatgatatggagaaccagaaagtgacgaacttggagaacccatgtggtgaccagcaccaggtggcagcgctgggttgccttatcctgctcaaggtcttacacggcacgcgagcattccatcac

SEQ ID NO: 3788 - DNA, 427 bp, Setaria italica
  Peptide Sequence Number=SeqID_69762
cgggatacgaagacgtgcgagacagtggtttggactctccaaagtgaggtgaagactgcagctgtgagcaccactgtttgctgtccagaaattcatcaccatctagcataccctggtctacccaactgtggaagtctgcatcttgaacccagtcagtagtcaaagaactttctctagaaattgatcgcctatcaccaataacgccaggattccttgttccgctaatacttcggttcaactttgcaaaagtgcttgcgagatcatcaatttcagacaagttactcatacaatcaatctcttcccccatagaagagaactggtagcccccatcatcatgtccaccaaatccgctaccatcgccgtcgacgcctccatcctccaagaacccgccgagctccggcccctccatgggcgccttgccgaagaa

SEQ ID NO: 3789 - DNA, 422 bp, Setaria italica
  Peptide Sequence Number=SeqID_69763
aaatactgggcctgaaacaggaaacttgagccgcacgatctgatccgaaggtgccgagagcagcacctcttcccccatagaagagaactggtagcccccatcatcatgtccaccaaatccgctaccatcgccgtcgacgcctccatcctccaagaacccgccgagctccggcccctccatgggcgccttgccgaagaaggagtactgcgccgcatcgaagcgcgagttctctgcggtggaagacgatgacgcggcggcgcctccgcctcctccgccgccgccatcagccctgacgcccctcatcgcctcgacgcccccgcggcagcacccggcggcgcgaacggtgcgctagggtttgggttcccgcgtggggtttggatctgacgagagcagagaggaaggagcgagggccacagctcgcc

SEQ ID NO: 3790 - DNA, 1643 bp, Setaria italica
  Peptide Sequence Number=SeqID_69764
ttttttgacaaccttattctatataaacaagggtaatgtgcataaagacatgaatgaacccagaaaaatgccctcagaaatgaagcgcagtaaccaatcgctagactaatcataagaagcttattacaattcatatagatagagagccgggaacagtagatacaaactgtagcatatcactcctgccttgggcacatccccagttgaagcaaacatcaccagaaacaagtagggggcacggtggtatgatatgctgttgccatccacccacctttgtcttcattgggagaaaataagtcaattaggttacctccacagatgtccagttcaccactacacagttacaacaggatacatacatgcataatctatcataaccatcagggaggtgataggcctacataaaggaggtttttcagcatataaatataatctcgaacctacacatggtcacatcctgaatgcctaacttcactgagccaatggaacttctccaagctcgcagcttacgatgaggtcacaagcacatctccagatataccatctgaagacaaactgcacatataatttaaccgacagccttggggtctcttcaatggtgctaacctggaactgattcagaattgatatgtccacggctagcattagggctgaaaccagagacatgcgtagatttacgagcaaaatctagcagtgtctggcgatgctgttcattggtgtgaggaagactcgcacgcagcagctcaacaggcatctccctgctaactgctttggtggcttcaggtccacccagagagttggatccgtgcatggcaaacctctgcacaatactttcatacttgctgtcacagtattttgtcagcagtccaaagaaggcatcaaatgatgcttgccaaagtgaacgtgttgatctgctgtagtttgctgcagaatgaggatctgccagtagatcagttgctctatctagtacagatttgatgatcagagaagccccatcaccagcagagctacccaatggtctgagaggtggctgctgcgatgaacagacaacagcagcaaggcaggcactgagagcacttagttccatatggtgcacacaagaggaaacagtcttggcaagaccaatggttgtttctgcagcaccagagtccgtcggcaaacccccaaacaagctcctaaggtgtcggaagaccgtcatacaaactatccgggtcagctcacttccagggacaagaagtcgaagatagcgtgccaaaagcttacgtcctttggggagagaaacaatgcgaagaaaaattaggtcgtccttgggggctaatccagatgagtggccaggtttgttggggccaaaagggtcaacaagctgaagggatgcagctaagccttcaaggaggacctgtcgccttcgcctcagttggaaactgttgtcctggggctggctagactgtaagaatcgatcgatatcatcaacatcgagaagaagacgaagagaatcttcaacagttattctagctgcaaccattggttctttctccagtggcctcgtggatgacttatgatcatacaaaccatcaccagatccaggcaaatcaacttcaagaagaggacgaggtctgcgtatggcagagaatgaaactcctcca

SEQ ID NO: 3791 - DNA, 1478 bp, Setaria italica
  Peptide Sequence Number=SeqID_69765
agtaccttaaggggaactaaaataaccaaagaaataagaatgcgttcccaaggtttagttaggggacccaaaagggtcaacaagctgaagggatgcagctaagccttcaaggaggacctgtcgccttcgcctcagttggaaactgttgtcctggggctggctagactgtaagaatcgatcgatatcatcaacatcgagaagaagacgaagagaatcttcaacagttattctagctgcaaccattggttctttctccagtggcctcgtggatgacttatgatcatacaaaccatcaccagatccaggcaaatcaacttcaagaagaggacgaggtctgcgtatggcagagaatgaaactcctccattagcatcaacctgtagatatgaatgctgatcaccaccagagcgggcctttgaggggaagtcctttattgacatggggcagaaattggacttctgagtatttacagatcttttggcgttggttgcttggtggtagtagtcatcgatgtaaggatcattgctgtgacttgcagagtgctgcatttttaagatgttttcaatctcttcagatgacatgtacttggatctgaactttatccccacactctcactatgctggctacttgcatcagaaggctgttgaggtaaacgtatgctgcgctttcctcttcctgaccttgatcttttgtctctgggtgaaggcacattaggaatatgatcaaaattgcccattatctcaggagattgatggtgatagaataggtgaggatgcaagtttaggtaattctgaaaagatggctggactggtggtaatctctgatgctgctgagaataatgcaatgaagacattgaactacttggaagagataattgtggttgcaataaactgggccgccggttaaggtgatcaaaagcgagtgggccagcttggtttggccactcattttgcatgaggctgtttgttgatggatctgcagcggtgtaagatgtgcttcgtccataaggcagtccatgagataaaccagacatatgatatggagaaccagaaagtgacgaacttggagaacccatgtggtgaccagcaccaggtgatggaatgctcgcgtgccgtgtaagaccttgagcaggataaggcaacccagcgctgccacctggtggtggatatgatgtaaatgaagtagatctgtgtagaagaataggttcacttgagcggtgctgtagtggttgatcgggatacgaagacgtgcgagacagtggtttggactctccaaagtgaggtgaagactgcagctgtgagcaccactgtttgctgtccagaaattcatcaccatctagcataccctggtctacccaactgtggaagtctgcatcttgaacccagtcagtagtcaaagaactttctctagaaattgatcggtccttattctacctaattaacgtcctaggtatttcctttgtttccgtcttaattactt

SEQ ID NO: 3792 - DNA, 233 bp, Setaria italica
  Peptide Sequence Number=SeqID_69766
aaagattagggttcagactttctcaaccccttgccaacctgaatttggtgtaactcagaaatgctatagtaatgtgcaagagatgcatactttatcagctctggatgcagaaaaactgaatggagaaaaatgtgcaccttctgcaacaatgattggagatcattcagagcattatgccatgtccaagaaagcgaatcgtaccacgcgcatggttgtcgcaaggaccgagctct

SEQ ID NO: 3793 - DNA, 745 bp, Setaria italica
  Peptide Sequence Number=SeqID_69767
aataaggtagcactcccagcacaaagattctgcacaacaatgaaggactctgtaaatacatcctccaattcctcttctgttcctttattctagttaacacacgcaaaacggcttagttacacctccagggcaatgctgaattcacatcaatgtctttcttgtctcctcactactgtcatttgatgtcttacagcttcacatggacactaaagagtgatatatggactgaccattgacaacagaacttctacgtgagtctgtcctagttggtgaagccaaaaacctcctcctcctcctggaagatcagctaggctgttgggcagttgcaccccaggccaccttgcagatgcaagccacatttgcgatgcggtcatagatggtatgctctgcggctcaggagaggatgccagcacaattggagcttgtcattaagcgcaggtcgaattgagaagcctgaccaagaacagcccaagcaaggtccttagaagctccagtgcccgcacttttcaagattattttcagagccttatcaaacttcgagcccgtagaaggaccccttgctattgtgctgcagccagcagtcatagtggcagtgaagattggtgaaattttagcggttcacatcagtatatgcttcacatcatcacatggtatctaaccatctagaagttggctactgctcacttcttcacttctgcaacaatgattggagatcattcagagcattatgccatgtccaagaaag

SEQ ID NO: 3794 - DNA, 606 bp, Setaria italica
  Peptide Sequence Number=SeqID_69768
tatgttcagagcctcccttcaagaattatcgctctatcaaaagcagcaaccttgtcttctctttcaatttccaaatctcttagtctggcattctctgtctgtaaggatttgctttggtctatgtagaaatcgacctcattaatctcattagtatagttgaagtgagaaagaaataccgttataagctcggcctgatggacggcaagcaggttcggcctggacgagtgctgaggagtgcgttcagggggcagtgcacgggatcgccgtcacgcgtgatgcggcgccgtcgcttccaggagcaccagccgccggtggggaacgacgagtgatggctgaccatagaggagtcggcggacgggagaatctgctagcaccggcgaatgggaaaatctgctggtggacgggaaactgccgacaacttgtgctgggcctgatcctagggtatgacgggtgccacttgggtccgcccctggatgagatgagggaggacgcgacgcgaggtaggctagcggcgtagaatacctaagggtaatagaacgggtagaccaacttagggtaccgacccctaggaatagaagaatagaagggaaggaacgacgaacgaca

SEQ ID NO: 3795 - DNA, 1376 bp, Setaria italica
  Peptide Sequence Number=SeqID_69769
taaattaaggttataaggtagcacttcgagcacaaagattctgcacaacaatgaaggactctgtaaatacatcctccaattcctcttctgttcctttattctagttaacacacgcaaaacggcttagttacacctccagggcaatgctgaattcacatcaatgtctttcttgtctcctcactactgtcatttgatgtcttacagcttcacatggacacattgacaacagaacttctacgtgagtctgtcctagttggtgaagccaaaaacctcctcctcctcctggaagatcagctaggctgttgggcagttgcaccccaggccaccttgcagatgcaagccacatttgcgatgcggtcatagatggtatgctctgcggctcaggagaggatgccagcacaattggagcttaccattaagcgcaggtcgaattgagaagcctgaccaagaacagccccaagcaaggtccccgtagaaggaccccttgctattgtgctgcagccagcagtcatagtggcagtgaagattggtgaaattttagcggttcacatcagtatatgcttcacatcatcacatggtatctaaccatctagaagttggctactgctcacttcttcactgctttaagccagtgcacaaagattagggttcagactttctcaaccccttgccaaccttctgcaacaatgattggagatcattcagagcattatgccatgtccaagaaagcgaatcgtaccacgcgcatggttgtcgcaaggaccgagctctcctcaagctcattgaactcaacttacaccatagttcagacatttcacaagattcagagcactattacagtgtcccatcccgttacacctctgatctcctaatttatcagtggcagactaacttacttgaggaataatgaagtaaaatgaacagcttctatcttctgtctgatctcagactatgttcagagcctcccttcaagaattatcgctctatcaaaagcagcaaccttgtcttctctttcaatttccaaatctcttagtctggcattctctgtctgtaaggatttgctttggtctatgtagaaatcgacctcattaatctcattagtatagttgaagtgagaaagaaataccgttataagctgcaataagcaagctcacaaaatgaattgagataggataaacatttaaattaacaatacactatgagcaaggacgaaattcatgaccagggatctgcaactgttaatctcaatggaatataataacatttaaatagtacgctcacatcaattgcaagttgcaacctatttacatgctaagataaccagatgcctaattgtctagatctccatctactattctgggagagcacagaagaaa

SEQ ID NO: 3796 - DNA, 1054 bp, Setaria italica
  Peptide Sequence Number=SeqID_69770
tgaatcataggaaataaaatactcgacaaagtaaggttgtgcttaaaattgggaactgacctaaagagtgatatatggactgaccattgacaacagaacttctacgtgagtctgtcctagttggtgaagccaaaaaacctcctcctcctcctggaagatcagctaggctgttgggcagttgcaccccaggccaccttgcagatgcaagccacatttgcgatgcggtcatagatggtatgctctgcggctcaggagaggatgccagcacaattggagcttaccattaagcgcaggtcgaattgagaagcctgaccaagaacagccccaagcaaggtccctgatgagaagagcaaagcagcacagcaatttttattatggccaaaagaaaagtgagaagcttctcaattatttttctcagtcccaaaccaaaccagaaagaattcatctaacatactaatggagataagaaaggacacattgtggaaatatttgggaatgtattatttcatcaaacctacaagagttctaaacatatgaaactatgaaaagaaattgctggaaggacattgatagagcatatcataaaagaacatgcctttttctagcattgatgcaggtcatctagatcctgatcctcttttacaccattccatagacttttaacctcccaaaatgattctctacaaatcttacacatttcgaacaagcaatggcattggtggtagtaggctacaacaaaatatacatgtcgacataggcaaagaactaacaaaagcttatgaacttggcatgaatggctcagcaacggaatcttcatttggaagaaaaagaacagcttcattaactgtaacattctaaattgtttttcagagtagttatacatcaggtatcccttctaagttctaacattccacactaagaagagagatttaaagaacaattgtatcagttctggcatgcactcacttagaagctccagtgcccgcacttttcaagatttattttcagagccttatcaaacttcgagcctgaacaaatgtaagtaaaatgccaa

SEQ ID NO: 3797 - DNA, 502 bp, Setaria italica
  Peptide Sequence Number=SeqID_69771
agcgaggcagtggtccttaaatcggtaccgcttatgaatgacatccatcaaatgcctatcaatcctcttggctgcctcaaccaccaatgcctccaaagcatctgtctccccataaccaagcccacctcgagatgttgtggtgccaacataagcagcagcctcggcagcagcatcagcccagccactatcatcacagcaaactctaagaaaattgattgacttgccagttctaagaattcgttgtgccagcactggagaaatgaaagttggaagcatatcagactgaataaggtagccctcccgccacaaagattctgctttaactggctgcccaacaatgaagaactctgcaaacacatcctccaactccccttctaatacccagctccgaaccatttcaaacaatggtgagcagacccgccgcagcaatcgccccataaactcctgaaacatgggatccccatggtgggcgtgcccatggatcgcaccagccatagcacca

SEQ ID NO: 3798 - DNA, 856 bp, Setaria italica
  Peptide Sequence Number=SeqID_69772
atacaatgctgcctatttcatccagtaccagactatcttttaatatagatcaacagtggctacaacaccaaatacagcttctagctactctttcggtttgcttaattatgttggaaaatcaagactgaatactcattataaagtggtctacaaaaccatcatcacagcccatcaaatgtgtatcaatcctcttggttgcctcaaccaatgcctccaaagcatctgtctctgcataaccaagcccacctcgagatgttgtggtgccaacatatgcagcagcctcggcagcagcagcagcccagcaactatcatcacagcaaactctaagaaagttgactgccttgccagtcctaagaattcgttgtgccagcactggagaaattaaagctggaagcatatcggaccgaataaggtagcactcccagcacaaagattctgcacaacaatgaaggactctgtaaatacatcctccaattcctcttctgttcctttattctagttaacacacgcaaaacggcttagttacacctccagggcaatgctgaattcacatcaatgtctttcttgtctcctcactactgtcatttgatgtcttacagcttcacatggacacattgacaacagaacttctacgtgagtctgtcctagttggtgaagccaaaaacctcctcctcctcctggaagatcagctaggctgttgggcagttgcaccccaggccaccattaagcgcaggtcgaattgagaagcctgaccaagaacagccccaagcaaggtccccgtagaaggaccgttagaatcattagtgaatttagaaaatcaaacgacagcagaacacatattcagaacagtcaactg

SEQ ID NO: 3799 - DNA, 786 bp, Setaria italica
  Peptide Sequence Number=SeqID_69773
aactgacgcctcctcccccctcaggccagaccccagaactccccctctcccctcccggcctccccaaactccccgattaaaccctagaattcccctcccaatgcgcgctccctaggcggcgcccccgaattcggcaccggttccgctaaaggtgtgcgatccagagtggacacaatgagtgcgggtttcaacaagcagatcttggctcagaagcttgcaaagcttaatagctcacagcagagcatagagactttatcacattggtgtgtctttcatcatcgttactgccgactagttgtagaaacatgggattgtgagttccatgcttcttctagtgagaggaggttatctttgctgtacctcgcaaatgatattatgcagaatagcagaaaagaaggtaatgggtatataactgaattcatgagggtcatccccgctgccttgaatgaagtgttgactatcagagatgatcttggacggaatgtcgtaaaaagactgattgacatatgggaagaccgtaaaatatttgatactcagggacaaagcctcaaggatgaattttttaggaggttaaaggacataagaaacaagttgaaaaatccggctggtgagctgctggagaaggtcgtctcaagctacaagcatgtcctgaatgctcctatggatgaggacactctgatgcaaaagtgccaagctgctcttatagattttgatagaaactacaaataaaagacgtaacaagaaaataaactactttttttaaggtaagtaagacaaataacaaaa

SEQ ID NO: 3800 - DNA, 2041 bp, Setaria italica
  Peptide Sequence Number=SeqID_69774
gttgaggtgctcttgcacctgccctgttgaatccttgtgcaaaactcaaaaagtggttgtgtactcatgtaattcttagctccatagtaaatgaaaatcatctatgggtttataccttgcttttatgacaaatacttactgtttcatctcagagattatcttggacggaatgtctcaacattacagattgacatatgggaagaccgtaaaatatttgatactcagggacaaagcctcaaggatgaattttttaggaggttaaaggacataagaaacaagttgaaaaatccggctggtgagctgctggagaaggtcgtctcaagctacaagcatgtcctgaatgctcctatggatgaggacactctgatgcaaaagtgccaagctgctcttatagattttgatgaactcaataaagcgtacagaaataactcttttttaggtagtagcaatcaatctggctttgaggagctgcagcaacaacatagtattctcagaaactccattgaacaactcaaaatgtcagaatcactcagggccactcttattcatcatttgaaggaagcactgaatgagcaggagctcaaagtggaacaagtgagaagccagcttcaggcagctcaatcccgatacaagaaagctggtgagctctgccgtggacttggaattgacgtggaaagacatcagccatctaaccaagggcttaagtccagtctctctgaaacacctgcttccattgccccagattcagctaacacgaaatcttttcagaagggacaatcaagtgcagtattgtattcacaggagggaaatggtgctgagcacaacgctatagcagctaatgttttgacaaagcttgctgtaggtgctgcttcagacaagatccgcgatggtgttttgccttcacgagccaacgggggcaatactgcagtgaaaatagatgaacactcttctggtaacaagaggcagaagctagaggatgacatacatacttctcagcctcaatcagagtcaccaccaccaccacctccgttcccgcatccagacgcatttcaacctccaccaccacctgagtatcctccagacgcatttcaaccaccaccaccaccacctgagtatcctccatcaccagagcctagcccaccaccaccgccaacttcaacaccaccccatataatccccccgcctctgccgaccacaatgccaccccaaataatctcacctctaccacctacagctggtacatatgcaccttttcctgctggacctcctggtccaatgtatggcacttttccgtttactcctgtggtcaactttcccatgaacattccacctggtttccccagtcctccaaccccacctccagcttttcaaggattagcgggtacattctatggccctcctccattccccacagcaaccccaccaacagacaagaaataaaagtagtaccgtacctgcagatttgtagcgccagacatcacacaagattgtaacatggggctttgctttggcaagtatcatagtttcttttcatcgaaggatatgaccgtggggatgcatcgccatgtgttcagtggagctcagaagactgttctagtgttgtgcatttagtcagccagcgtgcaacggtgaactaattgttctggtcttggtcaagaagtagaacctgcagatttcaactgccagagggaatttgcaattctgggagccgattgcaaatgctcccaacagtttaattcactgatttagttcttgtcttggttatggagtaaaaactgtagatctcgacagctagagagaaaatatggaaccctacagcgagggcaaatgttgtagcatgacatgtttgtaacttaatcatagctatgttatttgctagatcatccaagaatatgtagatgttcttgtgatgtatggagcgtgtagttctgttgtttggtgtaagatataattttagtggctgccgattgttgaaatttttgctctgttttaattcccttttagcactcagctatgctagtgtcaatattgttatagacct

SEQ ID NO: 3801 - DNA, 652 bp, Setaria italica
  Peptide Sequence Number=SeqID_69775
ctatccgtggctcatccttatccagttatcctcactcacgtgagaatctgacaggttcggatcatcggccggacactgacagactctcctagaaataggagaaaaggcgaaggcgtctactagaaatagatcgacagcgcgagccgatccagatccgcgagtcaccggcaacgtgtcgacgtcgtcgtgttcttgggggagaaataagagaggacgcggtggtgccgtgtgtgttcttgcggggcaagaagaggaaagaccgtgggcggggggtgatggctacaagaagggccgtgggcgttgggagagctcttgttcctcagcctgcgtgggcggcggttgcggaggccgtggcgaggaggatggagggcgtcggcggcggcggccgcgtgccgcgctacttcagcgacaaggcctccggcaggttgctcagcgaggaggagcgcgccgccgagaacgtctacatacagaagatggagcgggagaaactggagaagctgaggaggaaggcggacaaggacaaggccgaggccgccaagagggccgccgccgccaaaggggagaagaaggtgggtgaggaggaccatccaagctaatcaccaccagcttgattacttgtgatttttcccccaaatttgccttgggttctagg

SEQ ID NO: 3802 - DNA, 404 bp, Setaria italica
  Peptide Sequence Number=SeqID_69776
ggcggcttccgcttcaccggcagccgcgtcgccggcggcttacgcggggccggcgggcacaccgcgggcggccgcagcctgctctcctccgacgtcggtgtcgacggctcatgatcctcctcctcagccgccgcctccgcgccgtccttcgccggcgccggggccgggaccgacggagatgccgaggccgaggccgagcccgaggctgaggcacacggcggtggcggcaaaggcgccgtcttgatgggcggcagcgccgggagagcctcgtcggcgggagacgccattgctgccccctcccctctctctccaattaccgacgacctttcgcggtaaattgggatcgaattctcctcgtccctggaggacgggccgggggtgcaattgcaagaacaagaagtggg

SEQ ID NO: 3803 - DNA, 1221 bp, Setaria italica
  Peptide Sequence Number=SeqID_69777
ctgttgcgtccgtcgtctcccactccgtcgtcaccagcgcgcgccctcctcgcgctcgccgccgggatccgacccctcccgcgcccacctcggcgactccgcccgctttctagatttctgagaaaatggcaagaagtgcgagagcaaggaggcatgtagctcgtcagctcaggcccaccccgtatcccattccttcaaaccgatggaagccaatgaaagaatccaaccaaaagaaagcattgccgacctcgcagaagatggactgggaagatgccaattgctctgtgtgcatggaatacccccacaatgctgtgctcatactctgttcatctcatgataagggctgccgcccttacatgtgtggaactagctaccgccactcgaattgcctggatcagttcaaaaaagcctacaccaagggggcattgcttcaggaagttcatgcgaatggtgctggcactaacctggattcagccccattgactgcaggtgaaaaaactgagtccattgaccttgcgtgcccactgtgccgtggcaaggtgaaaggttggacagtggtggaaccagctcgaagttatctcaatggaaaaaggagaacatgcatgcaagatggttgctcatttgtagggacctacaaagagctccgcaagcatgtcaagtcagaacatcctcttgcaaagccaagggaagtggaccccgtccttgagcagaagtggagattgctcgagattgaaagagagcggcaggatgcacttagtacgatcactgcaacaatggggagggctgttgttcttggtgattatgtgctagacttggaggatggagtggacctggaggatgtagaaagtgatgctgatgttgacgatggccgtgggacagaaaacactcgaagaatgttactatttattatgcgccaagttgctcaacatcatcaaaaccaaaggcttcagaatgcaaccggtgcatctgaaaatgctgaggacgagtatgtggtgagcaatggtgccaatggaaccacgccatactcttaccccttggaaggggaggatgaggatgatatggtcgtggccggaggtagaagcactgatgtgctccgaccagagaggaggaggcggcggcgccgccggaaccgtggaagattgttcttaggtgctaattgagtacaggtggggttaaccgccagaggaatacacatgcacaaatgcttccctggtgcctggc

SEQ ID NO: 3804 - DNA, 400 bp, Setaria italica
  Peptide Sequence Number=SeqID_69778
gaccttcgcggatggcaacgcgaccatccaaagcctcggattcttgtactacgcgcaggtggcgctgggcactccgatcgcgacgttcctggtggcgctggacaccggcagcgacctcttctgggtgccctgcgactgcaagcagtgcgcgccgctctccggcggcggcaacgccacggcggagctccgcccctacagcccgcggctgtcgtcgacgagcaagcaggtgacctgcgacagcgcgttctgcgaccggcccaacgcctgcagcgccgccaccaacggcagctgcccgtacggcgtccgctacgtgtccgccaacacctcctcctccggcgtgctcgtccaggatgtcctccacctcaccagggagggccccccggcccccggcgcccggccc

SEQ ID NO: 3805 - DNA, 249 bp, Setaria italica
  Peptide Sequence Number=SeqID_69779
cccatattacaacataagcatcactggtgctatggtgggaagtaaatcaattaactccaagtttagtgctattgtcgactctggcacctctttcacagctctgtctgatcctatgtacactgaaatcactagcagtgtaagtattaagtttaattaggagtggttttcagcactccatctttcacaatggttctgttcttacttcttacttatgttcattcttatcagttcgattcacaagtcgaagga

SEQ ID NO: 3806 - DNA, 1765 bp, Setaria italica
  misc_feature (1742)..(1765): n is a, c, g, or t
  Peptide Sequence Number=SeqID_69780
gccgccggtcgctcgcctccgcgggacccggcgccggaggggaggtggccttcgccgacggcaacgacacctaccggctcaacgatttcggattcttgcattacgcggtggtggcgctggggacgccgaacgtgacgttcctggtggcgctcgacaccggcagcgacctcttctgggtgccctgcgactgcatcaagtgcgccccgctcgtctcccccaactacgggaatttgaagttcgatgtgtatagccctcagaagtcgagtactagccggaaggtcccttgcagtagcaatttgtgtgatcagcagagcgcgtgcctatcgacaagcagcagctgcccatacagtatcgaatacttgtctgataacacgtcgtcctcaggtgtgctagttgaggatcttttgtacctgataactgagtatggccaaccgaaaattgttacagcccccataacattcggttgtggacaggttcagacaggttcatttctgggcaacgctgcgcccaatggtctgcttgggcttggtatggacagtaaatcagttccaagtctgcttgcaagtggaggagttgcagccaattccttctcaatgtgctttggagaagatggccatggtagaatcaattttggggacaccggaagctcggaccagcaagaaaccccattaaatatttataaacaaaacccatattacaacataagcatcactggtgctatggtgggaagtaaatcaattaactccaagtttagtgctattgtcgactctggcacctctttcacagctctgtctgatcctatgtacactgaaatcactagcagtttcgattcacaagtcgaagataagccaagccaacttgactcttctctgccctttgaattttgctactctgtaagttcaaagggatctatcaatcctccaaacataagtctgacggcaataggtgggagtgtatttcctgtcaatgatccaataattactataacggacactgcatctaatccacttggctattgcttggctatgatgaagagtgaaggtgttaacttgataggggagaattttatgtctgggctgaagattgtgtttgatcgagagaggaaggtcttgggttggaaatttttgattgttacagcgtggacaactcaagtagacttccagcgaacccaaatccttctgctgttcctccgaagcctccaatggggccgaacagttacactcctgaagctgccaagggtgcttcaccgaatggcacccaagtcaacgtgttgcagccttcagcaggtttttcgctgaagctgcatttcaacacaaacgtcttcatcgcagctgctctcctgttcgtcgcgattctttgatcagctcaaattccacatgacagccttctgaaacagaatacacagatacgatagatttagctaaagcttcattacctcgtattgatttatgtgtagcggaataggaccacattcttttggcttgggtccagtaggaattacagggtgttagaacacgggatgactcatagcctcataggccatttttgttctacttttacacgttcatattgtacttttgtgatgtttttctccacccagtgtttatgtcgtggtggctgtacatatataggtaacttgaggatgtattgacacttctatagaataatagaataagtgaataatgatgctggaacaaaaaaaaaaaaaaaaaaaacaaaaaaaaactaaagagaacgtacgnnnnnnnnnnnnnnnnnnnnnnnn

SEQ ID NO: 3807 - DNA, 788 bp, Setaria italica
  Peptide Sequence Number=SeqID_69781
ggccagcaccaaattatgatagtttggtgaaaatacgggggtcgttgagtttgtcctttgggccaatgagtacattcctacctacaaactgcaaataaatgccaaagcatttgagaatactaatcttgaaggccgtcatgagttgcaaagtaataggtgggaagttctcttaacccactcgcaactggcggaactagggaacattatagacatgtactttgaagaccaattcacattaccaggcaaaaactttccatcctcactggaattcagatccatcaaagattaaaagaacaatggctatttgaacaacctttttactttcttggctggtagctgtattattctagtactcactgtctttgctcaattatgctggcctcgatctcttagggacaaaagactattcaacggaagttcaaatgtctcatcatctcagagctactgttctgatatcaactctctcgatagcagtgagatacaagcttattgcacatctcttattaagaaaatgaaagactcgtatggctgccctggtgatgtattcattgatgcacgtattggagcatgggttggagaactacctgactgcttcaagggaatcaatagccaggatgacactgcttctggcaatgttcagcatcctgacacttttagccaagaaaatcaatcccagttggtgccaactaatattaagatgtccgatttggaacaaaatgatagaactcaggaaactctgcagaatattgctagttttcaggtggtcatgtcagaagaagtaaagtagt

SEQ ID NO: 3808 - DNA, 784 bp, Setaria italica
  Peptide Sequence Number=SeqID_69782
ctcgtctccgctccccgaaagcccccgaatcgaatccggcggagttcgatttggggatttcggcgcctcgcccccggaaatttcttggatctgaggccggccgtcgtcttcgatctgcggctggagtgagtctgcaagttttccggctcgattttggtcggagggtcggggggcttcgattgcggggatggagtcgtccccggtgtcgtactggtgctaccgctgcagccgcttcgtgagggtgtctccggccaccgtcgtctgcccggagtgcgacggcggcttcctggagcagttcccgcagccgccgccgcggggcggcggcgggagcggccggcgcgggacgatgaacccggtcatcgtgctccggggcggatcgctgtccgggttcgagctctactatgacgacggcgcgggcgacgggctgcggccgctgcccggcgacgtccagcacctcctcatggggtccggcttccaccgcctgctggaccagttctcgcgggaggcggcggcgccgcggcccccggcgtcgaaggctgcggtggagtccatgccatctgtgacgatcgccggaggcggggcccactgcgcggtctgccaggaggcctttgagcccggcgccgccgggcgggagatgccgtgcaagcatgtctaccaccaagactgcatcttgccctggctctccctccgcaactcgtgccccgtttgccgccaagagcttccggccgcggccaccccagatgcggaggcggatgcggggctcactatctggcgacttccacgg

SEQ ID NO: 3809 - DNA, 1088 bp, Setaria italica
  Peptide Sequence Number=SeqID_69783
tgagaatgatgtcagtgacgaggagattgatgctgaggagctggcccgtcgaatgtggaaagacaagatcaagctcaagaggatcaaggagaggcagcagaagcttgctctgcagcggttggaactggagaagtccaagacgaagaagatatccgatcaggcccttcgaaagaagatggcaagggcccaggatgggattttgaagtacatgatcaagctgatggaggtgtgcaatgcgcgagggtttgtgtatgggatcattcctgataaagggaagcctgtcagtggtgcatcagataacattagagcctggtggaaggagaaggtgaagtttgataagaatggaccagcggcgatcacaaaatacgaggtcgagaactcgattctgagtaatgccaagagcaatggagccaaggatcagcatagtttgatggatctccaagatggcactctgggttcattgctttcagcactgatgctacactgcagcccacagcaacgaaggtatccgctggataagggtgtgccgcccccatggtggccatcagggaatgaggcatggtggtcttcactgggccttccaaagggagaagcgcctccatacaaaaaaccacatgatctaaagaaggtttggaaagttggagttctgacaggtgtaatcaagcacatggccccaaactttgataagatcagaaatcatgtaaggaagtcaaagtgtttgcaggacaaaatgactgcaaaagagaatctgatttggcttggtgttttacaacgtgaggagaagtctgttaacagttttggcaatgctttgtcagagataacgagaaatgaggacatatatagcagcagtgatgagtatgacgttgaccgcttggagcagcctcctcattctacatcatccaaagaggatgaggacactcagcctgttttgcagataagagggaagaaaacctcaactagggagaataagagaaggcgtcgtgataaatcctccaaccaagtagttagtaaggaagacatgactaaatctcggcagcagcaaagccctcaggccaccctccagttgctgaggatgaggttgaagtgac

SEQ ID NO: 3810 - DNA, 3829 bp, Setaria italica
  Peptide Sequence Number=SeqID_69784
tcttattggtgatggcggtgagacccttcaggttgctgcatttcgagccatggttaacattttaacccgggtacagcaggagtcatcagatggggctgagagaaatagatttcttattaactatgttgattatgctttcgatgactttggtgatcggcaagcacctgtgtatcctggtctgtctactgtgtggggaagtcttgctcggagtaaggctaaaggttatagagttggtcctgtatatgatgatgtattggcaatggcttggttttttctggagcttattgtaaaatcaatgggattggaacaaagtcgtctcttctaccacaaccttccactaggtgaagatgtcccaccactacaattgaaagaaggtgtcttcaggtgcatcatgcaactctttgattgccttctaactgaggttcatgagcgctgtaaaaagggtttaagcttggcaaagcgcttgaacagcacgcttgctttcttttgctatgatcttttatcaattattgaacctcgccaagttttttgagctggtttcattgtatatggacaagtttgccggagtttgtcaatcagtcctccatgactgcaaattgacattcctgcagataatatgcgaccatgatctatttgttgagatgcctgggcgggatccctccgatagaaactatctctcgtcagttcttattcaagagatatttctcaccttggaccatgatgatttgtctcaacgagcgaaggctgctcgaattttagttgtccttatatgcaagcatgaatttgatgcacgttatcaaaaaagcgaagacaagctgtatattgctcagttgtattttcctcttatagggcagatccttgatgagatgcctgttttctataatctgaatgctgttgaaaagcgtgaggtgctagttgtcattttgcaaatcgtgaggaacttggatgatgcaactcttatcaaagcatggcaacaaagcattgctagaaccagattgttcttcaaacttcttgaagaatgtataacccattttgagcacaacaaaactggagacagcatgctacttggtgctagttctcggagccctgatgttgaacgtccagcatccccaaagtactcagaacgattatccccatcagttaatgcatatttgtcagaggcttcaaggcatgaaataaggcctcaaggaacaccagaaaacggatacatgtggaacagggttagccctcagctaagttcccctaatcaaccctattcattgagggaagcactcgctcaagcgcaatcttcaagaattgggtcaaccgccagggcattgagagagtctctacatccagtactaagacaaaaattggaactttgggaagaaaatctcagtactgctgtgagcctggaagtgttaggaataaccgagaagttttcagtcgctgcaggcactcgaagcattactactgattatgctaagttagattgtgtaacatcaatcttgatgggtcttttgtctaggagccagcccttggccttttggaaagctttccttcccgtggtttataatatatttaatctccatggcgcaacacttatggcaagggagaatgatcgcttcttgaagcaaattgcttttcatcttttgcggcttgctgttttccgaaatgattcgattagaaaaagggctgttgttgggttgcagattcttgttaggaactcgttcaactatttcaagaacactacgaggctgagggtcatgttgacgattactttgtcagaattgatgtccgatgtgcaagtgactcagatgaaatctgatggttctcttgaagaaagtggcgaagcacgtcgccttaggaaatctctggaggaaatggctgatgttagaagcaaggatctgttaaaagattgcggcctccctgttactgcattggaggctgctcctgaaggttccaatgataataggtggtcttgggtagaggtgaagcatctgtctaaatgtcttgtccaggcccttgatgctggtctggaacacgccctcttgggttctgtagtgaatgtggacaggtatgcggctgccgagggtttctataagctagctatggcttatgcgcctgttccagatcttcacattatgtggttgctacacctgtgtgatgcacaccaggagatgcagtcatgggctgaagcagcacaatgtgcagttgctgtagctggtgtgatcatgcaggcacttgttggaaggaatgatgctgtgtggagcaaggagcatgttgcttcactgcgtaagatttgccctatcgtgagcactgatgtgagcgcagaagtgtctgcagctgaagttgagggatatggtgcatccaaactaactgtggattcagctgtcaagtatcttcaacttgccaacaaactcttcgcacaagctgagctctaccatttttgtgcaagcatccaggaactcatcattcctgtgtataagagtagaaggtcttacggacagctagccaaatgccatacatcactcacaaacatctatgagtcaattcttgagcaggaggccagtcctataccatttattgatgccacgtactaccgagttggtttttacggtgagcgttttggtaagctcaataaaaaggagtatgtgtttagggagccacgggatgtacgtcttggtgacattatggagaaacttagtcatacatatgaggctaaaatggacggcaatcacaccttacacatcattccagactcaagacaagtcaatgctgatgagttgcaacctggtgtctgctatttacagatcactgctgttgatcctgtgatggaggatgaggacttgggtagcaggagggaaaggattttttctttatctactggtactgtacgtgcacgtgtgtttgaccgttttctttttgacacaccattcacaaagaatggaaaaacacaaggtggcttagaagaccagtggaagagacgcacagtgcttcagacagagggttcatttcctgctttggtgaaccgcctgctagttaccaaatctgaatctctggagttctcgccagttgagaatgcgattggaatgattgaaacaaggacagccgcattgagaaatgaactagaagaaccacggagctctgaaggtgatcaactaccaaggcttcaaagcttgcaaaggatactccaaggaagtgtggctgttcaggtcaacagtggagtattaagtgtgtgcacagcattcttatctggtgagcctgcgactaggctccgatcacaagaactgcagcagctcatcgctgcattgcttgaattcatggctgtctgcaagcgcgcaatccgtgtgcatttcagattgataggcgaagaagaccaggaattccacacccaactcgtcaatgggttccagtcactcaccgctgagctgtctcactatatccctgctatactctcggagctatgatagtactgtagcaagctggaagttaggtagcacgtgaatggttgttcattctttcagtcgtcggtccccaccaaatgtccatatttccgttagctttggttgtatagttaactagccttttgctctgcaccgttttgacgtacggagtcccgattttggagtgtaaagtatgtgtaatccttagtgttacgtgtatgtcaccgtggtgtttgttgcagtttgctcactgtactagcaacgaggacaattacgctagtcttctggagtgaaatatggtgcctggtggtttttttttatcttttgttttcttgttggtaaattagcgtgcttcccaaccctttatctgtgcgcaatgtgttatttgagttgcctgtttgtat

SEQ ID NO: 3811 - DNA, 158 bp, Setaria italica
  Peptide Sequence Number=SeqID_69785
gactcagtgtgagtagtaatattgcacatttctcatttgaaggccagggatgagaaatgtacaatattgcacatttctcatttgaaggccagggatgagggttcctctgtggtctccgtgtttgtaaaggaaatgtgtatttccaggattacacaacc

SEQ ID NO: 3812 - DNA, 999 bp, Setaria italica
  Peptide Sequence Number=SeqID_69786
gctaagccaagccagcgagcagcagcgtctgcagggaaggggaaggaggcggcagcacgcaactccgagccaaatccattgcgcttccgtgctcatggcccctcgctgagcgaagaggcggcgggattttgggggcgcgagggagtccgagagaggcgaggaggccccttgaccgcgagagctccctccatggcgaccggcaacctggcgagcgtggtggtggcggtggacggcagcgaggagagcatgaacgcgctgcggtgggcgctcgacaacctccgcctccgccccgacggtgagctcgtcgtgctccatgtccagccgccgcccaacatcgccgcggggctcaacccggcgcccatccccttcggcgggcccagcgggctggaggtgccggcgttcacgcaggccatcgaggcgcaccagcggcgtatcacgcaggcgatcctggagcacgccctcaagatttgctccgccaaaaatgtcgaggtcaagacggaggtgatcgtgggtgatcccaaggagaagatctgcgaggcgacggccaaccgcaatgccgatctgctagtcatggggtgccgtgccattgggccgcttcagaggatgttcttgggcagtgttagcaactactgcatcaatcatgtgggttgccctgttgttgtgatcaaggggacctaagctacccttgattaaaattctttggcgcacttcaattcaagtgtttcgaggctgctattgtgccatttgtaatcctgtacaatattgcacatttctcatttgaaggccagggatgagggttcctctgtggtctccgtgtttgtaaaggaaaatgtgtatttggttgtgtaatcctggaaataagcctgccatgtggcacatcacattgttctgtacattcttgtatgttggagacatacatggtgctgcctgaactttgaaaacaaaattgccagaatccctagttcttgtctgttgtcttgccacagttagaaaaaaaaa

SEQ ID NO: 3813 - DNA, 755 bp, Setaria italica
  Peptide Sequence Number=SeqID_69787
tttttttttttcggaaccaccaatccaccatagccttctacaccaaaatgctgttaatcgtatttatatagatacaatccacacaaaagatctgttgtgaggttccagttttttcagaagtaaccttgctgtatccagctcagctcgtggcgcttgacaagtggaagagatacaggcccgaggcaaaacacagtcaagactcaagatggaaactacaatgtgacggggtatcgcccaacccaagctcattcagcagaaccgtggctcacagggacatcacactcgtcaagcagcgctctgatgttgttctcaggggcacttactgagggaagtatgtggcgccttggaactgcggatctcgaccttgtgctgctgctgtcagcctcgagctgcgacccttcctgcacgatcggcaagtcagtcctcaccctcacgctaactgaagacatcttttccttccatatcctcccatcctagcatccataagatcatcatcaataaaaccaattattaagggaacaataactttggatgatctgatgttttgctacagaggaaatgttgaacttcaagtatacaagagggcagattgtaaatgagaaaggtaagataagatcaggcatgtttgttgttgttgtaacactaaattctgcaacagaaggaatttcgctaatatgattcaacactgaagtctgcaacacaagaaagtttgccgatatggtctcattcaacactgaatggatcttcacctttca

SEQ ID NO: 3814 - DNA, 274 bp, Setaria italica
  Peptide Sequence Number=SeqID_69788
agctcgcctcgcttgcttactacctcgccaaaggcgccgcgcgctgtccctgctcgcttgccttgtcgccggccggccggccagccagccatgggcaactgcctcaacgcggcgtccaagcagaggcgcggcggcctgctgccggaggaggaggagagcctttccgagatgcggaggatcagccagctgctggcgggacgaggaggaggaggacgacgctgaggcggagtacccggaggagactgacgagtctccgccgccagcggcggcggcg

SEQ ID NO: 3815 - DNA, 362 bp, Setaria italica
  Peptide Sequence Number=SeqID_69789
ggcctcattgcatatgacagcctagaggtagacagatctgcaggaccacctattgccttctgatgcaactcgaatgattcccagtggtgacaggtctgccctcctgccaagcatgatacctgccaccgtgagtagtgtattttatctgttgcctcaggttggttacagatcatgatttatcatgttgcttttaatagcagtgtgaagtacatagatattagtatttccctggtgttttaggtacttcatcagatagatgttgtcctttgttttgtctgtttgtttcgaattcaggaaaaacatcatggagatgctgttgtagttttctggacatcttgtcattcttgttagctggagcgtct

SEQ ID NO: 3816 - DNA, 742 bp, Setaria italica
  misc_feature (683)..(742): n is a, c, g, or t
  Peptide Sequence Number=SeqID_69790
agtctagtagtccagcagaggtcgcactcggaagcagctggattggattaattggggtcggtgcggctcgggaggaagctttccggcgagatggcggaggagaagagcgcattgcagtcggccagggagtgggtcgtcgaccacaagctccgggccgtcgggacgctgtggctgagcgggatcgttggctccatcgcctacaactggtccaggcccggtatgaagaccagcgtcaagatcatccatgccaggctacatgctcaggctctgacactggctgccttggctgggtccgcactggtggagtactatgatcatcagcaaggatcaggatcaaaggttcaccaatatgcgaagcagttcatatcatctgacggcagctcacaaaacaagtaggcagcaaggttgggttaggcatgggtgacgaattagcagcagtgagacatggaacgggtcggatgctatttgttatactccgatcaaataatttgcctgtgacattctgtgggaacttctgaaaactttgcctgctgatgggctgccactttttctatgtaagctactgaatcagcatttcagatgatgtgatatgctgaattgctgatagcagatgttccctgaatgtcttgaatggaatggctttcatctgctagtgtcgacttgacggaaaacggtctaaaaannnnnnnnnnnnnnnnnnnnnnnnnnnnnnnnnnnnnnnnnnnnnnnnnnnnnnnnnnnn

SEQ ID NO: 3817 - DNA, 185 bp, Setaria italica
  Peptide Sequence Number=SeqID_69791
gcggacgccacggcggctgccagcccccagttcatctcccctcctgctgctgctgcggcggcggcggactgcgggggaagctaaccgcgcgtcggattcgccggccggtcggctggcgagtcgggcccgaccgtcgcagcgaagggagtcggttcggtcaggtgtgaacgcgcggggccagcaag

SEQ ID NO: 3818 - DNA, 258 bp, Setaria italica
  Peptide Sequence Number=SeqID_69792
aactctgaaagcaacgcgcgcgcccccggagagcaccgattcggctgcggcgagctcggcagcgggcatccttcccttcccccctccccctccagtctcctccgtcgcgagcagccgagcagagaccagagcatctccttctcttccttgctcgcggcagatcccgaggcggctcgcatttcctgcccgctgcgcccgtcccgacgacacgcgatcccaaggccgaggtcaactcaaatccaccacccccagcccgta

SEQ ID NO: 3819 - DNA, 240 bp, Setaria italica
  Peptide Sequence Number=SeqID_69793
ttttgtcgagctgaagcttcagctagaacatggcatcatcacatgctgctgccgctccattcttgctcgtgctgctactccaactatgctcctcgggtttagcattgcccagtaagttcattgaccagacctgtcctccggagcggctgccggcggtggctctgctctccaatggcggacccttcttgtgcaatccgccggcgccgcgcgttccggtggccgtgttccccacgacgttcg

SEQ ID NO: 3820 - DNA, 648 bp, Setaria italica
  Peptide Sequence Number=SeqID_69794
caccaaccatctgactgaaaacataacatctgaaaaccctacatccaatggcagaaacaatatagtacacccacatgtttgctagaagaaatcaaactccaagtagccgtcagaacctttctgtggtgcaccactggaaccatcagcagctcccgagggtgatggaggcagcttcgatggcctctcgatctcgacgggctttggtacctccggtgggcttgcacaccggatcagtgcccaattcacgccctcgaagaaaggatgctgcttgatctccgtggcaccacgcttgtaagctaaccgttgctggggctcctttacaagtagacccctgatcagatctcttgccgagaagctcacaactgggtattcgggaaagcgcaatggctggccgatgacattgaacagtgtagccctgttaccagatcccttgaaaggtgtcttcccaaacagcaactcgtacaagaatatcccaaaggtccaccagtcaacagcgctgccatggccctcacctttgataatctcaggggctaggtactcatgtgttccgacaaatgacattgatcgcgcatcgctgggctctgctatgagctcaggccaagggttgatctgagtggcaacttcaggttttcggttaacgatcccttt

SEQ ID NO: 3821 - DNA, 392 bp, Setaria italica
  Peptide Sequence Number=SeqID_69795
attgttggctatcttgagtgatgaagtagatgacagtaagtgggcaataacagctgctggaggtatcccccctcttgtccagcttctggaaacaggatctcaaaaagcaaaggaggatgcagcttacatcatgtggaacatgtgctctgacagtgatgatatcagggcatgtattgagagtgctggagctgttctggcactgatttggcttctaaagagtggcagccccgtggacaggaggcatcagtcaaagcactcaagaagcttatacgatcagctgattctgctacaatcaatcagctgttagcattactgctcagtgactcgttgagctcaaaggctcacgtcattacagttcttggacatgtccttgtgctggcacctcagagagc

SEQ ID NO: 3822 - DNA, 493 bp, Setaria italica
  Peptide Sequence Number=SeqID_69796
ttagagcagtggacttgtcctgtcacgcatgtggtggtttcaggtactaaggggggggggtggggggggggggggggtaggtcctgcaaatttgtgtgtaagggtggggggctagatgattctaatgttaagagctagatctattgatctgaatgcaaaagaagatgatttctagcaagacgagttggacataatactgtgtcgctagagaatgaagacacaatattgctcatttctcttgatggtttggggctttaatcaagatggcaacaaaccctcctcatctccagactcgcaagttaacttatcatttgttgcagaagagacctggtaaaaccttgtatgtggttatacagaagatagaaaatcaaacctttttctgaatgaaatgatattcagccctcctgcatgtttgaggtagttaagttttttttttttggttttattggtgggttggatcagataaataatgaacgcggactctgattacttg

SEQ ID NO: 3823 - DNA, 379 bp, Setaria italica
  Peptide Sequence Number=SeqID_69797
gctccgatgtaattgatttttcataagggtagtgaatcgttacaggtaaacgatttgtgtgggataaggtaattatgaaaccttgaccaatgtatcttgcggcgcgtattgtttgttgaccataactaatgaacccagttagcatagggaacatattctaaatatgtatgaaaaaggtatgtttctttctcttgtttgagagaacttttgtgttgaaaatattcttactgttattgtattatcttatttatagtgaaactagttggaaagaagttgttaataagagattgcccagagaaataggtaaaagaaatttccatccaagatttaataactgatccattctcatcctgggtaaagtccatcttattgtgataag

SEQ ID NO: 3824 - DNA, 356 bp, Setaria italica
  Peptide Sequence Number=SeqID_69798
ttgaagggaattcttcatgcaagctaaggataaggacatcattgctcattttcaaagcattgcagaatggaaagttatcctatagcttacacgtaaacttggtgaaaaggctttcgtagagacatgattctcatgactggtgacaattatacctatcttggtattgtgaaggcagtcaaggattctctggttttggcttgatcacatactgatgaaaacaagactaaattcatgacaactgtccgtgctttaagaagatggttggataccccttaatagtttacaaaataagttttaaaaggggtaaactaaaaagtttaaaagtaaaaacccttaaaaagtaaaaacgttaaaaa

SEQ ID NO: 3825 - DNA, 576 bp, Setaria italica
  Peptide Sequence Number=SeqID_69799
gggtcgcgcagttagccccgggctgccactgcattacggcggcagcatccagcaggtcgggctgctgtggatgggcggcagggtggtcgcctcccgtgatgtccgtctcgggggtcaggtttgtggtggtggtggtggcggccccgcctccgcagaagacctccttgaagacgtgaagctccatgagcgatctgtcgaaggcggcggggtcgtcgactcccatgatgtcctcgccgaagatgaagcgcatggcgtcgtcctccttgaagccgagcatgtcgtgggccatatatatgctgctaatcaatctggtatgctgagaagatgagatgcgcgggataatcggggtgaaatccgggtggattcggagcgggatcgagaggaaatgggggcggagcggagcgaatcgagatccgacggcggagtgcgaggtctctagcagtgtatgtagctagggttgggtggccgcccggcgaagagatgggatggggatgcgctgggtggcgaggtctctactactactaggcagcagcagctgagggcgaggagcgggcggcggaggtggagcaacggcgg

SEQ ID NO: 3826 - DNA, 245 bp, Setaria italica
  Peptide Sequence Number=SeqID_69800
caattgccgagctcatctggcagtgacccagataagttgtttccagaaatgtacaagaatacaagctttgtgaggcctccaacttcagatggtagagaaccaacaaagttattgctggataagactagagcatatgacaaagaggatagattaaagatctctttgggcaatgggccacttaactcattgttcgaaaatgttgcttcagttaactgctgcaggttcccgaggcttgatggaagagg

SEQ ID NO: 3827 - DNA, 572 bp, Setaria italica
  Peptide Sequence Number=SeqID_69801
cctcgcgaacgcgttcaccagcgcagtgtaggtgcagatgttgggcttgcacccgatcgccttcatctcgttgaagactttcaacgatgacatcggttgctttgcctttccatacacgttgatcatcagggtgtacgtctcagtgttagttctgcagcgttctttcttcatcctttggtacacctcgaccgccttttcggtacacctcgctttcagtaggccgtcgaggtacgcattatatacagttgcacttggaggaatcccattctcctgcatctctgaaatcacgccctcggctcggtgcagttgtccagcattgcagtaagcgcgcaagagaagagcataggtgtcctctgtaggcacacagtgagtctccagaagagccatgtaaatcgactccgccttgctcagctcacgctttcggccatatgcatctatcagcaggttgtagcagatgatgtccggccggaatgaactccggtaaaggatccattcacagactgtgatgatgggctcccattgtcggttgaggcggagctggacggcgacattgacaatgtcatcccaaagat

SEQ ID NO: 3828 - DNA, 348 bp, Setaria italica
  Peptide Sequence Number=SeqID_69802
gaaccagaggcgtcctcctcctccggcgctggacgacgccacgtcgagcgcccaaccccacctccttgcttacctccgcgaccgcaccaatggcgtcgccgacggcttctccccacttgcccctcgcctcggcctccgcccgctcctcctccttccccaagcgctccctccgctcctcgtgcttgcccccgcgccgcgggcccagcctccgggcgggctccgtcaaggagtggcgcgagttcgaggacgaggcgggcgccgtgaaggagtggcgggagttcgaggacgccgtcaggaggaaggacctctcccgcgcgctccgcttcctgcagtccgtggagcccgcga

SEQ ID NO: 3829 - DNA, 314 bp, Setaria italica
  Peptide Sequence Number=SeqID_69803
agtaggaattagagatgcagaagagcatattataagctggacgcacaaattgtaggtcgttttgacttttctaatacactatatctagatgcataataatatctatgaccttaaaaagctaaaacgacttacaatttggaacggagggagtaactagcaaagatgcagcatgagctctatgcatagtactgatcaatttgacttatctcgtgcctcactgcctcattactcaaccagtcaactgttatatggtaaaagttatgtatagtgcacaaagttcccatttttaacaaggtcaagtaagctaacccaat

SEQ ID NO: 3830 - DNA, 449 bp, Setaria italica
  Peptide Sequence Number=SeqID_69804
ggatcgcagcggccagcccttcctccagtcccctccgcctgccgtcgccggcgcgccgcaggccgggttcatgcacctcttggcgaccactgcggcgccggcagccgccatagccatggccggccggcgagcgctgccctgccccagtcagtcctccgatcagacctcaccacctgagcgcatcatcaccccctttgagagagaagggggagggagggaggcgcgccgggagacagagacagagagccgagaggagaggcggttggggatgcgtagctttccgatggatgtggagggggcaacgaacgcacgaacaccggcaggcgagtgctggcgattggtgcatgcgggtgcggggaagacaaggaatggaattcgaggaggggggatggggggacgaagccaagccccgtggtgccgtggtgttactaacagtaacagcaacccat

SEQ ID NO: 3831 - DNA, 3293 bp, Setaria italica
  misc_feature (1)..(58): n is a, c, g, or t
  Peptide Sequence Number=SeqID_69805
nnnnnnnnnnnnnnnnnnnnnnnnnnnnnnnnnnnnnnnnnnnnnnnnnnnnnnnnnnacttagtacgaatcaggtatatgtgagttattgaaaccaatgtttaagcgttagatacaacaccaaccaacacagagcgcacctgcggttgaacagcctcatacgtacacgtaagttactccaggagaagcaacacggtgaaaacctatcgtaatttgatttttcacaacaaaactcaccagctgttcctgaaaaaacaccaagagtagccgataagatacgcacgtcaacacactgacaacacccatcaatcacgcacgcacgcacgctgtcaagtagcagcaggaggaggaagaggagcatcgtcggcagccttgtcctgttgattgtcgccagcctcgtcgacggccatggcgtcaggctcccgtttccgctccaccgacgcgacacggccctcgttggacgtccgctcctcgctctccaccggagccggcaggaccgtggcagtgctggagctgccgcccgcttgctccccggccaggctcgtcaggccgttctgcttcatgtagttgtccaggggccgggtcgcgacttccaggaggcccatcatgctcaccggccggggctgctgcgcaccgtgctgtccctgatgatcatcccggacagcaggatggaagttgaggtcgatgtgccccttgttcgggtcggccaccttgtcgaacatggttacatcactgctgtctcgggtggtgtccagcgtctgtggggatcttgacaggttgctcccctcgggctcgtctctgttcgcccatgtgatcttcttgctcgcctcggcctcctctcgctccgactgccgctgcttcttcctcatcatcagagtcttgaacctgcgcctgacggtcatgcagacgttgcaggtgcatgcagggttatgcttcgggcccttgccgctgggtggctggatgcacacaatgcatgtgcagccagggcgatgccgggggtgctttgtggttgtcgcaactgaagctgtaccttggttcccgacatcaccaaacaccgcagcagtggccaaggcatcaaggctggatgcatccatttcagccacattcagcttcagaccgtagctgccctttcgcctcctcatttcttcatactgctgcagaacactttgcaactcttttggggtcaattcttcaggggcagagcaggagcagcttttagggtcccatgagttgtcagtgcacgtccatttggaagcaacaataacagtaagaggcaaccggcgccattttgagcaatcgtcacactgaatccattgatcttgttcccctgttgcacggatggtgaaaattgatctctttgcgaagacagggggttcatcatactcttcaaattcatagtcctcaatcatcacaatagttggttttgcagagggagcaggacgcaaccactcctgggcctcctcccaggtaagctttagctccatggcatcttcagcatccattaagaacctcctgcttttggaaccaatattgcgacttcgtttttgtagaaactgcagagacccctcatctggcctgctgccgaatttatctgccttaagccaactaacatccccatcagctgagttcatatgatgatcatatagagagcttggatggagatctgcagccccctttattgtctgaaggaatccgggataaccacttactactcctaagttctcatttgcagtagaaaagagtgtctcactgagaagggaaccattcgcaatagctgagatctgcgagtctggcagactgacagtatttgtggccttccggaagcccataacaagtttccctccaggttctatccgactaaaggtcactgtatcaccagcttgtaattgcaaggactgtatgcatggtgtgacaccctccaagacgtacattcggctgttattatttggccaaaacctaaactgaaaatgccattcttttcctcttgcatcttgaattgtcaaggggcgaccttccggttgagaaatcggggggaaatatgcctcagcacaggcttttggaagaacaaggcgccctatgcggcctgcatcactagcgcttaggaccttctcaaacaatggaacaattgtggaattcgaatctccagatatttgttgcagctcttggtctgttattcttggccaataccgaggaagtaattgattgcggccccttccctcggcaggtggcctagcaacacgaagatgtggaaaaatatctttcgttggatcaaaaacagcaccttcaccaacccttggtggtctggtcaggaaatgccgagccctttgtgcatgctgaaagggagataatgtagtggtaatttctcttccttcagcaatggatgtcgtgggtgatagtataggtctttccactgttgaagtagcctccatcttgtttccattattagcaatacccaagctcatgctaagacatgcctctgaaattgactcacttgttgtgctatctgtagttggatccttattgtcatctcttcgagtatattgaggtgactctaatgcactctgagacctagttaagaaaggccttcccatgtccccaatactaagggttggttgttcccatttaatctgccttgaaccattctccatctctttttgcctcaagatgctactgctttggccagcctctatgcctttcaccatgaatgggtgattgctcttatttacaacagcaatttcatcatttctggaatccagcataagggagggtgattgttcaaattttcttcctaacaataactcatcgcttttaccaaagatgcgctgattattttgacatggaaaaagctttgggaccacttgaccagaagcagactgtgctgctaaatttctcatgcaaatgacacattgaactcctccactatcaagtagatcgtaagagtttttggaagcaacacatccacaatggagacgcttcccacaaaatgagcagtctctccatcctgattccttttggtgaaatatatcacaaaatacaaactgctcatatgccaacccacacttgtcgcagagcagggcgaagccgccggatcgcagcggccagcccttcctccagtcccctccgcctgccgtcgccggcgcgccgcaggccgggttcatgcacctcttggcgaccactgcggcgccggcagccgccatagccatggccggccggcgagcgctgccctggaccagtcagtactccgatcaaccgaatacaagaacgcgctattctattctacccccttttgtagt

SEQ ID NO: 3832 - DNA, 440 bp, Setaria italica
  Peptide Sequence Number=SeqID_69806
ccttttccccgtatcaagactacaactaggattagtttctcctttatagtagccaacccttatcctgaattgaaataatgaccgcatgattcatgatctaggttattaaatggatgttcaacaaaggtcaagggaagacaatgggaagctattacaccttgttgaatgctttgatcgaggatggacggattgaggaagcagaagaattatttggaatgatattctcacgatatatggagggattgcctcgtacctttttcatgagaatgatttctttgtattacagtgtgggagcatacaataagatgtttgaggtttttgctgatatggaggaactaggcgttagacctgatggttcaattgtcaggacgctaggttaagaactaatagtaagtttagtattaaaatttaaacaaaagaaaaaagttaaaaagaaaata

SEQ ID NO: 3833 - DNA, 905 bp, Setaria italica
  Peptide Sequence Number=SeqID_69807
aaaaaacatcttgggagataaatcctaagggtattgcaaacgctgcagccgtccggtcgctcccctcccgactccggcgagaagaagcgacggtggcggcagtcgatacgccactggccgcggtggaggctgcccattcctttccgccttttcgccctcgaactacggggcacagcacgcctgctcttctgctcctttactaagctcctttgtagaatgttttgcttggcgaactattggtcgcctgcatttaccttagtgcggggaggagctacagttggacatcctctaaaattcaattctgtagtggtttgcggtgccaggggtccaagaccaagatatccccgtgtgtggaaaactcgtaagaaaattgggactatttccaagtcacagaagcttgtggaatgtattaaaggtctgtctaatgtaaaggaggaagtttatggcgcacttgactcatttgttgcatgggaactggagtttcccttgatagtagtaaagaaggcactgaagacacttgaggatgaaaaggaatggaagcgtataattcaggttattaaatggatgttcaacaaaggtcaagggaagacaatgggaagctattacaccttgttgaatgctttgatcgaggatggacggattgaggaagcagaagaattatttggaatgatattctcacgatatatggagggattgcctcgtaccttttcatgagaatgatttctttgtattacagtgtgggagcatacaataagatgtttgaggtttttgctgatatggaggaactaggcgttagacctgatggttcaattgtcaggatgctaggtgatgtatttcagaagttagatatgatggacaaatatgaaaagttaaaaaagaaatacccaccaccaaatgggaataca

SEQ ID NO: 3834 - DNA, 259 bp, Setaria italica
  Peptide Sequence Number=SeqID_69808
gatggtggtgggagtgggcgtcttcggatcgatcgggagggaggagggggagaagatgggggatcagtggcgatggcgacaagcaggaggaggacgatgacaaggaggagcgagaggcgcagctcgtgtcgtcggcgaccacgacgccgcccaagaacgcgctcctcctgatgcgctgccggtcagcgccgcagaaccgcacgtcgccgctcacgtcccggttccccgcgcggcgccggcgccggtgccgtcgccctcc

SEQ ID NO: 3835 - DNA, 213 bp, Setaria italica
  Peptide Sequence Number=SeqID_69809
gcacgcgagggctgccgtgccgatgggggtgccgcagcagttgcacccgcggctgctgccggtgatgcgcccgcatcatgtggtggggcatgtgccgctgccgcgccacgcggtgccggtggcggtacccgtaccgcagcttcgcccggtgccgccgcagccagtgcagcggcccccggtcgccgttcccttgaagccagagtcaccaaaacc

SEQ ID NO: 3836 - DNA, 428 bp, Setaria italica
  Peptide Sequence Number=SeqID_69810
ggatcaagtaccatccagcatgaaatgatagagaccccaaatcaagtcaattgtgttgaacaggcacaagtccattgcctcagcaccaaatgcctcaatcaagctcaagccagtcaggccaagttgatgcagccactggaccaccacaatcaaatcatggtgcatctcgagatgggaaattcccactctgctacagtcaattgtaccctccggaggtcccgggtgaacactcgcttgatagaattggtgacgagcagccacattcaccagaggcccaatttcatgttatgcatgtgcaacaggagggtgcacagagcagccatccctgttaggatctgctgtgaaatcgtcagggaagcgtagaggacgtgggacctcgaacctacaagattaatccaacacgaaggaagttgacaggacctgtcttg

SEQ ID NO: 3837 - DNA, 1389 bp, Setaria italica
  Peptide Sequence Number=SeqID_69811
acaaaatactagcgtgcggattcccctgcagattacgataatggtatgggacaaagaaggttggtgaactatgcagatccattgtttgaaaacggaggtttgcaatcttcaaagcaattgaggatgccaccttcagagcaaatgagattgcacacttcagccagatcaccgccatcaaacattaccagcaagtttagacctccatcggactttcaagatcatcatcctgtgcatattgctgatcctcgtaataatgtattcactgatgcattgcaaaatcgatcgttggatcataacatttcaaaaaggtcgaggtcacctactttgtcctatcaggatgttgatggcgcggctcgtattgatactggtggaaatgcgagaagactggttgactatacagataccctcatcggtgatgaaaatattgaaacctcaaaaaggatgagatcgcctgcatcagagttcacacgcgcgatcaaatcaccgccatcagacatcagagacaatattaggtcatcacccaactcagcccagaatcttcatgcacatgccgatgtccagaagtctactgcatcccttcccaagttcggaaatcaaatacaatcgcgcattggtggcgcacgttcaccaccacatcagatgtctagtctttcagatgactccaacgaacctaacacatctgctgtttctccaccaaagtcttctatccgtagtgctaccagaagaatggggacctctcctttggatgccagtgatgatgatcactctaccccttcaactgaacttgagagggagcaacaagcaaaagccaagcgtctggctcgtttccatgttgaattaagcaggccagtagaaaatactaatgactttgtaaaaacactcaaaggctctgcagacaggcccaaacaagccacatcagtgggaaactttccaatgaaaaaaaatgataatactgatgaaagtacttcggctgacatggattcgccagtgttagccgcgattgttgggctttgtccagatatgtgcccagaacctgaaagggcagagcgtgagagaaagggagatctcgataggtatgaaagattggatggagatagaaacctaactactgagcttctcgctgttaaaaagtataataggactgctgagagagatgcagacttgataaggcctatgccagttctacagaagacaatggattaccttcttagtttgctggatcacacgtatgatgacagtttcttgggcttatacaacttcttgtgggacaggatgcgagcgataagaatggatcttagaatgcaacatttcttcaatcaagaggctatttctatgcttgagcaaatgataaggctccacattgttgcaatgcacgaattgtgtgaatac

SEQ ID NO: 3838 - DNA, 366 bp, Setaria italica
  Peptide Sequence Number=SeqID_69812
aatttcatgtgttcttcatgccatgcatgggaccataccaaaatgtaaaacgcaatactctacctactacttcaaaactatacaaagggtatctgaattatctcaaaatgttgaacttcaaatatgtggtctcctaatcatgtaaacagttcatgtttatttttaagcttctatttctattgtgcctcgtttgatgtagcaatgctgcttatgttcagtaaggagacactaaatggtggacttgctgtaaataggaaaagagaagagaaagggttgccactgttgaaggttgaggtcgtcgatctactttctggaggtgtggaaggggagaaactgagttcgtctgctttgaggaagcttgaggca

SEQ ID NO: 3839 - DNA, 685 bp, Setaria italica
  Peptide Sequence Number=SeqID_69813
tttagtttacttagttaaggtagtactacttaaattggttggtactttgtcttgtcccaaacgaaacagccacagagaggaaaaaataggttgccggcggcacaccagccgtcgaagcgccgccgccgccacagacttcggaggaggaggcgaccccgccgtacggctctgtggtcctcggcggcaccttcgaccgcctccacgacggccaccgctgccttctcaaggcgtcggcggatttggcgagggaacggatcgtggtgggcgtctgcacgggccctatgctcgccaagaaggagtatgccgagctgattgagcccgtggagaagcggatcaaagccgtggaggattacatcaagtctataaagccagaactgatagtacaagtggagcctattgaggatccttatggaccttccattactgatgataagttggatgctattactgtcagtaaggagacactaaatggtggacttgctgtaaatagaaaaagagaagagaaagggttgccactgttgaaggttgaggtcgtcgatctactttctggaggtgtggaaggggagaaactgagttcgtctgctttgaggaagcttgaggcagagcaagctgaacaaagcgaagcaaaaactgctatccatgaagcttcttagggaggaaaaaaaatcatgaatttgattagatg

SEQ ID NO: 3840 - DNA, 698 bp, Setaria italica
  Peptide Sequence Number=SeqID_69814
aaacaaacccggaacggaaataagtaacggtaagaacctaccggacgacgacggtaagaccggaagaaccctacgtcggcgagaaggaaggcccgacgagcgtgggcaggccgtggtccgacacccgcgcctcgtagttcttggtgagcaggacgttggaggacttgatgttgccgtgcgacgccgtgggtcccgtggagtggatgtgcgccacgccgcgcgccgccgcgagcgcgatcgccgaccgcgtctcccagtccagcggcgtccgcccggaggcccggttccaattcacggccgatgccaattactgccgggcagcgtcggcacgtacaggcacagcacgattgcttcggtctcacgcctcacgcgccatctagccggcggtccgaactttttgaatgattctttaacccgtactggtactacgcgcgaggctaataattggcgcgagaagggagggagaggaatcccgaggaagacgaactgtggaggcaactaaatgtcacatggaccaggcaaactaccctacccggcctgcaacgcgggcgccggctcacatgcgcaacttgccctcaaacttactgccaccacgaatctactgatgctacgggttcagggcagaactctgcgtatacaactaacccagtacagtctacagaagtgttcaaacgatctgccagcaggcaagccaagga

SEQ ID NO: 3841 - DNA, 1309 bp, Setaria italica
  Peptide Sequence Number=SeqID_69815
tttttttttttaagataacaagccttggcaatcccatcaaatgttgcttttcaagaatcaaagagtacagtgacatgtgctatagaatagaatcaaagcccgtgagagaaaggccaaaaaaaaaaggtgaagaagaagaagaaagaagaaaaagaagaaaaaaacatgcacaagttgctggtgaattaaaagtagcctggggggagcaatatccatgcaaagaactaagcaatttccaactttccattcactgagactgacaagtatggtcgatcaggagcagctgctacgccggttatagtgacggctcgtcgccctcgccgtcgccggcgctgtcgcccgcctgccggtcgccgaggctggagcgccggatctcgtcgatccgcgtggcgacctcggccatggtcggcctcctgtcggggtgctgcgcggagcagtcgatggcgagctgtaggagctgcaccatctcctcctcgacgttctggtacctgaggagctcctggtcgaacacctcggccgtccactcctcccgcacgacggactgcacccaccgcggcaggtcgaggccctcctcgttgacgacggcgtgcgtgggcgccttccccgtgagcagctccagcaggagcacgccgaagctgtacacgtcggccttctgggacacccggcggatgtcggtgacctccggcgcgcggtagccggagaccctcgtcggcgagaaggaaggcccgacgagcgtgggcaggccgtggtccgacacccgcgcctcgtagttcttggtgagcaggacgttggaggacttgatgttgccgtgcgacgccgtgggtcccgtggagtggatgtgcgccacgccgcgcgccgccgcgagcgcgatcgccgaccgcgtctcccagtccagcggcgtccgcccggaggcccggttcccgtgcagcagggcggagaggctgcccatggacatgtagtcgtagacgaggagcttctcgtccttgctgaagtagtaggcgcggaggggcaccaccagctcgtgctgcaccgcgccgatggccgcgatgcgctcccggaactccggctccgggaggtccacgtccttgagccgcttcaccgccacggccgacccgttctccatcaccgccttgtacgccgtcccgaacgcgcccttgcccagcacctccgccgacgcgcggagcaggtcctccaggtcgaaaggcggggccgccgccatggggccgaagaagatgagcttcttggacccggtcgacccgccgccggccttggccgccgccgcggcaccggcggcggcggcggcggctgg

SEQ ID NO: 3842 - DNA, 370 bp, Setaria italica
  Peptide Sequence Number=SeqID_69816
agccgcaggaggtggagcgcggccggcgtgaaggagaagcggacgttgaggtggtgcgcaaggacgccgcccgccgactccacggtgacgaagacccggcccgtggaggtggaagaggtcgggaacaagatgcagtggcagatgcgcctccacgcggcggcggcggaggaaaacgacaccaacctcccgctccaggccctcttcgacagctaccgccgcctacctcccgctgagattttccgtccatacctaaggatgccttccgcgggagggtggccaagctctgcgatgccggccttggatgctggcttgcacctgcatttgaggacggagccaaggtactcaagtggatcaccaggcaggggaattc

SEQ ID NO: 3843 - DNA, 275 bp, Setaria italica
  Peptide Sequence Number=SeqID_69817
caagcatcgattgaaatagtgcttatagttagtggcaattgttgctaagatgagctcaccggcggctgagggcaaggtgtctgacgctcccaagacggagtggccggagctggtgggccggaagatcaaggaggccaaggagaagatcaaggcggaccggccggacctcaaagtcgaggtggtcaccgtcggcacgagggtcacggaggagttcaacatgaagcgagttcgcctctgggttgacaccgtggcggaggtgcccaggattggctaag

SEQ ID NO: 3844 - DNA, 486 bp, Setaria italica
  Peptide Sequence Number=SeqID_69818
ttgcttgtatacatgtaaacggtgatgggcatcctgagaacatgggagcacatgagcagttcgggttctcctccccaagcatgtggttttctcatctttttcacgtagctctcgaaatcgccttctaggaacctaacattaagacaaagttaatgcgaaagcggtgtctttgtatattcgagacagaaatataatttttaacacataatcttatggatgagaatattttgaaaggtaaacttgctgcatcctgcatgagaatagtttgtatgcggaaactaataactacacaacatattacttcctattgcggaaaaattgtggagggactttaatgtatcagaataataatagtggaggaaggatgaaaccattcagtgtcttctcttctcttaacaaattcatcagccactttagctcgaagctcgtcagccagttccttctgggcgctgtcgctgggtgacagctttcctctcctcaagcagg

SEQ ID NO: 3845 - DNA, 896 bp, Setaria italica
  Peptide Sequence Number=SeqID_69819
tttttggtatcgggccatttcattaattttcttactgggtctggagtttatttatacatcaatccttgaagaaaagaaaaggccatagcacccaatcgaggctgtatttcatatgtgtgctactgtatatgtttcggcaaaacctcgtcggcgaatcttgagctgctgccacttatgcagctgtcctatagaagaagctcaggtaacgcaatctccgattatctacacacctctcagtcttgattgtgttcttacaagagatggctgaagtgcgtcataatgcccgtaaccgtcatagagaacgcggactggattgtccttgccatattcctggccatattccgctatgattctggggctatcagagctgcttgtatacatgtaaacggtgatgggcatcctgagaacatgggagcacatgagcagttcgggttctcctccccaagcatgtggttttctcatctttttcacgtagctctcgaaatcgccttctaggaaccattcagtgtcttctcttctcttaacaaattcatcagccactttagctcgaagctcgtcagccagttccttctgggcgctgtcgctgggtgacagctttcctctcctcaagcaggccccgtaagcaacggacctgaacaagcatcggccgtcccctgtgattctgatcgagcgaagcgggcggagctctcgatccgacatccgctggacggcgatggggcgatcccccgatcccctgcccggcctcctcggtcggcccggctgctccgatcccgcagctgccgggcgcggaggggaagcgggagggcggaagaagcacgcaaggagctggaaatggccagatgagatggaatggaacaaagaggggcaggggagagggaggttggaattggaattgg

SEQ ID NO: 3846 - DNA, 461 bp, Setaria italica
  Peptide Sequence Number=SeqID_69820
aggctcactctatcgaagtcttcacgctcttctgtcaggttcaacccagcaactacaacaacgatatcggctcttttagctgcttcaatggcttcgccaaataaatctgttgagttacaggaaacatccttgcatccagcagcaaaggttgtttgtgtaacataggcctgaatgcccttaaggaaggttgtagggttgcagggaacacctgattaaagtgaatccaacgttaaaaatgtattcaaagatagtaagttagcaaaatgtttaattgagccagtggtttggaacctgtatagtctccacccattgcatacacatcatttacagatggtccaatgatagcaacatgtctaacttcgcttctctttagaggcaagaaactattatagttcttcaaaaggacagcaccctgccttacagcttcagctgcaagctctctatgctctttcgtgcacaca

SEQ ID NO: 3847 - DNA, 774 bp, Setaria italica
  Peptide Sequence Number=SeqID_69821
acattattgggccctaattggttgccgctggacttatcgaatattccaagacgcagttgaacagagaatagattaaaaagggcacggttgatatcttgttcttgaatcttccccttttcaattgctgactttgtatgccgaactaggaaagaaccacagttgagatccattcctgccttaagaacaattgctactgaatcctcatctgaattagtgtatgtctggttttcatgaataattgccacagcatcacagtcagatgtaatatacccctggaagccccattcatccctggtcttctgcagaagatctttgcgagcacagattggcaccccattaacctggttatatgaacacatcaagcagctggcgcgagcctcctggatgcaggtcttgaaaggaggctggtatgtgtcctccaaatcttgtgcatttaccttggcattgaaggtgtacctggagaagccctccccatttctccatgtcatacgccgtatagtgcttgcagcatgccgagagcctaatcctgccttcgtccccgtactccccctggaaccccttgacgtactcgagggagtacgcggcggcgacggcggggtcctccccggacgtctcctggccgcgaccccaccgcgggtcgcggaagatgttgatgttgggcgcccagtaggtgagccccgcctggccggcgccgtgcatcccggagggcctccgtggcgacggccccggccacggcgcgccacagcgagcggttgaaggcggcggtggtgagga

SEQ ID NO: 3848 - DNA, 1021 bp, Setaria italica
  Peptide Sequence Number=SeqID_69822
aaagatttgagattcatcacaattttctcaggttacaggcttacagcatgcgagctgagaggacgcactcgaagtacaaagggagatatgcacacacttatgatatattggtaattatcctttcccacgatcactgacaccacctgaacgtcttaacatttacagaccaggcggagtgtaggatgacaaggaagaaaatataggacgaacagcccagagatcacaaggatctccactactaactgtcaagtatatcaaactccgaatcctcgatgacgtcccatgattccttcttcgacagtgatgcaggcggagttggctgtggaggccggtggctgtagtcagtggacgaagcaggttttcgtctgactgaatcccggcggaccgaggagctagcgtacggtaggttcctcctatcggataggagcgagtccatgtatttgtccatgacgacaacattggcactatcaacgtcactcagctcctcgctgctaaggtatcttttaccttctctgaaagattctacgtctgaaggtatttcggaccactgatccatgctttcctcagattttgactttgcgaatacccattggtcaatgcttcgctcggatcttgtcttgggcaaagcctggccatctgaggattgatagccttcttggttgcttttcacactttctatctcacagacatgaggcggagaatctgactctatctcattgacgtggcgtgcagagtttggcacgcttcggttgtcttcctccgaactatgctcatttatgtttgactcaagcagcctaaagtataccttccagaatatatcttcatccatgtaagaaggacagagcctagtcctaagagatgctaaatctggaacgagcttttcaatggattccaaatgatctctttgaatatcagagattatagaattttcgtcgagggcaagcacggggaagtcgatccacgcctcgggccgcgccgcgagggcgcgcgctgctcccacgacatcatcgggtacctgcga

SEQ ID NO: 3849 - DNA, 689 bp, Setaria italica
  Peptide Sequence Number=SeqID_69823
aacatcaatggagttactagaaacaaagaagttagagatggaggttgaaacacagttggttttaataggcaagttcaggattggagggctcaatagagcatttggtcgaagaagacaaaatagagaaagatatgcttagcaagaatggagaaatcctcgctgaggagttagctgggcttctagagttggtgaggttgaaagaagcggagatagctgaaaacatgcccggatccatgaagttcaagaaataatcagtggcgtggtctccagattccatggctctcagtctgatattgacttgaagctcaattccctgaaggaaacccaaagtaaagtggatttagagactgaagcacttgtgttgaaaaagatgaaattgataagtttatctctttaacagaacagaaagattcagagttgagagaaattattggtgcttgttcctctgaagctaaaacttgccagcaatcagttgaaataagaagaaagcttgcatcatcgattttgaagtcaagagaggatagaattgggttgctaaaaatggaggaggaaattttgcaagacattcaaatgcttaggcaaaaaaattacagatgcgagaactagtcttcaggagatatcttcaaggagaacaagcatacagcaagagattggattcatttaagcagaagttgagtttcattgacaaa

SEQ ID NO: 3850 - DNA, 1710 bp, Setaria italica
  Peptide Sequence Number=SeqID_69824
ttttttttttttaacgtctaacaccggaatagaaaactaggaatactacggcagtttggcatggcacatgtgtgctcaaataaactgtcgctgaacgaccaggttccagatcctggtgggtaccgattgatgttcaaacaaatactgccattatgaggtcgtttccttttgttttccgactctactcactacccacatgcttgaagtacacactggttacaatttttttgccaaaaagaatcaatacgtataaatctgatggaaaacttttggagattccaatgaaccgggattactgctgggcgcattgcaccctcggtccagattcctcctcgtcttcatcataggcttcctgacgcttctgctgctgcctgcgtctcatctcctcttctatgttgacatcctgcagggtggtctcctcgcactgatccagctccatgtccgacagctggctccctggctttggtggaaggatcttctcaagtgattggcactggctaggggagagcgcaccaggctcagggaactcaacgttgaattcaacaaacagacgacccttcatgaaaggacgaccatgctgaggcataccctcatcatttatggccttgtgttggccaggctttataacctccccaggattagattttatcagaagctgccggccatcaagatgagtcagaacaaactggaggccacacagagcctcagtgagggagattgtgtgctcaacaaataagtcatcatacttcctcttaaattttgggtggtctttaagttgcaacacaaaaacaatgtctcctgtcaacgtgtcaggagcttcatcagcttgaccctggaatacaatcttttggccatgctgcattcctttctccacatgaacctccaagaccttcttctcctgggataccttgcttcctttacagcctgggcatttatccttctcacttatgatctcacctgatcccttgcattcagggcaaatagtgttcatctgttggatcatgcccatgcctatctgtcttgtgattgtcctcattccagcaccacgacaaccatggcaagttcctgatgccccactcttggatcctttccccttgcacttagagcacaaaacactccgtgacaaagatagctttttggttgtcccattatacaaatcttctaaagaaaccttcatggtatgcaccacatcttcaccacgcttttgtctgcgtcctcttgagctacctcccccaaaggtgccagaacccggaaaaagttgctcaaatatgtcgaacgggctatggaaatcactgctgctgcctcctcccattccctctttaagtgcatcttctccatactggtcatagatctccctcttttccgggtcactaagtacctcataagcttgagacaattctttaaacttctcagggtcaccacccttgtcaggatggttttttatggcagctttccggtatgctttcttcaactcatcctggctagcggacttggacacaccaagaacctcgtaatacttggtgttgttgctggtcttccttggcatgcgcccaaacatggctgatatcgggtgtttgcagcaaaggaagaagccagtccaagcgcggatggatctccgccgcacgccggcccgggggagcggggcgaggacgacgacgcggggaggaggagaggcggcgctacagcggaagggcgcctggtcgcctggat

SEQ ID NO: 3851 - DNA, 628 bp, Setaria italica
  Peptide Sequence Number=SeqID_69825
gccgatgaggtcaagttaccggtcttgtttattttctctttggattgggtctgtatatgcaactaatttgggctttagggtttaacagccaaataacaaatagaccacgtttgttccctcatgctatatagcaaggcatgtaatatatatatatatttttttcatttatgctaatcgcatgaattttagatcaatatctttttcacatcggaacgaattctcccattgcaacccacgggcataattgctagtaattagaaagggacatattgactaatttaatcagaaaggaagctagctttatatctaactaaacatcctacacattctgatcatgaactgtacgagttgataactatgtttagtatcataccaagaaaggaaataaaaaggcctgtcaacaagtatatagcgactccctaccttaatagttatactgttgtgcaaggtaaactctaaccagtgactaaaatcacacaaggaacatttgccatctggatgtgatatcactgtcacattaaactattaagattgttgaaggaatttggtgaactaacacattgatcttagatgacactcagcgtttctgtatgaacaatatcatccagctaagtgagaaacatataag

SEQ ID NO: 3852 - DNA, 445 bp, Setaria italica
  Peptide Sequence Number=SeqID_69826
tccttcttttcttcctttctcctccgctgacggcaaagcaaatccggtaggaagtaggcggctatggcgacgacggccgcggcgtacggctgctcctcggcggcgtcgctgctgccctccgcggcgttcccggggagacgctcctaccgccggtcacctcctccccgcgtctccctcgccgcctcctcgaagcccaggacgacggcgcacgggttgagagtttcgtgccgtcgaaggaggctagttgtctctgcttgctcttccggcgaggccagttcggaagcgccggcgtccccgacggaagccactgttgatataaagcttccaagaagaagcttgcttgtccaatttacatgtaataaatgcggtgaaaggacccaacgcttgataaacagattagcctatgaaagaggaacagtttttcttcagtgtgcagggtgccagg

SEQ ID NO: 3853 - DNA, 580 bp, Setaria italica
  Peptide Sequence Number=SeqID_69827
tgcacatggacaagtcggccatgccgagggcgttctcgagtcaccagcggtggtacgagtccacgctctccgcggccgccccgggcgccgacatgtactacgtctacgaccacgcggcgcacgggttcgccgcgcggctccgcaccgaggagctggagtctctcaggcgctcgcgcgggttcgtgtcgtgctaccgcgacgaccccagggcggtgacccgcgacacgacgcacactcccgagttcctcggcgtcagcgcgcaggggggcctgtgggaggaggccggctacggcgacggcgtcatcgtcggcgtggtggacaccggcgtgtggcccgagagcgcgagcttccgcgatgacggactcccgccggtgccggcgcggtggaagggcgcctgcgagtccggcacggcgttcgacggctccaaggcgtgcaaccggaagctcatcggcgcacgcaagttcaacaagggcctcattgccagccagaacgtgaccatcgccgttaactccccgcgcgactccgaaggccacggcacacacacctcgtccacggccgccggctcgccggtgccggcgcg

SEQ ID NO: 3854 - DNA, 747 bp, Setaria italica
  misc_feature (714)..(747): n is a, c, g, or t
  Peptide Sequence Number=SeqID_69828
aaaggaaagaagaaacctaaaaaaagaaaatttaaataagaacaattacaagaaaagaagtagtagtaatccaatacttgaaaaggcgctacatgatatgcgtggagaaacagctgagataaaagtttcatatgaagccaaactggtggaagcccttcaaatgatagatgctgcacagaaaaagtttgatgaagcagaagagaaacttctcgctgcaaaatccttggaagcagagtccattcggactcacaatgcctcactgagaagcctgcaagacattgaagaccgtgaagatcagctaagaagagatagaacttcttttgaacttgagagtgcatcgaaggagaaagagattagcctccagaggaaattattggatgataccaaaaaattttgcatgaaaaggagcaggcattggtgaaagaacaagcacttcttaatcagagggatgacaacatccttgagaggcttggctacataacacattcagagaaaaggttggaggaggaaaagctgaatcttgaagatgaaaggaaggctctcatggaagaaaaaataagctggacctgaaaatgcaggcaattatttctagggaagaagtatgtattgtttcctttccttcttttgttagcagcagagtttggttactcaaattgtgcctattgtacagaaattcccttcattcttttattagcagcagtactttgttaactnnnnnnnnnnnnnnnnnnnnnnnnnnnnnnnnnn

SEQ ID NO: 3855 - DNA, 3673 bp, Setaria italica
  Peptide Sequence Number=SeqID_69829
ccaccgaacccgagtaaaaaccccggaacgtcgcaggcgcagccgcacgaaagggggccgaggaaaaaagcgagagagaaaaagaaaaggagggggcgagagaggacggtggagagagagacctccactcacccccgcccggaaaagcagtgagccctcgccgcgaggaacgcgtgacctcgccggggtcgcggggcaggcggcgccgacaggatctggtagggttcaggcgggcgggaccctcgccatggcgagcccgcggtcggccggcgccggcggcggcgtggcgggggacgaggcgatctggaggaagctccgcgaggccgggttcgacgaggatgccgtcaggcgccgggacaaggcggcgcttattggctacatctcgcggcttgagtccgagatttacgattatcagcacaatttggggcttattttattggagcagaaggaggtgacatctaaatatgagcaacttaaagctgcttctgaggccactgagatcatgctcaagcgtgaacgagctgcccagcagtcagctttggctgaaacaaggaaaagggaagagaacctaaaaaagaatttatgcattcagaaagagtgtgtatccaatcttgaaaaggcgctacatgatatgcgtggagaaacagctgagataaaagtttcatatgaagccaaactggtggaagcccttcaaatgatagatgctgcacagaaaaagtttgatgaagcagaagagaaacttctcgctgcaaaatccttggaagcagagtccattcggactcacaatgcctcactgagaagcctgcaagacattgaagaccgtgaagatcagctaagaagagatagaacttcttttgaacttgagagtgcatcgaaggagaaagagattagcctccagaggaaattattggatgataccaaaaaaattttgcatgaaaaggagcaggcattggtgaaagaacaagcacttcttaatcagagggatgacaacatccttgagaggcttggctacataacacattcagagaaaaggttggaggaggaaaagctgaatcttgaagatgaaaggaaggctctcatggaagaaaaaaataagctggacctgaaaatgcaggcaattatttctagggaagaagctataattaagaaggaatctgtacttgacaaacgtgaaagcgaactattggttttgcaagagacaattgctagcaaagaaagggctgaaatagaaagactgcgccaggagcaagaaattgacttggggaggaggaggaatgaattcgacaccgagatggagattaagctcacttctttcaaggaagagattgaagcgaggaaaaccttgctagatcagagggaaagtgccctcagtgagcaggaggatgcagtggcacaaagggaacaaaatatcaaccttaggcttgccgagttatcaaacaaggaagagtctttggtgaagagatcagatgagttaaaggaagaagagagaaagctctcctctcatagagacacggtgcacagcgaattacaaaaagaaagggaggaaattcagaatatgaaattggatttggagaaggaaaaatctttctttgaagaggagaaacgtgaagcgattcaagctcaggagaaactactaataacccaaagtgagagagaggatttgctaattttgcagatgaaacttaaagaagaaattgatagtctgagagcccaaaaagttgaacttatggttgatgcagaaagactgctagcggaaaaagaaagatttgagattgaatgggagctcattgatgagaaaaaggacgagctacaaaaggaagcagccaggattgctgaagagcggagagtaatagatgagcatctcaagaatgaacttgatgtcatcaaacaagagaaggaaaatctccgtattcagttcaaaagtagtgcagaatccctcgcttgtgaacataaggagttcatgaataagatgcagcaagagcatgctagttggctaagcaggatacaacaagaaagagaagatcttaagagagacattgatatccagagaacagagttgatgaattctgcaaaggcaaggcagatggaaatagagtcatatttaagggaaaaggaagaggagtttgagcagaaaaaatccaaggagcttgagtacatcaattctgaaaaggaaacgatcagctcaaaattggagcatgtcaggattgaattgcagaaacttgaggatgagaggaaagaagctttgctggaacgagcgaggagagagcaagagctgtctgaaataaagagcactatagatgcccttaacgagcaacgagagaagttgcaagagcaaagaaaacttcttcattcagatcgagaagcaatcacacagcaaatccagcagcttaatgaattagaagagctgaagattgaatccgagaacaatcaactgtctttgagacagtgtgggagatcaaaacatggtgatgtagaaacccagaaagagaatggtgttcacctgtctcctgatgaggatcaaaatgctagtcccaagaagtgttcatcaccaaaagtcattcttggaaagaaattagaagtgtccccctcagtttcaacaccaatttcatgggttcgaaaatgcgctcaggtgatattcaaacgctctccagaaaagagtgctgaccatgataatgatagatctgcacatgcaacattgggaaatgtcaacgacttcagcttagtggaaaatggtggattatttgcttgtcagctggaaaatggtgccggagaagtaccacatgctgtcgatggtcttaaagttgggaaaaagaggcttaattatgcactctctcatgatcagagtgaaaatttagagcccaaacggaagcaccagaggagcagtattctgactcagaaagtggtaggaggggaaattgattctaacggcagtccatcagttctagaagaaaaatgctctaagaatgaacatgacgcagtcctggttggtttatctcggaagggactgccttatccaagaacaggagaagtggcttcatctgatgatgcactctttgtgaatgggaaaccagatacttcagatattcctgatgatgagccttcagaggagatttcagtgtctgccgctgaggcattaaatggagatgttgctgaggacaaggatgaacttgatgaggactctgatgatgaaggtgaagaggaagaggaagagaaggcttcttcagcaaagaagctgtggcgctttctcatcacgtgatctgatcaccttccccgtatgataaataacacagctaactgtaggctgacagttacctgtccaatgaggatatgtggtattgcgagcagcgtcgccttaatcatccgctgtgattgccctgcctttcggtttgtagaggtgggacgtgggggaggtacttgtttggttgtgtgcatgtagtactgggagcagcgcgctgttttggatgggcgctgtagcttgtttctttttctgttcttgtatccccaagatggcttcgacgtgtaaagtgtttgatagcttccaagttggtgtaaaaatgatggtgggtcgtagcaaaccctgcattgtccaaaaagcgtgcttgtttgagctgtttccgcagagttgtgtcaaatttgtgatttccagacacttttcatgcttgcggctcgcgtg

SEQ ID NO: 3856 - DNA, 247 bp, Setaria italica
  Peptide Sequence Number=SeqID_69830
tttttttttttggttcaggaacaggattattaccagtccccatccaatgaatttcctgaccggatgaatggatcttcatcagactgcgaaagaacaggtgagaattgatggacagttgcaggtcaggcgacatggccagcaaaaactcatcgcagatgcgaaaaatccatcggtctcgacgacgacgatgacaacctgaagattgtacactgtaatttacgacatctcatatctcacgcgatcctaa

SEQ ID NO: 3857 - DNA, 676 bp, Setaria italica
  misc_feature (676)..(676): n is a, c, g, or t
  Peptide Sequence Number=SeqID_69831
cctgcgctgcgggtacagggaatggatgcagtgtcatttcgagtatcggcatctttccccaggcaaagaacaagctttccatctattcgagtgcagcggattccaaagcgctttcaggtgtcatgttcggctaaacaagaaaccattgagaaggtttgtgaaatagtgaagggtcagttagctctacccgaagacagcactgtaacaggagagacaaagtttgtggaccttggagctgattcactcgatactgtcgaaattgtgatggggcttgaggaagcattccaaatcaacgtggacgaatcgagcgctcaagagatccagacggtgggggatgctgccgctctcattgacaagcttattgcagagaaggatgcttgaaatgacagaattacctgaatgaattgttttgcgagctcctagattgctctctgcatggtggcgggctggtggctatgcttcttagttagtgcctgttgggattaataaaggagggaaatcgtcttagagacgagtcctttttgccccttgaatcttgtgagagacagcattgcgtcaatgtagctgaagagggtattgcaatctattgcgaagaatttgaacttttttcacccatgatttccaagccagggagattatgagtttggaataattttaaaaaaaaaaaaaaaaaaan

SEQ ID NO: 3858 - DNA, 726 bp, Setaria italica
  Peptide Sequence Number=SeqID_69832
ggtggatagacaatattggcaagacacttgatgaggggagtatccttccaccgagtcgggtcgaggcagctggctggattacttattgctgcatgggctaggaatgaccttaagccacatgttggtgatgttgatgctgctgcagtgccatgtggctttggacatgctattggcaacaagggtggtgtgggattaagaataagagtctatgatcgcaggatatgcttcgtgagcaatcattttgctgcacatcaaggaaatgttagccgccgtaatgatgacttcaaccacatctatcggacaatgtcttttaacaaacctcatggatctacagcttctgctacatctgtccagttgcataaagcagtgagtgccaatggaaatcaagctgatgaagatatacctgagctggcagaagctgatatggttgtgtttcttggtgatttaaactaccgacttgatggtatcacctatgatgaagcaagggatatggtctctcagaggagctttgactggcttagagaaagggatcaacttcgagcagaaatgagggcaggaaatgtgtttcaaggaatgcgtgaaggtccgatcagatttcctccaacttacaaattccaaagaaaccaaccgggtctctcagggtatgattcgagcgagaagaagagaatacctgcttggtgtgataggatactgtatcgagatagccgtctgtatcaatgctgaatg

SEQ ID NO: 3859 - DNA, 1768 bp, Setaria italica
  Peptide Sequence Number=SeqID_69833
tttttttttttagtcatctgaagattctgaatttcgtaagaaagaatttgttatttcacgggcctgtgaaattgtaagttggtaacaacatacatcacaagttttttttttccacgttacatcatgccagcactcaccactactgtaatgaacatcacaaggctaaagaaagggaacctaattttgaggtaaagatcagcaaagaaagaaactaaattacagatgcaagatcagaagcaaggcacgttttcagttctcatgaccatgttgcacgtcgagtagatcgacgcggcagcagcttgcaccgcccattcactctcagaagtatccgggttcttcagcttccataattcagccataggcccgagcagtggagcatcactggtcatgtgtttgaggcctttgtcacagttcaattgcatttcttgcacttgcttcaaccggttctccaggtgtttcccctcctcctgaagtgctctgtccatctgaacaaagagagatttccaccgcgccgcatgtgcttctgaaactgctttgtcagtacatccagactcagaagtattcgcaatagatgattcattctcttgattagatgaaaactctgttgaaattaggtaaggtagttccgtgtgaagagcatttctgactctcttcctgctgcgcttcaaagcagcaaggcgcccccttatgtcctgatgaagtagctccaaccactgagaagcaacactggccgcttttactgacaataaagtcatgtaatcatgattagatgcaagatcatcagctgatgtactgcaggtcctatctgaagacgcagcggccgctgatgagagttgcagtttaagactatcaccatcctgtggaaggaactgtgatgtggtaggcagtgtttggtgaaacatcgcattattatctttcatcatgaaatggcacttcatgaaaccacccccatagttatgatcctgaattctctcactaacttctttccctctttcacttgttcgactagtacaagcaggctgattctcattctcaagcctctcagagtgtaccatagcctttattatggagtaaacttgcttgctatttctcacatggttaatgattccagggtttagcccagataataggccactaggagcagcaaccttcacaaacttgttagcctggccatgttgtgtggaagtgttcttcttgaattcatcatcccttttccttttggggggtcgaccacgtggcctaggcaccactgcctttccatgagatgaagaaagaaagccattctgtttcatttctctccactttctgtgcgactcgctctcttctgtagcaccagtagtactgccacattccgatggatcgctgacttttgactgccccagcttcttgtaggggaagaagggattaagctcagctgcatcagaactatctactgtgtttaggtccaatccaagatgtgcagaactcatcctattctcaccatgttctgcatcaggcttagactggagatctgtcccaatgttctctttaccacatgacaaaggatcactaccatgcagcttctccactgatgctgcattggaatcacgacccaaggtcagacaaggagcttctgtctgaagtgccccagccagaggcaataaagacactctatctccacattgtttggcaccatcagcagtgaattgaggaatatccttgttacatggatgcaaacatgcttcagattgacccgaagattccggaattcctgccctcagatctccca

SEQ ID NO: 3860 - DNA, 467 bp, Setaria italica
  Peptide Sequence Number=SeqID_69834
tttcttaagtctaaattcctttacgtattttgttctatttcctaattaagtctaactactatttatttctacttttgactacaccttccaattctgctccactgtagttctttgtccgtgcagctagctcatgaagattaatatctggagataggaaagaattctctttcatcttatttgtatgaatttgaaggatctcaataaagcttcatcaagcaaatccttacgatttgtcattccaataagcaacacattattcaatgcctcaacaccatctatctttgtaaggagctggtttacaatgctatcatgtacacctgtaccatcacgggttgatcctctagacttgcagatggcatcaatttcatcaaatatgataacatggaggtcactttgatcaccttgtgtcttctgctcattttcagcatcggcaaacaaatctctcacgttcttctctgtttctccaa

SEQ ID NO: 3861 - DNA, 528 bp, Setaria italica
  misc_feature (384)..(384): n is a, c, g, or t
  Peptide Sequence Number=SeqID_69835
ggtgtggaactctcttgaccctctagcaaagcttgattgacggtgaatacatagtttgttccataaaattcaaagggcaccctttgccctaaagtcatgacctgatccagaaacctcttccgaagttgttgggcaagcacaacagcatccagctcatcatttcggttggctcttgccttggcatattctagctccaaagttagcaacgccaacttgaaatcttcaggagggacaaaactgctaacagtaacagaatccccagctgaaacctttgcctgccgacgctgaatagcattcaaagcaatgcgtccacttgtaacagcgtcatgggcacgtagggtgaagacccaggcgtcggcgacgagggcgagcgcgttggggaancggcggaggtcgcctgaggagacggtaggcgcagttggtgagggccagctcctggttcggcgtgctgccactccatggacgcgccaccgccaccgccgccgccgtgccccctggtacgtacctccccgccatggctgcggcggt

SEQ ID NO: 3862 - DNA, 2788 bp, Setaria italica
  misc_feature (1)..(74): n is a, c, g, or t
  Peptide Sequence Number=SeqID_69836
nnnnnnnnnnnnnnnnnnnnnnnnnnnnnnnnnnnnnnnnnnnnnnnnnnnnnnnnnnnnnnnnnnnnnnnnnnacaacagactgttcatattccatatcaacacaggcaagctgaaaccatataaagggggcaccaaaatcagttatattctgtggtgtgtagctggatccacatcaactgtataaacatctgcatacaatacaaaaatgctacatcgtgtaactcgcctatatccaatcagcgcgacagcaacagatcgtataggcgcaccaaggaaacacaactcaccaatccactctacactctgtaagggtgataggagtgatgaagtaaaggcgcaaacaaattcctattttgacacctaacagtccatttctgttccaagaatgcttaataacggataatatcactcaagatgctaaagaaatggttgatatctatcttctcctctccggcgtaaattgcttctgcgcttccccctgttggcccctgtgcagacatctcaacaagtgtgtacaacttcttgattggcatatcgtccagtgcttctgctgctgcatcaagatcgccttcatcgaacacattaagattctgcaacacctttttggcatcctcctttttcagtttgggaacatggtaggtcacagagaacacgtcacacattccaacagattctaggaagcctacctcacttgttgttccaataacaagcaagttttttcccttaggagggaccctcttgaggaggaccagaagagtttgtgagattaggttcgagaaacgtggtccaatggctacatactccagtaacctttcaatatcatcaagaattatgatgctgaattgagatttgtatgcatcctcaaaaaccttgcaaatctgtgcgcatttgctgctttcactgaaaccaatcatagtttctgctgatataattttgacatatgcaaaatcactgtcaatgccaacactagctgccatagctgatttaccacttccagcaggaccttccaagaggcaagtcacaagtgggctacctttgcttactttaacttgctccacaaggagcatagctctttggtaaatgtgcttatgtgccttgccacagtcaacaataccacgcaatctgcatctttcaaggttatcagtagaagcaccaaatgcaggagtaatttcatgaagtgcattcacaaaatcatccatagtaaccttaatgctttcctcatccaaaggtttagtgaggtcatccatagttatctgccgattcaaagcaaacgagacagcacttttgactacaccttccaattctgctccactgtagttctttgtccgtgcagctagctcatgaagattaatatctggagataggaaagaattctctttcatcttatttgtatgaatttgaaggatctgcaaacgaccattttcgtcaggcaggtttatctcaatgtgaacttccaaccgcccaggtctcaataaagcttcatcaagcaaatccttacgatttgtcattccaataagcaacacattattcaatgcctcaacaccatctatctttgtaaggagctggtttacaatgctatcatgtacacctgtaccatcacgggttgatcctctagacttgcagatggcatcaatttcatcaaatatgataacatggaggtcactttgatcaccttgtgtcttctgctcattttcagcatcggcaaacaaatctctcacgttcttctctgtttctccaacaaatttgctcagaacttcaggtccattcacaatcttgggatcttttccattcaacagctttccaatttgtcgggccataagagtcttgccagtaccaggaggtccatatagcaatataccctttacatgtttgatgcccaatttactaacaacgtgaggaggaaatactcttgaagcaaatgccctacgaaatatgtcagtgaattcagcacttaacccaccaatccccaatttttctaggttaaactctttatgcttgaaaagcttgctgctagcagcttccttttggttgaacaccttaattcctgaattaggagcagcctcaaatatgatgtatgtatcacttgaaaggaatcctctatccaacggtgtggaactctcttgaccctctagcaaagcttgattgacggtgaatacatagtttgttccataaaattcaaagggcaccctttgccctaaagtcatgacctgatccagaaacccttattcaaataaaggtgaaggtaatttaaaacaattatttttgttcactaaatatgaaggccaacactcttccgaagttgttgggcaagcacaacagcatccagctcatcatttcggttggctcttgccttggcatattctagctccaaagttagcaacgccaacttgaaatcttcaggagggacaaaactgctaacagtaacagaatccccagctgaaacctttgcctgccgacgctgaatagcattcaaagcaatgcgtccacttgtaacagcgtcatgggcacgtagggtgaagacccaggcgtcggcgacgagggcgagcgcgttggggaagcggcggaggtcgcctgaggagacgtaggcgcagttggtgagggccagctcctggttcggcgtgctgaccacctccatggacgcgccaccgccaccgccgccgccgtgcccctggtagtacctccccgccatggctgcggcggtgagatctcgctcgcgggaggagatcgtgcaggcgcgtgtgtgatgtcgcgctgttcgcgaagaggaaggaggacgacttcggtt

SEQ ID NO: 3863 - DNA, 252 bp, Setaria italica
  Peptide Sequence Number=SeqID_69837
actgagttgatttaatgctgtcaccgccggtgccttcctacactggtactgaagctcgactttgcaaaggcattcgattctgtggactgggaatgcctaaactcagtaatggaagccagaggcttcccctctctatggaacgcctgggtcgctgctatgctgcacacctccaagctatctgttcttgttaacagtgtgctaggcccttggttcgcctgcggcagaggtttgcgacagggggaccctcttccg

SEQ ID NO: 3864 - DNA, 297 bp, Setaria italica
  Peptide Sequence Number=SeqID_69838
ggccgaggggcggcaggaggaggccgcggcggagcgcgcggagatgtacgagatgctcccggcgaagctccgggcggcggtgcggtcgaagctgcgggagtggtggcgcgacccgggcccgctggacgagggcctggcgcgggggtggaaggacgcggtggaccgcatcatggcgtggctgggcccgatggcgcgggacacggcgcggtggcaggcggagcggaacatggaccggacgcgccggttcgacggcgcgccgagggtgtacgcgctgcagacgctgcggtgggcggacaa

SEQ ID NO: 3865 - DNA, 254 bp, Setaria italica
  Peptide Sequence Number=SeqID_69839
tcccactcttccccttccttccccttccttcccgcacaaccaacctgcttttaatccgcttctatcgcaagataggtacgaatcactgaggtccaatcccaagaccacagctgcagctcgatttccctcacgctgccacccctctctctccaaactcgatctctctctgctcccaatcggcaagcacacccaacgcgcacggacagctccggcgcgtagcggattgggatcccgcggagatgtggccgccatcg

SEQ ID NO: 3866 - DNA, 604 bp, Setaria italica
  misc_feature (6)..(6): n is a, c, g, or t
  Peptide Sequence Number=SeqID_69840
gtgtcngttgtttttttttttttttggaaaatcatcgaaccttgtcatttctttcgagttgaattcaatatacaagctatgaacaagaaattagtcaaagaagagagatgatctacaatcatttagagcattgggattggatggtaaaaataaactattacaaggacataattacaagtatgtattttacattgcaagatcacaaaggctctttgttcatatcaagccaaagcagcagccttcgaggccgccccagaaacctagccttccatgcaggttcttcgccttcataaacaaatccactctttttgtacagcttttgccctgctatattgtttatggcaacatggacatacagatctgttatgccccattcacgagctagtttcttggacttgtcgaccaatgcataacctaaacccttcttttgaagctccttggcaacacaaacattacttagatatgctcttgtctggctgtcctcgtttaccccaggcctcattccagttaattcatctggtagccaaagacactgattaaggtccaaactaccaactactactctctcttctccatcctccacaaacttgcacatagaacaaag

SEQ ID NO: 3867 - DNA, 338 bp, Setaria italica
  Peptide Sequence Number=SeqID_69841
gaactgatgacgttgacgatccttgcgttgcaggcttcgtgcggggcggccgggtgtcggccaggaacccgctgatgacgaggaacctggagaggaacggcaggatcacctgcatgacgtgagtacacctctggctagctttgcccaagagcggcagcgcgcgttgttcatgttgtctctgtgaaatcgttgctgatcgatctcggcggttttttcctttcccgtgtacgtgctcgccaggtttccccgggactggctgcggagggacctgagcgtgatcggcttcggcctcatcgggtggatcggcccgtccagcgtccccgtcatcaacggcaaca

SEQ ID NO: 3868 - DNA, 619 bp, Setaria italica
  Peptide Sequence Number=SeqID_69842
taccccattttgagcaggtgaaatgaaaatgcccccattttcaccacatcaaatggcctgaaactgaggagttggctgagaagggcaaaatagacaggcctgcagtggaacggatggcggaaaaaggaatagggctttcactgcctgaaagaaaatttctcttaatattattccattgatagtgtaaacccttagttatcaagaatggttcaccacttttcctcccagattccatagcaaacccatatccaagtcaatccagggtgtagttagccctggagcgaatctggtagctagaatagaaagctaatgcaatgctgttttcttatatgtgtcaaagtaatgtcaactatgttggaggagttcaatgtgaactatcttggaggacttttcccttctataacttgcatacctattggccttcaattgtttcaatttctttatctagttctttgaatgcagcttccaattgtgttgagtgatttgtcaaatgcttttcatactccagatatatgatgacctttttaatgtgttttgtctttcaatgttcagggaattgcaaatatggtatagaccttgccaagcagctcataagttctctgtacaatgtgctagatag

SEQ ID NO: 3869 - DNA, 353 bp, Setaria italica
  misc_feature (345)..(345): n is a, c, g, or t
  Peptide Sequence Number=SeqID_69843
taatcccccaatcaacgtcacattgcaccggcgcaaggcgtcaaccggcatcgccaccgccacctgatggccacccgacggcgacggcagcactagccacctgccgctgccgtccggcgcacagtgaaagagatatagatgccggagcaggagcaggacaggccggattcacgagcgccgccgccggcttttcttcctggggtcggtcactgcgactgcgagcgagccccgccgaagatctgcgcgcccagctcgtacctgttggaggcgccgccggccgctgacgacggcggcgacggggagccgtgctggtgcgcgccctgtagacgacgcggagggccccgntggggtcg

SEQ ID NO: 3870 - DNA, 408 bp, Setaria italica
  Peptide Sequence Number=SeqID_69844
taaataattctgtattgcattcctagcagcttggtgaataccttttgttgccaaggggtattaagcctttgttcatttagatgaactaagctcttctgatcagtaaagataataaattcaccatgcaacaagtaagatctccattgttctactgcaattagtatggctaggtactcctttttataagtagaaagtccctgagttttcactcctaatggcttacagatgaaggctaaaggatgaccttcttgcagcaaaacagccccaactccattcttgcaagcatcagtttcaagacaaaattgcttggtgaagtctggtagtgccaacacaggagcggtgctaagagcttgctttaaggttgtaaaggccacttcatgatcttgtgtccacacaaaaatagaacta

SEQ ID NO: 3871 - DNA, 693 bp, Setaria italica
  misc_feature (685)..(685): n is a, c, g, or t
  misc_feature (691)..(691): n is a, c, g, or t
  Peptide Sequence Number=SeqID_69845
attgttttcttaatctctgaacttgatggtatgccattttaatgtcaaactgacgtgtgtctattaaattccagggtgttggccataatgatgataaagttcttgttcttgctgctacgaatacaccttatgctctggaccaggctgtgcggcgaagatttgacaagcgtatctacattccgctacctgacatgaaagcaaggcagcatatgttcaaggtccactacggggacaacaacccaacaaagaacttaaaacaaagaaaaagtcagaattttagaagaagaccttggcccgtcgaacagacggattttctggttcagatattgctgtttgtgtgaaggacgtgttatttgaacctgtgcgcaaaacacaggatgccatgttcttctttaaggctgacggtgacatgtggatgccctgtggaccaaagcaaccgggtgccgtccagaccaccatgcaggagcttgcatccaaaggccttgctgcaaagattcttccaccgccaatctccaagacggactttgagaaggtcctctccaggcagaggccaacggttagcaagaaggacctggaggtgcacgagaggttcaccaaggagtttggcgaggagggctgatacatcgtaggcggaacgacccacccatgcactgctgcacccccgaaataaagaaacaaaacaaanaataanaa

SEQ ID NO: 3872 - DNA, 2026 bp, Setaria italica
  Peptide Sequence Number=SeqID_69846
ccaactcgtctcgtcttcgttcccctttcctcctccctccgcctcccttcttctcctcaccgcgtcaaaccccagcaccaagcaaccgcccgccgcccctccccttccctcccgaatccgccgccgcggtgcctaatccggccgatcccccctccgatccgcgggtgcccgccgcaaggcggcgccttttggccctcccccgatgtatagcaacttcaaggagcaggcgatcgagtacgtcaagcaggcggtccaggaggacaatgccggcaactacgtcaaggcgttcccgctctacatgaacgcgctcgagtacttcaagacccacctcaagtacgagaagaaccccaagatcagggaggcaatcaccgccaagttcaccgagtacctccgccgcgccgaggagatccgggccgtccttgatgagggcggcgcgggacccggggccaacggcagcgatgcggccgtcgccacgcgccccaagaccaagggcaaggacggggacggcggcaacggcggggacgactccgagcagtccaagctgagggcggggctcaactccgccatcatcaccgagaagcccaacgtcaagtggaacgacgtcgccggcctcgagagcgccaagcaggcgctgcaggaggccgtcatattgcccgtcaagttcccgcagttcttcacgggcaagcggaggccttggagggcttttcttttgtatggcccccctggaacaggaaagtcttatttggcaaaagctgtcgcaacggaagctgattcaacgtttttcagtatatcttcatcagatctggtttcaaagtggatgggtgaaagtgagaaattagttgcgaaccttttccaaatggctcgtgagaatgccccttcaattattttcatcgatgaaattgattctttatgcggtcaacgtggagaaggcaatgaaagcgaagcttctaggagaatcaagactgaacttcttgtgcaaatgcagggtgttggccataatgatgataaagttcttgttcttgctgctacgaatacaccttatgctctggaccaggctgtgcggcgaagatttgacaagcgtatctacattccgctacctgacatgaaagcaaggcagcatatgttcaaggtccatctcggggacacaccccacagcttaacagaaagtgattttgagagcttggcccgtcgaacagacggattttctggttcagatattgctgtttgtgtgaaggacgtgttatttgaacctgtgcgcaaaacacaggatgccatgttcttctttaaggctgacggtgacatgtggatgccctgtggaccaaagcaaccgggtgccgtccagaccaccatgcaggagcttgcatccaaaggccttgctgcaaagattcttccaccgccaatctccaagacggactttgagaaggtcctctccaggcagaggccaacggttagcaagaaggacctggaggtgcacgagaggttcaccaaggagtttggcgaggagggctgatacatcgtgtgcgcggacactcacccatgcacagctgcaccacagaaatgtatattgtttatgactttgattgttctggatgcaagttcgattcacaggattgtacattcggtagcccaacaaaggttgatcatggtcgtggctttatcttgtgttgggctatggatgtgcctctgttgtcaacttatttcaattttacacatacttggaatatttccacaggtgtattaaggaataataattcttaacgtggagtccttgtggtgcagcctgtaatgtatagatgttttcttaattgtcggatattttcctcgagtttctcttgtgctagtttgattttacctactgggccattttattagaggtataaactaaagccgagttttttttaaaaattatctggcgttttatttgaggcatctagcacagcttgaatctgtacatcccaggcatggctcgcatgattgtatattttttactacccaaacttcagcagttttgaatggtcttgaaaaa

SEQ ID NO: 3873 - DNA, 440 bp, Setaria italica
  Peptide Sequence Number=SeqID_69847
tgagtgggtgactggggacaccctagcgaggatcatgtatgacacctgttggtaggcatggaagcagaatgcagcaatcagggatctggtgtatatctgttttaagttcaagccagcagactgcaacactgcaggactgactttgacaccctctgttagtaaggtgactggggccaagaggcagaatgacatgactctttcttcaccatcagcttcttgcttagcacattcctggactggaaggttacatttgaagccattgcactccaaaagccagcccagttaaaggaagcctcagtaagagatgccagtgccacaccaccaacaattggaagaagagacaacacaacccaaggagtaggcaactcaccaaggaagattgctgaaaggagaacagagaagaaaggctccatggctttgatagtgtgtgtaaatgaaca

SEQ ID NO: 3874 - DNA, 270 bp, Setaria italica
  Peptide Sequence Number=SeqID_69848
ccgagcagcaaagcacaggcgcacgagctcccgagctcctcctcccgctccacgcctcctctcctctcccgccatcctcctccgcccgcgccgcacgccttcccaccccgccgagccgggggagccccgttcgcatccccgcgcgtgcgagaccgcccctgccgtcgagaatctgcggagctcggcatggggtgaccagatcggggcgcggctcggtgctctctagctgaattccgctcgggggacactcgtctcggagaggccgcggag

SEQ ID NO: 3875 - DNA, 561 bp, Setaria italica
  misc_feature (303)..(303): n is a, c, g, or t
  Peptide Sequence Number=SeqID_69849
cccaaatcctgagccaccagagcctgaaaggtgcaatgtccattccttctgcaagacttgactgcttcagacacgagcacccatggtgggttctctgtcctcaggaggcatgctgaagaatgtttgccgcaactggatatgagtcagaatccaccgtggtcaagaacttggttggtcttaaagccatggtcctaaatggcaattgcgttttggttctcgaggtgttctactaaggcatttactaacaacagtctccagagggtttgttagctcgaaaagattggttgctggtgatgcatttancttttttgagaggtgagaatggagagctacgattggggtaaggaggctcatgaggcaattaactaacatgccatcatcggttatctcaagccacagcatgcatcttggagttctggcaactgcatctcatgccatctccactggaactctcttttctgttttctacaaaacccaagaaacaaagtacgaaataacggaaagtttaagttaagttaaaagaaacgtaaaaaaacaaaaaagtaaaaccttaaagaaaaa

SEQ ID NO: 3876 - DNA, 2863 bp, Setaria italica
  Peptide Sequence Number=SeqID_69850
cgccgggcgccctcctctcctctgaattacgcgggcttggggctctaacggctgcgagggtggcgctgcgcgcgcagatctgcggagctcggcatggggtgaccagatcggggcgcggctcggtgctctctagctgaattccgctcgggggacactcgtctcggagaggccgcggagatggcgaacgccggcgcgggggcgggcggctcagggggtgttagcgatgctttgttcagggaactatggcatgcatgtgctgggccattggtcacagtgcctcgccaaggcgagctggtttactacttcccacagggtcatatggaacagcttgaagcatctacagatcagcagcttgaccaacacttacctttgtttaatctaccatccaagatcctgtgcaaggtggtaaatgtagaactcagagctgaaactgattccgatgaagtttacgctcaaattatgctgcaaccagaagcagatcaaaatgagcccaccagcccaaatcctgagccaccagagcctgaaaggtgcaatgtccattccttctgcaagactttgactgcttcagacacgagcacccatggtgggttctctgtcctcaggaggcatgctgaagaatgtttgccgcaactggatatgagtcagaatccaccgtggcaagaactggtggctaaagatctccatggaaatgaatggcatttccgtcacatctttcgaggtcaaccaaggaggcatttacttacaacaggctggagtgtttttgttagctcgaaaagattggttgctggtgatgcatttatctttttgagaggtgagaatggagagctacgagttggggtaaggaggctcatgaggcaattaactaacatgccatcatcggttatctcaagccacagcatgcatcttggagttctggcaactgcatctcatgccatctccactggaactctcttttctgttttctacaaacccagaacaagtcgatcggagtttgttgttagcgtaaacaagtaccttgaagctaagaatcacaagatgtctgtcggtatgaggtttaaaatgagatttgagggtgatgaatctcctgaaagaagatttagtgggacaattattggtctgggaagcatgccagctaactcaacatctccgtgggctgactctgattggagatctttgaaggtccaatgggatgagccttctgctgttctccgtccagatagagtttcaccatgggaactggaaccccttgatgcaactaacatacagccacctcagcctcctctacggaacaagcgtgcacggcctcctgcttcaccttctattgctccagaacttcctccagcttttggtttttggaaatccccagctgagcctacccatgctttctcattttcgggactgcagcgaactcaggaattgtaccattcaaaccccaattcgatcttttcgtcaccgttgaatgaaggattcaattcaaagaatgagcgttctactccaaccaacaatcatttgtactggccagttcgagacatgagaactgaatcctactctgctagcattaacaaacctccacctgaaaggaagcaagaatctgttactgctggctgcagattgtttggtattgagataagtaatgcggtatcaccagtggttactgctgctagtgttggtcaagaccaaccacctgctgtctcagtagatgttgagtctgatcagctgtcacagccatcccatgccaacaaaacagatgccccagcagcaagcagtgagcgctctcctcatgagaccgagagccggcaaatcaggagctgcaccaaggtaatcatgcaaggaatggtggttggcagggcagtggacttgacaaggctagatgggtatgatgatcttctccacaagttggaggagatgtttgatatccagggagagctttctgccagcctcaagaaatggaaggttatttacatggatgatgaggatgatatgatgctggtcggggatgatccgtggcatgaattttgcatcatggtgaaaaagatatacatttactcctacgaggaggccaagtctttgattcccaaggcaaagctgccggtcattggtgacaccatcaagccaaacccagacaaattgtcaccggaatctgacatgccgcagagtgactcaaacaacaccgctccagttgccgccgataaggactgatggatgctaacattgctctaccttttattccctttttggatgtttgggaggcaatgcccatgctcctgggactgctaagagttatctgtttgtttctccgcgggcccaaaggacgtgttgccctgcaatctgcctgactgccttggtttggaatgcctgtgctggaccagcggtggtcctttgccagcaaggacgactgggacggaatggcaaggtaggccgcgtgccgttccctgtggtaccaacctgtgttttgtttgccgtgtttggtaggaggcatggtgtattgccggctgctgggttttggagacttgccactgactctgccgccgtgtcaccggccgtcggccggcgggcagcgcccctcacctcaccttccagtaaataggagttatgtacaactattttggtagtagcagtagtagtggtacatgtacatcatcagcgtctatgttcttgctacacatatataggcatcatctgtagctgctgtgcttcccccctgcattatattctgcccccggcttggtatcggatactctggtctggtgcaaaaatgtctctgcttgctgttccaacgacaatgctcttttcggcgcgtgctgggtgtcgtgtgcgctttcggttgggaacattgctgcctctgcccggcatctgtgttttc

SEQ ID NO: 3877 - DNA, 261 bp, Setaria italica
  Peptide Sequence Number=SeqID_69851
caaaacaaccagtgagatgattgtttcatgctttggttccactcaacataaagctactagttactgcaacgcaaggccctgtggttgtatcaattgaaaggctaacagagttgtacaagaaaagttaaaattttctcatacataaaaaactaaaatttcatttttcctattcaagcttgcagtgctgttgcctgctcccagccatttctaattgagcaattatccactgcgagttccctttaagctgctttcactttgaag

SEQ ID NO: 3878 - DNA, 178 bp, Setaria italica
  Peptide Sequence Number=SeqID_69852
ggtggcggcccgctctcgccggccgcgcccgcagatgggacgcttcgactcgtacgcgagcgccggccggtcgccgctgctgatgatgcgtacgcaggtggctttcggcttcttttgcgccgggagccatgcgcacaaagccgtatccttctccctgaagacctgaagtatttcccct

SEQ ID NO: 3879 - DNA, 556 bp, Setaria italica
  Peptide Sequence Number=SeqID_69853
cacgagcccttcttcagcgcgaacagcttccccgcgccggacgcggccgcctcggcctccgcgcgccgccgcttcttcaggtatatcaacacgcccagcgccgccagcaggaccgccgtcgcggcgaggatgcaggtaacgaccaggcgcgcggcggcgctcgccgaccggcctccggagcccggcgcgcagcggcggaggaagccggcgccgttggtggcgcacagcccggggttcccgacgaagctctcgccgtaggccgagatcgcgagcgcctccggcacgggcccggtcagctggttgtcggacaggttcagactgctcagcttcagcgcggcgaggctcgccggcacggcgccggtcagctcattcctggacaaatccagagaattcagccgcggcaggttgcccagctccgcggggatcgcgccggcgagcttgttcccggcgaaattgaccgtgctgagcgccgagcacgaacccaggctcgccgggatggccccgccgatcccgttcccctcgatgctgaggctgttgaggctcgacagcctcccga

SEQ ID NO: 3880 - DNA, 490 bp, Setaria italica
  Peptide Sequence Number=SeqID_69854
tgtttcccctaacgtacgacggctgctagggataaataggagctgtatgtttgactggctgctaatgggtgtaatttttttgtgtaataaatcgctcattggcgatggtcacatgtaattttgatttgatggatcatgctgtatcaatcatatcgaagttcttgttattacatttcattctgtgggcttatagttattttagatccttcaaattatgcttttttgtgtatcaggtgataattaaaacagtagtggctactgcgatactaacagcatgcttgtttggcagatatctggctgagttgcttgcagagaggcagaaattggccccattcgtgcaagttcttcctttctgtaccaggctcttaaaccaagagattttgcgggcatctactatggcgcctaaccataattttgttgaacctgagagaattgagcatggtagcccattaaggttacctggcccacccagtgaatggtcagccaatgg

SEQ ID NO: 3881 - DNA, 804 bp, Setaria italica
  misc_feature (772)..(804): n is a, c, g, or t
  Peptide Sequence Number=SeqID_69855
ttaaaaaaaagggaaaaaaaacgtaaaaaactaaaaaataaacaaaagaactagtagtaccaatacctaagaaggaatcttctgaaaccaattgacgagtccatggattactacaagaagcaacagctgagggaattggcaattctaaatggcacactgagggaggaaagcccaagccctcacctcagccctagtgtgtcccccttcaactccactgggatgaagcgtgcgaaaacagggcggtaatcccgattccgtaagcttcaccctccgaaatcaatcatggttcaatgcccccattacaagctgctgctgctgtactgctggagatgattggtgatgcatatgctgggatcatcagtgctgctggcctatgcctgtcatgatctatgctctttatcgacaaacaacatgtctgtccttggacggatggtctccgtgggcttgtgtttgactctataattatttattctttgtgcgcctgactgcctaagtattaacattattggtttgggtaagttaacaaggcctggttggccaatcactctagaagctggggttcaattgtgtcggacaataataagggtctcgttgggtgtacctgaaatagttgtaatatgtcaagtgctgatgcttttgtgtggtgctagttcaagacaaccagacagctctagttgaggcaatgattatttgcattcacatatagatgtctttgtcatgccttgtacatggattatcatctcgtctcttgtccttgtaaattgtagtattnnnnnnnnnnnnnnnnnnnnnnnnnnnnnnnnn

SEQ ID NO: 3882 - DNA, 2238 bp, Setaria italica
  Peptide Sequence Number=SeqID_69856
ggggaccatggatgacaggattccaccgccgtccctcttgcaatactctccgtctcctgttcattcttccccccatcccctcaattctctgaggtattcttcctctgaaagagaaaggtgcgtgtctgtttcgctattttgctcttgattttttattttgtttcccgcgattgttttccctattgtttttggtcaagttttgttttagttttttgatcctgccctttcggaatctttctgaggagcacgagatttgatgccgcccgtggagatttccgcttaattctaaacttccggatgtggtgtttcgccttgatcaatgctgccgagattggtgaagtagtgatctgtaaaaatagggatgtttgatgatcgctcgctgatagatttgtttctgctgttccccaacgacggctgctagggataaataggagctgtatgtttgactggctgctaatgggtgtaatttttttgtgtaataaatcgctcattggcgatggtcacatgtaattttgatttgatggatcatgctgtatcaatcatatcgaagttcttgttattacatttcattctgtgggcttatagttattttagatccttcaaattatgcttttttgtgtatcaggtgataattaaaacagtagtggctactgcgatactaacagcatgcttgtttacctcaatcatcttgatttctgcgcgacatatactggagggagagagaatccaaagccctcctttgggtttgtctcttcctctctctcgcctcccttctcccacccaccccttctctctcgctgtgggtgtgctgtggagaggagaaagggaggagagctagaaccaaacaccagcaagagctgctgccaacccctgcacagcctgggctttcattactgattgcccaactattaccttccctcttttgtgattagaatcaaccatctatcccttatatatctatcatcccggttctttgttaactctcttcggttccagatttcccaggcctcaagataggcctctgcacctaagcttgcggagtagctgctgttcttgttttcttggtttcgtagttcttggatttttgtgttcttaggtctcttattttcccctaatcttgcaaaatcttgtggagaagtttgttgtttcgctgtttggggaccatggatgacaggattccaccgccgtccctcttgcaatactctccgtctcctgttcattcttccccccatcccctcaattctctgaggtattcttcctctgaaagagaaagatatctggctgagttgcttgcagagaggcagaaattggccccattcgtgcaagttcttcctttctgtaccaggctcttaaaccaagagattttgcgggcatctactatggcgcctaaccataattttgttgaacctgagagaattgagcatggtagcccattaaggttacctggccacccagtgaatggtcagccaatggatctggagggcggctggtcagggatgcaaacagagcatatgggggttctacaagcatcatcaatgggttggaatggtgctcctgcacttgcgggtactcctgttgtcaagaaagttgtgaggctggatgttccagtggacaagtatcctaattacaactttgttggtcgtttgttggggccccgaggtaactccctgaaaagagttgaagcttcaacgcaatgtagagtttatattcgaggacgtggttcagtgaaggactctgttaaggaagacaagctgagggataagcctgggtatgaacacctcaatgaaccactgcatgtgcttgtggaagcagagtttccagcagatattgttgatgggcgtctaaatcaagctgtgtccatcctagaggatcttctgaaaccaattgacgagtccatggattactacaagaagcaacagctgagggaattggcaattctaaatggcacactgagggaggaaagcccaagccctcacctcagccctagtgtgtcccccttcaactccactgggatgaagcgtgcgaaaacagggcggtaatcccgattccgtaagcttcaccctccgaaatcaatcatggttcaatgcccccattacagcagctgtgtcggacaataataagggtctcgttgggtgtacctgaaatagttgtaatatgtcaagtgctgatgcttttgtgtggtgctagttcaagacaaccagacagctctagttgaggcaatgattatttgcattcaaa

SEQ ID NO: 3883 - DNA, 1350 bp, Setaria italica
  Peptide Sequence Number=SeqID_69857
taacgtggagacttctccttcccaagccaatggtgtaaatgaaatgcaccttcatattcgtcttgagaagctactcactttggggccagatgaccatggtatggttgttttgagcagtggtgatgagaaatatgaggtaataaatgctattaattccttgatgctggatgcaaaatggtcagatcaagaatcagcttctgccaacgaagtagtttccactgctagggatcaaagtttaaagaaattggtgaaagagaagctgcatcattggcttatctgtaaaataaatgatgatggaaagggtcccaatgtgctgtgcaaggaaggacagggtgtaattcatctggtagcagcactgggttatgattgggctatcagaccgataattgttgctggtgtaaatgtgaacttccgggatgctcatggatggactgcacttcactgggcggcatcttcaggaagagagcgaacaattggtgtcctcatagcaaatggagctgcagcaggtgcattgacagatccaacttctgagttcccttctggaagaagtccagctgatttagcatcagtaaatggacacaaggggattgctggttttctagcggaagctgctttgacaagccatctgtcagcacttactattagagaatcaaaggattccactgtagaagtgtgtgggttaccagctgttgaaggtctgactggcattaattctgcccagctagctggagaagattctcatgctgaatcacttgaaggttctttaagcgctgttcgtaaatccactcaagctgcagctcggatatttcaagccttccgggtggagtcattccacagaaagaaaatcgtggaatacggagatgataattgtggattatctgatgaacgcacactttcacttgtttctctcaaaggacaacatgatccacatctgcattctgctgctgttcgtatacaaaataagtttcgtggatggaagggaagaaaggaatttatgatcatccggcagagaattgtcaagttacaggctcatgtacgaggacaccaagtgaggagaaactatcggaaggttgtctggacagtaggtatcgtcgagaaagtcatactgagatggaggagaaagaggcctgggttacgtggatttcgacctgagaaacaactcgaagggtccatcggaaatccaacctgcaaaggttgaggatgaatatgatttcttgcacgatggcagaaggcaggctgaagccaggctgcagagagcacttgcccgagtgcactcgatgtcgcagtacccagaagcaagagagcagtaccataggctcacaacctgtgttgctgaaatgaaacagccca

SEQ ID NO: 3884 - DNA, 1317 bp, Setaria italica
  Peptide Sequence Number=SeqID_69858
aaacaaagaaacacgacagcttttctagactggatgagtaaagaactcaaagaagtggttgatttgggtatcaaatctacgtctgatgctttctggagtaacattgagacggtgaaggttcctgatcgttgcaatgtgctgactaatgaacagctagatgcttatgtagtgagcccttcactttctcaagatcaactattcagcattatcgatgtctcaccaagttgtgcatatattggtacaaatacaaagatttcggttactggcacattcttggtgaagaaagaacatgtggaaaatcgtaaatggtcatgcatgtttgggaatattgaagtaccagctgagattttaactgatggcaccctacgctgctatgcaccagaacatcaatcaggaagagttccattttatgtgacctgttcaaacagggtggcttgtagtgaagtacgggaatttgagtatcgggatccagatgctcagtacgtggagacttctccttcccaagccaatggtgtaaatgaaatgcaccttcatattcgtcttgagaagctactcactttggggccagatgaccatggtatggttgttttgagcagtggtgatgagaaatatgaggtaataaatgctattaattccttgatgctggatgcaaaatggtcagatcaagaatcagcttctgccaacgaagtagtttccactgctagggatcaaagtttaaagaaattggtgaaagagaagctgcatcattggcttatctgtaaaataaatgatgatggaaagggtcccaatgtgctgtgcaaggaaggacagggtgtaattcatctggtagcagcactgggttatgattgggctatcagaccgatacattctgctgctgttcgtatacaaaataagtttcgtggatggaagggaagaaaggaatttatgatcatccggcagagaattgtcaagttacaggctcatgtacgaggacaccaagtgaggagaaactatcggaaggttgtctggacagtaggtatcgtcgagaaagtcatactgagatggaggagaaagaggcctgggttacgtggatttcgacctgagaaacaactcgaaggtccatcggaaatccaacctgcaaaggttgaggatgaatatgatttcttgcacgatggcagaaggcaggctgaagccaggctgcagagagcacttgcccgagtgcactcgatgtcgcagtacccagaagcaagagagcagtaccataggctcacaacctgtgttgctgaaatgaaacagcccatgatgatgcaagatgagatgctaagcgaggctgctggc

SEQ ID NO: 3885 - DNA, 301 bp, Setaria italica
  Peptide Sequence Number=SeqID_69859
gcctcacccgccgccgccgctctttgttctcgactgccgcttctcgaaaatgccgtcccacaagaccttccagatcaagaagaagctggccaagaagatgcgccagaaccgtcccatcccctactggatccgcatgcgaaccgacaacaccatccggtacaatgcaaagcgcaggcactggcgccgcaccaagcttggattctgatttcattttgtattgagtacctgttatgtcttgagacaattgagcgctatggatcaccttttattcagtatcaaagaagttctctcgtgtttgcac

SEQ ID NO: 3886 - DNA, 517 bp, Setaria italica
  Peptide Sequence Number=SeqID_69860
ttcgttctggttttcgcgctgccgccgccgccgcttcttcgtctccgccgcaaagatgccgtcgcacaagaccttccggatcaagaagaagctggcgaagaagatgcgccagaaccgccccatcccctactggatccgcatgcgcaccgacaacaccatcaggtacaacgcgaagcgcaggcactggcgccgcaccaagctcggcttctgagcgaggggatggaccggctgctgcgtcggaaggctagggtttaagagctatcttatgttttatgggtgtttcagtgtttctgcaagataggaagtgattccaggatgcttttattaagattttggtgatgttaagagagttgcagtactctggataccatgctgcattgctatgagtaaaggacccctgttaccctatatttagtgatgcagttattctgaggcctaaatttgattcatttgtttatttctgttgcatgaatggagtcattgcttttacctgtatgctgccaattatgatgtcccc

SEQ ID NO: 3887 - DNA, 279 bp, Setaria italica
  Peptide Sequence Number=SeqID_69861
ttcttgcaaatacaacagccattggaatgcatccaaatgtcaatgatactcctttatctaagcaagcactaaaatcatatgccgttgtctttgatgcggtctacacaccaaaagagaccagacttctccgtgaagccgcagaatgtggagccacagttgttagtgggctggagatgtttataagacaagcaatgggtcaatttgagcatttcacgggcatgccagttgacgatgataaattccgagcaattacaagttcgctggacaaccctaacacca

SEQ ID NO: 3888 - DNA, 1854 bp, Setaria italica
  misc_feature (1774)..(1854): n is a, c, g, or t
  Peptide Sequence Number=SeqID_69862
cgggttcgcgccgcgcagggacctgcccgtcatcctcgccgagccgcgcccgctccccgcgctcgtcacctacagacccaagtgggaaggtggcgaatacgaaggtgatgatgagccacggttcgaggcgcttatgctggcaatggagctgggagctgaatacgttgatattgagctcaaggttgccgacaaatttatgagacttctgtctgggaagaaacctgaaaattgtaagctcattgtttcatcccataactacgagaatactccatcagctgaggagcttgcaaatttggtggctcagataaaagcaacaggggcagatatagtgaaaattgctaccactgccactgacattgttgatgtggcaagaatgtttcaaatacttgtacattgccaagaaaagcaggtgccaatcattgggctggtgatgaatgacagaggttttatttctcgagttctttgcccaaaatatggtggataccttacttttgggtctctcgaaaaaggaaaagaatccgcagctgcacaaccaacagtcgctgacttgattaatgtgtacaatatcaggcaaataggcccagacactaaggtgtttggcattattggaaagccagttggtcacagcaagagcccaattttgcataacgaagctttcagatctgtggggttcaatgctgtgtatgtgccctttttggtggatgatttggccaaatttctcaacacatactcttcaccagactttgctggcttcagttgcacaattccccataaggaagctgcagttaggtgctgtgatgaagtcgatcctattgccagggacataggagctgttaatacaatggtgagaagacctgatggaaaacttgttggctacaatactgattatgtcggtgctatttctgctatcgaggatggaataagagcatcacaagatccttccacttccccactggctggaaggcttttcgttgttatcggggctggtggtgcgggcaaagccctagcatatggtgcaaaagagaagggagcaagagttgtaattgcaaaccgtacttttgcacgtgctcaagaacttgccaacttaattggtgggcctgcattgactctggccgatttggaaaattaccatccggaggaagggatgattcttgcaaatacaacagccattggaatgcatccaaatgtcaatgatactcctttatctaagcaagcactaaaatcatatgccgttgtctttgatgcggtctacacaccaaaagagaccagacttctccgtgaagccgcagaatgtggagccacagttgttagtgggctggagatgtttataagacaagcaatgggtcaatttgagcatttcacgggcatgccagctccagataggttgatgcgtgatattgttctgacaaagacatagtaagttgacgatgataaattccgagcaattacaagttcgctggacaaccctaacaccatgaagcctcgtctgtgagcgattcatccatgcttctgtggcccttcaatttttgtttatgtttccttctatatttggatttcagcaaccggtttgctggtcagccgatgtaaatgagatgtttggactgagatatttttgtgtgttatttgtatctgcccaaaaattgctttccccaactgtgcacatcaaaggaaattaggaaggcttttgcaaggggttttgtagtagaaaatcatgaggcagtaatggaaatgaagtatggtatgctccattgctccaaaaaaaaaaaaaaaaaannnnnnnnnnnnnnnnnnnnnnnnnnnnnnnnnnnnnnnnnnnnnnnnnnnnnnnnnnnnnnnnnnnnnnnnnnnnnnnnn

SEQ ID NO: 3889 - DNA, 368 bp, Setaria italica
  Peptide Sequence Number=SeqID_69863
cgggcgcggttcctccggatgacggaggccgtcgccaagggcaacctggcggccaagctcgagtccttcttcgactcgtgcgtcctccacgggtggaaggactccgtcgccgcgctgcaggcggcgtggcgggtctccggctggagcgagagccgcgtcgtccagccctgcgtcgactccatcgtcgagaagatcctcacgccgccgtccaaggtcacctggtccttcacctacacccgcccggggtacaccagcaggaagtcatcggtgcccaaggactggtggacggaggacgtctccgagctcgacatcgaggtgttccggtcggtcctctccaccgtgcgcgcgtcacggctgctcccgcgccg

SEQ ID NO: 3890 - DNA, 292 bp, Setaria italica
  Peptide Sequence Number=SeqID_69864
cttctacctcaaggccttaaagcttgtgaacgtggagaggtgcttcgctgagaagcactactctgatctgtccgccaagcccttcttccagggccttgtggactacatcatctctggccctgtggttgccatggtctgggagggcaagagcgttgtcacaactggccgcaagatcatcggtgccaccaaccccctggcttccgagcctggcaccatccgtggtgactttgctgtcgacattggcaggaatctccttggtagcactctcaatgctgtcacttccatgaatatt

SEQ ID NO: 3891 - DNA, 826 bp, Setaria italica
  Peptide Sequence Number=SeqID_69865
gaagagagagccgtcgtctagggtttcctccacggcgccgaccataccagaccaatcccccaaaccgaggaagaactagcgccctctcgccgtcgccgcaatggagcacaccttcatcatgatcaagcccgacggcgtccagaggggcctcattggtgagatcatcagccgctttgagaagaagggcttctacctcaaggccttaaagcttgtgaacgtggagaggtgcttcgctgagaagcactactctgatctgtccgccaagcccttcttccagggccttgtggactacatcatctctggccctgtggttgccatggtctgggagggcaagagcgttgtcacaactggccgcaagatcatcggtgccaccaaccccctggcttccgagcctggcaccatccgtggtgactttgctgtcgacattggcaggaatgtcattcatggaagtgacagcattgagagtgctaccaaggagattgccctgtggttccccgagggcctcgccaactggcagagcagccagcacccctggatctatgagaagtaaaccgtgtcgcttcactccaaacctcaagagcctgagagcgtggcaccagccctactttagtaatatttagagttccaggaaattattatctgtatcgttgaaccgtattttcatgaaccgaatttccttccttggctcgcatgctatgcatgcttgacgttttgtttatggtatttgatatggttttgcttttatatgagctactgccaacgttgtttattgaaaattgcacgtcgcgtggctgccggttgacggtttttttaatgagggaatttg

SEQ ID NO: 3892 - DNA, 458 bp, Setaria italica
  Peptide Sequence Number=SeqID_69866
gaaggggtccttgagcaggcgaagagcggcgtgcgagccgatgtagccggcgccgccggtgactagcacgtgcgtcaccccaggttgatggacggagaacacgctgggggtcctcctgtggcagggcggctgtgtgagcatgacgacgcacatggcggtgagtagcgcgaccatgatgaccttgctgaggtagcgcggcctgcgcttggggtcggagaagtccaccatctctgaaaaggaccaagatctgggcggcctctgctgcggcctgccgcgggtgttgggcagcatctggctgggagcggcgcgcggcggctccgctccgctccacttgccggaactcgaggcggggaagcacctcgttccttgtcaggtggggtggaggtgcagatccaggccagggaggcaagcgaggaggcaggaggtgccttttacaggttggtgtgcggacgggagtg

SEQ ID NO: 3893 - DNA, 1572 bp, Setaria italica
  Peptide Sequence Number=SeqID_69867
gacatgaaagcctgcgaatccatgataagtacatcggtaaaagtcgtcaccagccaaagagtaaaactaaaatactgctatcaagaacaaccacccaaggatcacaactcatttagctatagctgttcctcaggctcgcagtcgcagctgatggtaagaatccatttaattgtaaaaggttaccacaggaagatgagtacgaagcatgaaaagaaggttaggctggtatgcttgttcttaacgagtcacataaaccagccacacggcagaatctacagagacaagcgggactcccaagaaaagtcagtccacctcttatcatttgcatctacttggtaacggtaaaggatcccagcttggacagatccggaacccagcaggacagttctgaagatcctgtcacgaacatcaaggatcctggagcccaccttactagtggtggttcattatctgtgcttccccagcgtgcaacctttccgctcctaacattccaggcataaacactaccatcaccagagccagatatgatatggtttccatcaggactgaatgatgcctccagcgttgaattggttaccactggcttcacattgtatgatgcaatgctgctgccatggaatgaatctagcacatgaacacgcccagctttagtggttaccagaatccgcctgccatcactactgaactttatgacatgggcttctgaatcatcattaccgatagagaatatctcaaaaggccccttttcaaattttcgagcatcaaacatccttatgtgaccaccataggcaactgcaaataccatgccctgatcatcatatgaaactgcaggcctcccttgcacacgcagtaagccctgtgatttttcagcccgctgatcccataagagaacggtgcgatcaattgaaccagagagaaaattttctttttcagagcaaaatgagatgcagacaaccctgtcaaggtgacctttaaaatatctaagaaaccggttatcattcagtgagagtagacgcagagattcatcccagccatttttcgatgaatataagacaatgcctgggttatcagtgaagcaaacaagttcgaccccatactttttgctattaatagtcttcaaacacaatgcattttgagtgtcatataggcggattgattcatcatcactggctgtcacgagatagttcgtagccttgctgtgaaaatccatagaactaattctgccattatagtctctgaaggccagtccgacctccatgctcttgagcatctcatcggtgatctccatgctcaccctgggcggactcgtcatggtgtcagttccccaaatttttcctcaagtaaaccttaatcggcaccagggaccacgaaacgaaggaaccaaaccgattgacgcccggctggcacgatggatggacccttagcccggttacgcagagaggaggagcggcggcggagcgaagagcggcggaaacaggcctggggagcgcccggcggcggcggcggcggctttgcttgtccggcgccgcggcggtaagaggttttccgtagtccgtagtcttcttatttctt

SEQ ID NO: 3894 - DNA, 246 bp, Setaria italica
  Peptide Sequence Number=SeqID_69868
ctcgcggctagccatcatgttggagctaatcacactgtcaatgaaatcctccatgtcgaaggacagttcgcgcacctcattcatccagcgacttagaaccataggagttgggacgtcccaaccctgacagatccaccatgaagctatttagttcttctagatcttgtttcagatgcaggatcccgtccttcagtgatccgggcagctcatgctccggggagaaaagctgtgtatggagcttacccg

SEQ ID NO: 3895 - DNA, 633 bp, Setaria italica
  Peptide Sequence Number=SeqID_69869
gatgcggctgctgaggaggaggatcctagccatccacaggattttaccaaagaaggcttggatgcaaaagaagtggtgctatgcctatccaaatccatcgtgtcacttgtctcttctgttgatgggaagcctctgtttggttgcacaggtacagtggtcaatcatgtgggttccgagacatggatactcacctcagccacgctggttaggaaacctggcactgaccatgatgcttacaaagcggatgaagttaagattgaagtgcttctggacaacaaaagaagtatcaatgggcgtttagcaatgtgcaatctgcagtataatattgctgttgtcactattgagttacagttcggtcttcccattgtggcgcttaatgatcctcctgaatattattccatactgggtcggcctgtggtagctgtaggtcgggattccaagtcacaagttttactggtgagacatgggaacatgatccgcaaaaggagcaagttggactgcagcgagcttttgctctgtacctgtcctgttagtaagactttcattgggggccttgtcatggactttgaaagaagaatcattggcatcttcttttttggcgaggacaccacccctgttatgccaattgagatt

SEQ ID NO: 3896 - DNA, 256 bp, Setaria italica
  Peptide Sequence Number=SeqID_69870
aaattgcgtacttttataagaatatcattttgttgtaaattttgtcctttttgtacccattccatagttattcacaactagattttgtaactcttaactattgactgggtcctgatagcaatgatgcatccaataatatctgtttgtgaagggacatggaatgagccatgttgcaaaactgggcctatagaaatgtatatggcaggctctaattggctgacatgtgggatgtaggtaagagttgaagggtcagttg

SEQ ID NO: 3897 - DNA, 462 bp, Setaria italica
  Peptide Sequence Number=SeqID_69871
gttctgatcattttgcacactgaagggtagacagatggaggcaatgccaaataaaagagcctgcgatagctttctgatttgcttgatgcctcatactctgatattgccttgttcaatttctcaaatccctctccattgtcataggaaccactgacatattttatctgagacacaaattaccatgatgatgcctgtgccatttaattaaattcagtgtgattataataacaacttactaattgcaaaaattctgaaacatcttcttccggggctcctttgagatacccacgaatgcgttctcttaacccatcatcagaaagatttgatctagcataaccaaatatatgcacttcgccggactgtataaatccctgatcgaaaaggtggtagagtgctgggaaagtcttcttcttggcaaggtcaccggaagccccaagtacaacaatagagagacaccctttg

SEQ ID NO: 3898 - DNA, 372 bp, Setaria italica
  Peptide Sequence Number=SeqID_69872
gtcaatattatcacggttccaaagaggcaagaacaagcggttggcaaaacgaaggacaagcaagttttggaccaactcttttccccaggtagtggtctattctgtacagttggtgttcctcgaatagctccccaagttgggcacttagttcttctgcagaatccaagtcctttccaaagggcttctcaacaatgactctagtccatccagggtgagaagctgcatgcacaacactaatgtcaagcccaaactcgatagatgtagttgtgcaatttagtacagtagtatgccactcgacatttggaatctgtatatattactacaatgggaactgatatgggatttagttgataaatagcatctactagtatt

SEQ ID NO: 3899 - DNA, 602 bp, Setaria italica
  Peptide Sequence Number=SeqID_69873
tgaagggtagacagatggaggcaatgccaaataaaagagcctgcgatagctttctgatttgcttgatgcctcatactctgatattgccttgttcaatttctcaaatccctctccattgtcataggaaccactgacatattttattaattgcaaaaattctgaaacatcttcttccggggctcctttgagatacccacgaatgcgttctcttaacccatcatcagaaagatttgatctagcataaccaaatatatgcacttcgccggactgtataaatccctgatcgaaaaggtggtagagtgctgggaaagtcttcttcttggcaaggtcaccggaagccccaagtacaacaatagagagacacccttgttctgaaggaaggtctaggtctctagataaagaattaaagctgctccgccttgacgatggtgaagatcctcctgacatgataaataggacaagcctcttctaccagcggcgagatttccgggtggagagctagagcgagcgccgagcgggacgggtggtgggagggaggcgggcgggcaccctgtcgctgcttcgaccggtccccctcggcggcaggtcccgtttttataccg

SEQ ID NO: 3900 - DNA, 704 bp, Setaria italica
  Peptide Sequence Number=SeqID_69874
ggggcctcggctgccaggttgatattggacggccttcatcttgccctcgtcgatgtcatgcagcaaaggagtgaagatttgccaagcagcctttaactcgtctctgcgaacaaagtgctgttggtctcctcgtattgtatccaggatgaggcgttcatatgcctcaggaattttgacattttggtagcgcatcccatatgacagatcaagctcactctgttcagtagccatttctaacccaggtttcttaacagttagtttcatgtacatggcttctgatggctggaggcgtatgacaaactcatttcttccttgcttcttacatttaaaaatgtcaccaggaacatccttgaattgcacccgaacttctgctttctttgagcttaatgctttaccagctttaagaatgaatggaacaccttcccatctttcattgtgcacccgaagaacaacagacgcaaaagttggggtattagagtcatctggcactgtagggtcatccttgtagccatcgtattgtcccaggaccacctcttcaggcttaatagggttcacagattgcagaaccttgactttctcatctctgatgtgctcaggcttaagagagacaggcttttccattgcaaccaaacagaaaacctgcaattaaattggtttcttgtaattgtattattctacgtaattgtattccatattggtcgaaa

SEQ ID NO: 3901 - DNA, 689 bp, Setaria italica
  Peptide Sequence Number=SeqID_69875
tttgaaacatgtacttttatttcacattgtagttggaacattcagcctaagttaccacaacactgtggttggcggtacaatgaaaatgggcgatatatatatgcgtggccttattgtagggcactcttcctagatacacaattcctatgatgccatggaaacagattttctcttctatgcaagggtgggtggtacccatatgtaaccgtgggtctggacataaccaactctagcgctcaattcgtcagcttccttggggcctcggctgccaggttgatattggacggccttcatcttgccctcgtcgatgtcatgcagcaaaggagtgaagatttgccaagcagcctttaactcgtctctgcgaacaaagtgctgttggtctcctcgtattgtatccaggatgaggcgttcatatgcctcaggaattttgacattttggtagcgcatcccatatgacagatcaagctcactctgttcagtagccatttctaacccaggtttcttaacagttagtttcatgtacatggcttctgatggctggaggcgtatgacaaactcatttcttccttgcttcttacatttaaaaatgttcttaccttcaccaggttatacttatattcagttcaactataagatccattgcaaaaccaaataaaatatccattgcaaaagaatcaactagaggcatt

SEQ ID NO: 3902 - DNA, 419 bp, Setaria italica
  Peptide Sequence Number=SeqID_69876
tcttctacctaccgttccctacgccgggtacctgccgtacgggtgatcctctagctagcaccagcgctcgaggagaagctgaaggaaggaggtcgaagcgcccagagattttggtaggctagtgttgcttggctaccataaactagttgggttggcgccccaaggcgatcagcggggcgcaggggaggaggatgcagtcgtcgtcgcaggcgaggtcgtcgtcgtactacgccgtgctcggcgtccacccgggcgcctccgccaccgagatacgaagcgcctaccaccgcctggccatgaggtggcacccggacaagatcgccagcggccgcgcggcggacccggcgcgcgcggaggaggccaaggccatgttccagcagatacacgaggcctaccaagtgctgtcggacgagaagagg

SEQ ID NO: 3903 - DNA, 270 bp, Setaria italica
  Peptide Sequence Number=SeqID_69877
cagccgccggtggccatggcgatgatgggtgctgcggcggcggcatccacctgctgcatcaggtcgtgcgcctcccctagcctgtctcgctcgcgcgtcagggcgcaggcgacgtcgtgggccgggggcgccgaggcgctggtgcggtcgggcgcagtgaaggccgtccggcccaaggacgcggcggaggcgctgggcgcggaggggttccgtctgctggacgtgcggccgccgtgggagctcgcccgcgccagcgtgcggggctcggcg

SEQ ID NO: 3904 - DNA, 332 bp, Setaria italica
  Peptide Sequence Number=SeqID_69878
gagtttgtttgtagtaagtaagcttactgtccgggtgtgttacatgtcgatgcggcggtctcttgtcagtaggaagaatccggtcggtgaggtgttgaaggttctgcttgccatggatgaagcaggtgtcaagccagaaaggagcgattatgagcggcttgtctgggcgtgcacaggggaggaacactacaccattggcaaagagttgtatcagaggattcgtgagcttaatggggagatcagcctgtcagtgtgcaaccacctcatttggctgatgggtaagtctaagaaatggtgggcagctcttgagatttatgaggtatttgttggac

SEQ ID NO: 3905 - DNA, 396 bp, Setaria italica
  Peptide Sequence Number=SeqID_69879
gttttggcctggcgcatgacaaggcggaccttgcttgtctccttgtgcttcaggagtttgacggtgccagtgcccctctccttccactggttgccgtccttgtcgaacctgtagagcttcgccttcatgtcgaggagaacatcctcgtcctcctcgccggtcgtaacggcaacctcctcgagccgcacgatgggggccacctgggcgcccgtgtcctcctcctcccccgcggcggcggcggcggaggcgtcctcctcctcctcagcggccccggggcgctcggcgacgggctccttgtcggccatggggtggatgatcgcggtcgatgcgcttctcgattcgattcgaagaggacgcgacggcgggagggggacgggcagatgtctccagaagctt

SEQ ID NO: 3906 - DNA, 1310 bp, Setaria italica
  misc_feature (9)..(9): n is a, c, g, or t
  Peptide Sequence Number=SeqID_69880
ttttttttntttttttttttggttagcaggaaaacgtgtatattagacaaaatcacatgtacaaacacctgttctaaattatctccccgcgactagcgtcgcagaaatgatgtattgtatatagcacaaataaaaatatagaatgcatcttatatgaatttaacgcaatccataacgatccatgcagtgaaatactcgcaaactcacgtaccaacgttcccgactgataccaacggacttgttttcagcaaaatcaagcccagaccaaatccaaacgtagcctcactcagaacagcgatctctgtaaagcaaacggagctaccaagacacgactcgacgactctgctctgactccccccaaagactagaagcacatcatgcgcaacgagtaccaaacttgcacttgcgggaaggaccaacaaactgtttaagccatctactcagatggggttgccccagctttgctttctgcctccttgccagattctgttgattctgccttcacactttcctcagatttgctctcactcacactgagcttctccagcaatcccgcagtggatgaactgtcttcattttccttgccttcattctttgtaagcgactcagcaatctcatcaatcaagtccttaaacttcttgcagttctctacggagccaaaccggatagcaaacatctcctccttaagctcaccgtcagcgaaatccacagcatgccaaacgcaggacttgtcgctgccggcatgctcctgcatcttcgtggacgagaccacgagatgattggcgcagatctttagcgttttggcctggcgcatgacaaggcggaccttgcttgtctccttgtgcttcaggagtttgacggtgccagtgcccctctccttccactggttgccgtccttgtcgaacctgtagagcttcgccttcatgtcgaggagaacatcctcgtcctcctcgccggtcgtaacggcaacctcctcgagccgcacgatgggggccacctgggcgcccgtgtcctcctcctcccccgcggcggcggcctggttgacggtgatgttgcggccgtcgagctccttgccgttcatgttctcgatggcttcgagcatcgactgctcagtggagaaggtgacgaagccgaacccgcgggacctcccagtctcccggtcggtgatgaccttggagtcgacaacgtcgccgtaggaggcgaaggcaagctggagggactcgctgtcggtggcccatgcgaggccgccgacgaagcaacggtactccacgtccgccgccgccatctcccttctctcccactgaaaaccc

SEQ ID NO: 3907 - DNA, 558 bp, Setaria italica
  Peptide Sequence Number=SeqID_69881
acagcggcaaattaagggtcttccagatgactgggtggatctcaagttgcaagtggcagtcaagaccaggcttgtagggatactaatggccatcgtgcctgcgcttattaaggctttgattcaaggacgacaagtggttgttgcccctttcaagacggaatcaacgtctgtgatggttagttgcgacaagtgatggagctgtgggccgaccagccccggctccagttctacacgggcaacttcctcaagggcggcgccgtctacgccaagcacggcgggctacaagttctcgctcaaaaaatagccgcgggattgtaattgtatcgtctggatgtggggtgcgtgctaggctgcgactgcgagtaataaagagttcttgaaagttgaaacttgatcgtgtgtaatttaagcaagcagtgcaggcttcgcctctgtctagctcaggagctgcagcaaagatgtgtatggctagtttgcttgcgatgtgtgctagcaaggaggcgcaggaagaatgaatccacactgcatgtgtggattcattcttgattccagtggtac

SEQ ID NO: 3908 - DNA, 457 bp, Setaria italica
  Peptide Sequence Number=SeqID_69882
cgtgctcgtgctaaaggtcagcgggggaccaaacgcccagagggtgctcgcagtctgcccattgtgacagcggcaaattaagggtgctccagatgactgggtggatctcaagttgcaagtggcagtcaagaccaggcttgtagggatactaatggccatcatgcctgcgcttattaaggctttgattcaaggacgacaagtggttgttgcccctttcaagacggaatcaacgtccgtgaaagggccaatcgatgctgaaactgcagcttttcagcttgtgtggacgactgcgtcagtttcttggagactgtactgtacgccaccaagcacatttaaaggatgctgcctgtctacgatcgagaaactgaagaagcctgctgtggtcgcgagctgcacttgattatagccagtaagcgttctactaaatacctgctcagagtccaagtgtttagttcca

SEQ ID NO: 3909 - DNA, 1235 bp, Setaria italica
  Peptide Sequence Number=SeqID_69883
ctgcctgtctacgatcgagaaactgaagaagcctgctgtggtcgcgagctgcacttgattatagccagtattagtagcatggatgttgcgtgcagttcatttcaacagaactttcatatttgaacatagcagccacaaagtctccgggtacgtgcgaaaatccgccacagcctactctggtgatctctccgtgcttaatttcctctaattgctggacatggtgcagtctgtcttaggaacatggtactataccgccacagtgtaaacgggctgatgatgtcccactacttcctctctagtgctcaacaaatcaaagtagaaacataactgcatgatgaagtttcatatggaaaagttgtgacaatgaagcaaccattcacatggaaatgaacagaccagctcagtttccgtagtgatcagtcgaaaaacaattccctggaaatgcgcgcctaagcgtaacagcaagttcaggccattcaaccctcctccagtgctatatatacaaggtggaggagggccagttgagcgccagaagcaccagcagaagctccagtgttattccctgaataagccatccatctctcggtttgaatcgaagaatggaggggaagacgacgagggcggcggttcttgccgccagcctgctcgtcctgctgctgtcaggccagccggcgccagtgtccgggtccgtcatgtcaagtacaagtactgcaagtgcttccggaagtgctacactccctgcaggaacaacgaccaccagcctaggccggtttgcaagatcagatgcggcggcaaatgcatctttcaccacgaggtgaccgcagcctcggcggcggcgacggggcatgcagagagatctgcctggcatccgtcggctgcagcacggacgccgccgcaatggtggcgccatggctgcagggctgaccgacgccgacgtggcggcttgcgtcggtggctgcacgggctactacgggaggctgaaggccaagcgcgtctaggaactgctgatcgagaggttgatgcctgaactgcgacggccagtttgattaaataaataaatgtaatagtgcggccttcctttgagatgtctggttctgaaccagtttgatatgcttgtaattgttagttactgaatataaaataacacgtcttctacgtgatcgatactattcaagatcaggagccagattcattacaacatttgttaaaattttaaaacaaaaaaaaaaaaaaaa

SEQ ID NO: 3910 - DNA, 866 bp, Setaria italica
  Peptide Sequence Number=SeqID_69884
cggactcgcgtgctcatctgtcgcggcgatggggcatgttcaaggacaaggagctggcgtatcttgtctcgcgtctcaaggacgccacctacgacgcggaggatcttctccgcgagctggatgaccaggtgttgcggaagagaatagaggacgccgaccggagcagagcaggtcaactgttatcttcctctcttaatcttgcaaaaactttggtccgccgtagcaaaacaaggattagggagacacaagataggcttgaaaaggttctggctgagatcgagtggatgctgaatcatatgggtcttatgagtgttgagctatcgcagaacatgccggagacaagttcggtcatcagcgctccggaagttgttggtcgtgacggtgaacgagatgctttgatcgagatgcttggtgtgatgattgggcgtgaggtccaacaggatcaggtgatcaaactattgggagtgccactcgctgggaacagaggtggtactggtagaactgcagggtctaatgggaagagagcagcagcaagcaatggtgttgcatctacatccagagccaagcaaccaaaaggaaacggtggcagggctggacttgctgaaactaacttcaccaacaatgtttctgtcatctccattgtcggcattggcggggtggggaagactaccctggctcagttcatctacaatgatccaagggtgaaacaccactttggtgtcgatgatatgggtatgtgtctcagacttctttgacaagagaaggataacaaaggagatcattgaatccatccctggtgaggaatacaactcatcaagcagtctaaatgctcttcaaattgaattgatgaagcggctgaagatgtg

SEQ ID NO: 3911 - DNA, 247 bp, Setaria italica
  Peptide Sequence Number=SeqID_69885
ttctctttgattggatgcagcatcttcaccgcaacctcgtggtaccggtcataatcctccgtccactgatggtgagttgctatccagacatccccaaacgggcctctccctatccggtgcttcagattcagcacgctcgggtcaatccacgggcttatctgacttggaccggagaagaccatccggtagatatcagggtccttctcaagcagcatgtactcgaatgcatctgtgggttgtgagtcgg

SEQ ID NO: 3912 - DNA, 253 bp, Setaria italica
  Peptide Sequence Number=SeqID_69886
ttttttttttttaattttaacagcagaccgaattcaatcattcataaaacaatatccagggatatgctaatcatgtttgaagtagtacagacaatagaatcattggtagacctaagacgttttgggctcaggacagtagcaagggctgaataagtagcagagccaaaatacttatttataatcataaacagcaggataacaaaggctacagatgaaaacaacaatcttgggctcaagattgggcaagatgctg

SEQ ID NO: 3913 - DNA, 414 bp, Setaria italica
  Peptide Sequence Number=SeqID_69887
atcccggtggagccagttctgaaaatacatgaggggcgaccaaatgccagagatatgctgaaaccaaggtcctggaatcctcgtccaatctcagcaaggtgccgttttgtcaggtcattgaggctaaggaacacagtgccacttaaagtgagcttctgtccagcagcaatctgcgccttggcaaaggcaccagagaactcgtagtcaatgcccatcacctctccagtgctgcgcatctctggtccaagaagaatgtcacaaccttggaatttctcaaatggaagaacagcttccttaacagatacgtgcttaggaaccacttctttagtgaagcctagttcatgcaaagtcacaccagacatgaccaatgatgcatatttagccaatggatgcccaattgcctttgacacaaaa

SEQ ID NO: 3914 - DNA, 1269 bp, Setaria italica
  Peptide Sequence Number=SeqID_69888
gagggcgagggcaaggtgaggcttggcgagtccggcgtcgcggtcaccaagctcggcatcggcgcgtggtcttggggcgacaccacctactggaacgactccgagtgggacgaaaggagactgaaggaggcgcaggaagcattcgattcgagcatcgataacgggatgactttcttcgataccgccgaagtgtacggtacagcgctgatgggagcagtcaactctgaaagtttactaggaggattcatcaaggaaaggcagcagaaggagcagattgaggtcgccgtcgcgacaaagtttgctgccctcccatggagatttggccgaggaagcgttctttctgcactgaagaaatcgctagaccgtcttggcctaccctcggttgagctctaccaacttcactggccagggatatgggggaacgaagcttaccttgatggcctggcggatgcttatgagcaaggccttgtgaaggctgttggagtctcaaactacaacgagaagcgccttcgggatgcacatgcgcgcctgaagaagaggggtgttccacttgctgcaaaccaggtgaattacagcctgatatacagaacccctgagttgaatggtgtgaaggcagcttgtgatgagctcggcatcaccttgattgcctattccccaatagcccaaggtgttttgacagggaaatacactccagaaaatccccctaccggtcctcgagcaaatacatacactcctgagttcctcaccaagctccaaccactcatgaacaggatcaaagagattggagcaagctatggcaagaatccaacccaggtgtctctgaactggctgacctgccaggggaacgtggtgccgatccccggggccaagaatgccacccaggccaaggagttcgccggtgcgctcgggtggagcctgaccggcgacgaggtcgaagagcttcggactctggcgcgcgagatcaagggcatcaagatgcccatcgaggagtcgtgaatactttgcatttcaccatccaatggaatgtcgctgataggagattaacgttcttttataagggagaaaaaacactaagatgcagaaatgaaacagaagtttcagcatgtgtaagtagaaaatggttatatgtagctgccattggttctcaacctctcacgcctaaacactgtaagatatgtaatgtaagtatgtagcatattcatttgccaaaagcagggttgcaggggtggcacatccaaaagtaaaaaaaaaaaaaaaactagaagacta

SEQ ID NO: 3915 - DNA, 378 bp, Setaria italica
  Peptide Sequence Number=SeqID_69889
ttacggtaaggaacaacacggtgctggatacacatgggggcctatgcagctatgctgaatgggatgcagtggactgaaaacggcctgctcggcacagccgctgcggctgcggctgcagcagccacaacagaagccagcagtcgctacaggacagcagcagcttcttcaacaactgctcccagccagctagcgcagctgtactgctattttggcatgcagccgaatggctgggctgcacaggcagcacagctgcagctgcagccgctcaatgagctgcagcaaagtgtaattatgggtccagtgaacttcttctatgaatgcagacaatatggaggctgcgcaaggagaacaggttgctcaagaaggaggacggcgaca

SEQ ID NO: 3916 - DNA, 881 bp, Setaria italica
  Peptide Sequence Number=SeqID_69890
acaaaggaagctgttcctctccgaccacttcgacctgcagagcgcccacaccatcgagggcaagtgtgttgtacactctttcaagaactacaccaagctcgacaatgtcgggcccgaggacttcttctgccgattcgagtataaggcggcgaccggctcatttacccctgatcgtgtcgcagtgtattgcaagtgtgagatgccgtacaacccagatgatctcatggtacagtgcgacgcctgcaaagactggttccatccatcgtgcatgggcatgaccattgaacaggccaaaaagctagatcactttgtttgctcagactgtgtgaaggaaaatggatcaaagagactttcaaatgcatatgctacttccccaaattctgagcctaaggctgaatcgaaaaggcagaggaggtaacacaactccgagtgccagcatccatcgctgaggagacgcgctgccttccgtggcgtaccagcagcccttggcgtcactagagcggaggtgtacagtgcagtgcagtagaacaagtgtttgcggaacctttggctccgtcgttgtgagccgtcaggcattatgccgtgttatcggtggtacggttttgctggtttcagtcggtgtggcatgctgttgtaccgaacaggaaaacagccgcggtcgtgttggcttgtcggattagcagctgcttgtgcattgtgttgactgaactgaactgctgccggacagttccctctgtggctgataattcgagtcatgtgggtatctcctctgggctctgttgctgcagagcccaaactttcatcaaagttgccgtcctgttgttaccaaaaaaaaaccaaaaccccaaaacccaaaccaaaccaaccaaccaaccaccaca

SEQ ID NO: 3917 - DNA, 449 bp, Setaria italica
  Peptide Sequence Number=SeqID_69891
catcacctgcggcgccgccgccgccggagcggtcaaggaaagaggagaagaagcccaagagaaagatccaagagaaagagcatcagaacttgatccccagtgtcaagaagtcatctgcaacggtgcttaaatttcaaggtggcactttggtctcgagccaacacaagaggaagcttaggtgtcttgagctatgccctgctaatgatcagcttgttgttaccagtgcgttggatggattggttactttgtggcaggtggagccaagaggaccttctatctcatttcgcggcaaaacagattgcttttccccaaagcatagatggcctgaagatatagcttggcatccagatggtgacacaatttttgcttgtatacactgctgataatggtgattctcaggtttcaatgacaaaccttatatcaggacagaggaaggttacttcctacca

SEQ ID NO: 3918 - DNA, 1325 bp, Setaria italica
  Peptide Sequence Number=SeqID_69892
ataggtgttgaaaagatgcataaggataccaagtatgtcttgtttcttgacgatgatgtgagactgcaccctgggacgattggagccctcacaaaagaaatggagaagaatcctgagatatttatacaaacaggatatccccttgacttgccttctggcagtttgggcagctattgcatatatgaatatcacatgccttgctcgatgggatttgcaactggtgggaagactttcttcttgtggggtggctgtatgatgatgcacgctgatgattttaggcaagaccgatatggtgttgtcagtggattaagagatggtggttactcagatgatatgacattggctgcaatagcaggacagcacaaaaggctcatatcctcacctcctgttgctgtgtttccgcaccctcttgccagtgatcttagcttctccaggtactggaattacctcaggaaacaaacttttgtccttgagtcatatgtgtcaaatgtcaactggctgatgaaccgtgcattatttacatcgcattgctatttgtcatggggatttgtttggccctatattatggctttggtgcatcttttgaccgctctgcgagcgccgtacagcaaaattgtaaaggaagcatctgattcatcttggggtttgcacctagtgggcctcttgtttatatgcactctcatagaacttgtttcaatgtggaatttgacaaaggtggaaattcaactgtgcaatatgttgtctcccgaaggaccaaatgtatctcttgattcatacaactgggggcttgtgttcattgctgttttggtagacaattttctctaccctatatctgcattccgatcacatttctcccagtcaattaattggtctggtatcagatactatttgagagatgggaaaataagcaagatcgaaagagagaacaggtcgaagtatactgatcttggagggaagcatctatatggcaagaggacatacccctctaataaatcattgcttggttacctgtcaagaactttagcgcaatggcatcagccaaagaaatatgatgtgtaggaaatccaaccaggaattcacccctcaatttgatggggcctcttgttgtacactccttttgtttcatccttttctccctccctccctccctccctctttcccgctccctctttctttgattgtttattgattattaggttcattcatattaatcaatgtggtgttcaagcggcaccacttgaaaggtttgcacctcatagttcctgtaacattatagatatgtaacagcctgattgaagaagtgaaatgttccatattgacaaaaa

SEQ ID NO: 3919 - DNA, 1463 bp, Setaria italica
  misc_feature (1308)..(1463): n is a, c, g, or t
  Peptide Sequence Number=SeqID_69893
cccagccagcccaaatcaaccatcgcctcctctctctccccacacatcggcagcgcatacaaatttccgacgagaccctagcttcgatttcttcctcctctcaccgctcagacaggtcaggccaggccaggccccggcggggagagagatccagcgagagaccgcggcctctcgctcctcctcccctctccagaagcgtctagaagcttcgggaagggaacccgccgcggctcaaaggaggggagggaacgcccgcgggcaatggcggcgatggaggccgccgccgacgctatgctcgccgccgcgagccgcgccttctctagcacctcagccatcgccatccagatccagggttgcgtgatctgtttagtacttgctcttggatgggcggccgcttcaattgtcagaaaaagggttatactgaacatgaggcgcaaacaattagatggaaatagttttgcatttctttgtgatgacatagatgagcttgagcactccgttcaggagaatttacctagagtctctgtaattatgcctttaaagggctttggcgaacataatttgcaaaattggcgaactcagattacatcactttatggtgggccactggaattcctgtttgtagtagagagcaaagaggatccagcttatcatgccgtttcccgtttgatctcagagtacaaggacaatttggaggcgaaggtggttgtggctgggttctcaacaacttgtagccagaaaatccacaaccaattgataggtgttgaaaagatgcataaggataccaagtatgtcttgtttcttgacgatgatgtgagactgcaccctgggacgattggagccctcacaaaagaaatggagaagaatcctgagatatttatacaaacaggatatccccttgacttgccttctggcagtttgggcagctattgcatatatgaatatcacatggtatgttggcttctcattaaaacttaatatcctgcaaagttatccaatgaaccaacgttgtgggtgcctgcctgtgctttcatgaagtacaagaaagttgaactgaaattcacttcacagtttgatggggcctcttgttgtacactccttttgtttcactactaaccaaccgaccgaccgaccgaccatcacgaggtccctctttctttgattgtttattgattattaggttcattcatattaaattttgtggtgttcaagcggcaccacttgaaaggtttgcacctcatagttcctgtaacattatagatatgtaacagcctgattgaagaagtgaaatgttccatattgacaaannnnnnnnnnnnnnnnnnnnnnnnnnnnnnnnnnnnnnnnnnnnnnnnnnnnnnnnnnnnnnnnnnnnnnnnnnnnnnnnnnnnnnnnnnnnnnnnnnnnnnnnnnnnnnnnnnnnnnnnnnnnnnnnnnnnnnnnnnnnnnnnnnnnnnnnnnnn

SEQ ID NO: 3920 - DNA, 276 bp, Setaria italica
  Peptide Sequence Number=SeqID_69894
tattatcacgtaaggccctaagaagcctccctcttttaatcatgtgggaagtttggaaagaacggaatgcacgtattttcaacaggcacgagacctcaccaacgactctgatggcgaaaattaaggatgaggcctcagcttggctcttggcgggggccaaagatttagcgttacttctaacacgcgagtagtcccttaaggctcccctttttttccttttccttctcagtttttttgtttattcctgtactttcctgctctatcaatgaaataggc

SEQ ID NO: 3921 - DNA, 854 bp, Setaria italica
  Peptide Sequence Number=SeqID_69895
caaatcccccagtgcagccgcggctgctcgggcgcgcagaccggaggcgcgcggccccacaccgtcgccggcggcgggcgacggggaggctggagcgggggagcccacggccgtggagcggcggccggaggccaatgtcggtggagagagaggcccgccagcgaaatcgccgagggtacggggctgattggaggtgtgacgcgtaggggagatgccacgtgccagagattctgatattagagactgaagttctgcaagtccttgtttctgctcttaagcgttagcagtcgtgttactgttgaggggttgggagccatggaatcacggatggatcagtacgaggttatggagcagattggccgtggcgcctttggtgctgctatcctcgtcaaccacaagacagagaagaagaagtatgtgttgaagaaaattcgccttgctaggcagacagagcgatgccgcaagtctgcccatcaagagatggctcttatcgctcgcttgcaacatccttacattgttgagttcaaggaggcatgggttgagaagggctgctatgtttgcatagtgacgggatactgtgaaggtggcgatatggctgaattgatgaagaaagcaaatgggacatacttcccagaggagaaactgctgaaatggttcgctcaattggcattagctgttgactacttacattcaaactttgttttacatcgagatctcaagtgctcaaacatatttctcaccaaagaacaagacattcgccttggagattttggcctggcaaagactttaaaggcagatgatttaacctcttcggttgtaggaacaccaaattacatgtgtccggagttgcttgc

SEQ ID NO: 3922 - DNA, 774 bp, Setaria italica
  Peptide Sequence Number=SeqID_69896
atggattgtataaccatttgttcaattatgtgtgtatcttgcactgaggaaactggatatccccaaaatggaataacgatgattttttttgttaataccgtaatacgtatcggaatgtgaacatataaccatatgaagattcgctgctgtcagtggatcttaaagcatgattaccatatgattatattcttgaatcgtggtttagatgcattgtacagtatcatactcttcgtaattgttgtatgtagtccctacaatgaatatttgtttttaataattcttgaagtataagtgacatgataatgtgatacttagaagttccacattcttagtattttccaccttcaaacaaaaaaaaagggatgctcattctgctgttgagtcctgttactacaagtctgtgtacttgtggtgagtatccaacctatgttaatttccttgttctacgagatcttttaaaataaagcagaacatatatatacagaagttgtggtgccatgttcctagtatatccattatgttaaataatgctgaatttgctggaagattcatttccaaattctcctcttttgatattcatggtgaccaataagtagtgctcatatttatggatgagggccgcatatatgctgaaggataaatttgtctctgtttctacttttaattgcatggataaattaaaataaaaacgaatttggttaaactaactgcttgttcgataacgctaatggagcttttctgatccaaataaggtattctggcttgtcttgatgg

SEQ ID NO: 3923 - DNA, 1119 bp, Setaria italica
  Peptide Sequence Number=SeqID_69897
gcaagctgcgggcaccatctggtttatgttaccactgggcagctgttcaggactccaatggcactggccatcctatgtctcagcagatggctttgtgtgaggcaactacatcctcggcacatgctctgagagtccctgtaacatcctccgcattagagccttttgatgtccaaacagctagtgaaacttccgttagctgttccgctaagagacagctatgttctgatatgaagggtgtctctctggttgaccaaaccagatccagttggcaaaaaagcccgtttcagcagttgtacagagcacaatggtcatcaggatagcgcatcttgccaagcatcaactgaccgccataacatgatgtcatcatccacgatagacttatcaaagcagattgatcccattttttccaatgctttgagcacccattgtatgatcacgaaagcaatgcctacattataccttgggtgctcatcattccaagttgtggttctatagatctcaatgtcgcattgcagtcactggattcttctgatgactatactcctagaaaggttgtcccgcttatcatagattccaagactccttggcagctgggattccagccgagcaatgcctatcttaattcatcattgttaatggaaaagatggtgctggtggatgatggtgtcaatgataggatgccatgcttcattcattatattccaaagtacatagaggtcttgacagttgcagtcaaattgcaatttattggccagtcagagatggcaatggatttatttgatgcgatcctgaggcgtttcaagcagctagaagatgcattatgtgttggccaaccttgtgcttgttggagacattttgttgaatctgacttcgtggcatgttcactattattataacattgtggtgtttcccttttcatcaatttgatcaatggcacaatgagtttcatttccacccattatttttatccaatgttcttttgaatcccttttgtaacaatttaatgttatgttactatctgccaattcacagggatccatacttgatgggtcattcgatatcatggccctatccatacgcgaacaatttttggtcggctatgatgtcccccactgcaag

SEQ ID NO: 3924 - DNA, 544 bp, Setaria italica
  Peptide Sequence Number=SeqID_69898
gatatccgtgacctaggaccaatggatgaggccatcttcaatttggtaaacaacgttatgcctgccccaaatcaaataccgtccatctatgacatgcaagaggtttgccatctgttcattgttcatgcaatcagcattcttactcggcgccacggagttgcaaatttattttgatgctctagatttactaagtgcctgagcagaagcttcgatgagcaattcatgcgctactgtgcatttgctgttctatagctgtgcatatcagtgttcatttgagatgcaattctgtagcaggattatacacggctaaacattgctactgaaattagcggttgatcctactatttttgcagcgcacggtggacggcaagaactactggacgtttgagtacgatctggaggcaccgggctacggcgtttctgcctttgcaacggtcgccattggaaacggtaggatgatgcctataattaaactacaaaatctaggtcggctcgtgtgttcccgtctgaataaaaggggatggaactctgtattattcttacc

SEQ ID NO: 3925 - DNA, 1124 bp, Setaria italica
  Peptide Sequence Number=SeqID_69899
tccacccacacattcaacactggaaaaaggaagcgtgccacggtccagctgctatggataactgatgctggggcacaaacttcacagaaaacttcctcgagctcagtgcttgccttaactattgaaggtgaaatggcaagcctgcagaatctgatttgctccgtatccaaacaattggttgccccgaattatgcggtgactgccaaactgaatggggctccaccctcggttgtctcagcaagctcaagcggagcatcctctgatcaaaagaatgtcacgaaaaggcagttagctttgcttggtgctggagtgttagccactggcctactgaagacaagctctgcaattgctgaagaagtaccgaagaattacaagtcttatgtggatgcgaaagacggatactcgtatctttatccagctgaatggagggatttcgacttcttgggtcacgattcagcattcaaagatcgtaatctggctcttcagtgtgtccgtgtgggatttattcctactgagaaaacagatatccgtgacctaggaccaatggatgaggccatcttcaatttggtaaacaacgtttatgctgccccaaatcaaataccgtccatctatgacatgcaagagcgcacggtggacggcaagaactactggacgtttgagtacgatctggaggcaccgggctacggcgtttctgcctttgcaacggtcgccattggaaacggccggtactacacgctgatcgtgaccgcgaacgaacgccggtggagcaggctgcggaacaggctcaaggtcgtcgcggattctttcaagatctcggatctgaccgcgtgattgctcgctttcttcgttaactataatgtaatacggtctcatgagtcatggtacatgtactcatggtgaagggaaatggtgtaccttccgtggtgataatccgcgcgctcctaatcatgcttgaaatggatcattaggtgcaaataaaaggtcataaactgattgcgactgttttgtacattcggtgaaaacagcattcagtccaagtgcagggttatgccaacttagaaaacatccaaataaagcaacgggaaaagggaaacaagaattcggccaactaaaaaaaaaaaaaa

SEQ ID NO: 3926 - DNA, 766 bp, Setaria italica
  Peptide Sequence Number=SeqID_69900
aaccagtacgagttcctgatccagcgcatgggcggcccgccactgttctcccagaggagaggtacctaactatttcctactagcttgccactcctcgtctgaagactggtgaggaggtgcatgtgacgattgagctcatcagccacttactgaatttggtcaaggaggaagtcagggatgattcgtcttttctgaattttgttggatttagggcgcgagctgtttagtttcgccttagtgtggaggaatcgttgctttggtctccttgtgcagccaatcgtgtttctgaaacctgcaaagtacatggtcggatatgctattctttctgcagattatgcacttcccatcgacgatgatgtttatgagtcttatgaaattgtggaatcactcaatgctttatagtatgaaataagatgaatttggtcagcatatgaaaacaaccaacttgatggggaacaattacttaaaaatcctcactttttttgtgagaaatgagtgcctgtaattcagccctatttacattctcattagcgttttcagtctgaccttctgccgatatttctttttttgagaggaaccttctgtgttctgtcgatacttctttcatttaaccagcagcataccactgttacagtagtataatatgtattccttcaagtgattcaattcttttaccatatatttatcagcaatatttgtttgagtgcttcatgtcaggcagcctgctagcacccaagaatgatctttgttctcattcgtaaactgt

SEQ ID NO: 3927 - DNA, 919 bp, Setaria italica
  Peptide Sequence Number=SeqID_69901
acattcctcttcctccggcctctggcagcaagtcaagtcaactcagccaacaagcgccgctgcggggtcaggcctcgcgggacacacgggtcagaccggacaggatgcagtcgctgcaggacaaggcgtcggagtggagcggcgtggccgccgccgacgcattcgccatcgacgacggcaacatcttcgagtccctcggcggcaccccgcagcccttcgtcgacctctccaccaacttctacaccagggtttatgaggatgaggaggagtggttccgggagattttcgcggggtccaagaaggaggacgccatccagaaccagtacgagttcctgatccagcgcatgggcggcccgccactgttctcccagaggagaggacatcctgcccttataggacgacaccggccattcctggtaacccaccgagctgcagagcggtggctgcaccacatgcagcaagctttggatacaactgaaagcatagatgctgactcaaaaaccaaaatgatgaactttttcaggcacaccgcttacttcctcgtcgctggcaatgagatgacaaggcaacatagccaaggagtagcctgcaaacatgcagcaagcaaaccagctgagtaactctattctagccatggagctagtaaccatctgaataacgaatgatgcaagcctttgcccaccgcgccattatagaatcccatacgcaacagagttcgaaccacttccacattcaaagaaacagttgcgctgactctttgtaggctttatagccactcttgatcagagagcactcagaattgataattttagctcattccagtatatgtttactctgctttgtctcttgtgcttgagagttatcttcataatgctacatgtgaggatgtctcttttgcaaattctatttcgcttaaacg

SEQ ID NO: 3928 - DNA, 813 bp, Setaria italica
  Peptide Sequence Number=SeqID_69902
ttttctaagaaaactaaaggaagcagattaaagcacatacctgtcaggaaaatggatgccaacagcttgaaacagtccgacagtcagatggagatcaggaatacagatatagagatcacactggaacatgttagaaggtttcaaatggaacagcctgggttcttctatgctataaagactgatgatcgcaacactgtaagaagtatattttggacagatgcacgagctagacttgattatgctttatatggagatttcatctcgtttgatacgagttataccactagagaacacaacatgctgtttgcaccattaattggaattaatgggcatggtaaggcaatcgttttcggtgggttgcttgaaaatgagatggcagataaggcagatacattttcttggttactcaggacattcttggatgtgatggatggcaagaaaccaactacaataatcacagatcagggttcagctatgacaaaatcaattgccgaggtattccctactgttttcataggttcagcatgtggcatgttatgaggaaagctagagaaatatttgaagattttatggaaaatggacctgtaatggaagctgatctgacatgtctgattgcaaattgtttaactatagaagaatttgaggatggttggaaaacaatgcttgagaaatacgatgcaccaccaaatgaagacttaaatctcatgtatcagacaagattaatgtgggtgcctgtttacttcaagcatgccttttgtccatttatacgatccactggacgtagcgagagcacagatacaatcttcaaggaga

SEQ ID NO: 3929 - DNA, 254 bp, Setaria italica
  Peptide Sequence Number=SeqID_69903
ggaagaagtgcttgcttaggccatccctggtcacacctgataatcatcagcacaaaggcatatagatgcaagaactgtgttagaaccttagttggtgggtgggctatgtttcttgaaagatgcaacaaacctctggaaaagataagagatagaaaggaaagaaacctatttggaaacttcagaagcatcttaccatcatgactgagaggagagaggtagatcagggtaggcacaactttccataaacaataatt

SEQ ID NO: 3930 - DNA, 377 bp, Setaria italica
  Peptide Sequence Number=SeqID_69904
acgtaaagtgtggtgcgctgacccagagcgaagagcaggtatgtgattatctcaatctcatcggagctgtttggactgaagcacttcggaaagatatacaacttcatcgcgctggccaatccagtcggtgcgttcctgttcaacacccttgcagggtacgtctacgacctcgaagtggagaaacagaaagccggaatggtagacacagatatcgcgtgccatggccctaattgcttcaggctcacgttttatgttctctctggtgcggcttgcttgggcacactgctgagcacggttcttactgtgagggtccggccagtgtaccagatgctctacgcaggtggatcctttagccagcccaggacctctgcacattg

SEQ ID NO: 3931 - DNA, 1268 bp, Setaria italica
  misc_feature (5)..(5): n is a, c, g, or t
  Peptide Sequence Number=SeqID_69905
tgctnttgctggcattcttaaagggtattctggtttaagtgctgctgtctacactgaaatatatactggagtgcttggtgattcacccataaaccttttgctccttctcactctgggagttcctgctatatgccttctgacaatgtactttgttcgcccttgtgaaccctctctggtggagaccaatgcagagcaactccatttcctgtttgctcaaattgcgagtattcttcttgggttttatctggttggggctacgatactggatcatgtcgtgactctcaatgacattatgaactattctctgcttgccattatggttcttctcatttttgctcccctggcaataccgttgaagatgacgttatgcccaaagagaaaaggaccatcagattcgtcagataatgatcatacagaatcacttctgccttcttcctctgaatcaaaccttggtaattttgaagaatatgattcaacggatatcgacattcttttagctgagggtgaaggggctataaagccaaagagaagaagaccaagaaggggagaggacttcaggtttcgtgaagcgattctgaaggcagatttctggcttctctttgcaatatactttgttggggttggatctggaatcactgtacttaacaatctagcacaaataggaatcgcagcaggtgctgtcgacacaaccatctcactctctgtcttcagcttctgcaacttttttggacgtttgggaggtggtgctgtttctgagtattttgtcagggcaaggacacttccacggagtgtactgatcatatgcacccaagtagtgatgataatcacatacctgctcttcgctctgggtcagcgcaccacactttacgtctccgtcgccttactcggcatatgctacggtgtccaattctctgtgataatctcaatctcatcggagctgtttggactgaagcacttcggaaagatatacaacttcatcgcgctggccaatccagtcggtgcgttcctgttcaacacccttgcagggtacgtctacgacctcgaagtggagaaacagaaagccggaatggtagacacagatatcgcgtgccatggccctaattgcttcaggctcacgttttatgttctctctggtgcggcttgcttgggcacactgctgagcacggttcttactgtgagggtccggccagtgtaccagatgctctacgcaggtggatcctttagccagcccaggacctctgcacattgataaacagcgatacaaactg

SEQ ID NO: 3932 - DNA, 374 bp, Setaria italica
  misc_feature (17)..(17): n is a, c, g, or t
  Peptide Sequence Number=SeqID_69906
gttccttgtgtaccacngggaaaaaacttgcagcattttcagattctatggaagtttcttcaacatgtcggtccaaagataagcagcacattcgaagtatatgcttcgcacacaagacaaagtggtgttaataacaacaaattgtaaacattaccttaaactgtccagctcaaatctaatgaagcgggagcttccacaagttgtagctgtgagtgaacatcactatgaaggtgaaaaaaagcttgagttacagctcaaaatttgcacaagatctatgagctgatgaatgactcatctgtttgactacagactataaatttctgatttgtcttgtattgtatgagatccatctcatggctcctttctttgttatc

SEQ ID NO: 3933 - DNA, 982 bp, Setaria italica
  Peptide Sequence Number=SeqID_69907
ttttttttttcgtcacacaaagacaaagtggtgttaataacaacaaattgtaaacattaccttaaactgtccagctcaaatctaatgaagcgggagcttccacaagttgtagctgtgagtgaacattcactatgaaggttgtaaaaaaaagtcttttgttagtttttactttagttgttacacctcaaaatttgcacaagatctatgagctgatgaatgactcatctgtttgactacagactataaatttctgatttgtcttgtattgtatgagatccatctcatggctcctttctttgttatctcttgatttcatattgtttgatgctttactttgacatatcaatgtgacaacagcaagaggcagcacactttgcaagtgtgatgctctcacttaataaatggtaagccagagtgcactctccgcgcatattcttcgtattcagagccaaagaattgcctcaagaaaaattcttcatacggtatccgttttgaaaagaatcgccacagcaccaaaatgaatgcaactgttgatactggattacagagcataacctgggttcctactgcccatataagaaaaccagaatacccaggatggcgcataaacctatacaccccatgggtaaccaactgatgctgatcttcatgataaattcttataacatgcgtgaaggcacgcccagctgtcacaacagcaactttacggacaatttcaccgataagcaccattagaaggccaatattactgataaaccagtactcctttatttccgggaagataaggatttctgtcagatgttccagcattgcgaagctcattgccaatacatactgcttgctgataagaagtgatgtggcggtgacgttccggcggccgtggaaagcggcggcgagcacgtactcggagccgtggaagaagaccagcgcggccgcgaactgccacgcttgcctccaggccgacatggctagagccgggatc

SEQ ID NO: 3934 - DNA, 461 bp, Setaria italica
  Peptide Sequence Number=SeqID_69908
ttgggaccgaacttctccttgagttcggcgaactgggactcgccgaagctggcgctcgagcttgggcgagaggatgacgaggtgggtgcggttggtgtagggcacggcctcaaggtggccgaagtagaaggcgaccgcgccacccccggtgatgaggaccgccgcggtgagcttccgctggtcgtggtaccaccgggagccgccgcggcggcggctgaagtggatgacctcctgccgccgcggggaggtgtagtagtgcctagggccgggtaactgcggcggcggtgtggagacggcgggcttgtggcggaggatgcgggaggcgtagaaagagtagtaccgagaggccggcgactgcggaaccggcgccggagcaggtggcgcggctacgtggggcctgtggcggaggagtcgcgagaggacggaacgcgagttcctcaagcagttcatgctgctgtgtt

SEQ ID NO: 3935 - DNA, 2069 bp, Setaria italica
  Peptide Sequence Number=SeqID_69909
taggaagacaaccgaaaagcgcatgcaggctgaaaatgctctactttcccaggggaaggagcttgctcaatctcatgaagaggtacagaggttggctacagaaataaatatggcaaatgaaaagttgaatgatctcaagcagaccaaggaggaccttgagaacactgtttgtgagctgaagaaggatgttgagagccttactgaacaaaaccactcctctgagatgcttatacagaaacttcatgatgagataaacacgctcaaggattcaaagaatgaacttcaaagtgaaatacaaagccttaagagcatcatttcacagctaaacactgagaagaatgcagctcttcttcaataccagcagtgtgtggagcaggtttcagttcttgaatctcagctctcaaagctacaattagaggtagaagagactcggcagaaagtacagctgctgacacaagatcttgaacaagagagagaagaagcgaacagtgttcgcgcccagctgcaagatgaatgccataggcgcacacaaactgaagcaactcttctcatgacagagggtctgcattcccagttgcaggaaaaaatgaaaacactgacacaagatcttgatggatcgacggagaagctgagtgacttggaaaataacaagttaaatctggagagcacactgaaggaactgaagaacaccattctggatttgaactccgagaaggatgcagcacttcttgaacaacaaaagtcattggagaaagcatctgatttggagttagaactctcaaagatgcagttagaaatggagaagcatgaacagaaaatccagttactggagctagaaattgcacagaagaatgaaaatgtcgacagcttggagttgagtttgaaagatgaatgtgagaagaggctgcaaacccaaacatcacttgtgtcaatggagagaatgtattctcaatctcaggaagatgtgagtaggttgcatctagagattgagaagcagaatggcaagttgaatgagttggagaacttgtcatccgaacttaagaataccatactacttctaaatgccgagaaggatgccacccttcatgagaaccagcagtcctcagcgaggatatctggccttgaatctgaactcacggctttgaaagcagaactggagcaggttgaaggcaaagtacagatactgggacaagaactcaaacataagaaagaagaagcagataacctccaaattagcctacaagatgaggctcagaaacgtgttgaaggtgaatcatctctccttatgatgacaaatcttcactctgaatcacagaatgaagtgaacaggttggcattggaaattgagaagctgactggtaatttaagtcaggtggagaacagtaagatggatcttgagaacattgtaaccaagcacacagaggagatccatagccttcgtgaacagaatctttccactgagcttatgataaaggaccttcatcgtgaactggaagcattgaaggaattaaatgtgaaaacttcaaacagaaatgggattacacatagatgaaaaagaagtacttcggagagattttgcttgccaaagggaagagaaggaaaatctagaggggatacatcacactctggttgatgagatggatgccctgaaaaccagtgcagcaataaaccataaattaattgaggaattgcaaattatgaactcaaagctgaaggaggtgtgtgcaaagaatgaggttgaaaaggcacttctttctgaaaagctccaagaggtggagaagctatctgaagaatattcactcttggagaactcactttcagatgcaaatgctgaaatggatgcattgagggagaagataaaagcctttgaggcttcagaaagctctctgaaggatataatttcctgtcatgtttctgaaaaggctgttcttacatcagagctcgagatccttggtaaaagtttatctgatgtttctagagaagaattccatcttggatacctcattatctgatataaaaactgagctagaagatttgagaacgaagctgaaaagttctgaagaatcctg

SEQ ID NO: 3936 - DNA, 406 bp, Setaria italica
  Peptide Sequence Number=SeqID_69910
gccaactgaatgcattatacaaatgaattttaatcaagaaacagcagcacttacaatcactacctacatccctcttaacttttagctagattttgcgatcaatcagaaaatttcgccccggttcatcacctgagcatgtccccattgtctatgaacggggccagcgggccactgaacgccggcgaggcgctgaagttgcttccggcttcgctgaacatgaggctgtgcccgtacggcagcggcctgtccggcagctccggcacgtccatgtccccctccagcatcctcaccgcatcgccgatggtcggccggagcgccaccatcacgtgcgcgcacaagatccccacgagcacgaacttctccatgaccccgctccgggggctctcggcggtggacagcgcctcgt

SEQ ID NO: 3937 - DNA, 756 bp, Setaria italica
  Peptide Sequence Number=SeqID_69911
agaccaatgttttctcttacccacaatgcagatgttcctgatatttcttagaaacaatagggtaggggtgcgacaactgaaagcattcgcaatggcaatagtagttgccttactatgcaggaagaacatcaacagggggagtgtggacaatatcctcatccagattatgtttctgttgatatggttggtgaaagatctctgcatgatttgccacaggattttttcacaaaacaatgagcaatatgagatggagcagttcccacagaatatatgtgaaagtgattcgatgcagatgggctctccggatcaatattgcgatgatacatctttatcagatttttacatggatgtatcctcgccagagtcgatatcatgtgaacagaaccagtctgaagatatttgtttcaagagtgagtctagcactgactcttctccagtaccctctagcagaaactccaccacagaggatgctgataaatacttaggtcacatatcaaaacagttgctagactccaagtccaagtttatccctttcaataaccaacatccgtttaagaacataggatatcaaaaacctccggtattgcagaaacaatacgattatagaagcaacagttcctctattcagggcaattcatcaagaggctgcttcagtatcaatggggcttctgatttatgtgtgcttgagggtaataggaatcctgcttctgatccccgattgccaatccagggcaagttccatcataagttttcagt

SEQ ID NO: 3938 - DNA, 1911 bp, Setaria italica
  misc_feature (1883)..(1911): n is a, c, g, or t
  Peptide Sequence Number=SeqID_69912
gcggcccgcccgggtgagcaggtcagagctcccccaactcgcaagcggcactacactaccaccaacccccgcccgtagccgccgccgcgccgccatccacgagcgcagcagcggcgcgcccctcctcaccctgctggccatctgggttatttatacgggcgcaatcgcgtgacccagcggcattcggtggcgcacgctctcctcgcagccgcaccgcaccgggacaagggaagggcatggcctcctccacgacggcgctcggaggcgcggcggctccggcgcgcgcagggttggctccccagaatggaatccttggatctaattcgaagccattcgctggtgtcatgctcaagaaagctcagcaggttggacccctgtcgctccgtgtgaggggatccgctacttcttcaccaaggaagctgttctcccctaaggcagctgcagctaaatcaggggatggggtgcagattgcagtgctaggggccagcggttatactggagctgagattgttcgaattctggcgaaccaccctcagtttcatataaaagtgatgactgcagatagaaaagctggtgaacagtttggatctgtatttcctcacttgatatcgcaggacctgccaagactggttgcaataaaagatgctgacttttcaggtgttgatgctgttttttgttgcttgccacatggtacaacccaggaaattatcaaaggcttaccccagcacttgaagattgttgatctctccgcggacttccgactgcgcgatatcaatgagtatgctgaatggtatggccattcgcatagggcaccagaactgcaggaagagtctgtgtatggtttgaccgaacttcatcgagatgatgtaagaaatgcacggttagtagcaaatccagggtgttatcccacatccattcaacttccacttgttcctctggtaaaggcaaaattgatcaagttgaccaacattatcatcgatgcaaaatctggggtcagtggtgcaggacgtggggctaaggaagcaaatctttacactgaaattgccgaaggtatccatgcttatggaataacaagccatcggcatgttcctgagattgagcaaggactaacagatgctgctgaatcaaaagttacaatcagttttactccacatctgatgtgtatgaaacgtgggatgcaatctactatgtatgttgaattggcttctggagtgactgccaatgatttgtatgaacacctcaagtctacttatgagagtgaagaatttgtcaaactgttacatggtagcagcgctcctcgcacgagccatgttgcaggatcaaactactgcatcatgaatgtctttgaggatagaattcctggaagggccatcatcatctctgtcatagataatcttgtgaagggagcatctggtcaggctgtgcagaaccttaatctgatgatgggactgcctgagaacatggggctgcaataccagcccctgtttccctgatctttcatgtcaatacttcatccatgatgacagtacatgggagtacgacttccattccatcagagaactatctggaggcaaggagccccccattagagtgcaatcaagttaaatttgctcggaagtgtagcttgctttgtgtcattttattttccagagaatagtgacaacttagcagtgcaatgatagtattaggtgagtgtttcggttccaataaaatcataagccttgtactgcattgttgacttgtttgttatacccatcaaggaatcaataccgtgtaaactcaattctgagacattagacgccctcagcatcaatggatatagttagggtgtcttctgtatcatgttcaacaaatgttagctcactacagctatactttgtagnnnnnnnnnnnnnnnnnnnnnnnnnnnnn

SEQ ID NO: 3939 - DNA, 605 bp, Setaria italica
  Peptide Sequence Number=SeqID_69913
ctcgcccccgtcagacccctgcagtacgacatctcggcatacgttgatttccttgttcagcaggcctgcgacttcatcaagcaactgtacgatcggggggccaggaggattgcgatcctggggctcccgccgatcgggtgcttgccgtcgcagcggaccctcgccggcgggctcgccagggactgcgacccggcgcgcaaccgcgccgctcggatgttcaactcccggctgcagggggtggtcgcgcggctccagggggagctccggtgccagcggatcggctacgtggacatctacgacgtcctgcacgacatgatcacggacccctgcaggtacgggttcgacgtctcgacgagagggtgctgcggcaccggggacttcgaggtgtcgctcctgtgcaaccggctgacggcggcgacgtgccccgacgaccggaagtacgtgttctgggacagcttccacccgaccgagagagcgtacgagatcatcgtggactatctgttcccgagatacgtagagaagctactatgattgttgctgctgttttatcatggctactattatgaactgaaagtactgaactggcccaattgctgccatacaaa

SEQ ID NO: 3940 - DNA, 660 bp, Setaria italica
  misc_feature (628)..(660): n is a, c, g, or t
  Peptide Sequence Number=SeqID_69914
tgtccgtacttccgccgactcccacaaaccctagcctcgctctgttgcggcggcgggagagatggcgaagtcgctgcgatccaagcgggagaagcggctgcggacgctgcggcgggagattgccgagcccttctacgacaagaaggaggccgccaagctcgccgcgcaggccgctgcccttgaagctcccccgctcccagtccgcggccccccgccgtcccaggatgccggcagctcccgcgctgacaactcggcctcggccatggatgtggagatgtctgatggaggaaacagcaggtcgaaatccttgttgaagccgcttggcagcattagcaagaagaaggtacagcttcatttgaagatcaagaaagacaagagaaaagctaggaagaagggcaagttttcttttaagaagtagggccgtaaaagcctcttatcttgtgaaccatgcagttttgttgtcagttcgaacaacgcttgtagtggtagtgacgagcacctaaagtgctaaccatccatccttgggtggctacttatatgttgaaatgagtataccttgtggctatgaattccaagtaatcaaattgcgcaggttgtgtttgatttcaaaaaaaaaaaaaaacaaaannnnnnnnnnnnnnnnnnnnnnnnnnnnnnnnn

SEQ ID NO: 3941 - DNA, 388 bp, Setaria italica
  Peptide Sequence Number=SeqID_69915
ttttgttccgtcttgtgctcgaagcggcggagcgagcgcaggtgcagcagcatgccgcccaccatccccggcaccgccgccaccgtctccagcatcatcgcgcggcagccgtacctcctctggaagaatatgtcggtgggaaagcgcagggatttgacggtccagtaggcgatcttgtcgagcagcaccttgggcttgtggtgcctggtgagatcgatcgaggtgtccggtttgtacgactcccacggcctgaagcaagaccacctccactcgacgccgtccttgctcaccagcttggacggctcaatgccccagtagctgctgaccacgtttcgctcaccgcacccgaccacagctgcagcttcgcaagctcattccagagagatcc

SEQ ID NO: 3942 - DNA, 615 bp, Setaria italica
  Peptide Sequence Number=SeqID_69916
tttttagttttaccgtttctttgttgtcttcgtaagtcggtcggtagtcgtagtcgtctaggttgtctagtctagtcattgccgcccaccatccccggcaccgccgccaccgtctccagcatcatcgcgcggcagccgtacctcctctggaagaatatgtcggtgggaaagcgcagggatttgacggtccagtaggcgatcttgtcgagcagcaccttgggcttgtggtgcctggtgagatcgatcgaggtgtccggtttgtacgactcccacggcctgaagcaagaccacctccactcgacgccgtccttgctcaccagcttggacggctcaatgccccagtagctgctgaccacggggctcttcttcccgtccccctccctcgcggcctccgccgcctccgccttggcggccgcggtgctgctggcgttccccttcgacgcggccgcctcctccttcacctctgcggccgatgtggacagcagccgcacccacacggcggcggcggcctgggcgagcaggggcctcggcgccgcggccaccggagaggagaccgggccgaagacgcgcgggcccaggtggcgcaggaggacggatccggcggcgcgggagctc

SEQ ID NO: 3943 - DNA, 577 bp, Setaria italica
  Peptide Sequence Number=SeqID_69917
atgatagtgaagaagcttcagaagattctcgcaagcccgcaacatcaattggctcggcttacagattgcttactccatcagtaaaggtatgaggatgccattatgctgatctaccacttttgtcttgatttgtttctgtaccgtttttctgagaatttatttgaacccaagattgtattgatgaactggaaatagattaaatatgttctgattttactagttcctgcactgtagtagacaacctctgattattctgctttcctcacccaaatgagggttttcaaattttaaccaatctgtgctttaggctaagaatgcggttattatttttcttctacttctggacatcttgactcaactgtactttgctcatgcaggttcaattgttgatctacttcatgctcaaatatgcaatggagatttttactttcagagtccagtgtattaccaatcactatttcagttggaacacaagtgaagtggcaatatttctagcaaatccttgggtaacagtcctttcctgtcaatgctgttgttggaacatacatcagcaatatgtttgaggactaggtttgtg

SEQ ID NO: 3944 - DNA, 184 bp, Setaria italica
  Peptide Sequence Number=SeqID_69918
gctcggcttacagattgcttactccatcagtaaaggttcaattgatgttgcgggcttgcgagaagcttcagaagattctcgcaagcccgcaacatcaattggctcggcgttacagattgcttactccatcagtaaaggttcaattgttgatctacttcatgctaaaatctccattgcatatttg

SEQ ID NO: 3945 - DNA, 2627 bp, Setaria italica
  Peptide Sequence Number=SeqID_69919
cccgacccgacccaaaccaacccggcaaaccggcggtgccgacgcgagcgcgcgccgcacacgcacacgcgcctcaccgccaccgccaccgccgcgcgccgtctctgttcctcgccgcggcggctcacggctgccacacctcctcgcctataaatacccacctgcggtgtctctcgcgctcctccccttccccaacgccttccctccgcctccgcctccgcctcccccgcgcacgagctcagacgcgcgcgtccggtccgatccgccggtccagcaggcgcacgcccgcacgtcggagagagaggagattaacttatcaaagtcaagatggttaactttgggaaaaaattgatggccgatcaaattccagaatggaaaggatattatataaactacaagttgatgaagaaaaaagttaaacaatatggccagcagatccaactgggtgagaaagatcgtcgccgggttctcaaagatttctcgaagatgcttgatgatcagatcgagaagattgtcctgtttctgttggaacaacaaggaatgctggcaagcaagatagagaagctaggaaagcaacgggcaatactacaagagcagcctgatatatctggcattgctgagttgcgagaagcttatagggaagttggtttggatctcatcaaacttctcaagttcgttgatcttaatgcaactggcattcggaaaatcttgaagaagttcgataagcgtttcggttacagatttactgattactatgtgaccagtagatcaaatcacccctactctcagctacagcaggtcttcaagcatgtgggtgtaggggctgttgtaggagccttgtcacgtaaccttgctgaacttcaggagcgtcaaggaagttatttgtcaatttatgatcagccatcttctgctcttaaggacccaatcattgatatgataaattcgtcagtggataagttaacacgctcaactaattttcttcgatttttggggcaacatgccatgattgttgatgaggagtctcctagcactgcaggggaggaagaaatagaagatcaaaaatatcatttcatgtcccttatgttgaacctggtgaacacattcctttacatggtcaacacatacatcattgtgccaactgcagatgactactcagtgagccttggggctgcttctactgtttgtggtgttgttattggttcaatggctgtcgcacaaatattttcctcggtttacttcagcgcatggtccaacaagtcatatttcaaaccacttattttcagcagtattgttcttttcttggggaatgtatgttatgcaatagcatatgatatgaagtccctcacagtccttattattggccgcttactatgtgggttgggttctgcaagaagctgtcaatcgccggtatattagtgattgtgtccctgcaaggatacgcatgcaagcttcggcaggatttgttagtgcaagtgcacttggcatggcctgtgggccagcactagctggtctacttcagtggaaatttaagatctacatggttaccttcaatcaatcaaccctacctggttgggtgatggcagttgcatggctgctgtacttagtctggctatcgatctcattcaaggaaccaaaccgtgctactgaggtgaatgatgccacacaaaatcctgcttctggacaaagggtggatattgggcaactggaaaatggacttgcacaaccgctgctcacagacgctgaaaataaacaaaatggagatgaagatgaagaaattgatgatagtgaagaagcttcagaagattctcgcaagcccgcaacatcaattggctcggcttacagattgcttactccatcagtaaaggttcaattgttgatctacttcatgctcaaatatgcaatggagattttactttcagagtccagtgttattaccaatcactatttcagttggaacacaagtgaagtggcaatatttctagcaatccttgggttaacagtccttcctgtcaatgctgttgttggaacatacatcagcaatatgtttgaggacaggcaactcctgatggtatctcaaattacattgctagtaggcattattttcagcttcaaagttacgagcacatactctattgtccagtacgttgcctcagcactcatcacgtttgtttctgctgaagttcttgaaggtgtgaacctctccctcctatcaagcgtgatgtcgtcccgcctctcccgtggcacgtacaacggtggtttgctctcgacggaggctgggaccctggcaagggtggtcgccgactgcaccatcactgcggcagggtacctgggcgtggggaagctcctaaacatcaccctgctgccgtccctggtgatctgcgccacgtccatcgcctgcaccttcctgacctacaactcgctcttctaatggaagcttccacggtgtgttctgtcgtgtcaccgttcgttccatggtagcgtaaatcaaggcggcgggtaggccgccattgcagttgcccgaaggggctgtcgttttgtatgttcgtcgatttgattgctgtgaattgatcgcagcaacggaactgagctttgccctgcaaaattttgatcgataagatcctctctgt

SEQ ID NO: 3946 - DNA, 583 bp, Setaria italica
  Peptide Sequence Number=SeqID_69920
atcaccaaagagtgtgccgtacaagtttttgcagtttataataaaccaggggcttctggttgcaatttccaatgaaaatgaaattcaggtatggaatcttgagttcaggcaactgttttgttcatcccagtgggatgtcaacattactgcttttgcagtcatagaggggtcctttctgatgtaccttggagatgagaatggtcttctttctgtattgaagtatgaggtagatgatgggaagcttcaaagaatgccatacaatgttcctatccaatctttagccgaaacagctggtgtttgcttacaggatcctcaacctattgttggaatactgatccaacctgaaacttttgggacaagggtgctaattgcgtatgagaaagggttgctggttctttgggatgtatctgataacaatgcagtttctgttagaggctatggtgatttacacatgaagggtcaaatcactggttctcagagggacgctggtgaagatcaattgaatgatgctattgatgaaactgaagaagaaagagaaatttgctctctttgttgggattgggtggattcttagtagggggca

SEQ ID NO: 3947 - DNA, 291 bp, Setaria italica
  Peptide Sequence Number=SeqID_69921
attccagtatagcatttgagaacactggtaactttcctgctccagtgtagtcgctggcaggggttcttgatcatgtacccgtgtgttagttttgttgtgagcttctagcagtgttgcgctgcatgccaacctgaaaaacttcgagaccgtcctttggaccatttccggtgcaataacaaaatacagatttgagcttgtaacaagcaaggatgtcagtacagaactgcagcgtttggtttgatatctgttattttaaccaaaagaaaaaaaagtatcttcattgaccaattt

SEQ ID NO: 3948 - DNA, 414 bp, Setaria italica
  Peptide Sequence Number=SeqID_69922
gcggcgagggcgcggagccaaccaagtgggcggcggtggcggagtactgccggcgccacggcgtggaccgcggacccgtgcagtgccgcaagcgctggagcaacctcgccggcgactacaagaagatcagggagtgggagcgcggcggcttcgcggccaggaaggaggcctcgttctgggccatgcgcaacgacgcgcgccgggagaggaggctcccggggttcttcgaccgcgaggtgtacgacatcctcgaggggcgcgcccctggtaatgcggcggcggccgcggtggcgcgccccgtggcggtggacgtggagagcaaggaggatgtggcggcggcgctcgacggtggtgcccgcggggccgagggggccgggctgttctcgtcgtctgaggatgaggatgatcaagaag

SEQ ID NO: 3949 - DNA, 794 bp, Setaria italica
  Peptide Sequence Number=SeqID_69923
ggcacggagtggagcggggccccgtgcagtgccggaagcgctggagcaacctcgccggcgactacaagaagatcaaggagtgggagcgcgccgcggcggcctcgcgcgagccgtcgttctgggccatgcgcaacgacgcgcgcagggagcgccggctcccggggttcttcgaccgcgaggtgtacgacatactcgagggacggggacgggcgatcctcgccggccggtccgccgggaatgccgcggaggaggaggaggcggtggcggtggcgcgcgtcgaggaggagaaagaggcggggccggcggaggccgtgtttgacagtggccgcccagccacggaggaggcgctgttctcggaggacgaggaggatgaagaagaggaggcaccggcggccgctcctcctcctccgccaccgccggtgatcgctgtaccggtgtccgagaagccggatgcatcaaggcaacaacagagcgctgagcaaggcacatcgaaagacaaacagcctgagcaaagcactgagagggatgcaccggctcagcagggtgggcagaagaggccgcggactgacgaagaagctggagaaggtgcaacagacctgcagagtaagctgatccagatcctagaccgcaacagccggatggtggcggcacagctggaggtgcagaaccagaattgtgagctcgacagggagcagaggaaagaccaagctaacagcctagttcttgtgctcggcaggctcgccgatgcccttggcaggatcgccgataagctatagtcagtcaatcacctaggt

SEQ ID NO: 3950 - DNA, 929 bp, Setaria italica
  Peptide Sequence Number=SeqID_69924
cgcgtccgtgggcaatgctggcgccggcggtcgaggtgatggtgatcagttcggggaggaatccgtggctgttagttctgagaaggtttcagcggttaagtccactgatggagagggttcggagaagaacaagggagttgaggttgagaggagcagtccacagcctgttgccaagaagatcagagttgaggccgcccatggtagtggcagtgggagcagcggaggtgcagctaagggtggaactggtgggaaaatgcggccccgggggctcccttcgtggcggtttgaaaaggcggaggtaaggggagggcgagttcttgatgataaaaggtggggtggatatgaaggcaagcagtgcctcaaaggtgaaagagcagctatcgagtttggatgacaagaggagatgggtggagctgcagaagcatgaaaaacggacaccgttgaagaccgaccagggcaaatctgctgattctggccaacaggaggttattagattgcaagggaaaaggggtgttttgaagatattgccaaagaacgataagttggtcagggatactggtgatggcaagattctgtcgaagaaaactaaggtggatggggagactggcaatgtcaaggttctgcctactaatatcaaggcggatgagaagactggtgatggtaggattccaacaaagagaggggttttaaaactcctgccgaagaacaatggcatgacgacggagactaatgatagaaaacttctgcccaggaacaataaggtggatggggaaactggggatggcaggatggtgatgaagaactccagggtggataaggagtccagtgatggcaagattcttaccaataaaactaagttggatggagagtttagtggtcacaaggcgatgaagaactctaccatggacttggaaactggtcctgagaag

SEQ ID NO: 3951 - DNA, 319 bp, Setaria italica
  misc_feature (311)..(311): n is a, c, g, or t
  Peptide Sequence Number=SeqID_69925
atcgaagctccacgcggggttgaacaggaccaccggcttggggtccaccgcggcggcggcagccttcacctgctccacctgcgccggccccggcgccaggaacacggcggcgtcgcaggcgctcagcacgtccggcgcctccgagcccagctgcgcgtgcgcagtcgccgagtccccgaactctcgaactcccgcattgccaccgccagcgcgtcggccgagggccagatgagcagcagcctcgccggggagcccttctcgacacgcccgcgccgccggagaacacgtcgagcgcgaggcgagcgagggancccggcga

SEQ ID NO: 3952 - DNA, 782 bp, Setaria italica
  Peptide Sequence Number=SeqID_69926
tagtttccaggcaccgatggttggccataagatccaggtgttgatggttggccataagatccaggtgttgatggttggccataagatccaggtgctgaagggccaccagtcctaaaacctcctccctgcccttgcgagaagttcctgtgctcttgggggttgttgtaaccttgaccttgaccagctggatttacatgcccttggtactgaggtgcttgaccttggaagccaccaggtggtccattgtaccctgaacggtctgcataatcattcctcccaaaacctctagcatcttgtccactttgtgcataattctgctgtggggcatagcctcttccatcttgctgcgagcggtacgtctggaagtttccttgctgtggtggactattatgataacctccttgcggaggagggcggttcgggtaatttccttgctggggagggccatcccggtagttacgattcctgtcagtccttgatggtttgctataatgaacaggcggttgtcttggagtgatgacaccattttcatatttgtctcctccgtactcttttgtctctggatacaggtatgaatcaggtaaaatgaaaactactccaggcaaaccgcggaatttttctgacatttcctcagtcattacagcctgaaaaccattataggttgttgtactaaaagcatacatcctcttcttagagtccttcctcctcataactcccgacgaccttggcgagggtctgaaggtaggtctcgatcatctcctcgcgggatggcttggggtccg

SEQ ID NO: 3953 - DNA, 832 bp, Setaria italica
  Peptide Sequence Number=SeqID_69927
caaaaattaaggattcaacttcaaattttgaagaatcagaatcttttcctggggcaaactcaatattgccaagatgaagaacggctgccaatgtccggaatatagcatcctgatcttttctgctaatcccaacaatatccattgctctttttgtcttccagtactcgtcttcattgtttgtcccttccaaatcgtaagtcctgctttgattcaagtagtgaaaactgcttgcatgcccaagcttgtacagctctgcatcctttccagaagcacacaattggtagaagcaatgaaaattcctttcaggatcagtaatttgcacaacacgggacctttccaaaagataggtcctaatagctgctccagatattctaccacttgcatcaaactgtatctccacgaattttccaaatcggcttgagttgtcattccgaactgttttcgcgttgccaaatgcctccaaaagagggttagattctagaacctgttgttcgaccgttcgatcgtcaagagcagctctaccaccaacaaaggtgagatactgcataataagctttgtcgtttcggtcttgccagcaccactttcaccactaaccaggatggactggcttcgggattcattcaccatagccctgtacgatgcatcagctactgcaaaaacatgtggactcaactcccctagtcggacacccttatattgctccatcatgtactcgttgtacaggtgaggcagcctcgtaaaaggattaacagcaatcaagatgcttccggtgtacgtatatatctcattcaatgcatatcttttcttcagattgtaaagaacacctggttc

SEQ ID NO: 3954 - DNA, 505 bp, Setaria italica
  Peptide Sequence Number=SeqID_69928
gttcggttcggtcgcaggagacgacgggacggcgcggtgacgtcaaccacgaccgcgactggactcgtccagtctcaccaggcaacccaacggcgtcgcgtcgtcgtccccccgcccgtttccctcgccggccttccttctcttctagtctcgtctcgtctctctcggcgccgcgccgaaagggagcccgatccgttacccgaaccccgccgcgccgcgagctcgagcgcggggggtaaaggcggcagcggccaaaagcaaaagagaagcgagcccagcgagggctgctgcttcgggagcgtgaagcgggaaaaggcaaggcgagcggggaagcaacgcggaaaccggaaagcgagcgagacaagcgcccgattcgcttcgtttcctccgccgcacgcctcctcctcttccccactacctcacctcaccaccgcctgcccttaccgttccccttcactcaccgccacggggacccgctccgcctccgctgcgtcgtcggagccgg

SEQ ID NO: 3955 - DNA, 472 bp, Setaria italica
  Peptide Sequence Number=SeqID_69929
cgagggatcagaccatcacagcgagatagcgagtgagcgagaggtgacggcgagagacgatgagggggtggcgagaggaggtggtggcgctgtcgctgcgcgggtacggctacggcaatgaggaggacgaccggccggagaagccgcgccggtacggggtgacggagatgcggagccccttctactccttgcgccccgccaaccaggcgctccaggaaatattggattctcttggtccttttgttgatggtctgaagttctctggtggatgccatagtttgatggggaaagaattggttagagagatcactgatttagcacacaagcatgacatatacgtgagcacaggtgattgggcagagcatctactgcgtcaaggcccctcttctttcaagcaatatgtagaggaatgcaaggccttaggatttgacacaattgagctgaatgctggatctctcaagctcccgaagaa

SEQ ID NO: 3956 - DNA, 320 bp, Setaria italica
  Peptide Sequence Number=SeqID_69930
gttatatttggtgctactatggcatggttgttgtttgagaagtctgggctgtcattcttgactatctgctgtgatatatttctcatcttgataattgtgcagttcatacgggttaaaatagctggattgctaaataggcagcctaggccactaccagagttagttttatcagaggagatggttagcaacgctgcagcttcattccgcgtcaaagttaacaacatgctaatgatagcgcatgatattactcttggcaatgacttccggctctttttccaggttgtgcttgtcctttggatgttatctgtgatcggcaattt

SEQ ID NO: 3957 - DNA, 555 bp, Setaria italica
  Peptide Sequence Number=SeqID_69931
gattggaaattgccttttttagttggcttttctttactttgtcaaaattatttgcaggcagcctaggccactaccagagttagttttatcagaggagatggttagcaacgctgcagcttcattccgcgtcaaagttaacaacatgctaatgatagcgcatgatattactcttggcaatgacttccggctctttttccaggttgtgcttgtcctttggatgttatctgtgatcggcaatttctgctcttctatcactcttgcttacataggaaccattggtttggtcacaatacctgcattgtacaacaaataccagggccatgtggataggtatgcggggatggtccaccggaatatatcaaggcattacaagatagttgacgaaaatgtgatcagtagactaccgagaagctttatgagagagagtgaagactgatactcgaaaacgtgagcatgtgaagctactcaagtaattttgtacctacattcacgcggcgtgaaacttgagatttaggaaaatagaaaagaaatgtagcctgctgtagataccgttgc

SEQ ID NO: 3958 - DNA, 948 bp, Setaria italica
  Peptide Sequence Number=SeqID_69932
tttttttttttttacttcaatacgctgagcttattgatatgcgatgccagcaactctttccaaaatatatcataggtgcttcgtcaattacagtttacaggacgacgtttgaccgttcaaaacttcacgcatgatctacactttgttacaaaagaaaaaagaacttcagaaaaataggcatccaaagggcaatttgcagacatgaccactcaacctgcacagcacccatgaaatcactgcaactgatggaagatcctagacaagctcaatatacgccataggtgcattatctccccgccttgggaatgtcgggatgatccttgtgtaaccaccctctctgtctccatacctgtctgcaacctcagcaaacaatgcatggacgatatgcttctcatatatgaatgcgagagcctgtctcctcttgtgaagagatccatcctttgccaacgtgatcattttctcaacatacttcctcattgcctttgcccttggctttgtagtctttatccttccgtgcttcagcagctgtgtggtaagaccacgcagaagtgctttcctctgatctggaggcctgttaagtttcggaacacgtctcccatgtctcattgcaactatccttccacgagcatcaacactgaacaaccgatgctcaaagcttgagttctcggcaccaagggagagaagattcgagacaggcgcgaggccggagaatgacccgaggcagccgaccgacgccgccgtcgccgccgacgcgggtgagaaggacgaccggagcctgcccgccggggaaggtcggagagtgggaagggccgcacggagggaagccatgcgccaggtcgaggcggagatcgccggcgacggcgaggcggaggggtaggccgccatggcggaggcgagcggggcgagcgaggcgagcggcggagtgggtttggctggagagaggtgggc

SEQ ID NO: 3959 - DNA, 410 bp, Setaria italica
  misc_feature (33)..(33): n is a, c, g, or t
  Peptide Sequence Number=SeqID_69933
gccgccgccaggttgctccagcggcggggcggngcagctcgaaggagccggcgcccagcgcgaacagcaagtcgccgacggggaggtagatgggccgggctgggtacgtcttgggccgaggcccgaagatgacgccccaccagcggacttcgaagatggggaataagctctcgggcaccaggcggagcctaccgccgccgtcgtcgggcccgggcggctccctgggatgcgtcgccatgatcctggtgccgaaggcggaagcgaaatactcgggcaacccacgcggcgcctccaagcggaaggctttggcaagcgccgcgcagcgccttcgcctgagaaggcttgtggcggcggcgccgtgatatcatctggatcggagcaggacgacgacaagtttaccttgcggatgg

SEQ ID NO: 3960 - DNA, 263 bp, Setaria italica
  Peptide Sequence Number=SeqID_69934
aacgcatagttgttcctgaatttgttgtggctgatagaaagatttctaattcaactcttgttccgcatcttgtaatgctgttaacagtaatttgtttcaggcactcaaaattctcccagcaaagtctttatccagtaagaaagtcgagaggcgatcacacatttccttggaggagtttatatgtaattactttttatgtgagtcccctgtcataatcggtggcaccattgaccattggcctgcaaggacaaaatggaaggaac

SEQ ID NO: 3961 - DNA, 924 bp, Setaria italica
  Peptide Sequence Number=SeqID_69935
ttaacgaaacaaaattaaaggggaactaacaaatacaatagggggacaaacctagctccgcgccgacctcgaggccgccctggcacgcatctcctccgccgagccgtgcggctgcggcggcggcggccgcgaagagggcgcggggcccgtcgatgaggaggaccggaggtggagggaggggctcgacaggaaccgagacatcgctgataggcactcaaaattctcccagcaaagtctttatccagtaagaaagtcgagaggcgatcacacatttccttggaggagtttatatgtaattactttttatgtgagtcccctgtcataatcggtggcaccattgaccattggcctgcaaggacaaaatggaaggacattaaatacctcaagaaaattgctggagatcggactgttcctgttgaagttggaatgcattcttatactaatgctgaaagactttggaagcagactaattttattccattaacttaattcagtgtcactgagtatgcatttgccatttttctgcttgacaaatcacaaatgcatttaaaggtatttgggaaaacaaatgcatttaaagaacaaggaaacaaactgtacaagtagaactcatttcaatgcccttttaagcaatgtggtataaataagtgtattaaacatggtgctcgatatttgtttgtactgtttaagtcggaccttttatctcaatcagccttgtcatcaagtagcattaactaacagtgaaacagagtctatccccgtatatgtgtaacgttgatcttttgacatggcagtcaatgagtcaaaacacttggtaaattgcacctcttttcaactgtctctacataacgtaatatccgactgaaaatactaatagctccggtaaaaatacctaacacaattttgacttttcacggtctgtct

SEQ ID NO: 3962 - DNA, 1121 bp, Setaria italica
  misc_feature (1116)..(1116): n is a, c, g, or t
  Peptide Sequence Number=SeqID_69936
ctgatttaggactgcgaagaagctgacggcctacagcaatttatacaacatttccattgtatgtaatgattattttttggtccacttatgaagttgattctcgtcaggttggaaaaaattatgtgtgtagtgattggaagcaggagcttatcacattttctcagttccttgagaggatgtggtcaactggttgtccatcaaacttgacatatctagctcagcatccattgtttgagcagataaaagagcttagtgaagacttaatggttcctgactactgttatgctggcggaggtgaactacaatcactcaatgcttggtttggcccacatgggacagtaacaccattgcaccatgacccgcaccacaacatcttagctcaggtcttgggcaggaagtacattagactttatcctgcttccatatctgaggacttgtatccacacacagaaactatgctaagcaacaccagtcaggtagatcttgacaacatggatttgaaggagttccctagggctgaaaacctggaattcatggattgtgtactggaggagggtgagctgctttacatcccaccaaaatggtggcactacgttcgatctctctccacaagtttctcggttagcttttggtggcgtgccacggttgaaccttcaggcggttcatagcatcaattctttctctcccatattattggaatcagattgcagaagactaaagaaacctgacaggacccttcgattcaggtgacatccgcttttgaatggatgtaggcacaccatcacagctgtgcattgttagttttaccacagtgattcagatattgaaattgttgcctgtatgccacttgtaacaatgcgacgttcgtcgcgctacccgctaccatctgattcatgaaagttgaggtcgaaggggtgcagtagtccccactccccgcgtcatttcttacaactagtagtcagtaccgctacctaccacataccgtttctgactttctgtacgaagagctgtctttttgtttttgaaaaaagaaacgaagagctctgtccgttgcctgtaattacaaccactgcttgtacacggtggcctgacctgttcctgaagtttttttttaangaaac

SEQ ID NO: 3963 - DNA, 267 bp, Setaria italica
  Peptide Sequence Number=SeqID_69937
aagaacgtttgttgattttcgtgctactctggaaaaaagaaaattccaccagtttgttgatttttcatgaatttgtagtgtccaatgctaccacgttgcaagtagcagcatagttttctcgaccaagaacacgtatgcagatacaccgcagctagtttcttccttggatgacatattccctgcctttatccccacctcggctccaaattctttattttttttgaaagaaactaggctccaaattcagacgctgcatgtttgccgcat

SEQ ID NO: 3964 - DNA, 1032 bp, Setaria italica
  misc_feature (1032)..(1032): n is a, c, g, or t
  Peptide Sequence Number=SeqID_69938
cttcgcaggttctagaccaccaaaacccagcggcacctcccagcgcaaaccggctctcgcattgctcctcagattcgcggatttgttgggcggagtgcgggatggggggcggtggatccggatctttcctcaaggtcttggtcaataacctggatgttctcgccgggcctttagtttcacttgcatatcctctgtatgcctctgttagagcaattgaaacaaaatctgctgtagatgatcaacaatggctcacttactgggtgttgtactcatttatcactttatttgagctcacctttgctccagtactagaatggctccctttctggtcttatggaaaactgtttttcaattgctggttggtattaccacagttcaatggcgctgcacatgtgtatgagcattttgtgaggcctatgattgtgaaccagcaagttgtaaacatctggtatattccaaagaagggtgaatcagagaggcctgatgatgtgatttcagctgcacagagatacattgagcaaaatgggtcgaaagcatttgagaatcttgttaacaagtttaagagttcaaacccaagacggtcaatactggaggaggtagaggttgaaaggagagccaggattcaacgagaatccgaagcaagggaagttaatcccttcttcaatccaaattaccaatactaggctttcagtcaccaggaatcaataggatcagtttgagggaagatgtctagatattaggactgcattttgcagcaatggaatcaacaatattgtgtagctggacaaccatgattgttgtaaatatgtttctagcgttgaaactccttgtcatgtaatggtcgtgtcatgaatctttcatgttactgaaaattatgcattcagtgttcgtgccaccaaactctagatttgtgtctcgatggttgcatggaggctgttgatgatctgggtaataactaataaggttgttcttcgtctcgtatctgatgtagatgtagattgtagaccatgtggctgtgcaatgttttttttn

SEQ ID NO: 3965 - DNA, 526 bp, Setaria italica
  Peptide Sequence Number=SeqID_69939
taacattccgtggaggattttggaattattttagtatggggatggatgcggaagtgtcttacgcatttcactctgaaaggaagaggaatccagagaagttcaagaaccagctgacgaatcagggtacatatgctaagcttggacttaaacaaggatggttttgtgcttctctaagtcagtcatcatcaaggaaccttgctcaacttgcaaaggtaaaggtcatgaaaagacctggtagccactgggaggaactccagattcatcacagtattcggtcaattgtctgtctgaaccttcctagtttttctggaggactgaatccttggggcatgcctggcacaaggagagcagcagatagggagttcactgcaccttttgtcgacgatggacttattgaagttgtcggcttccgtgatgcctggcatgggctggtcctgttggcccctaatggacatggtactcgcattgcgcaggctcatagaatccgtttcgagttccacaaggcgtggcagaccacacgttcatg

SEQ ID NO: 3966 - DNA, 939 bp, Setaria italica
  Peptide Sequence Number=SeqID_69940
aagtcagtcatcatcaaggaaccttgctcaacttgcaaaggtaaaggtcatgaaaagacctggtagccactgggaggaactacaacaagtaaatacggtacggtctagtgtctgtctgaaccttcctagtttttctggaggactgaatccttggggcatgcctggcacaaggagagcagcagatagggagttcactgcaccttttgtcgacgatggacttattgaagttgtcggcttccgtgatgcctggcatgggctggtcctgttggcccctaatggacatggtactcgcattgcgcaggctcatagaatccgtttcgagttccacaaaggcgtggcagaccacacgttcatgagggtcgacggagagccatggaagcagcccctcccgacggacgatgacaccgtcgtcgtggagatctcccacctcggtcaggtcagcatgctggcgaacgagccctgcaggtccaagagcgtcagcgacccgtcatcattgccattgccagcccaggacagccatggtgatggcaaggatcccgcggaggaggaagacgagtgggaggatggtaggaggaagtttggggccgccgacacgttcaggcttcctgacgagatcgacattgctcatcttagctgagcttggcttctgcattgctctgggcattccgaccgtaccaatatggtttgtaaccattcttttcttttgaattgatttgctatatgattgccgcagccctgtataaagtgaattgtagctaaccaagtgcggggttgctatgagtaaccgatgtatagattcagtgtaatttgcagaaacacacgaacattttcattttttccttttaagaatacaacatttgtttttttgttaagagttgaagtggcccaaatgtttaatggattgatacagttactaaaccaaaaaaaaaaaaaaaaaaa

SEQ ID NO: 3967 - DNA, 1284 bp, Setaria italica
  Peptide Sequence Number=SeqID_69941
gcctgactgcctcctgttcctgtccacctcgggtccttccctccccactcactcgacccttgccaccatcccatcctcctcctcctcctcctcttgattcctccgaaatcgaaatctcatcctccggcggtccgaccccagcaaggcggcgacgcaaggtgccttgccgcaggaatcttcgatcccagcccaggatggaaggggaggcagaaatcgtggttggttcttgttctaagccatgtgggcccttggaggaataccacattccagattacattctgaagcctgatgcccaacaagtgattgtcgatcatgctccccgctgtcctgtagtagtgttcatcaactcaaggtccggcggccaacttggaagtagtttgatcaaaacataccgtgaacttctcaatgaagcacaggtttttgacctctcagaagaggctccagataaggtgttgcaccgattgtatgtcaaccttgaaaggctcaagatggaaggagacattcttgctgttcaaatttggaggacgctgaggctaattgttgcaggcggtgatggtacagctagctggctacttggggtggtcagtgaccttaagcttgcccacccacctccagtcgcgactgtgcctctgggaaccggaaataaccttcccttttcatttggatggggaaagaagaatccttctacagatcaagaggctgtaaaatcgttccttgggctagttaagcatgcaaaagaaattaagattgatagttggcacatcattttgagaatgcgagttccaaaagaaggtccatgtgatcctattgctccattagagttgcctcattcattgcatgcatttcaccgtgtgtcaagtggcgactccctcaatatggaaggttaccacacattccgtggaggattttggaattattttagtatggggatggatgcggaagtgtcttacgcatttcactctgaaaggaagaggaatccagagaagttcaagaaccagctgacgaatcagggtacatatgctaagcttggacttaaacaaggatggttttgtgcttctctaagtcagtcatcatcaaggaaccttgctcaacttgcaaaggtaaaggtcatgaaaagacctggtagccactgggaggaactccagattcatcacagtattcggtcaattgtctgtctgaaccttcctagtttttctggaggactgaatccttggggcatgcctggcacaaggagagcagcagatagggagtttcttttctttctttaagtttcttagtttctta

SEQ ID NO: 3968 - DNA, 486 bp, Setaria italica
  Peptide Sequence Number=SeqID_69942
ctccatgctggatcaggctgacgatgagctttctagagcacagttggccctctcagaagcactgtcaacaaaaacaagaattggagctgaatctgaattctctcagtgagcagcatggtgagtccaaagcgtttggagaaaatgcaaaccagaagattctcgagcttgaagcacaaatccaggcaatgcatgcagctgaagaggcactcaagtcacagctaaaagaagctgacgcaagtgtgcaagctgctgagaagaaaggttcagaccttgagcaacaactcaatgagattgaaaataaattggttgcatcaagtgaagaaatagagctgcttaaagagcgtattcaacaagaagcggctgtatcagcagaaaaaggaatgcagcttgaagaagcagcggccagtgtagagggattcaaagaaaaaatcaacgagttacagttgtccctagattcctcagtatctaaaaatcagctacttgaac

SEQ ID NO: 3969 - DNA, 1524 bp, Setaria italica
  misc_feature (30)..(30): n is a, c, g, or t
  Peptide Sequence Number=SeqID_69943
cttttggactcaccatgctgctcactgagngaattcagattcagctccaattctcgtttttgtgacagtgcttctgagagggccaactgtgctctagaaagctcatcgtcagcctgatccagcatggagtctttttctgaaagttttgagttaagatcaacaagagacccttggagagtttcgttttcattcttcaaattttcgagcccagcctgcaagatgactatctgctcattttgcttctctagtgcagcttcacttgtctgtctgtcttttgcctgttcatcaagttttgcctccaattcctgcaaactcaaaagcttcgcttgtagttcttcatgtgttgtagtaagttcattctctagtttaagagtcttctctttaagagactcttcagacgaacaatggtgattcaactcttcagttagtttactgatgtcagcatcctgagaggcaagcttgtcttccaaatcagccacttgcgactttgacagctccagtgcctcttgtactaccttgagttctgagattgtgcttctcagtgattcttctatttgctgatgatctgtggccttatcttgatgttcctttatctcctcctgaagactgctaatatgtttttccatttctttcatgtttgtctgagccagttccagcatcttatcaagttctgaggccctctttgcctcctgtgcagcatgcaagcttctttcatccttcagctcttcaagtttgtggagcttatcagctgatgaatccaattcagcttcaatttcttgaatcctccttttcgagctttcaagctcagaagcaagctccttcagtgactctgttgcttcagccagatccttatctttcacagcaagagagctttgagcttcttgtagagaactgtagtgctggctttgcttattttctgcttctgtcaagtcctttaccagtttgtccttttcagattcaagctcttcaatacgcctagtcagctcacccaattgttctgtttgttggttcaacatggaggaatctagatgtctcgtgtttgctgcaactgattgttcttcatgggctgccgtttttcttcctgtgtatcactttcctttgtaacaggtgtgtcaacccttgtacttggagctgctgtttcttcctccatttttgctgaaccaaagttttccttcacatctatcagctcgaacccatcagatcctgttccatcatcttcatcattgtgtgcttccttcacttgcagatttgagttaccattcagtaggttttctttttcaccaccttgtgccggcgtcttatcaggcaccttaggatcagtcgtctctggagcacttacgttgcccccctgttcgacttccatattgcacaactactttagctatccgtcccttggattggaggaggtcccggcggcgcgatccttcttgcttctccgttttccttcctccctctcggcggttgcaaagcaagcagcgagcagaaaccagaaccaacccggcaatccccccaagaaatcgagag

SEQ ID NO: 3970 - DNA, 779 bp, Setaria italica
  Peptide Sequence Number=SeqID_69944
ggcctcagatcctgttgcacataaaagacacccaccaagggacagccaagcctgaaaaggattcctcccaaaataataaatgatgtagagaggattaaatgctttaaaagctgttggtccgtatagactcagattgtatatgccaattcctccaagacaacaaaaccatacaagtaaagaaggaccaagtgcaaaccccactttgctagtggcatacctctgtaaactaaacaatattacaagaagtgcaactgaaatcatcaccacaacatcttgtgaggcatttcgtatcccaactttcaagccactgacagcagataacactgacattgctggtgtgataactccatttgatatgaacatggaagtcccaaacaacactaagcctaacagcagcttctttaacaacaatgatgattcaagtttctcttttacttttatggatctctctagttctgccgttggaagcttgagtcgaaaacttgacatcctcttctcagagtgtacttggtttggaatgagactcactttagcatttctacaaatcaaagaatacaaggcaaatataccaccttcaccatcatcattggcccaaaggacaaccaaaacatatttcactaatggcatcaaaatcagggtatacagaacaagtgagagtgctccaaggacatcctcctccccatgaattgggtacttgttaaacatgacatcaaatgtatataatggaccaattccaatatctccaaacactacagcaagagtctgaagagcaaagaaac

SEQ ID NO: 3971 - DNA, 495 bp, Setaria italica
  Peptide Sequence Number=SeqID_69945
cgagctctagaatttcatcgcttagcgctgaacctatgcatgcaacaagagccaacatttgaagggcataatgctggaattgatgctttgctgctagctgcagaatgttacgttaatccatttttctcctggatttccagcctaatttagagcgactggacaagattgaacgtatccattcagagttgatgcaagggaatgcctccattgtgtcgaaaaatttgcacttgaaagatttagatcgaaaagcaatgtctaatttggagaagaagcgggatagatctgtcatagatttactcctgcaagctgcaagatttgattgtgaataccaggaaaagatacctgagggggaaccttatccaaataatgctgaagatggcgagcgatctgtagaaatctcacaagaagctcttcagtttgctgatgcggtaactttggtcagaaagaaccaggctatgctctgccactttattatgaagcaattccaaaggaaag

SEQ ID NO: 3972 - DNA, 1726 bp, Setaria italica
  misc_feature (1723)..(1723): n is a, c, g, or t
  Peptide Sequence Number=SeqID_69946
ataatcaaaaaaaattagcaaatgcagcaattattaagaggtcaatgtggcagtatcaagtcactgacgaattcaggccaacaaacatacgagaaatactagctactaagctacctcaaatttcagtaaacaaatatcatgttaagaaagcgccatttttcatttagttgcaagtgaacattcagtttcaagagtaatgtccattgaaataagagtaacaagtgttatttcatattctgcatatgcaaaatctgtcgtgttactgtataatgtccttatgtcaaggtcaaatgatgggtttggtgaccaagcactgcaaaaggagaaatggacgcacgaaggaagagcatatgaccgctgcctctgcacatccaccaaccaattcctacccaagtaaacccttctctataatgggaaactatcagtgcagtggacagatggcagaactagagtggacatatcgccaccccaagtttagaaatactgcatacacttgcacatttactagtgcaagcccagtccttcctgtcgctaccccattcagtcatggttaacagctaaaatcacctatgatgtcaaagactagcttaaaatgcagaagtaaaagaagccatgatgcctattgctagttcaacagctagtgtttcaaaggcgacctgaggtcccatcctaaggcgagctgggtatgccttatcgcctaggcgccgccgcctttgaaacagtcaacagctttttttttgctcatggttgatttaaaatggacgtagagtcaaaatcatcacactgaattgctcctgcagcacaaggttgaatggatttaatgtaagttaacacaaaaggagcgaacaactcacggcaagaaataatgatccgttccagtgttccaacaaagtaatcatgaatattccctatgaaaagcacacgtccatcttagcttcaaattaaggaaatgaacagcaacagaggccccactgtatatcccaacaattattatctgtacaagatagaatataaaaataaatcatcatgggttaagcacaaatgatgaaccatcaccattaattaacatcaaatctaaagacttctccagctcaaagtagaatgcatgaactgaaagctaaaatcataatttgtgtcatgcaacactatcagtatacgtaaacatgctgtaccatgtctcctttgcagattacgcattcagataaacaagttaataccaatcacgcctgcctcctgcttttcatagatacagctgtttctagactagtgtttcgcaaggacagctgttccacatttaatgtagcctgattagttgataaaccgacattcccgacaatagtcaaaatatggagctaaaaattagaagcacacaacatcaatttatcaaattgtactaaaattttactgaggaagattttagcagaaactagatatagctatcatagtcggagtttcacattttcactcaagaagactattatcctttcgcataaataagtataaaactatgagctattattagcatgtagcaagctcaaatcaagtgctagtatacacatttgctcgaatgcaatatacaaggtcactgattagcaattgaaaaatcggaatcttacgcaatctatccatctatacaatatgcatgcacagcagctccaaatcaaaactgtacctccattgaaagaagcaattacaacttttgcaacattagagagggcaatanata

SEQ ID NO: 3973 - DNA, 577 bp, Setaria italica
  Peptide Sequence Number=SeqID_69947
cctgttgaggaagaagaggtggccacagcaagaaaaggacaagaaggtccacaagatctaaggtagcggcagcatcacggaaggggcagaaagctgattcttctgacacaaccatagggtctgctgataagagcagcattggtcctaacgaggatgaagtggttgccattatggaggaagagaccacgaagccacatgatggtgggaatgtgataaggaaggccatggcacacaaaatggaggaggtgccactcctagccaccttgcagcagagccaaaggacggcagcactagatgcgacggcacctgtagaggcggaagagggggctacaacaaagagaaggaggagaccaagaagatctaaagtggcagcagcagcacagaatggacagaaagctgattcttctgatgctgccattgggtctccggtattagtctcagatcggagctgtggtgattttagggaagaccaactggttgcggtggtggaggaacatgttgcaaagccacaggaaggaattgtagacgaacaggagcaaagcagaactattcacaagtctgcttgctcaggaaaatg

SEQ ID NO: 3974 - DNA, 968 bp, Setaria italica
  misc_feature (950)..(968): n is a, c, g, or t
  Peptide Sequence Number=SeqID_69948
agaagaagaagaagaagaagaagaagatggggtccgcgagccgcgccgtctcgtgcctctgctgcccctgcaagtgcctggcctgcgggctcttcagctgcctgtgcagcatcctcatctccctcctcgtcttcgccggcgtcctcgtcctcatcctctacctcatcttccgcccccaccatgatcgccgccaccgtcgactccgcctccctcgccaccttcaccctctcgcccacctcctccctcgcctacaacctcaccgtcggcatcaccgtccgcaaccccaacaagcgggtcggcctctactacgacaacgtcgaggccctcgcgctctacaaggaccagcgcttcggatacgccccgctcgactccttctaccagggcaccgaggcctccaccaagctcaccccgggcttccacggccagcagccgctccagggggacgtcaccgccgccgagttcaggaaggagcagaccgacgggaacttcgccatcaacgtcggcctcaacgccaagctcagggtcaaggtctgggccttcaaggtccccggacccaaggctaagatcacctgcaagctctccgtcccggcgccgggagccgccaacggatcgccgttccagcccaccgactgcaaactctggtagaggatgttgttggattattctgctgctagctagtatggattctgtctgttcttcgtcttggattatttgttggtgagactggtgggaggattatttgttgctgtacatcgccggctgctctaccatggatatgcacatattagcctatccgatccatggatgactcttttgttttgccatttcattgatactgctactagtatacattcatctatcatactactgctgtcgagactccatggatgcagaatctgctctgtcttactgttgcgattcatgatgctttgatgccctaaaaaaaaagnnnnnnnnnnnnnnnnnnn

SEQ ID NO: 3975 - DNA, 427 bp, Setaria italica
  Peptide Sequence Number=SeqID_69949
ggcctaacataactcaccataacacaggacacatcgcaaaaatttaagcacagattataaaagttcagttataaaaaaaagtaattctgttccagggaataagaaaggtaccaggaaagagaaacagggaaggaatgatgaagaaccctccctttgatttcatcagggactatgttttttgctgatggatatattcaagtagctgtacatcaatgccataaacttagcaatgaccagtgcctcatagcattctttaacagcatccaagaatgtgaaaaaagtcttgcttccctgaatatcaagaagacccacaaaggaagagatagcatataatggagccattagcacaaagctatacttattattgtgctaatggctccattatatgactatctcttccctgaatatcaagaagacccacaaagga

SEQ ID NO: 3976 - DNA, 273 bp, Setaria italica
  Peptide Sequence Number=SeqID_69950
ggacaaatcgtcggttatggcggcaacaacaaccaagttccccaaccttcccttgctgatcttccccatcctgcttctttcccacagagcctccagtgcgggcattgtgtctaagacgctcaacaacggggccaacatcaccgatggtgagacgctggtctcgcccggtggctcattcactctgggtttcttctccccgtccggtgtgccaaccaagagatacctcgggatctggttcaccgcgtccggtgcggcctctgtttactgggtgga

SEQ ID NO: 3977 - DNA, 335 bp, Setaria italica
  Peptide Sequence Number=SeqID_69951
ccagttctgaaattctgtctgcagatctttaaggaattccgcgaacccatagaatggctcctcttcagcagttgatttgctctctctggagctataggaggaccatgacgaatctgaactgctgctcgcgtacttggatcggctctctgagttcatcagtgtgttgtaagcatgcttgatccgcagaaacttctcctgggcattaggttccttgttgacgtccgggtggtacttgagcgcgaggcgccggtacgcgcgcttgatctcgttgggcgccgccgacggcgacacgccgagcacctcgtacggggaactaaaccctaaaaaccgaaaaa

SEQ ID NO: 3978 - DNA, 339 bp, Setaria italica
  Peptide Sequence Number=SeqID_69952
tctttgggtaaaagacaacctcaagttaatgtttacatcttcaaccatttccaaagcaggagactggcatagcttccccactagtgtaagaaggcgtggtatacaacataaatgaacagctgcaaaatgctgcgctaatggcaccatgctatttggagataccacactgcatgattgggtattctctgaaataacgtaatcttgccgcaagtattctggtaataaggctaaacgaaaccgtttaagatcatctccacttttcgagcagttgaatccttttagatagcagaaatatttctcttgtgggctcaagcgctcagcttcaacttggacagatcg

SEQ ID NO: 3979 - DNA, 571 bp, Setaria italica
  Peptide Sequence Number=SeqID_69953
caaactcagttttctaactctgcggcacgctagctctagctcctccgacctccaagacgctcggcgatctcctctgcttgtcaccccttccagcagctagctacctgactatcggtgccatggcaacaagatttgtcgccatcgcggccgtgatggcagcggccatcttcggcgtggcgtcggcggcgacctacaacgtcggcgagccgggcgggtcttggaacctgcagactaactacaccaactgggctgcctccaagcggttccacccgggcgaccagatcgtgttcaagtactcgccgcaggcgcacgacgtggtggaggtgagcaaggcggactacgacgcctgctccaacgctaggcccatcaacacccacacctccggcaacgacgccatcgctctgacctccgccggcacgcgctacttcatctgcggcttccccgaccactgcgccgggggcatgaagctccaggtcgacgccgtgcccagcgccacctccctcgccccggccggcgctcccggcgccaatgccccggcctctccgtccacgcccggttccgccgctaccaa

SEQ ID NO: 3980 - DNA, 189 bp, Setaria italica
  Peptide Sequence Number=SeqID_69954
tagggttctagccatggcgtggagcgccgccgccgtctccaggttcgccgccgcctccctctccttcgccggggcgcgcggccgccgcttcggccccgtcaccgcgtccctctcgacctccgcggccgtaacggctttgaaaaatttctgtttagctttaaaggaggctattcagacagagaaggcacc

SEQ ID NO: 3981 - DNA, 917 bp, Setaria italica
  Peptide Sequence Number=SeqID_69955
gttcgtgctcgtgatcgggccatccatctcgcgacaaaatccgcccctcgcctcgccagtcgcccgtgctcgctcgctcgcggttggtggtagtagggttctagccatggcgtggagcgccgccgccgtctccaggttcgccgccgcctccccggcatcggcgcccgtccccgtcaggctcggcgccgccgcctccctctccttcgccggggcgcgcggccgccgcttcggccccgtcaccgcgtccctctcgacctccgcggccgctttaaaggaggctattcagacagagaaggcaccggcagcactaggcccttattcccaggccatcaaagcaaacaatcttgtgtttgtttctggagttcttggcctgaatcctgagagtgggaagtttgtctctgaaaacgttgaggagcagactgagcagttaatgaagaacatgggcgaaatattgaaagcaagtggtgctagctattcttcagtggtgaagacaacaatcatgttggctgatctgcaggatttcaagaaagtgaacgagatctatggcaaatatttcccagctcctgcgcctgcccgctcaacctaccaagtggcagcgctgccactgaacgccaggattgagattgagtgcatcgctgccctctaagcatatcatctggccacccatcaaaccataaataagcattccaaccttttcgatgtagttgttcgctttcctgggatgcattgctcttaggaatttatggtacatgtgcttagtgtcacccatgcgaaatcattgtaccaattcaggtctcgaaaactagctataataaactttggatgaagtggcttgtgttgaacagcagatctggcaacagcacttcgtgagtttcactagtgagtttgagcagagcattcttgggtggttgcttaaa

SEQ ID NO: 3982 - DNA, 1777 bp, Setaria italica
  Peptide Sequence Number=SeqID_69956
ggcctacgtcttctacgaggccatctacagccgcgggtactttggcgctgcggcgggcgcggaaggcggcggcggcggccggcaccaggcgctcctgatccgctacaaggagctgcggttcatcgcgcggttcctcgtcgtcgccatgctgatgcggcgggccgaggcggtcgaccacctcgccgggcgcctgcgcgcgcttgttgaggagacgaaggccgcgtacccgaaaacaaacttcaaggagtggaaacaagtgattcaagagcttgggagattcttgaaggctgatggggcgtacaagggatctagatcactgagatatgacaacttgtttgattcttatccatcaaatcttgcatcgattgcacgattccattcaaaaagagtgctgaaactgaaggaagctgtattaacaagctaccaccggaatgaggtcaagttcacagaactaactttgtacacattcagaatgctacagtgtttggaatgggagcccactggatcttatcagatcgctgcgaaagaacttacagaaaatggcactgtaagtgatcagagtggaccctctggtctgatcgatattcacctgtctacggaaatctctgatggaagtcttccttcaaatcctcaaaaggcaattatatatcatcctacagtatctcatcttttagcggttcttgcaacaatctgtgaggagctttctcaagatagcattttactcatctatatatcagcatcaggatgtgccgagcagaatatggcaagccaaaagtatgcctctagctcctcatcacatgcaacggctgcttctgccttccctattgataagccaaattcacatatgagttctgataatcatctaaggcttggtccccgtggaagtggaggtccgaacaatctttatccagaagatctgattccgtttacaagataccccctgttccttgtaatcgatagcgaaaatagccatgcattcaaggcaggccatacataatgcagagaagggagaaccagctgctttattgctttctcctagaatatcatcagccatgtctggtgtagaatccactggtcatggaagccaatttacatacttcctcactgctccaatgcaagccttctgccaactagctggaataacttccgacatagacactgatacgtatgctaatgcagagaacatacttttctctgctttggaagaatatgaaggaatactttgcacttctgttgggttaaataatgtctggggacaagttgtacctgatccatttctcagacgactgattctcaggtttattttctgtcgagcagtgctcttctattttcaccccgaggatcatgaacaacatctaccaacatgcctacctagtctcccagattcggtctctccaactgcggaagccatcaaaactcctatcctcctgctcgcagaaaaccttgtcgtcagcaaccggtttaatttccgggattccagacacaacaagaaatgatgatcaacagcaataaccatagctcaagccttctgtagatacctccgtggtaaatatagtccagcaatttgttgattgtttcgcatttataccgccaatggagaatgactcggcatcaacaagctgctgctgcatcctaagattgggtgaatcgaatggtgatacgaagaattttgcctgccgattcatctccattgtgcgtctgtataagtttgtttagctgttctgtttctctgatttgcttaggcattttaggcgtgtagggcttgtcttcaggtttc

SEQ ID NO: 3983 - DNA, 478 bp, Setaria italica
  Peptide Sequence Number=SeqID_69957
acaatgctgttgcagtgcttaaattgctcccagtaggggcgacctgcctgatctatgcagttgtctttgcccaatggatgacactcttcactaagcaagcaagtacactagataggtggataggtaccttacaggtaccagctgctacccttcaaagcttgatcaatgtgtcaattgtcatctttgttcctatatatgaccgcatcctcaatccactagtgaagaaatactcgaagaacacttgtggtatcacaacattgcaacgtattggaattgggatggttgtttcggtgattctgatgattgttgcagcccttgtggagatgagaaggctcaggatagcaagagactatggcctagcggacaaacctgatgtcacaatccctatgagcgtctggtggattgtccctcaattcattctgtctggcttggcggatgtgttcacaatggttggcttgcaagaattcttctatgatca

SEQ ID NO: 3984 - DNA, 919 bp, Setaria italica
  Peptide Sequence Number=SeqID_69958
cgacctcaaccacgccgacctcgccggccacctccccgaggagctcggcctgctgaccgacctcgccgtgctccacctcaactccaaccgcttctgcggcctcgtgccccgatccttcgataagctctgcgcgctccacgagctcgacctcagcaacaaccgcctcgtggggccgttccccgacgtcgtgctccggatgccggggctcaggtatctcgacctccgctacaacgacttcgagggccccgtgccgccagagctcttcgaccgccagctcgacgccatcttcctcaactccaaccgattccgcttccggatccccgacaacgtcggtaactcgccggcgtccgtgctcgtgctcgccaacaacgacttcggcgggtgcctgccggcgtccgtcgccaacatgtccggcacgctcgaccagatcatcctcatgaacaccgggctcaagtcatgcatcccgccggagatcggcgcgctcaaggggctcaccgtgctcgacctcagcttcaacaagctcatgggcgccatccccggcgagctcgccgggctccggagcgtcgagcagctcgacctcggccacaaccgcctcgtcggcgacgtgccggaggggatctgccacctgccgcgcctccagaacttcacctactcgtacaacttcatcaccggcgagccgcccgtctgcctgcacgtcgatcacgtcgtcgaccgccggaactgcatccccgaccgccccgaccagaggtcgccggagcaatgcagcttcttcaagaaccaccacgtcaactgcgacgcgttcaggtgcaagaagttcgtgccgccgtcgccacctccgccgccgccgtctcctcctccaccgtcgcctccgccgccatcaccatcgcctcccccgccatcgcctcctccaccatctccc

SEQ ID NO: 3985 - DNA, 2072 bp, Setaria italica
  Peptide Sequence Number=SeqID_69959
gctgaattcacaatgtttacccaagacatgatcggcgttgctttcctttgcttctgcttaaaacttgttatgtacaaaaatatacaggtaaaattgctgctctatgagaaactatagctgctatttaaaccaccaccctttacctcccatatccataacatgtccaatggtgaagctttcactcgataaatatgccaagtacacatgttaatcaatgccgcaactcaaatcaccctcctatcctgctctggttcagttacaacggggagctctgagcatcggcagggattgctcctacagcccaagcacatcgaactcatggggcatgtaatcttcgctcggacgatagtacttgttgggggaatacaaaccgaagtttgtaacctggctgctgtacaggcatgcaaatctctcgacctgatgagcaaatcgggaattttggtaaccagtcttcatgagctgtccccacaccttatgaaacttctgatgatgttgcctctgagcctcttgatgaaggcggcgaacatgctctcgctgttgcagcagatcaacatgttcagagaacaacttttccttctgattttccgtgatatcatcaaatttgagagaccattcaagatgatggattctgtcttcaattgaatcacgttccattctaagatgtctaagctccttccgtgtcgacttcgattctgaaagaagcttcacctcatgctccagttctggaatcaccagcatagtccgccagcccagaactttcttgctgcgcagaatatctccatatatgtgatcaccaacatagagaatctgtgaactagaagcaatagaaagtaatctgtgaagatgaccgacattgcctccctggtaaactttgtgaactggtgttgcatgctgatgacttgatcttgggcttccaatctgaatatcagcatttagaagttttccagaatcaggctcaacttcaaagaggcccgcacggttatcatcgtggaagaaacttggcttcgaactgccagttattacaatatcaaaatattgaagccacttgtggttgagaccagatcctgcatctgaagtgtatgctccacaaaggtagttcatgacaacatcggtgtagtcccacaaactatttgtcactaagaatgttgagcgtccagatttttttatcatttcaagcattggtacaattgccaagtcctcattgatgtacctgccaggttccttcgcaaccatccgctttaaagttccatcacgatgacacaagtcaactgcagacctcacatctttatacataagcgggtagtctgtgccggcaggtacttttccaggattattgtccataaaatcaacaagctgagcaaatagataagcttcacccaatgagaaaagcgtatctatcagggcataatcaggttcatcaaatgaatctcttatcaatgtactcccataagcagcaactttttcttctttcgacagttccctaaaaccatggtatgcaacttttacatacttgtgccgatccatcttcaagatatttcctctcttcttgtcaagaactagccctctgaccatgtatttccaatcaaactcccaagtcaacagctcttcagggtagtgcagatccttcacaagcttctcaattgtaccatagtaagcaagggcctcgaaggtctcaggcttgtactgtgcaagagtgtagtccatatcaaatcccactgctgtgatgttcctcatgttgagtgacctattgcagaatatcgccttcccgatagaaacgcttcttggttctgccgaaggtgttgaccatactgccccagttgacgttgtctccactgcaccgctgtccatccttacagcactgcaacctctggtgccgccggaggccgacgcggcggcgggcgagcacgaggacgacgcggacgcgaagaagaggagcaaggggggcgagaggggcgcgaggtggagtgcggcggagaggggcctcctggcgaagagcattatcgctggttctcagcccgcgcgccttaaataggcggagcgccggatgcgacgaggacgggacgacggaagcg

SEQ ID NO: 3986 - DNA, 359 bp, Setaria italica
  Peptide Sequence Number=SeqID_69960
actaactcaaagcgcatcgtatgacttttctatagatagaggacttgtctgagcatttgctatatgaaaataacataagcctgttgtattctaagcatcattctattggtgcagtgaaggaagtcaaactactgggaaatatgtttcatttacgctttgtaggaatttcatcaactgcatcgcctggaatttcttttaaacaaaacattttgaccttgtcaaaaaatgcatggcagtacttacacaacttcttgaatcgtgattgatcccgattattttgtcatctgactatctctcacaccattgcctacctgactctctgccttgttctcatgcggtcatgccctgtgtttcttcta

SEQ ID NO: 3987 - DNA, 346 bp, Setaria italica
  Peptide Sequence Number=SeqID_69961
ctttttagaaaatatgtcgcaccgcatctacctgttgccatgccttatcccctaggtgctgggccgagtcgacgtcgagtgcgttgtgcgtcctctagccactttaagtgcatcgttaacagtatccagccagctgttcctcactaccctactgtcgccgctaacccctattgctgccgcgcatccatcagaacatgtcagagctccacccgccatagggcagggcctcgggataaagccgagctcattatgcaagtttcatggccccgaagtacatccacatcacatagccccaacatcatacctagaatctactaccaaaacctagcttgttatgctgcccgat

SEQ ID NO: 3988 - DNA, 477 bp, Setaria italica
  Peptide Sequence Number=SeqID_69962
ttgggagtttctaattaccaaagtctttgttgtcccgtttggttatggcatcaagaagatgaccgtcatgttgaccatcgtggacgatctcgtgtctgttgacagtcttattgaggaccatcttacggtggagcccatcaacgagtatgtccagagttgcgacattgttgccttcaacaagatctagaatcccagttactgtgcaccaaatttgctgctggggtcttggacctgggattggttgcgacgacaagcgctcaagtttctcgagggatgcgagctcgcatcccttttagttactctgctatagaaatgtcagtcttgagtctattgttgagtgctgccaggtttttgaatatccgtttgtcttaagaatagtcgaactgctgggcggtgaaacatctgctgtgtctaaagtacaacagttttctttgcccagcagttttctcatcctcattcaaaactagcattgcaaag

SEQ ID NO: 3989 - DNA, 1102 bp, Setaria italica
  Peptide Sequence Number=SeqID_69963
aggaggtagtgttttggcgacaatcgtggctggaggggattattatggtttgccaggatggcggcttgcatttatattggttgcatttgtgagctttgtaattggacttcttgtatacctttacgctgttgatcctagaaaaacttctccaagccattatggtggtgatgaggacaatgagaggtcacatttggttagcaatggtatccttcctccgcattctatctggaaggattcatggatggcggcgagatcagtaatgaaagtgcggacatttcaaatcattgtattgcaaggcattgttggctctttgccatgggctgctgtagttttcttcaccatgtggtttgaactcattggtttcaacaacagcagctcagcagcgctgaacagcttttttgctattgggtgtgccagtggatcatttctaggtggtgtgatagcagaccgcctatcaagatactatccagattctgctcgaatcatgtgtgcgcagtttagcgccttcatgggcatccccttttcatggatcctccttacagtcattccccagtctgttgattactggttggcctatgctgtcacactcttcttaatgggcatcaccataagctggtgcgctacttgtgcaaacaaccccatgttcgcagaggtagtccctcccaagcaccgcacgatgatctatgcctttgatcgtgcatttgaaggctcatttggctcactggctgcacctgccgttggcatcgtcactgaaaggatttatggctacaatgcaaagactattgatctagcgcatggatcagtggatggagcttatgcactctccagaggtctattggctatgatgattgtcccttttgctctgtgtctcatgttttacaccccattgtacactgtgttcaagcgtgaccgagataacgctagattggccagcatcaaagaacaggagctcatatgaaaggtttctgacgaggaatactgatgtggtttcttgattcagttggtgccagtttctaggtttgattattaacatttacaacactgccaacctggaagttttgattgaagtactttggttgatggctaggaaattcgcttttca

SEQ ID NO: 3990 - DNA, 611 bp, Setaria italica
  Peptide Sequence Number=SeqID_69964
catggaagcctgcctctagatatggagaaggcaagggaaagtgagttaagttctagtctgcacattgcagatctcaaggagcatggaacttcatatcctggtagccttgcggaagcgggagttgcagctttatctaagatagaccgcaagacagattctttagtgccatcttccatcaacatccttgcacctgatggtgcgactggtcctcagcaagaacagagtcaacagagcagacagataccaagctcaactcctgaagctctgaaaaagaaatctttcatgaaagtttatccactggactttgaggacaacaatggagggttgttactggaggtaccggacttggcctttgagcaagaaatgatggatacctacccagaactgtttggggatatggatgttgacgatttcttaagctgtgattttgaaacgatgaccgcagacgaatcagtggaagcaatgtctgggttactgtgggacgacttggaggaaggggagattccaacaatgtgaaggaagaacatgatactttagagcttgtgctagttcgagcaaatgagtctgcatcgtgcttttcctgggacgttctgtaacgtaatggtagagca

SEQ ID NO: 3991 - DNA, 476 bp, Setaria italica
  Peptide Sequence Number=SeqID_69965
tacttccttctccaccaagttgagtccaattccaccaaatcccaatcccccttgggttcctcttcggttgcagctgcagatcggttccatcgatcggaggaagacatctcgatccaatccatccatttcactcgttgaagatggcgacggcagagggatccaccatggaggacgaccccgacggcgccgccgccgccgactcctcctccttcgtgctgcgctccggcgtccgcgccggcctcaagcgcgaattcgccttcgccatcgcctcccaggcagcactctccgagcccctcggccgcacccgccgctcatcccgcacactgctcaccacctcatcgccgccttccgacggacccaagcccaagcgcccgcgccctggccctagccttgcagatcctccaccctcccccctcccccctcccccctcccccctcccgaaggagaaacagtcgagcagccccggccccgtgctc

SEQ ID NO: 3992 - DNA, 425 bp, Setaria italica
  Peptide Sequence Number=SeqID_69966
gcgatgatttatgaaatatacaatagtagtaactgctaaaggcaatgagattccagcaaacagcacgcggtaagcacgctcccctattattttttccccgctttcccgtaggcttgccataccactatggaatacagcaaaaatgatggtaaggaccaacataacaacctcgtggctgtcggagacagaggcgacggcgtcgaggaacttggtcccgaccccggcgccggggtcgatccacagcacgttgagcgcccaaagcacggcggcaagtatcgcggcgaagtacgcccacgacgccacgctctggtccccgagccggaacgcggcggagtccctcccccacgagcccgccaccgccagcgtcctcccccttccccttccgccagccccgcgcccgcgccgtcctccgcgcccgcccccga

SEQ ID NO: 3993 - DNA, 264 bp, Setaria italica
  Peptide Sequence Number=SeqID_69967
tcgtcttgttatattggatcttttttctatttttacttacgtctcagcttgtaaaacacatgcaatggctgattcagtcatcgttcacgatgctagctttgcatcatttgctgccttttttttctttcttctgatcttggttagtgcttagctaaccctgtatttgagaaactgatcctgtaaatgatgtaaggagcatcagcagcaccggactgctcctgttgtcatagagaaaaatacaaatttagcgtttggaaaagagag

SEQ ID NO: 3994 - DNA, 401 bp, Setaria italica
  Peptide Sequence Number=SeqID_69968
aaatgaaataacatgcttggttaaatatccattactatgcatgattaaattatcaaatagaatataaaaccataaaaatctaatgtaaatatttgtgcaattatcctaatattgagaaaaatagaatgactgtaccatgaatatgatgctaaacatgattgatcgccccttctatctttgacaatacccttgccatgccacgggaacaccatagatagacctcaatggcacgcacaactccaatcggtaatgatggtgtggatggtacataattacctttttttttctttataaatcataaactttcctgatttgaatagtttagattatgtgcctcgtaaactttaccattcttaccttgtattccatcgagatgcacaactgagggtgcctaagccaca

SEQ ID NO: 3995 - DNA, 1442 bp, Setaria italica
  Peptide Sequence Number=SeqID_69969
caccaatcacctcttatccctacgggactgcccccaaaacgatggccgcggcggcggcgggtgcggcatcttccatcttctcttccacgcccccgcgtcgcctccccttccctcccgctcccgcccgcaaacccctcgcggcggccgcgcccaaggccctcactctgtcatctcagaagctcctacgcctcccgtgtccgcccgcttcgtgcgcccccgcccccccgccgcccccgcccgaggggacggagaagccggaccccatcaagctcgcgttcgcccgcgccgccgcctataagaaggaaagggacagcccgagcccgtcgccggccccgcctcccactcccacgcctccttctcctccttcgccgccgtcgcagccgcaggcttcggcgggggagtccggcagcaaggaggccttcaagcgggcgctggagtaccggaacggcaacgggaccggagcgcgcgctggtggtggtgaggccccgctgttgggaggatcgccggattttggtcaaaatgccttacttagtgaagatgtcacgctcggcaagaagggagagtacgagtttgatgagactgattttttgggcctcgatttttttgagaaaaagcgttataaaggtccaccacctgggctggctccagcttttgagcctttgacagataacgattttcctgaggtggagataataattggagaccgtagcaaatttgagaagtctcgtggctcaacaggaatccaaccagcagatgacagggagtcagaggattcacaatcaactagtgaaacaaatgaagctgacaaggttgacaaagcacccccttcaactgttatcgaaccagaagaagatgaagatgtttacagacccactgttagatcatggggaatgtttccaaggccacaaaatatttcaaaagcgtatggtggtggaagaaacattcgccttggtggagagactcaaagtgcagaagaaaaggcagccaaggataagcgcaccaaagagctaatagctgcatataggaatcggcaaaacatggtagtcgatgcaaagacaaaagcagaatgtattgaggccttgagggaaggtgatgagatgatgaatactggaaggcttaaacaagcattgccttattatgaaaaagtgatggatgctgtggactttaagactgaacttcatggaagggctgctttgcaatggtccatctgtctcgattcactctgcaggtccaaggaagcaatgagcatgtatagcaaactcaaaaaccacccgaatagtgagattagcaagaaggcaaacatgtttgtgttcagctttcaggcgatggacttcatgaaggtgaacagcacgccggtgcccaagagcacaggctacgagacgtacttcacaaagtttagcgggcagaagaactactacgcgagcctggacgagcccgaggtc

SEQ ID NO: 3996 - DNA, 1214 bp, Setaria italica
  misc_feature (1190)..(1214): n is a, c, g, or t
  Peptide Sequence Number=SeqID_69970
attctgtatctgataattccagtatgattttagatctccacacatgatcttttaaatgttccatgtacttatctgcattgcctatgaacatggtatattgagaagcaatttcttgttaatattagaatgctttgtaagcagtgtcagccttggcgtaaaacaataagagggctgtattagtttatacttaacatttaagtagtaaaattaactaatatttaaaaagaatagagaggaggtgctcatggtccaccctgacccctccaccattgtcagtaaggataattacattcctatatctcaatcaggctccatttgcaacgcagcaatatttcctgactccagtaggaattggactgttctggtgaaatgccagccttccaaataggctgcaaggtttgaagttagttgccagcatagtataaagttgtttgtcaagtttattaaatgtgcataaatgtcccacagtgctagtttaatttacagatactcccattatgttggtttgaaacttgttatacttttctgtaccaagtacttttgaaacatcttggagcagttttcatgctatgctatggtacacatgactttggtatgtgatctaaaattttatgctgaaggccttgagggaaggtgatgagatgatgaatactggaaggcttaaacaagcattgccttattatgaaaaagtgatggatgctgtggaagtgcagactgaacttcatggaagggctgctttgcaatggtccatctgtctcgattcactctgcaggtccaaggaagcaatgagcatgtatagcaaactcaaaaaccacccgaatagtgagattagcaagaaggcaaacatgtttgtgttcagctttcaggcgatggacttcatgaaggtgaacagcacgccggtgcccaagagcacaggctacgagacgtacttcacaaagtttagcgggcagaagaactactacgcgagcctggacgagcccgaggtgggattcgaccagatcatcccttacatgctcttcctcgtctccccgatatttatagtcgcgtttgctgcgctgaggaaatccttccagctatgaacagaaatcacgaacgaatcactgaagcttgaataccatacaggagcatatagcttggtaaatagaaaaaaaatcatgctgtatagtttcgttgaggcgttccttttgacnnnnnnnnnnnnnnnnnnnnnnnnn

SEQ ID NO: 3997 - DNA, 1929 bp, Setaria italica
  Peptide Sequence Number=SeqID_69971
ttttttttttttaggtaatacagaggggaactagcaccctcgatcacattaccatacgatacaattacaggcttcatgccgctaatagcagagccctgatagttacgagcctgaagaacccatacaaaagtgtacaacaatgaccggaaaaaactaaaaaaaagaaaacacgagacgccacacacagccccacagctagtctcgcctttcttgttcccttccaggcttccagtagcccgcagcgctcatttgtactccaggatcatgttgttctcgggggccagcccgacgcaggccctcatgatgttctccagcatcgccctctgcttcgccagagcgttcaccaccggtgtgccggggggaaccaggggcgccttggtgaggtagctcaggatggtggccactgggtggaaggagtggaacttctcctctccctcagctttcagctggatcctggtgctgagctcagccaggagcaccagatcaagtatgattggtgcagcgaggagcgagtcctcgcaggtgttgtgcagcacgatggtgttcttgccgcccatgaagatctcagaggtgtactcatccatggctctcttgctgtccccgacgtagggcacatacttgatcacgacaacgtgatcaggatgctcgccgggctcataaaggatagcgttgctcgagaccatgtcatccaccacattgctcttggagatctccttggagcggaatgtttgaggggctgacaggttcatgccatcgttgtttcccaagtggttgtagctcacaattgaggtgggctttattccagcaccaacaaggaaatcaaccaaaacagacttcatcttggtctgtccactcttgaaatcatcaccaccaatcaagcagttgtttttgatagcaaggtcaatcaggccaggcacaaaggtgttctgggggcttccattgatgaatggtacaccctccatgacacaggcaatggcatacaacgtcgatggtgagatctctgcctcgttcttgtctacagatgccaggaggttctccacggtgtcgttgagaccagcacagacattgctgtacctttcagtgtttgcagtccacagcacaactatcttgtccaccttgttcttctccttgaactccctgatgtccttgatgatctggtcaacctgctctttcttggtgcccttgatgacattgttggcgcgagaaccctggttagctgcaatgaagtccggatcatagatgcccggaagtggcaccatggactccatgtaaggcctgagctgcttctgcaggtcgatgtccagcaccttggccctggtcatggaatcagccaggttcatgttgctgatgtcccagcctccgaacacaatgtcatcagggttcaccatgggcaggaggctcttgaacggggcgtagatctcctccccgttgtagctgccgaccctgatggtggaggcctgggtgagggagccgaagtagttggcttgctgcaccttgtccttggtcgcccatgagatcccctccctgttggcgatgaccccagccgtcagcgtggacccgttgttgccgccccaccccacgagcatcaccccgagcttggggacggcggtgctggtccggaagttgtacttgacggacttggggcggacgacccatcgggaggcgccgtccttgccctcgtgcaccagctccgtcgtgtcgtaccggtactccgactcgatctccgacgggccgtaccgcacgttcggactctccacgcggaagctctcgatgaacatcttgcctctcctcccctctcgatcggaccactaccccgctcgctgctctcctggaatggaatgcgaagagtagcgcgagcgaaaggagggaggaggcggctgcgctgtattagtaaattaaacttaaaaggttaaaaaactaaaaaaaaaa

SEQ ID NO: 3998 - DNA, 520 bp, Setaria italica
  Peptide Sequence Number=SeqID_69972
tggaactggggcaccgtgtcggcgcaccgcatgccgccgcccgtcgtcgtggacctcctgcgcgccaacgggatcgccaaggtcaagctcttcgacgccgacccggccgtcctgcgcgcgctcgccggcagcggggtgcaggtcatggtgggcatccggaacgaggcgctcgcggggatcgcggcctctcccgccgccgccgacgcctgggtcgcgcagaacgtctctcgctacgtcgccgccaggggcggcgtcgacatacgatacattgctgtcggaaatgagcctttcctgacaagttatcagggacaattccaatcatatgttcttccagcagtgaccaatattcagcaatcactggtgaaagctaatcttgcaagctacattaagcttgttgtcccatgcaatgctgatgcttatcaaagtgcatctgttccatcacaaggtgtattcaggcctgacctgactcagattatgactcagcttgctgctttcctcagtacaactggacgcccccatt

SEQ ID NO: 3999 - DNA, 452 bp, Setaria italica
  Peptide Sequence Number=SeqID_69973
gctgcaattgtggattcttccaaaagactaatcctgctatacagtcatcggccattgttcccccggttagatattgactaggaggtttggaggcgccacctctgaaaatgcctcattatgcaaattgagtgctatctacttctgacttacagcctcatctgtaatcttcgcctcagctgcagtatctctccggaccttcctagtcgggctcctcattgtgacaatttcttcagcagttgttggatgaacaccaacagtggcatcaaaattttgcttcgtcaacccagccttaacagcaattgcaacaccctgaataatctcaggtgcatcttcaccacacatgtgcactccaaggactttgtttgttttagcacatacaataaccttcatatacacgcgatcaggtagaccagaaagagtggccctgagaggtttgaaatttgatgtgttag

SEQ ID NO: 4000 - DNA, 303 bp, Setaria italica
  Peptide Sequence Number=SeqID_69974
gaatttataaaggggtttataactagctaaaatttgaaagtcaaatcatctttgtgctaaacctgttagggtaataccccgctttgaactatagcatctaattgattgcatattgtgataatataccatcacaaagtttatttgtgcagattactttcagaaggcgaactccatgcatttatttcttacaaccccgcggtgggatggactgcatccatcagtttgtagcgtttctcttgaaccaaccaagaccagcaacccaatttagttaattaccttctaaatttaatttagttaattagt

SEQ ID NO: 4001 - DNA, 412 bp, Setaria italica
  Peptide Sequence Number=SeqID_69975
gctgtgtttaaactcaatgaagggaaggatgtacttgagtgcaaggttcaggttgagacagaaatgctgtccccatttgacctggctgctagttggagggctcatcaggagtatgttcagccttctatggtgcgaggggcccatgatattactatcaacactgggttagaaggcagggccaagggcgcaactggagggcatgcaccatcactggaagaacaaagggcaatgtttgttgatagaggtgttggctcaccaaactttgcaagaccaacaaaggaaaccttttcagtgagcaactttaagttggattctgaagcaaaggatatgccagcagcagaaggagctgttgcagcagctgcagtagctgatcagatgtatggcccaaaagaggaccgcaagttgaccattg

SEQ ID NO: 4002 - DNA, 872 bp, Setaria italica
  Peptide Sequence Number=SeqID_69976
ttaattagttaaaggtaggttttggtggatggcataggatggtaagaaattgaaaccgaatggcatataagaagtaagcaatttgtgatggcagatccggggtgaaaagaaattacaattgcaataaaattggccctttatataggaacactatttttttttcagaatgtggaatagttatatgcaaataacttgaacgcaggtatatgaaccggtggaagaaggctcttacataaaaatgatcgacatggttagtgggaagggaggccaactacagattaatgacataagtggttacttgcctggacggattgttttcttcttggtaaactgtcatctgacacctcgtcctattctgctaacgagacatggcgaaagtatggataatgtcagagggagaatcggtggagactcttctttgagtgagtctggccagctttattcaagaaagcttgcaagctttgtagagaagcgactgaagtctgagaggactgcctctgtaagtatgccatttgcttctcatcataacaagaaaaaatatttattaatttatgtgcaacaaccaagtcagatatggactagcacactccagaggacaatattaacagcacatccgatcattggttttccaaagatacaatggcgtgctcttgatgagataaatgctggggtttgtgatgggatgacatatgatgagataaagaaaagtaaacctgaagaatatgaatcacgtcgaaaagacaagctgaggtatcgttatccaagaggagaatcctaccttgacgtcattcaaagactagaacctgtaataattgagcttgaacgacagcgtgcaccagttgtaagtacaataagactacaaccaaggacca

SEQ ID NO: 4003 - DNA, 435 bp, Setaria italica
  misc_feature (1)..(18): n is a, c, g, or t
  Peptide Sequence Number=SeqID_69977
nnnnnnnnnnnnnnnnnncgtataaatccttatgacctgaatgaacatgctcagaactcaagccacaattaaacatgcaattctgtaggcgtcagtccgggcgcattgaattataaagggtttataactagctaaaatttgaaagtcaaatcatctttgtgctaaacctgttagggtaataccccgctttgaactatagcatctaattgattgcatattgtgataatataccatcacaaagtttatttgtgcagattactttcagaaggcgaactccatgcatattttgctgacaaaccacttgaggaagtcccaaatattgagatacctctacatacaataattgagatacaaatgggtgttgctggtgttcaagagaaacgctacaaactgatggatgcagtccatcccaccgcgggttgtaagaataaatgc

SEQ ID NO: 4004 - DNA, 2227 bp, Setaria italica
  Peptide Sequence Number=SeqID_69978
taagtacgttacgttacccttacgacaagacaatacaaaccgctggatttcaagtttattttaaagtcaaaaaaatagatagctctcagtgcattgttgaggagggaccaaaccgatctctaggttgccagagcaatgaagttgaaatgaggactgctgtgtttaaactcaatgaagggaaggatgtacttgagtgcaaggttcaggttgagacagaaatgctgtccccatttgacctggctgctagttggagggctcatcaggagtatgttcagccttctatggtgcgaggggcccatgatattactatcaacactgggttagaaggcagggccaagaatggcttcgcttctggtttggagcttgatttagagaagtatgtagttccaacaccaaacatgggttcaggtgttgtttatgcagctaacttgactgaaaatccacgttcattattgcaaactgggagttcctcaaacaatgataccacaaaggacattttgtacaactcgactaaaggcgattcatccccgaatcactatattaacactatgaagggcgcaactggagggcatgcaccatcactggaagaacaaagggcaatgtttgttgatagaggtgttggctcaccaaactttgcaagaccaacaaaggaaaccttttcagtgagcaactttaagttggattctgaagcaaagggatatgccagcagcagaaggagctgttgcagcagctgcagtagctgatcagatgtatggcccaaaagaggaccgcaagttgaccattgtgttggttgggttgccagctcgtggtaagacctttacagcagctaaacttacaagatatcttcgatggttaggtcatgaaacaaagcacttcaatgttggaaagtaccgtcggctcaagcatggaaccaatcagactgctgatttctttcgtggagataacagggagggcgttgaggcacgcaacgaggtggcagcattagcaatggaagatatgctatcctggatgcaggaaggtggtcaggttggtatctttgatgccacaaacagcacaagaatacggagaaacatgctgatgaaaatggctgaaggaaaatgtaagatcatctttttggaaacgatatgtaatgacaaggatgttctcgagagaaatatacgattgaaagttcaacaaagtcccgattatgcagagcagacagattttgaagctggtgtgcaggattttaaagagcgattgacctattatgaaaaggtatatgaaccggtggaagaaggctcttacataaaaatgatcgacatggttagtgggaagggaggccaactacagattaatgacataagtggttacttgcctggacggattgttttcttcttggtaaactgtcatctgacacctcgtcctattctgctaacgagacatggcgaaagtatggataatgtcagagggagaatcggtggagactcttctttgagtgagtctggccagctttattcaagaaagcttgcaagctttgtagagaagcgactgaagtctgagaggactgcctctatatggactagcacactccagaggacaatattaacagcacatccgatcattggttttccaaagatacaatggcgtgctcttgatgagataaatgctggggtttgtgatgggatgacatatgatgagataaagaaaagtaaacctgaagaatatgaatcacgtcgaaaagacaagctgaggtatcgttatccaagaggagaatcctaccttgacgtcattcaaagactagaacctgtaataattgagcttgaacgacagcgtgcaccagttgtagtcatagctcaccaggccgtgttaagagcactttatgcatattttgctgacaaaccacttgaggaagtcccaaatattgagatacctctacatacaataattgagatacaaatgggtgttgctggtgttcaagagaaacgctacaaactgatggatgcagtccatcccaccgcggggttgtaagaaataaatgcatggagttcgccttctgaaagtaatctgcacaaataaactttgtgatggtatattatcacaatatgcaatcaattagatgctatagttcaaagcggggtattaccctaacaggtttagcacaaagatgatttgactttcaaattttagctagttataaaccctttataattcaatgcgcccggactgacgcctacagaattgcaataag

SEQ ID NO: 4005 - DNA, 1274 bp, Setaria italica
  misc_feature (1)..(18): n is a, c, g, or t
  Peptide Sequence Number=SeqID_69979
nnnnnnnnnnnnnnnnnngtctagccatcatgatgtagggatttagagaatagatccaaagaaacatctgcatcgccatcttggatcacatgatatacagtttgatttaaacatcgcgactgctcagtaaacactctatgtttcaaggtacattcccttccttccttgtgccttactgcaccagaaggtcacaatccaactcaaaagtgaacgtcgcgactttattagaacatccagccttggtctattggcaattatgtgaaaatggggagcaaaagaaaacaaaatgattcgtcggttagttcaccccatagatccacttctccgcgttgctggagtaagagaccagctccttgggctcaaaccacagagcaatctcatcctttgctgtctccgggccatcacttccatgaatgatgtttcttccaacaacaacagcaagatcacccctgatggttcctggttcagatttctgcgggtctgtggcaccaattagttttctcccatacttgataacgccctctccctcccaaaccattgcaagtacagggccagagctgagaaagtcacacagtccattgaagaaaggtctgtctttgagatcatggtagtgcttctgagcgaattctttggatggaacaatcagcttgatggcaacaagcttgtagccttttctctcaaatcgagacacaatctcagaaatcaggcctctttggacaccgtcaggcttgatggcaatgaaagtgcgctccatctccgcagcatgagcctcctggtcctggagcatgtaaactgcagcggggacggcggcggcgaaggctccccatcccgaggaggcgtggtgggatccctgcttgtgataggcgtaggcggtggggagggtcttcctgcccaggttggtgagcgtggcgagcgcggcggtgcggccctcggcggcgaggatggcggcggaggaggaccgctgggaggcggaggcgaggagggacctggcggcctggaacagcttcctggaggcgctcatggttgctcgcttcgtgcgtggtgggtttgcggcggggtggatcgggaggacgcaaggtttcctctggcgctcgtcggtggtagtagcagagagtgagggggagggatggcgaccagatgggtgggtgtgctgtgcgtgccggtgcgcttgtcgtcttctagacgacacatagggataactctggtaacagtagtagcgacaagataacttggccacgcgggccccaccgctcagctcctccagttcccatcgg

SEQ ID NO: 4006 - DNA, 1095 bp, Setaria italica
  Peptide Sequence Number=SeqID_69980
tgcaaaagacttcaggttggcagaggtcaagttcatctccagatgggagcagaaaagcctcaggttggcaagcaccaggttcttctacagagggcagtgcaaaagctgcatggcaccgatcaagtacttcaccagagggaggcagaaaagcttcaggttggcaacggtcagcttctttcactcagggaagcacaaaagcttcaggttggcaaccctcaggttcttctacagaggggtgtgcaaatggtgatggctggcaacgaacaagttcgtctcccgagggtaccagaaaatcttcaggtttgcattggtcaggtcgtgagagatcaaaggttaattcgacatctggtgccagcgaaaaccgtaaatcgtcaagtcaccaagcgacgacaccaactgggaggcactctttggaagtcccaaagagacagggaaatggcgacaagagtacttctgtctgggaagaagctctaggaaactctagggaagcatcaaagaggcagggaagcaacgacaagaacgctgactggggagaggctataggaagcaacaggagctggcattcatcctctggcaatgccggtcggggcagccaggggagtcaccaccatgacagacactcccatggcagcgaatcccggcgtggcagctcaaacaaccctcggaggtctgaccatcgtcatgattatggcaatggagggtcatcaagatcatcgtcgagagggcaaccccaaaagggggtctgcaaatactatcagaatggcaactgctggaagggtttcaagtgccagttccagcaccgttgatctcggcggtggcaaaacgatgcgcagttgtgtcgtcgtggtcacaattttgtatagccccatatgatcaccccgtagtcagtataggagcgagcttattaaccatgttggcaccaccaaagttgccagtagtatatatccatcagagcaggaatattgttaaactagcatctcaagcttacagggccactgatttatatggctgtggaggtaggttctccgcttttggagggtgaatcattctgctcagttaaaccgagtggttaggacaaaaaaaaaaaaaaaaaac

SEQ ID NO: 4007 - DNA, 1303 bp, Setaria italica
  Peptide Sequence Number=SeqID_69981
gaaaacaaagactcgcacggatttacagaaggtgtgggacaaaagtaaaataaaatcatatggccattcgatggcagtaacccgagagccaggaaattgttgagcttgtgccatccctccatttcacattacatacatgcagcctgccccccagcaacataaaacggaggcttcacattcgcaacgagaaaaaaacaaaggcttcacgctcagaagcagctttcaccgcaactgctctgcgtctaggcctcctgatcgtcctcctggccgttgtcctccatctcttgaccatcgacggctatatgcagcatcgcaccaggaacatcaaccggttcttggatggccgcctctcccggaccttcaccattgtcccccattccttggttctcgaagactatctgcaccatcgccccaggggcaatgacccctccttccatcatcagcaggtcctggtggacccttcccaagagtgctgaattgtcgagttccattctgtggtcaggggtatgctgctgattgaagcgtcctgggagctttaaactggattcgtagcacgctccgcaaaggtcaaagccaattaactcggtgcagtccttgcatttgtacctcttaccatgtatcggatattccccacatgagtcgcacccaactccaatgtgaatatttaataggtcatcatcatgttgtgccctgctgcttccttttgcacttgaagtacctgaagatgatccttcacgattgcattgacccttcttagactgaactttttgccctctcgattcatattccgctggaaaatattcttccaggaaatgatcaaggtccaggcaaacattaggaaaacatccagggtgaagacttccgcaaacatcgcatttgagtgcttcctcagttaaggagggcaaacaggatacacaatacacatgaccacaattaagaacagcaggttgatacagcatctccttgcatagagggcatgaaacatcctccaacttaattttctttgaatgatcatccacaacgctgccattcaaggaaacttcttgtggaggcctagttttactgtcttcatttctgttgtccgcatcatttccaacattgttctttgagtttaaaaactcgataatttggggagagtacatttctatacgcttctcttcctctagtacttcttcttcccttcttttgtaatctgcaggatcaagctttcgaagcaagtgatgcatgagctggcagatacttggaaaatgtttaaagggctgcctacacacagcacaatgggattcctggaagatatgcatag

SEQ ID NO: 4008 - DNA, 786 bp, Setaria italica
  Peptide Sequence Number=SeqID_69982
ctcagcgatacgtgcatcgatccactactactgtccagtgctcgcttacgcactcaaccaacttcacatcaagctagctaatcgacaagcagggagaggcatggcgctcgcggaggggaacggcgtggtcgtcttcagcgaggagcaggaggcgctggtgctcaagtcgtgggccctcatgaagaaggactcggccaacctcggcctccgcttcttcctcaagatcttcgagatcgcgccgtcggcgaagcagatgttctcgttcctgcgcgactccgacgtgccgctggagaagaaccccaagctcaagacgcacgccatgtccgtctttgtcatgacctgcgaggcggcggcgcagcttcggaaggcccggaaggtcaccgtgagggagacgacgctcaagaggctgggcgccacgcacttcaagtacggcgtcgcggacggccactttgaggtgacggggtacgcactgctggagacgataaaggaggcgcttccggctgatatgtggagcctggagatgaagaacgcatggagcgaggcttacaaccagctggtggcggccatcaagcaggagatgaagcctgctgcatgatgcttctactcgatcagcctccgagcccccccatgacgcaacacctcaaatttcccgttgctgcttctgcttgccgatttgactttgtgctgtgcattttcgaaatttgacagatcatgtatattattgtccttttgttattgtgatggacagtgaataaagatgtaaccattacgcgttaaaaaaaaaaa

SEQ ID NO: 4009 - DNA, 899 bp, Setaria italica
  misc_feature (824)..(899): n is a, c, g, or t
  Peptide Sequence Number=SeqID_69983
taaaattttcaattctagcatgtatgacctaacattttagcatatttgattatcttttgggcttttggcaattggcatggggtcagattgcagagtttacactcgtgcaaattacaattagagctcctatgccacataaaagtagtgttggatgtgttatttcatgagtagcctagtgttgagtagcatggaatttgttcctctgatacgcttggcccacacgtctgtgaccatgccagaggtaagtagtcacaaggtactcatccacccttaaccataacgaataagtgcataaataataccccatgtaatttgatggaatcacaggtgaaagaaaaggctgtggagctggctaaagccatggaatctgaagacggggtgacaggtgctgttagggcattcctcagacacctgccttcaaaaactgaggaacagagtccgccacaatcatcaagcttcctggagttcctaggcccagtaagtcgatgtatgggctgctcatagtgcagaacacatcgatcatggtatacaattcctaggaagaggaattatcatcgtatttcatgaaatgtgctcatagtgcgggtttttgcaattcttttcctgttttcacttttccccctccgggtatttaatgtgtaaagagtgcttgtttggtgtggtgagtatgcggcgcgtataattttgttgtgcaagtttgccgtgcagcaaacggcgatctcacatctgcatggccaatccattgtgtatatgacaaaggttcggttttagttaaaatgttaaattgattcatgcagcaaaataaaaaaaaaaacaaaaaaaannnnnnnnnnnnnnnnnnnnnnnnnnnnnnnnnnnnnnnnnnnnnnnnnnnnnnnnnnnnnnnnnnnnnnnnnnnn

SEQ ID NO: 4010 - DNA, 1879 bp, Setaria italica
  Peptide Sequence Number=SeqID_69984
ggagagcggcgagcggcgtcgcgggagcgggaggaggggaagctccggcgccctcggctcccaacgggaccgctccgggaacagccccccgcccgcggagtcgtcctccgcagtagatgacagaggtctccatagagcaagtaccatgccaggggtgattaagaatgatgaaataacaaatgaaactgttggcccatcgaatttggaaaggtctagaactgagcgccgccggcaaaacaatccagctgatgatcctgctaaacagttatttgatgaaaggattccaattaaaaagaagctcaaaatgctgaatcggattgctacagtaaaagatgatggaactgtggttgttgatgtgccaagtggtctggaaccagctacagctggtgggacagaagatgcttatactgaagttcctgttgacgaatcattggatggagcagacataccatacaggcctcctatgcaaattgttatacttattgtgggtacacgaggagatgtgcagccatttgtcgctataggaaaacgcttacagaactatgggcaccgtgtgcgattggcaactcatgccaactttaaggagtttgtactaacagctggcctggagttttacccgcttggtggagatcccaaaatacttgctgaatacatggtgaagaataaaggattcctaccttcgggaccatcagaaattgctattcaaagaaaacagattaaagaaataatattttctttgctacctgcctgcaaggatgctgatcctgacactggcattcctttcaaagttgacgcaattattgcgaatccacctgcatatggacatacgcatgtggcagaagcactgaaagtacctattcatatattctttaccatgccatggacgccaactagtgaatttcctcatcctctttctcgtgtgaagcaatctgctggatatcgactttcatatcaaattgtggactcaatgatttggcttggaataagggatatgataaatgagtttagaaagaaaaagttgaagctgcgtccagtaacatacctaagtggtgcacagggttctggcaatgacattcctcatggatacatttggagtcctcatctagtcccgaaaccaaaagattggggccccaagattgatgttgttggattttgcttccttgatcttgcttccaattatgtacctcctgaatcacttgtgaaatggcttgaagctggtgacaagcccatatatattggttttggtagccttccagttcaagagccacaaaagatgactgaaattattgtcaaagcactggaaatgactggacagagaggtatcattaacaaaggctggggtggacttggaaccttggcagaaccaaaagattttgtatatctactggacaactgccctcacgactggctttttctgcagtgtaaggcagtggtgcatcatggtggtgctggaactacagctgctggtctcaaagcagcgtgtcctacaactattgtacctttctttggtgaccaacctttctggggtgaccgggtgcatgcaagggggctaggacctccaccaattccagttgatcaatttggtttgcagaagttggttgatgctataaatttcatgatggaaccaacggtgaaagaaaaggctgtggagctggctaaagccatggaatctgaagacggggtgacaggtgctgttagggcattcctcagacacctgccttcaaaaactgaggaacagagtccgccacaatcatcaagcttcctggagttcctaggcccagtaagtcgatgtatgggctgctcatagtgcagaacacatcgatcatggtatacaacaagaagtaccgaccaacaaatacaatacaaagacttacctaga

SEQ ID NO: 4011 - DNA, 1091 bp, Setaria italica
  Peptide Sequence Number=SeqID_69985
agctataaactgacattcccgatctgctgtggatataatctgacattctctgctgtagatataaaccgacattctctgctgtagctacaaagaaatgttgcggatacttggtaagcttatcagacaatctataatctaacctacacatcatttcaagcatggcctatactaccatcactcccaggtggattgctgtggaacaagcatgtctcacgggaaagttccataatctgaaattctaatggaagtcagttgccggagcttaggcacatccgcacacgacggcgatagctgataccttgtcatctgaacgacgactctgagcacagtaaattgatcctcaaacaattgtggcttattgaaggaggttcttgggtggatatgaacaaattatatatacaaaatctttccttaatcattttttgtgtctttgtccaatggtccttgatgctgtctgctgcttagaaagaatttctgctatcagttgtttttggccaaaaagctgtgcattcttcaaaagcaagttccttgatgatgagtctacagaatagccttgtccagtcatccagtccaagaggcacagcagtagatgctttttatcaggcttctggatgtatctctgaattgctctcccaaagatatcctggctgatacgccacccagagcgatttagggctttcatgacatcgttaattagatttatatttcctgataccatgaaagccctagcaaacttctccaaggaggaaggagaaatcagctcagcattgtccttaacaacaatgtatgcatccttgagaagttctgatgaaaccaagatgcctaaagccttctcatgaagagatttacgtactgttctcttactgtacctcaacatgttatacacagaaaatgcttcagaaggaaaacctgcttttcctagctgtaccattacatgagaacaaagctcctcatttaattgatgaccctttgtatgcatatcttcaaccgtcttgtatgctaggtgataaacctttgcattgcagaagtaccttatcaaggtattaaatgtaatattatcagggagatatgttcaattcatccattttctt

SEQ ID NO: 4012 - DNA, 418 bp, Setaria italica
  Peptide Sequence Number=SeqID_69986
gtgagacatgcttgttccacagcaatccacctgggagtgatggtaataagggccatgcttgaaatgatgtgtaggttagattatagattgtctgataagcttaccaagtatccgcaacatttctttgtagctacagcagagaatgtcggtttatatctacagcagagaatgtcagattatatccacagcagatcgggaatgtcagtttatagctacagcagagaatgttggcttgactttagcggattgtgcttgttgaagtcactgtacatggacctagaaagctgcgcacagatttagatttgttaactacatatattttgtaaccagtcctgaacatggaatggacagtttcctgagcaatgaatgtaagatggattaaccaaacatacaaatggagttaatgggattttttggg

SEQ ID NO: 4013 - DNA, 813 bp, Setaria italica
  Peptide Sequence Number=SeqID_69987
ccaccatgccgccgcccagctcctccatcgccagcaatcgccggggcgtcttcgacgtcgtccacacgtcgccatccaggacccgtccaccatctgcagagcgctgcgccgggggccaccgccgccacgagcttagctggcagtgctgctcgcgcgcaccaggaggagttcccggacctcagccggtacgcgcacatactgcagagcggggacctggacctgctggccgtcgctggcggcgggctaacgccggggcagtcgtcgtcgacgacgacggcgtcatcatcgttgacggcgccaccggaggaactgccgccacggcgagaacaagccagctaatcaagcaatgcatcttgcccaacaatggcatatactgcagaattctagctagccaccattagtgaaaatacagtacacatcagcaaagtttcagagcccgtaggatcggaagttaggcagctgatcatcatgtacatgtgcaggaaaatcctggtgtaaatctgtatatgcaggtcaatgagacaatgatgatacacgcagcttaagatgtgtgcagacgcgtacgctgatcatgattcatgagatgtgctgttggtttggccatcacgtacataatcaaggaacaaggtgcttggtcaaatgcagcagtgctggttgggagtcatcatcaagactgaaaaacaataactgaagactggacaccacatcatctatccatccagcagcaactggtccctgcacgcctgatgcttatctgaactcgatccgggctgttccagagcgatggataactcatgagcttcatcatcaggc

SEQ ID NO: 4014 - DNA, 1418 bp, Setaria italica
  Peptide Sequence Number=SeqID_69988
tactaagaataattatggacaaagcaaaggactattcatattcataatcctttaacatcaccctaacatccttattagataaacttcgtgaattgtacagatccaaccacttagagaaacacgacacaatttcaacaggcactttacatggcattatatcctcgacacaacaaactgaatatcaattctaaattttcaattagataccaccattaagcaactcgaatcaattgaatttctttatgaagctgataatgtgctcgctaacttcctttggtttttcttcattgatgaagtgcccaacatctttcataacgacaacatcatcaagaagtggaacgaacttcttgaagccacccttgtgaatgaaatcttgtataccaggggtatgatatgtcaaatccaagtcgccaatgatgaacttgactggtacatttatctcagatgcagtccaggatgatgtgagctcccatgtcctattcagggcacggtagtagttgagtcccccggtgaagccagtcctctcaaattcgctggtgtagtagttgaggtcctcctcagttacccagctcggcaggagtacctgatcatctggggagccccacccggtcttggggatgatcaacggtccaggggtgcgataactaaagaactttctgagcaccagctccgtgccaagacgtttaaattctgcttcaattgctccaggctcctggatccggcagatgtagtattcgtcgccgtagatcgccctgagcccgtcgacgggcctccgcgcggcgctccggggcgtgtaggcgacgctgagcgcgacgagcgcgcgcacccggtcggggcggaacaggcagaggctccacgccgtgaccgcgccccagtcgtgcgcggcgacgaacaccttcctctccccgagggcgtcgaggagcgccaccaggtcgcccaccacgtgcatcgccgtgtactggccgggctcctccacggcgggcgcgtcggagccgccgtacccgcgcaggtccggcgccacggcgcggtagcccgcggcggccagcgcgcgcatctggtggcgccaggtgtaccacagctccgggaaaccgtggagcagcagcaccgtcggcgcccccgccgggccggcctccgccacgtgcaggcgcacgccggtgctcacctccaaggtgcggtgcgtgatggtgacggtttgctcctcgtcgccggcggcagcggcggcggtgggtgccatcgtcgacgtctttgggctggtgggctcgtaccaggggcagcagctggagcagagctcgcgaaggcaggctatgaccatggacaggtcgtgacgcactgacgctacgggaccagcctttttgtttgtgcgcgcgttcttgggtggcgcgcaggatcggagcgagcaaggggcacagcgagagcac

SEQ ID NO: 4015 - DNA, 448 bp, Setaria italica
  misc_feature (418)..(418): n is a, c, g, or t
  Peptide Sequence Number=SeqID_69989
aagtagtaagctgtcggggtccttttccctggcttcaacggtgaagctgttttgctttctcctgggggggtggggggtggggggggggggtgggcttcaccataaggtggtgaagaagccctcccaaagaggcacttagttgacaccgtatggtggttcttctatgatagttataaatcatgctgtgataaactaaaccgtttatggccaatcctttaatgaattaaatacacgggaatgctgttgaagagcgaaagtcgataaggattcctgatatagttacagtagttgttatttcctctaacagtctcaatgctttgccatattctttgcagtttagttattctgatttctgaggtcttacatgttaactgactgttgtcatgctgcagtccaagcatgatcttaatggaaaagntcaacttacttgtttgataagaaagttcgc

SEQ ID NO: 4016 - DNA, 1013 bp, Setaria italica
  Peptide Sequence Number=SeqID_69990
atagctgagaggatgaaggcgttgcaggagctggtccctaaccgccaacaagaccgacaaggcatcgatgctcgatgagatcattgattatgtgaagttcctccagctccaagtcaaggttcttagcatgagccgtttaggcggagctgcaggggtcggccctctagttgctaacatgtcatcagagggtaatgggaatggaaatggtacaagcgacagtggagatggcaatgccgccaacggtggcaacaatggtgaaaatggtggcagcagcctgaaggtgacggagcaacaagtggccaggttgatggaggaggacatgggcaccgccatgcagtacctgcagggcaaggggctctgcctgatgccgatctctctagcctcagccatctcctctgccacatcgtcgtccctcctatcccgcccctccattggttcaatgggcggcgctagaggtctcggacatgaaggtagcaatcctgcgtcgcctccattgatgaatggcgccggtggcgacgactcccggaccggcaaggatgctggtgccggcagtaaacagtgaaggcagtgttcttgacttctcgggaggttgtgtgctcagaaggtggtcttggaggggtggaattgtcaaatggcacagcaggccttttcccttcacctttcctggccccttttgtttgtttataagaaatgatgtttaatcatgcaacctttagctccatcttttcatgttcttgcaaaatagcttttctgatctctttactggcctctcctcctccttttgggctatgagctgctcctctgatccatagctttcttttctgctaaatttgtcgcggagctgtcgtgtctcttgttaggtggaggtgaggaggaatccaaattattggtccaaaggatcgtattcatatcccatcccgcgtacaaaattatcaaatggatgttagggcggtatcaagtgcaaagctggtcaacaaaatgaaagagtatgtgagaaccgggcagaggcatgc

SEQ ID NO: 4017 - DNA, 281 bp, Setaria italica
  Peptide Sequence Number=SeqID_69991
ccaacagagaaaactatagcttcccagcttcccaacaggcaaatgtacacctggattaattagaccatagtcacacaatctttgtattgtctctcataaaaaggggaacagaatccataagcaagcaaacaatagatcagttttcaaggggaacaataaaaacagtatccataacacaaccatcactttcaaaaccgcaccagaaagctgagtgccttccttggcgttacaccactagcaggccagccaccgccaatgctataagccttctgtccaaaggt

SEQ ID NO: 4018 - DNA, 729 bp, Setaria italica
  Peptide Sequence Number=SeqID_69992
agcagctcacaaacatacctaagctgttcctccgcttgcaacggtaacaacagagcatctgaagaccaaaacaagaacatcactgcacctttttaaacactaaaagaaaacactagaatcagagcacacaagtaataaagggttaacagagccgaaccaacagagaaaactatagcttcccagcttcccaacaggcaaatgtacaccagaaagctgagtgccttccttggcgttacaccactagcaggccagccaccgccaatgctataagccttcattagctgaccttataaaaaatagcaaagaaaagtatccatcaatggctccgtggtgcggccattacaatcttatcaagaaaacccatacacggccactccgatgtctgctccatagcttaaataacagaatactttccagtttgagcagatccagggagattcagagcttggttggcacaatcttcaagaacacgtttcaattctgctttcgccttcttcacagatgactctgtcgggccctcgataaacaagtacagcttgcgctcatttgcaccaacaatttttccttgaggaatatatgttccccttgtagtgatagcagcaccagtccagtcctgaataggagccaatgtctctttgtgagtgatcttccagcgggcgttctgtgggaaatcattaatcttctaagttctagtccttctaattaagttagtttacttaggtaaactta

SEQ ID NO: 4019 - DNA, 3326 bp, Setaria italica
  Peptide Sequence Number=SeqID_69993
acattatagcacgattaaaaaaggaggtaaaatggcccacgtcatccacattttctcaagtttaggaaaccaaaccaaatgttaccatccatccatttttcataagcagcaaacctcttcacacgatatgatccaaaaggaaaaacgtaacaacaattgaaccatatgatccagaagtccagcagcatcagccatcaccaccaccaccgtgacctgcagcagctcacaaacatacctaagctgttcctccgcttgcaacggtaacaacagagcatctgaagaccaaaacaagaacatcactgcacctttttaaacactaaaagaaaacactagaatcagagcacacaagtaataaagggttaacagagccgaaccaacagagaaaactatagcttcccagcttcccaacaggcaaatgtacaccagaaagctgagtgccttccttggcgttacaccactagcaggccagccaccgccaatgctataagccttctgtccaaaggtaaccaaaacctgtcagtagaagttgctgaaacacccccaacaattccataataaccatgtgatagcaagtaaccattagctgccttataaaaaatagcaaagaaaagtatccatcaatggctccgtggtgcggccattacaatcttatcaagaaaacccatacacggccactccgatgtctgctccatagcttaaataacagaatactttccagtttgagcagatccagggagattcagagcttggttggcacaatcttcaagaacacgtttcaattctgctttcgccttcttcacagatgactctgtcgggccctcgataaacaagtacagcttgcgctcatttgcaccaacaatttttccttgaggaatatatgttccccttgtagtgatagcagcaccagtccagtcctgaataggagccaatgtctctttgtgagtgatcttccagcgggcgttctgtgggaaatcattaatctcaagttcagcctcatagtgttctggaactgcatgagcctgtatcctcgccagattttgttgcaagttcattgcagcctgaagtgcacgagctgtggcttcatcattttgttggttagttgcagcaagtaaaggaatcaaggggactgccgcagttcctggtacttgctggttagcattaccagcagcggccttgtttgcaaccatagcagcagctgcatgagcattggcaatagcttgtgctgccaggtcacctcccgccttacgaaccccaccttcctcatcagaatctgaatctgacttgtcttcttcgtatccatattcccttgcctgagccttctttgcagtctttcgggcttcatcctcttcctcattgaacttaaaaccactaccaccataacctgtaccatgggcctgctctgtgccctgcttcaccttcgccataaaccgatcagctagggctttcaggtcttcaggaagagcttgctgagagagctccagggccttaacaaggtcaggtgcataccgctcctcttcctcagaaataaaagtcacagcaaagccctttcttccagcacgccctgttcgcccaacacgatgaacatagtcctcgtaatggtttgggacatcataattgacaaccagctcaagttctttcacatctaagcccctagcagcaacactagtagcaatcagcaagctgcagacattgctcttgaaatcagcaatagttgattcacggtcagtttgatctttaccaccatgaagagacagacatggatacccatgctggaatagctctttgagcagagaatcacatttatcttgcgagtgaacaaaaacaagaattttccccttaacataccattcaccaagcaactctaacagcctgaagaacctctcactgtctggtcgcacctcaaccagttgtgcgatatctttgttcacaacactcctcccacccacctgaatttcaacaggcttagttagcaccttgcgtgccagtatctccacctgccgtggaaatgtggcagagaaaagaaccgtctgcctatctggcctggtattctgaactatccgagtaatctgaggctcaaaacccatgtcaaacatcctatcagcttcatccatcaccaagaaagtcaccctacgaaggttagttatttttccgctgctagtgcaaaggatatcaatcatccttcctggtgtacaaacaacaatttcggcacctctcttcaattcactaatctgctgcgcaacccctgaacctccatagattgcaacacagttgatgccgagtaccttagagaacttcttaatatctgaatgtatctgcaccacaagctctctggtgggagccataataagcccaatagggccatctccaggaacaacaggcggctgatctttaacatgcctcagcatcgggagaacaaatgctagagtcttgccagatccagtctttgcaattcctatacaatcacgtccactcattatgatcggcaacgcttgcgcctgtataggcattggtttctcaaaaccaagcttcttgatggtgtcaaggagcttgctagtcatcccactctgcacccatgtctttattggcttgggcacgtcttttccatgcaccttgagctccaactccttcctgtaggccaccacttcctcggttgtcatcttggtaatgtccttcacctcaatatagaaattcttccggaacggttggtagtcaatctttgagtggtcaacaattgcaagcttctctgcctttgtcttcttgacacgctttatgaactcctcatcatcctcatcctcctctccggccccctcattgtcagcatcatcgtaatccgactctgaatcatccccttgcataattctccccatcgctctccttggcccctttttatccccattactaacagcatccttcgtgctcttaccattcttatcatccacaccttcagcaggggcagtatccattactgccgcagcactctccatcttcgcaacctccggcagcaccatggagttcatgaaggcatcgagcggatcaatctcatcctcctccatagcagcaccaccgttggcatcgccacccccattcggcaaatccacattcatgtcacctgcgccgccattgtcctcagccttattgccgtcctctttatccccttcctcatcggactcctccccatccaaggtccacttcttccccaccttggggacatcagcctcggccgccgccgcagcggaagtgccagcggcgccgcccccgtcctgctgctgctgctgctcgcggcgcttctcctgccactccttgacgcggcggcggcggcgctccat

SEQ ID NO: 4020 - DNA, 2499 bp, Setaria italica
  Peptide Sequence Number=SeqID_69994
gcaagaagcttgggagcatgtcttaacttgtttatcacggtttgagcatttacatctgcttggagaaggggttcccactgatgcttcatttctgacagttcctctgattgagtcagaagataaaactcagaagtctacttctgttatatcttccaagaaaaccaatgctcttcagaatcctgctgtaatggctgctgttagagggggtacttatgacagcacagtggcaaaaaccagtgtgtcagcactggtcactcctgaacagatcaataatttcctatcgaacataaatttgttggatcagattggcattgttgagttaaatcatatctttgcccatagccaaagattaaatggtgatgctattgttgcttttgtgaaggctctttgtaaggtctcaatgactgagctgcagtctccaatggaccctcgtatcttctgccttacaaaaatagtagagatcgcgcactacaatatgaaccgcatacgtctggtgtggtctcgtatttggaaagttttgtcagacttttttgtgtctgttgggttgttggaaaatctttctgtctctatatttgtgatggactctctgaggcagctggccatgaagtttctagaaagggaggaactggcgaactataactttcaaaatgaattccttagaccttttgtggttgttatgcagaggagtaaagctccagaagtacgggagcttattgttaggtgtgtctcacagatggttctgagtcgggtgcataacataaagtctgggtggaaaggtgtttttatggtttttacttttgccgctgctgatgatacaagaagtacagttctattggcatttgagactgtggaaaaaattattcgagattattttcatcacgtaactgaaacagagacaacaacatttactgattgtgttacttgtcttattgcatttacgagtagccagtttaacagtgatgccaatctcaatgctattgcgtttcttcgattctgtgctgttagacttgctgaggaaggatttgtgcgtcaagataggggtgctgaacaacccatgaattcagacatgtcgggtggaaatgccactgtgcacaaagatggttatgtttccctctgggtgcctctccttgcgggtttagccaaattgacgactgatccgagactgactatcaagaaaggtgctgtaggagtactttttgacacattaaaggatcatgggcacttgttttcacaggcaatttggaccgatatctttgagcgtattgtttatcctctatttaacagtgaaatgcccatacctaatgatcagatttcaacatccaatttacctgatcttgaaacacaaacgttggcaatgaaatgcttggtgggtttgtttgttaatttctttgatgtgatacggccagaatttgctagaactgcatccattgtcacaaattttgtcagaagtccctacaagcattgtgctaccactggtgtgtctgcaattatgcgtttaacagaggggcttggtaacaaactttctgaggaggaatggaaagagatattggtctgcttcaaagaatcagtgacacatacctttgtcatattttctaaaattgtaaggatgatgcaagatattgaaatctcagatagacttgattcttattcagaaaccgagcaatatttggatcatgaaatgtacagtaatgatgaagaggaagctaatatggagacggcttcctatgctattgtcaaactgaagaatcatatggccctacttcttgtagtgattcagagcattattaaattatatgaggagcaccgaaaatatcttcgtgctgagcatatgagcattcttttggagatggtgtcagctatcgcgacacattcaagtgaagtgagctctgaatcttccttgcagatgaaatttcataaagcatgttcccttttggaggtatctgagccagccattgtccatttcgaaaatgaatccttccagagttacctcaaacttctacaagctctgcaacatgacgatccatccctgtcggaagaaatgaacatagaatcacaagtacttaatacctgcaagaaaatactgcgaacttatctgaagtgtgcaggacacgaaccatgtgatgaatcgtctcaaagaaatccacctttaaattgtgcagtgccactgagtgctactaagaaagaggaactggccgccaggactttgctggtccttcaagtcatgaaattgctgggcgatctggagagggactcttttggcagaatattgcccttctttttcccattgttagttgatctgatccgctgtgagcatagctcaggagaagttcaactcgcgctgtacaatatcttccaatcagttataggccccatgatacgagtatgatgacagatagtcacatgcagagtgtacagttttgtgacccattttgacgctgtagttctgtccatgaccctacgatggattaaccaatatgctggcaccccaggtgcatctgg

SEQ ID NO: 4021 - DNA, 225 bp, Setaria italica
  Peptide Sequence Number=SeqID_69995
gaagagtatcttgacattgcgcgatgctctaacaagaacaagaataaatgtgcaacaccgacagcaggaactgaatctgtacagcattctaacagagcagattggttaccttgagcaatggccggtactagaagaagagagcactggtatcgtagctgaggcgatcgaggctcttcaagcaagcacgctgtgccttccagttacatcaggagcacaggctgatgg

SEQ ID NO: 4022 - DNA, 562 bp, Setaria italica
  misc_feature (510)..(562): n is a, c, g, or t
  Peptide Sequence Number=SeqID_69996
ctcttcatctctctcgaggcgcctcactcccagcctaagcgcaaggtaacacaatgaaggtcaagattcttcagtggcatgcagtcgcttcttggacgtgggatgcgcaagatgagacatgtggcatatgcaggatggcatttgacggctgctgccctgactgtaagtttcctggtgacgattgcccgctcatctggggtgcctgcaaccatgcttatcatcttcactgcatactgaagtgggtcaattctcaaacatctacacccctttgccccatgtgccgtagagagtggcagtttaagggctaaggcacaatgccgcatctggagctgtattatcaccaagtggctttcatttctccttgcctccttggagaacgctgtattgtttgctgaaaagtcaaatcctgattgccagcacctgcttaagtgaccctgtgtatgcttctgagtttgtgaccaagcaagtgaagtgataaattttctaaaggctgagcttcctgatcttatnnnnnnnnnnnnnnnnnnnnnnnnnnnnnnnnnnnnnnnnnnnnnnnnnnnnn

SEQ ID NO: 4023 - DNA, 1502 bp, Setaria italica
  misc_feature (1429)..(1502): n is a, c, g, or t
  Peptide Sequence Number=SeqID_69997
ctcctgtgtaccggctcggtcccggtccggcccgtgttgaatctcacctacattggaaacgaaaccttagcaacaatcgagaatgtgtttgcggtgatccaagggaaagaagagcctgacagatatgtgatcataggcaaccatcgtgatgcatggacatttggagcagttgatcctaacagtggaacagcagccatgcttgagatcgcagggaggctgtccaagctacaagcgaaagggtggaggcctcgacgaacaataatcctgtgcagttgggacgctgaggagtttgctctgatcggctctactgaatgggccgaggagaacatggacactctagcttccagagctattgcttacctgaacgtggacatatcagtgtttggtcctgggggtcttcgtccccgcgcaacccctcaacttgatgagttgatcaaagaagcgagtaaaatggtacctgatcctgatgagccatctcaaaccttgtatgacaccatgatgagccatcatccaccgataactagagtggctggtgctggaactgattttgcagcatttctccaacatattggggtcccatcacttgacatgtcttatggaacgatcaaagaataccctgtttaccactcgttgtatgatgattatgtttgggtggagaggttcggagatcccttgttccacaggcatgtcgcagtggccagcgtttggggtctgattgctctgaaacttgctgacgatgagatcatacccttcaattatgtctcttatgcatccgaactggaggaatgcacaaaagacatcgtagataaatgtaaaggatttcctgtcagtttctctcctttgcagaagtccatcaagcagcttgagagggcagccaccaaaattcacaaagagaagatgttgctacaagcagaaaactggagcctaaagacgagacagtacacactgaaagtcagggagatgaatgaccggttgatgatggccgagcgagccttcaccaaccgagagggactcgcgggcagaccatggtacaagcatatgatctatgcgtcatcggatcaggatgactggggcaccaaagcgttccctgatatcgtctcggccatggacaaggccaagaagtccaacacgaccgaatcctggcggtcgctgcagcatgagatttacagagttgcaagggccgtgtccaaggcttctgcagtcctggatggtggactaacatgatatgtgctgcagcttccattctatatagatcaaagtactgggtagcttcagcttttattttactttttttttgaaaaaaaaggcttggaagcgagtcagatgtataattgggtaattatgtttagatacagaagaaatatgctggattcacagtcacactgaataagaatagtgattcatctctcatggtgattctacctaagtnnnnnnnnnnnnnnnnnnnnnnnnnnnnnnnnnnnnnnnnnnnnnnnnnnnnnnnnnnnnnnnnnnnnnnnnnn

SEQ ID NO: 4024 - DNA, 471 bp, Setaria italica
  Peptide Sequence Number=SeqID_69998
gcggaggagctgagggccacggtgcgcgcgtcgttcccgtcgctggcgttccgggtgtacccgttcgccgacgaggcccgcgtggcggggctcatctccacctccatccgcggcgcgctcgaccgcccgctcaactacgcgcggtcctacctcgcctccacgctgccgccctgcgtgcgccgcgtcgtctacctcgactccgacatcgtgctcaccgacgacatcgcgtccctcgccgcgacgccgctcccgggggaggagacggccgtggcggcgcccgaatactgcggcgccaacttcaccgcctacttcacgccggggttctgggcgtctcccgcgctctcctccaccttcgccggccgccgcgcctgctacttcaacacgggcgtcatggtgctcgacctcgcgcggtggcgccgcgcggggtacaccgcgcagatcgaggagtggatggagctccagaagcgggtg

SEQ ID NO: 4025 - DNA, 1032 bp, Setaria italica
  Peptide Sequence Number=SeqID_69999
gtaaccttagtaagtatatcattcattccattgctagtgtggtgtctgtttcggttcatgatcagtgtataaatatacagagaaacaacttacattggacatctttcccttcccaacgcaagctctttcaagaatcaatggcacgccctttgccactcgcgtctccgcaaacagcaaggcaacagatattcacgtaagtaaccccccctaccatcccctgtagaatgtagatacacaaacgaatacaagaacaagggggaaaaacgagagctcagctcagctcttctctttttttttctttttgtccccccattttcctgaacaagcttcttcacttgcagcaaaacttcacttgccgttaacttattccctttcctaccgtcgtaatgtactcacacaccaccactttacattaccgagtatgcacggaccacctccacgatcggggcccggcaaagcgggcacttgccaccgctccgaactagctcatttgcacattttgagcaagtacacatgtgcccgcacctgtacagtagagaatcgatttgcgtatcgcagcatacgcagcaggtaccctttctcacttggttccatttcgatccatcatcagttagatccatcgaggatccttcagctcctgcaaatcgattcaaggccgctgacacttcttgtctcactgaacgttgcaattccagctgcatgtccatgcacgcctccagcatcctctgcatgttgctcatcccttgctgaagtctacccatgtcacttctcaaatcattaatagcatcccattccctgtgtctgctgctccagttgttatgacgcagttctctgtgccataatggctgtcgcggtggcaaaggtggaggagggataacaagggcaggtctgttgacaggagcctggaattgccgagtctcagtgttcctttcttgttcctgattttcatttggtgaattagaagggggcatagtcgcatacaagaattaccaagttacaaggggaaccaatagaaccaactaccgttagaaa

SEQ ID NO: 4026 - DNA, 838 bp, Setaria italica
  Peptide Sequence Number=SeqID_70000
taaaggtaaacctaaattaaagtaaacctaaacttaaccgtttaagtaaaactaaattaaattagtaacctttaatttaaattacgcacttctactaaatctattaatagcactcccagttcgggatctgcatgatgtaccctgtgtctgctgctccagttgttatgacgcagttctctgtgccataatggctgtcgcggtggcaaaggtggaggagggataacaagggcaggtctgttgacaggagcctggaattgccgagtctcagtgttcctttcttgttcctgattttcatttggtgaattagaagggggcatagtcgcatcaagattccagttcaggggaccatgaccactccgttgaacatatgaccttattaatcgctccaaactttcaccaaagccattactcagaagattggacacacttcgcctgctaagtaattctctaagttccatgctatacacattgtcatcatcgggtgggataaacctattttctgtcctaggaatggggcctgtatcaagtgcggaatcttggtaatcatcttgccagttttccacggtaccatgagactcgtcatcgtgccagtcatcaggctcctcttggagatgatcatgctccctatcgtcatcctccacagtttcactgtgtaaatcttctgcattgtctccccaatttctgtcagcaccctcttcgatctcactgggccatctatccagcctgctatccaaagatgactgccagaataccgtgtcatcttctgtctcatcttgcctcatattatctaccttgtagttaagtagtacttctttgttcttatttcttacttagttcc

SEQ ID NO: 4027 - DNA, 781 bp, Setaria italica
  Peptide Sequence Number=SeqID_70001
caaaaaccaagcatatcacttattctaaatacatcaccgaacacaaactccaaacttggatttatgaaattcatattaaaaccagttccagcatttcatattactgttgaaagaagtggtacagctagtcttccatcacaagaattgtgacattagactatctagaaaaaaggggcggaaatgcagcagcagaaacaagttagacgccttgccattttccagagcagctccttaagccattgcagctttcttttcttcctcgagctgttttagctctatcaatctttctgtccatgcccgatctcttgccacagcagccatcttcctttctgttcgttctgcctcctttctcttaacagcagcagaatactgtgccctgcgcttcttcttttcagccatgataaagtccttgcgctgcttgatccgcttcttctcctttctcccttgcacactccctttgtttggctggctagttggtatgggctcctcaggattgcacttcacccagtaatatggacctttggggcgcaagctggccctcttccgccggttggcgaagcccggccggcgcttcgggaaccgggtgttcatgagcccgccgaagagggtggcccccatggccggcgcctgcgaggcagtggcggcggcggagaaggggcggaacccgatcggatccaggagccaaagacgagcgggaggaggaggaagcggatgcggggtgtgccggaggagagccgccgccggcgaggagagcggctccactccggcacacagagcatcc

SEQ ID NO: 4028 - DNA, 1266 bp, Setaria italica
  Peptide Sequence Number=SeqID_70002
gtgcctgcttctacggtggattggggtttgcttctgctgatgctgctgttgtgactggttttgcgccactttgctgttgctttgcaggtctgcgcgctgcttagcggcggcgggtacgcggagaaggtgttggtgccagcggggcagctgctgccgataccggagggagtgtctctgacggacgcagccggattgcctgaggtggcctgcaccgtctggtcaaccgtgttcatgatcagcgaatctctttgtctctgtttgttcctgatgactgtgcaccttcaattttgtagatccatggaggatcaagtggaattggtacttttgctatacagattgcaaagcacctcggaattaaggtttttgtgactgcaggtttgttcactgtaatggaaatggtattatagtctaattttatcagtaatatccctactaattccatgagaatgttataggaagcgaagaaaaactagcagcttgcaaaggtttgggtgctgatgtatgcataaactacaaaactgaagactttgttgaacgtgttaaacaggaaaccaacggaaagggtataacctgccaccttattatctctcgtcaaactgttcgcatggtctgcgttgtcatactacctgaatgcggatctcattctttgtagcatttctccttggaagagctacccctgttcatttcttgtaccaaggcattatcgttaaatttacatgttttacagattgtgatctgaaaatctctttaccaggtgttgatgtcattctggacaatattggaggattgtatctccagcgcaacctgaatagcttaggtgttgatggtagacttttcatcattggcttccaaggaggcgctgcagctgaagtgaacctgcaacctgttcttgcacggcgcttgaccattcaagctgccggactgcgtggtagaagccctgccaataaagctcagatcgtcagcgaggtggaaaagaatgtgtggcctgcggtcgccgctggcaaggtgaagccggtgatttacaagacgttcccgttatctgaagcggctgaggctcacagattgatggaagctagcacccacatcggcaagatacttctgcttccaggactacatatgtagtgtttgtgcgctcactttcgggcgagggagttttgggacatctgcaacttctgtgacgacctccttgtatcatgtactgagtggcatggcttcttatcttgtaaattggatcctttcgtacgagcaattatcttccacggagga

SEQ ID NO: 4029 - DNA, 385 bp, Setaria italica
  Peptide Sequence Number=SeqID_70003
ctggcggcggcggccgcactcgaaaccgggggtgttcgggactccatggcgatgcggtccgccgcgaagcacgcgctgctgacacaaccactggcgcccggcagccctggcgccttcctccggggccggttctcgccgctcagccccggggcgcggccgtgccgagcggcgagctccgcctccgtgccggcagcaggaaagcacctccctccattgttcagcgtcgcgccgatgatggactggacggacaaccactaccggacgctcgcgcggctcatctcgcggcacgcgtggctctacacggagatggtcgtcgccgagactattgtgcaccagaaggataacttggataggtttctagcatttcctgaggaacaacatccta

SEQ ID NO: 4030 - DNA, 678 bp, Setaria italica
  Peptide Sequence Number=SeqID_70004
gacagcatcaacactaatggaattccacctcgttgactcgagaaatgttcacgtcatggatagcctcatctccacaggtgatgactgtgtctcgatagtgggcagctgcaccgatgttcgcctaagagccatctcatgcggacctggtcatggcatcagtattggatttttaggagtaaacaactccgttgattatgtggagaagatcaaagttgacaccttgttcatctcaaacgcccagaatggtgtgcgcatccggaccaccaagattggtggcggtggtttcgcccgcaaggtgaaattcgggagcatcatcatgaagaacgtcaccaatcctatcatcgtcgatcagggaaacttctccgatctggcagattcatctgaagcacgggctgcagcgacaggcgtgcaggtggagaagatcaactacatcgacatcaggggcacgtcggcgtcggagcacgcggtcacgttctcgtgcagcgacgccatgccgtgcaggcgcctgtcgcttaccaacgtgaacctgacccgggtggacgggcgcaacgcgtcgtcttactgccataaggcgttcgggaggagcatcggcaccgtcatcccggagtcctgcctctccaaggaggattacgtccagcacgtcccacggcattctgaagaagacgaagcagattcaga

SEQ ID NO: 4031 - DNA, 764 bp, Setaria italica
  Peptide Sequence Number=SeqID_70005
attcaatgcgggcttttatgtcttctctttatttagtaaaaacatcgaagtacatgcctcagtacctatgctccatcaccatggaacatacataaataaaagattgcatatgcaacacaacacgaccataatggtcactattggaggtgaacattcacgaggggttttagtggcatagaagataaaagaagttaacaaacgaggacatctaagagcttctctaacgcttctcagcttaggctcttgtaatagcgactcttgtctttgtcgttgagatcgatcttggttgaagcgcctctcttgcacgccgtgcttggatcaaccgctcttgaatcatcccttcaatatcaggttgtgggaccgatgatgatagccgtgatagatgcttccgacgaattgctcttgccgaatatcgacaacatgaaaggcacctcagagtcttgagccaatgatttgcaaaattctttaccttgaatgaaattactccctgagtagttaacacccactatgattttatatattgtttgcaacgtagtattagaaaaggagaaaaactcaaatcggcaacaaatcaaaagtaggggaagttcgaaaaccatattgaaggaggcctcgtggatctgctcgcggttggggatggtggtaagaaagcaaaaagtcacagcaatgacaagagcgacaaggagacgcaaccgttgacggagcatccaagtcattggaactctattcgtgatgaaactcgaggaggatgaagaagatgatag

SEQ ID NO: 4032 - DNA, 1066 bp, Setaria italica
  Peptide Sequence Number=SeqID_70006
atcggctggattcctctcctcctttctctctcatcctccgcttcctttgtgcttcgttgttgagaggttgagacccacttgcctttcttctctctctcatcccccttccaactcctcctggtccctggaaaaagggagatcttttggtgcaagattcgatctgctgttgccgccttgctgcacagagatttgctcctttcttggccggtttcgctcggtggtttcttggagtggcagggctttctggtgtgggcagttgcagttcttgatccaggctcagattgcaggcggtggatgattgctctgagggcgaggttgctgcggtcaggtgattccttggtcgcttgtggtggcggtggcctcgtttgatccgtttcttcgggagattttggttgatgtgttgggtttcctgggagctcagttccccaattcgccattttgatgaggagttcttcctactgtgagagcaactgcgctcctcccctgtgctacctgccctgcctccccaaatccaaagacgatgcagggggtgatctggcatccgggtctccaagcccggccgctgtcaccgaggacaagccgcccgtggtccagaagattgaggaagccgcggcggcgcccggcggcgatgatgatgatgagaaaggctgtaaggaggtggcggtggcttccaagagctgcttgaagagagctgattgtgcggacagcagtaagaatgtggtgaaaggcaatgtgaagtggaaggatttgttggggaaggatctcacacaagtcaaagaattcgagccaagcgaatccggagactcggacgatgatgaagacaccggcgcctgcacctgtgtcatccaatgaggccaggggtctccactgtaaattctgtgaagaaaaaacaaaaagcaaaaacagaagaggattgtctgagtcagccattagtcattgtctgtagaggctagaccgctagagagcagcaggtccatccattgttgtgcgtgtggatatttggatgccatggcttgtgttgtgtttcatcagcagcttcaactgtaaaattgttagttacagatgc

SEQ ID NO: 4033 - DNA, 601 bp, Setaria italica
  misc_feature (591)..(591): n is a, c, g, or t
  Peptide Sequence Number=SeqID_70007
tcccccggcctggcgggtacgctcccggcctcgctcgccagcctcgccgcgctcacggacctcgtcctctacccgggcagcgtttcgggggccattcccgccgacattggctcggggatccgccgcctaaggctcctctcgctctccggcaaccagctcaccgggcaggtgcccgagtcgctcgccgggctacccgatctgcacacgctcgacctcggcaacaaccgcctcgagggcgccatcccaaccggcttgctgctgccctcttcgccgagcctcaaggtgctcatcctggccaacaatggcggcctctccgggcagattcctgctcaattctccagctcgcagctgttccacgtcgacctcagccggaacgccatcaccggcaagctcccgccgctgccgccgaccatccggtacttctccgttgctgctaatgggatgcagggcagcctcgacggcgtcttcgtcgacggttccgcccccgccgacctggccttcctcgacctgtccatgaacaacttttcgggctccatcccgccggaggtgtttgctctcccgagcgcatcctcgctgctcctggcccggaanacttcaccgg

SEQ ID NO: 4034 - DNA, 3188 bp, Setaria italica
  Peptide Sequence Number=SeqID_70008
agggaccgaagttacggacgacctagaccaagaaacgcgctcacctcatccgacgagaccatctatgagctgcttgtgcccgtcgacaagccaggcctgctctcccaggccatctctgtcctcgcagaattcagctccgaggtccgggtgtcggcagaggatctggagaaagagagaggtgctgtgctggaggagtacaggggtggacgcaatgccacagggcggatgcaggactcccactgggcgctgttgtttgaaggttccaagtatgcagaacgcctgccaattggtactgagaaggtcatacgaaccgttccgcatgaaactgtgaagcgattttatcagaagtggtaccatttaagcaatatggctgtatttgcagtgggagatttcccagatacacaggcagtcgttgagttgataaaggagcattttgggcagaaagccccagctcccctccctccgccagctatacctgaatttcgagttccatcgcatgaggaacctcgcttttcatgctttgtggaatccgaagctgcagggtcagctgttgttattagctgcaaaatgcctgctggtgaaattaaaacagtaaaggactacaaggattcactggcagagtccatgtttcattgtgcactaaaccagaggctcttcaaaatatctcgtggaaaggaccctccatacttctcttgctcctcagctgcagatgctctcgtccgccctgtaaaggcttatattatgacatccagttgccgtgaaaggggaacagttgaagctcttgagtccatgcttcttgaggttgctagggtacgactccatggattttctgatcgtgagatatccattgtacgcgccttaatgatgtcagagatggagtctgcatatttggagcgtgatcaaatgcaatcgaccagcttacgggatgaatttttgcagcattttcttcgtgaggagcctgttgttgggattgaatatgaagcacagttacagaagactcttcttccccatatttcttctgcggaagtggcaaaatttgcagaaaatttttcaacagccagcagctgtgttatcaagatagttgaacctcgagctcatgcttctttggaggatcttaaagcagttgtattgaaagtcaacagtctagaagaagaaaagtctattcctccatgggatgaagagcaaattccagaagaaatagttgctgaagctccagagccagggagtataattgataaggtggagcaccctgggattgttgccactgagatgatactttcaaatggcatgcggatttgttacaagtatactgattttcttgatgatcaggtttgtttttactggctttgcctatggtggtctatcagaattatctgaagctgagtatacttcatgctcaatgggttcgaccatagcaggagaaattggcacttttggctacaggccttctgtcttgatggacatgcttgctggcaagagagctgaagttggtacaaaagtggggcttacatgagaacattttcaggcgattgctcaccttctgaccttgagacagctttgcagctggtttatcaactatttataacaaatgttgagccaagggaggaagaagtaaaaatagtgatgcaaatggcagaggaagcaatctatgctcaagagcgggatccatacactgcatttgcgaatcgtgttcgggaaataaattacgggaactcatacttttttaagccaattagaataagtgacctgaagaaggtggatccaattagagcatgtgaatatttcaacaattgtttcaaggatccatcagcttttacagttgtaatagttggaaaaatagacccagctatctcacttccactgattttgcagtacttgggtgggatacctagggtacaggatgctgctcaaccacttagtcgtgatgatctcagaggattgccatttaagtttccagcaacaatcattagagaagttgtgcgcagccctatggttgaagcgcagtgcttcgtgcaactagcatttcctgttgttctaaagaatacaatgatgacagaagatattcactatgttggatttctaagtaaacttctggaaacaaaaatcatgcaagtacttcgcttcaaatatgggcaggtctactcagttaatgtagctgtcttcttgggtggcaacaaaccttcaagaactggagatgttcgtggagacataagcgtaaatttctcatgtgatccagacatatcatctaaactgggttgatttcgttctggaggagatatcatacctacaggctgaaggtccttctgaagaagatgtgttgaccatcctcgaaattgaacaaagagctcatgaaaatggattacaggagaattacttctggttggatcgaattctgcggagctatcagtcaaggctcttttctggagatatcggatccacctttgcgttccaagaggaggggcgtatgaaggttagagaggctttgacaccgcagacgatgcaatcagccttgcagcgagttctacctttcccttgcagaaatcaatacaccgtggttattcttatgccaaagtcatcctgttgggcgtcagtgaagtcaatgcttagctggagctctaatggggttagcagagatgctaagattcttgctggcatcgctggtgcactggtcttggcagttagtttgtggagatactctcgcagcacgctaaaatcatagtgcctgatacaactgaccgttttttgagtcatcctgtcagatccgaaaatggattgacaatcaggttaggaactgatatacgagcctgtcaacacgatctttgtttctacctgagcacctgctgggtttgtggagattgggctatagaagatccatactaggacaaaattgttagctaacagattcgttgccacatgtgtgcgtgtagtaagcatgtaaccacattcgtcataccgccacatgtgtgctctgtaatagcccttggtgtatgatattggctcccccatttgatttccatagacaggactgaagtagcagtcagcaatgctagagtggtggaaacccaacgggccaacggtgtagattcatactggtctcatttttgttgacagctttgtgtacctatacgtctttctgacgactcagaatgaggaagataggatgaactggaaataaaatggggtacttt

SEQ ID NO: 4035 - DNA, 1106 bp, Setaria italica
  Peptide Sequence Number=SeqID_70009
gcccaggggcgagaagctgctcgtgcaccccttctacgccgccggctcgctccatcgcttcttgcaagagggaattgccgagtcacagagatggaacatagtttgcaacctttctctcggcatcgccaagggactggatcacctccacacaggtttggagaagccgatggttcacggcaacctcaagacgagcaacatccttctcgacgccaactacgagtgcaggatatcggactacggcatctacctcctgctgaaccccgccgccgcccaggagatgctggaatcctccgcggcgcaggggtacaaggcgcccgagctgatcaagatgcgggacgccacgagggagagcgacatctacagcctgggggtcgtcctgctcgagatgctcgcccagaaggagcacgccgacgacgggcggccgaacccgcgggacatcctcctgccggcctccttcaagaacctggtcctcgagaggaagatctccgaggccttcagctccgatctcgccaggcactgcaggaggtccgggaaggagaggaacctgaacgcctacttcgagctggccacggcctgctgcagcccgtcgccgtcgctgagacccaacacgaagcatgtactcaagaggctcgaggagatagcgagatgaatcatgaatgggtgtgagtaggtttgccagcttgctacttaatcagcattgcatcacagtcacaacagctgtccgttgatcctctgaagctgaaactccctgcctactgcatcttccccaaactaattggcaacagaatttgagctgggcatttggggaatggacacatgcgttccactcacatccaggaacctgtacagtctttcacagagagatgcagagggggactcatctgaagatacatacacctgggctgctgtcaatggatgagcatgactgcatgagtactagattatgtttttgccttgttttacctgaaaatagaaatgtacaatcatagagtgcccctggagacgtgtaacggacttgcatgttgtatttccatgctgcaacatcagtgcatcaccaccatgtgcgtggaatgttctcttaaccaaaaattaccttaaaaaaaaaa

SEQ ID NO: 4036 - DNA, 360 bp, Setaria italica
  Peptide Sequence Number=SeqID_70010
gactgtcagtccgccggtcacgatgctgaaagccctgcctgcgcggttcctcgcctcgccggaacccggggggtggcgccggcggcctcgccgagggtcgctgaagccggtttcggcggcgctcatgaccaaccccgcttacttcgaggtgggcaggttcctgggtggctatggcttcatgaatattacaagctactcatcttctcaatttggtgagccttcaaatgttgctggtattcaagatcttggtctcggatattcagcagaagagattgaacgattgagggtccaagacgttggagaaggagaagtgacgattagactttacgagggaagggttgttcaaggcccattgagggg

SEQ ID NO: 4037 - DNA, 1370 bp, Setaria italica
  Peptide Sequence Number=SeqID_70011
ccgcggtgcccgacgcggtcgactggaggaagaaaggggccgtcaccaaggtcaagaaccagggcagctgcggagcttgttggagcttttcagctacaggtgctatagaaggaataaacaaaatcaagacgggctcactggtcagcctttctgaacaggaactaattgactgtgacaggtcatataataatggctgtggtggtggcctcatggattatgcttttaagtttgtgattaaaaatggtggaattgatacggaggatgattatccctatcgtcaagcggacggaacatgtaacaagaacaagctgaaaaggcgggttgtgacaattgatggttactctgatgtcccttcgaacaaagaagacttgttgctccaggctgttgcccagcaaccagttagtgtaggaatatgtggcagtgcacgagcatttcagctatactctcagggtatctttgatggtccatgtccgacatctcttgatcatgctgtgttaatcgtgggttatggttccgaaggtggcaaggagtactggattgtgaaaaattcttggggtgaaaggtggggaatgaagggctacatgcatatgcatcgaaacactggtgcttccagtggtatctgcggtataaacatgatgccatcatttccaaccaaaacaagcccgaatcctcctccttcaccaggccctggcccaaccaaatgcaatctgcttacctactgtcctgaaggatccacctgttgttgctcgtggcgcgtcttgggcttgtgcctttcttggagctgctgcggactggacaatgcaatttgctgcaaggacaaccgttactgctgccctcatgactatcctatttgcgatacagttcgtgcccagtgcctcagggccaatggtaacttttctggtattgaaggaatcaagaagaagcagtctttctctaaagttccctcttggaatggtttgttggaagtgatagatcaatgaacatagagtcattatggatggaagattcaagcaagctcttgtgcgagcagtaggtctaggctatgctggcttcttcaggtgcccttccatattcccgtatgctctttctctacactacacccgctgggttgcactgagatgcccagatttgctctgtattggtgaaccatactctggtgtgaaattccacgatttgtacatgtcagacttgtattagcctatgaatttagagagcccctgcgtggatgatttatacccgcagtttggtgaccagataaataaagaaatagtacttgtaagttaacttaaggaaatgttatacaaagttgcatcatgaggaaaacgtacagcaaatggaattgtggtgtaatacttggagcttatgcatac

SEQ ID NO: 4038 - DNA, 614 bp, Setaria italica
  Peptide Sequence Number=SeqID_70012
ggtgttgaaataagctcctttcctgagacctggtgaggcatcctctccaatgaacatcagaggaacatctattttgagaagcgcagaagaaggggctctcatgaatgtgacagtcagaggttcatcagtgccagcatgcaggtgtacctttcgcggcaggacgcggacgctctcgacgagttctccctgcccggcgtgctgagaccaaacctggagcctgaacagcctggagaggaagaaggagcggccgaggtggtcgacgagcttgcggatctgcttggactgcacggagatgaggcgcttattgccaccctcctggccgttctcctgctcgaagacgatggaggggacgcgcccggccttgcgctccttggcagagacgtggcggcccgaggaggcgcgcggcacggcgaggatcacctcgtcgtgcttggggttcggccgcgggtggcccgggaggtagtcgtacggcggggagagcgggtcggcgccgtggtggtccgccggggagacgatcgcctcggcggcggcggcggcggtgaggtggcggcggaggagggggagggtgagggtttggagcggtcgccggaggagcatggttgagcggcgtaggg

SEQ ID NO: 4039 - DNA, 687 bp, Setaria italica
  misc_feature (1)..(29): n is a, c, g, or t
  Peptide Sequence Number=SeqID_70013
nnnnnnnnnnnnnnnnnnnnnnnnnnnnntctacaagtgcttctagctgtagcctgtggctgctcgaaacattccttcttgaggtaaaatgatggtatgtggccacaattcatcctacgagtaggagaattaagacccaaataactcgagcaagaaaaacaaaaaaagaacattattgctcaaagtagtgcatacagtggaacaagttattttcccttcttctgttcaggagccctcgatcctataatgctacagatgggctgatccggtgactgaagcagcttcaacgcagggtgaactttcaggtcacgcatcagcagtttttgtcctacatccaactcgctcagatccacttcaatgtatggtggtacgatgtcagcggggcagaggtacttgactgttctttttatggtgttgaaataagctcctttcctgagacctggtgaggcatcctctccaatgaacatcagaggaacatctattttgagaagcgcagaagaaggggctctcatgaatgtgacagtcagaggttcatcagtgccagcatgcaggtgtacctgaatatgttcaaacaagatcccgcattagccatcatggtaaattctgttagtatacatagaaggtaatgaacatacatattcatattattgttcaacagttgacatacttattgtactatgccatctg

SEQ ID NO: 4040 - DNA, 351 bp, Setaria italica
  Peptide Sequence Number=SeqID_70014
cgatctctgctcggattctgctccgcccggcgtcaatcaatccgtcgattccccgacggccccctaccgatcggccgtccagtcgccgccgtgtcccgccatgacaacggtggggctccggatggggccgttgggaggatggcggatgggcgcggtggatgaggagggcgaggagaggcgagggggatgggggaggagaaggaggaggggaaggacggcaaggacgaggactggggtgtcgagcaggagaggaagagcagcaggggcaaacggaagaggacggcgccgcgggggcgccgcccgggcgtggggccgggtcccaagcgccggcgtgccgctgcggcgaccgag

SEQ ID NO: 4041 - DNA, 319 bp, Setaria italica
  Peptide Sequence Number=SeqID_70015
aatcctccacatcaccatattgtgacacaatcagaccataaaccgtccatgccactggacaaatccaatagtaccagatccaccatttcgggattttcgatcttggaatgatgaatcctgagaagagattaaagagagagtagaaggcagcagcaaatatggaagcaacctgagggttcggtgttatggcaacactcatcataccatagtatgtgaaatagaggaaggtaaggaatgaaatgtagaagaaccagaagaattttgctggtgtccactggaaagacatcattgagtacacaataagagtgtagatgacagt

SEQ ID NO: 4042 - DNA, 566 bp, Setaria italica
  Peptide Sequence Number=SeqID_70016
aaaagtaaactaaggaaactaggtaaacggtagaataagtgaagtgcagcgcaccatgcttgagcttctaaaccagcttgatggttttgaagcatcaaacaaaattaaggttctgatggcaacgaacagaatagacatcttggatcaagccctcctgaggcctggccgcattgacaggaagattgaatttccaaatccgaatgaggcttctcgcttcgatatcttgaagatccactccagaagaatgaacttgatgcgtgacattgatctgaagaagatcgctgcgaagatgaatggagcatcaggagctgagttgaaggcggtctgcacagaagcgggaatgtttgcccttcgcgagagaagagtgcacgtcacccaggaggactttgatatggccgtggcaaaggtgatgaagaaggatacggagaagaacatgtcactgcggaagctctggaagtgaggtggtcacctctcgtgccagggccaatgcttccgtgctgagacagctgaagggctgaagcgaatggtcgtgcgttgtcggattaactgttgtgagattctgaaaa

SEQ ID NO: 4043 - DNA, 1863 bp, Setaria italica
  Peptide Sequence Number=SeqID_70017
taagaaccctaacctagaaggacctaggaccgacaaacccaacaagcaaagccacacttccgcatccagggcccgaaacctttcctcgaacgcaagaagaaccaagccggcgatggcgacggtggcgatggacatctcgaagcccacgccggcggcgtccggcgacgaggccgctgcggcggcgaaggggaggagcggcggcggaggggagggcctgcgccagtactacctgcagcacatccacgacctgcagctccagatccggcagaaaacccacaacctcaaccgcctcgaggcccagcgcaacgacctcaactcccgagttagaatgctcagggaagagctgcagttgcttcaagagcctggatcatatgttggtgaggtggttaaggtcatgggaaaatcaaaggttctggtgaaggtgcatccggaaggcaaatacgtggtggatattgacaagagcattgatattacgaagatcacaccttcaacaagagttgctcttcgaaatgatagctacatgctccatctggtcctgccaagcaaagttgatccattggtcaatctcatgaaggttgagaaggttccggattctacgtatgatatgattggaggacttgatcagcaaattaaagagatcaaagaggtcattgagcttccaatcaaacatccggagctatttgagagcctcggaattgcccagccaaagggtgttctcctttatggacctcccggcacaggaaagacattgctggcacgtgcagttgctcatcacactgactgcaccttcatcagggtttctggttctgagttggttcagaaatatattggtgagggctcccgtatggttcgtgaactctttgtcatggccagggaacacgcaccgtccattatatttatggacgaaatagactctatcggatctgctagaatggagtctggaactggtaacggtgatagtgaagtgcagcgcaccatgcttgagcttctaaaccagcttgatggttttgaagcatcaaacaaaattaaggttctgatggcaacgaacagaatagacatcttggatcaagcccttctgaggcctggacgcatagacaggaagattgaatttccaaatcccaatgaggattctcgtttcgatatcttgaagattcattcaagaaaaatgaacttgatgcgtggtattgatctgaaaaagatcgcggaaaagatgaatggggcctcaggagctgagctgaaggcggtctgcacagaagctggaatgtttgccctccgcgagagaagggtacacgttacccaggaggactttgagatggcagtcgccaaggtgatgaagaaagacacggagaagaacatgtccctgcgcaagctctggaagtgaggtccataccttgatgtcgcccacaacctttcacagtctcgccgaagctcgcgccttcatctcccgagccttttccgccttgccaaaacagtggaacggtgtcaccgcatgctccggaccttcgccatgtgcctttttaagtttacgccgtgcatgcctatgtttaaaagttgttttctgataacagatgtagtatgttgttgaaaagttgagatttatcggatcagctagatacgagataatgcattgcttgctcgcgatgtaccacgttactatgcctactacttggtttgcagtttgccggtacttggtttgcagtttgccggcccactgccccactcgtaatgatcactgcctactgtaatatctgcaagcaatgtaatattgtattaggttgtactagctagcacctagtatccgagaagctggcagctgatttgtatttcagagaagctgctcctatccggttgttgttacaaaaa

SEQ ID NO: 4044 - DNA, 226 bp, Setaria italica
  Peptide Sequence Number=SeqID_70018
ccgtaaccaccggacagagcagagcacgcgccatgaggaccaccaccagcacagcgctgccgctggcagcggcgctctgcctcgcgctgctgctccccggcgcggccgccgccaccaagccccggctgcggcagggcgactacctgaaccggctccgcgggtcgccggcgtccgcgcgccagtcgtggcagcaggccgagtcgtcgctggcggtcgcgtcgccgtc

SEQ ID NO: 4045 - DNA, 870 bp, Setaria italica
  Peptide Sequence Number=SeqID_70019
ttggtgggtgtgcaggaataggtgctgctactaaaaagggagtctgaatggaaggccgagctgttggtgatgcattgctgaagttcgatccagtgagctgcacatattgattgccaggcatgttgtaaccatgaaccgacaaatagccattgcccccaccagaaatggacgggctcaactggctaaatggttggttggttgcatttgctgcagctgagactccataaatcggaatatattgctgaccggtgtatgggtttaatgtaccctgtggatagatgtattcggtcccatatgaagtgtaactgtactggggaactgggaaaccttggtagtacccaagtggaagtggtcggtgctggccataaccccctaaataaaagccccttggaactgagacaccaaaataggacccagctgatctcggccgcccaaggggcacgggatgctgggctcgaccaagcgacgccaggttacaattagcgcgcctgccgtcgatcaccggcgtcgggtcctcgcaggccttcctcgccgaatcgggttcacggaatgtcacgaatccgtatcccttggagcggccagagtggcggtcggtgatgacgacggcctcgaggatgtccccgaagcgctcgtaaaagcggcggagcctgtcgctgttggtctcccaggcgagcccgccgacgaagaccttggtgtgggtggtgtccgcgaaggacgagggcgaggcgagcgggtgcagccccgagctggagctcgacgccgacgccgacccggacgccgaccccgcgtgctgctgctgctgctgcagagccatcatgagcggatcggaaggcttgggagcggaggaatcggagggaatcttctccgccg

SEQ ID NO: 4046 - DNA, 830 bp, Setaria italica
  misc_feature (819)..(819): n is a, c, g, or t
  Peptide Sequence Number=SeqID_70020
tctgccaaccttttactgggcaaagatcatgttgtgaaagtggcagattttggtctagcccgtttccaggatgaaggaggttctatgacagctgaaactgggacctaccgatggatggcgcctgaggttatcaatcatcagccttatgataacaaagcagatgtgtacagttttgctattgtactttgggagctcatgacatccaagattccgtatactaccatgagccccctccaggcagctgtcggtgtgaggcagggattgcgaccacaacttccagaaaacgcacatcccaggctattaaacttgatgcaaagatgttgggaagtccttccatctgaccggccttcattcacagatatcattgctgaactagaagatattcaggcgcaagctcagggaacatcaggggagtcgagccagaaacaaaaggatggtgacagtgcccactaaagattgacactcagcacgtacttgacggcagtttggtgcatctaatctgattaacttgagttaggatccaggccactaacattggagaaaatatacgtaacccagttttgtctgcgcttcttggggccaatttctcggtcctgttctcgtcttacgcggtcctagtcccatttttcttgcacagagaggaggaaaccaggaccttctgagttctgactgagttttggggttgcggcttgatatgtgaatattcgaatgagaggaaatctttgctgcctggcatgtaaaattgcatgcttcttgtatctgcttcacccgtgttattgaggcgcaatggttgatgaaaataaaaaaaaaaaaaaaaanaaaaaaaaaaa

SEQ ID NO: 4047 - DNA, 463 bp, Setaria italica
  misc_feature (442)..(463): n is a, c, g, or t
  Peptide Sequence Number=SeqID_70021
cccttgaggcaatcagacctggagagagccctatcaacatctagaaagggcaagaaggctgctagctcagggctgcagtcacccttgtgggttcggccatcggattcagtagatgatcagatctcgtgaaaatctgcagtggagtagacgcaagcattaccctcgatttcgttaggttttcttgtgcagcttgcgaaggttcagcacatgtattagagttccattttgcgtggcgaggctgcacctgtttttgaagctaattgcagctggcaaaatggcaagcttgcactgatgtttaagttgattcgaagttctctctgtcgccaaaagttaccagcactccatggttgtctggctgaattactgtttcgcttgccttgtacttttaaacgattttagggtagacaatatacataatgaagaaggggctgttccattaccnnnnnnnnnnnnnnnnnnnnnn

SEQ ID NO: 4048 - DNA, 555 bp, Setaria italica
  Peptide Sequence Number=SeqID_70022
agaaaaatagggaatgaacaattaagaattaaacctagacccttgaggcaatcagacctggagagagccctatcaacatctagaaagggcaagaaggctgctagctcagggctgcagtcacccttgtgggttcggccatcggattcagaagatgatcaggtacagagcgcgatctttgagatatctaagctgatgtctcgaatagttcagaacagtcagtcagaaccgcaagagccttcttcaccttaatcattaccttttgctagatctcgtgaaaatctgcagtggagtagacgcaagcattaccctcgatttcgttaggttttcttgtgcagcttgcgaaggttcagcacatgtattagagttccattttgcgtggcgaggctgcacctgtttttgaagctaattgcagctggcaaaatggcaagcttgcactgatgtttaagttgattcgaagttctctctgtcgccaaaagttaccagcactccatggttgtctggctgaattactgtttcgcttgccttgtacttttaaacgattttagggtagacaat

SEQ ID NO: 4049 - DNA, 1017 bp, Setaria italica
  misc_feature (1014)..(1014): n is a, c, g, or t
  Peptide Sequence Number=SeqID_70023
ccggagctcttcaccttcggcaagctcctcagcccccaagaaggggtcgtgctcctatatggcccacccggcaccgggaagaccatgctcgccaaggccatcgccagggagtccggagccgtcttcatcaatgtcaggatctccaatctcatgagcaagtggtttggggatgcgcagaagctcgtggcggctgtgtttagtcttgcccacaagctccagcctgctattatcttcatcgacgaggttgatagtttcttggggcagcgacggacaacagaccatgaagccatgactaatatgaagacggagttcatgtccctctgggacggcttcaccactgatcagaatgctcgtgtgatggtccttgctgctacgaacaggccttctgagttagatgaggccatcctcaggcgctttactcagatatttgaaattggaattcctgttcagagtgaaaggagcaagatacttcaggttgtattgaagggtgaaaatgttgaacctaatattgattatgatcgcattgcaagattgtgtgagggctttactgggtcagatatcctagaactgtgcaagcaggcagcattctaccctatcagggagcttttggataatgagaaaaatgggaggacattagataaacctagacccttgaggcaatcagacctggagagagccctatcaacatctagaaagggcaagaaggctgctagctcagggctgcagtcacccttgtgggttcggccatcggattcagaagatgatcaggtacagagcatctcgtgaaaatctgcagtggagtagacgcaagcattaccctcgatttcgttaggttttcttgtgcagcttgcgaaggttcagcacatgtattagagttccattttgcgtgtcgaggctgcacctgtttttgaagctaattgcagctggcaaaatggcaagcttgcaactagaatagtttaaagttagaattacgaaagttaactaactaaactaaagtaaacgaaaccaaaaaanaaa

SEQ ID NO: 4050 - DNA, 185 bp, Setaria italica
  Peptide Sequence Number=SeqID_70024
agggaggtgttcaattgtccgcgaacttcatgtctatggaactgcagtccctgtgcatggtcgtgatgcagacaaactacagcaccagggttatggaactctactgatggaagaagcagaaagaatttctttgaacggtgttcccttcgagcaattctttctgcttcttccatcagtagagttcc

SEQ ID NO: 4051 - DNA, 544 bp, Setaria italica
  Peptide Sequence Number=SeqID_70025
gcgggtacaaccataagatagcatctggcgcagatgaggccccaagcaataatcaggtctcgtctcaattgtcatgccaatacatttgacagcactgtgttctgaataacaaacagcctcctcaacatttgcagaagtgtgaccggataaagcatcatgaagatttctgataaaataatcgcgataatcagctggcaaggacatgaaagtcccacccatcaagatgaattcgaccttatccacactatgccctagcctcttgagctgatctatcctgcttctggcttgaacatatggattgtaccttgcccgaatggcacgcatgctagtaggctcatatccagtgtaggactgcgtgctgtactcgaagtcggagtcggggccgcccgggcagtacacgcagatgttcccggtggtggcgatgtgggggcaccggtgcggcttcgacatgacggcgacgacggcgatgcccgacgccgtgcgcacgggcttggcgcgcagccgcggcagcagcgcggcgcggtcggcctcgggcaccgcggcg

SEQ ID NO: 4052 - DNA, 1519 bp, Setaria italica
  Peptide Sequence Number=SeqID_70026
ctccgacttcgagtacagcacgcagtcctacactggatatgagcctactagcatgcgtgccattcgggcaaggtacaatccatatgttcaagccagaagcaggatagatcagctcaagaggctagggcatagtgtggataaggtcgaattcatcttgatgggtgggactttcatgtccttgccagctgattatcgcgattattttatcagaaatcttcatgatgctttatccggtcacacttctgcaaatgttgaggaggctgtttgttattcagaacacagtgctgtcaaatgtattggcatgacaattgagacgagacctgattattgcttggggcctcatctgcgccagatgctatcttatggttgtacccgcttagaaattggtgttcagagtacatacgaggatgtcgcccgtgacacaaacagaggccacacggtggctgctgttgctgattgcttttgtttggcaaaagatgctgggtttaaggtggttgcccacatgatgccagatttacctaatgttggagttgaaagagacctagaaagtttcagagaattttttgaaagtccagcattccgggccgatggtctaaagatttatccaacacttgtgattcgtggaactggtctttatgagctctggaaaactggcagatatagaaattatccacctgagctgttggtggatattgtagctaggattctgtctatggtaccaccgtggacacgagtgtatcgggtccagagagatattcctatgcctctcgtaacttctggtgtcgagaaaggtaacctgcgtgagcttgctttggctcgaatggaggatctaggcttgaaatgccgagatgtcagaacccgtgaggcagggattcaggatatccatcacaaaatcaggccagatgaagtagagcttgtcaggcgtgactatgctgcaaatgagggttgggagacgttcctctcttatgaggatacacgacaggatatcctgatcggcctattgcgcttgcgtaaatgtggtcgtaatgttacatgccctgaactcgtagggaggtgttcaattgtccgcgaacttcatgtctatggaactgcagtccctgtgcatggtcgtgatgcagacaaactacagcaccagggttatggaactctactgatggaagaagcagaaagaattgctcgaagggaacaccgttcaaagaaattggctgtcatttcaggagtcggtactcgccactattaccgcaagttgggttatgagctagaagggccttacatggtcaaatgttttgcataatgtaacttcatttttcatgggataataatgtaaaaaaactagcgtttgtcatgtaacatgagtagtttttgaaatgttatcattgctctcattttcagtgttgagtagtgagtaatccaaatgaaaatgttgtcttgtgatgctaagtggtttgaaattacaactacttagcgatactgaataaactcttctagctgtattggtcacttatatattgatactgaa

SEQ ID NO: 4053 - DNA, 1433 bp, Setaria italica
  Peptide Sequence Number=SeqID_70027
tgtcggcgccgctgctgcccccgccggcgtcgtccctggccgacgagcccgccgcgccccccgccgaccgcctcggcgtcggctacctcgtcttcttcaccctgggcgccggcttcctgctcccctggaacgccttcatcaccgccgtcgactacttcgccttcctctaccctggcgcccccgtcgaccgcgtcttctccgtcgcctacatgctctcctgcctcctgcccctcctcctcatcgtgctctgcttcccgaaatccagctcccccgcgcgcatcaacacggggctcgcgctcttcacgctcgcgctcctcgtcgtcccggccatggacgccgcatacgtcaaggggaggcccgggatgtacggggcattcgacatcaccgtcgcggcaaccgtcctgtgcggcgccgccgacgcgctcgtgcaggggggagtcatcgggttcgccggggagctgccggagaggtacatgcaggccgtcgtcgccggaaccgccgcctcaggtgtgcttgtctcagcaatgagagtatttaccaaggcactctacccacaagatgcacatgggctaaggcaaagtgcgaacctctacttcatcgtcggcattgtggtcatgatcatttgcattgtgtgctacaacgtggccggcaagcttccggtcgtcatgtactacaagaacatcaagaagagagctcagaaggcagatgttggcggtggcatgacaggtcctgcctggagatcaaccctgtggagcatcgtcgggacagtgaaatggtacggcattggaatcatcttcatctacgccatcacactctccatattcccgggcttcatcacagaggatgtgcactctgaggccctcaaggactggtaccccatcctcctcatcagtgcctacaacgtgtttgacctcattggcaaggccctgcctgctgtctacttcctcccgaacgccaacatcgcggttgcaggctcctttgctcggctcttgttctacccactcttctatggctgcctgcacggccccagcttcttccgcaccgagatcccagtcaccatactgacatgcctgctgggcctcaccaacgggtacctgacttgcatcctcatgacgctcgcgcccaaggccgtgcccatccaccactcggagaccgccgggattgtgatagtgctgttccttgtggttggtcttgtcgtcggttcatttgtgtcttggttctgggtcatctgatagggggttcatttgtgtattcatgccaatgtatcatagcaccatgttcaagcgccttttgcttgctgctgtttcatttgccaatccaatggccaaggatacctgcaactcgtttagtgtaacccaggtgcaagactgggcaaatgtgtgtaatttacatttcatgagaggcagtaaaatgttcatatcaacaaaaaaagg

SEQ ID NO: 4054 - DNA, 421 bp, Setaria italica
  Peptide Sequence Number=SeqID_70028
caggacgagatcgagaaggttaatgaggaagcaagcaatgaggttttagaggtggaacagaaatacaatgaaattcgcagaccagtttatgctcgacgcaatgaagttatccagaaaattccagatttctggctgacagcggtttgcatatcttctattatgatttgtgttgcatcccctcttttactggaagtgcttaatgatttgtgacactgctgtgtgctgaccctgcagttcctaagccatcctatgctcgctgatcttttaaccgaggatgatacacagatttttaaacacttggaatctgtatttgtggactcagaggatgttaaatcgggctgctctattactctagtaagcttcttttgaatcttctataacttattttgcttcaaagacgtattccatgttaatttttctt

SEQ ID NO: 4055 - DNA, 407 bp, Setaria italica
  misc_feature (43)..(43): n is a, c, g, or t
  Peptide Sequence Number=SeqID_70029
tgaaaggctatgttgttgttgttgttgtaatttgctttgtcanatttgtaaccagggtaagtatgctttttgaagccgatgcttcctcaaggaaaataatgtactcaacaaccaattgttcactcattatttaaatgaattaactaatagtgacatctgatattttgcagttcttgatttcattgataatgaagctgttgatgatgcatgggctgtggtatcgtatttgagtgaggcagattgtcttcttgctggcagtccaatcacatcatacaactcaggaaaacatggcacaactcattgctgcatctgttacagcacgaggggttctttttggaaatgctcatgttgcttcctcgaggtggcatactatccggagcccaaagcttttggtctaaacttgtagt

SEQ ID NO: 4056 - DNA, 2015 bp, Setaria italica
  Peptide Sequence Number=SeqID_70030
cgagcggctccaggaaaagccgcgccgcgagagcagcgcggggaggggacgccgccgcgcctcgggacccgcgccgttggactccttgaaggctgaatttgatatgctctcagaagatttttcagaatgttttgatgacttgggtatgtcaggcaggatccatacggaaaacgaaagagctttgggttgacaagtacaaaccccactcattagcagagctggctgttcataaaaagaaggtcgaagatgtaaagaaatggtttgaagagaagctgacagcaccaaagcaaacagttggaggatggactcttgtcctaactgggcaaactggcgttggaaaatcagcaactgtgaaagcgattgctgaagaccttggagtggacttatgtgagtggacaactccagtgccaacactgtgggctgaacatgttcatgctaattcaggattacgctatatatccaagctggaagaatttgaaaactttgtggagaagataaggaaatatgcaatgcttcatccaaccagcatcacatcccaaagaaagcttaatattattctgattgatgacatccctgtaacaagtggaaatgctgcttttgcaagactaggaaaatgcttaactggtttgattcatagcacacaagtaccaactgtcatttcacttactcactatcacaaaagtgagagtaatgatactgcaatgtggaactctgaggaccttgagtccttacttcaagatgctggtgctcataagattgctttcaatccagtaaccacaaattcgatcaagaaaattcttatgcgaatatgcaaagaagaaagatatgatgcatctgaagaactactgcatcaaatagcaatatccagtggaggtgacatcagacatgcaataatgtctcttcaatactattgccttgatcctagaaggcatagttctgcactggcaacaaatggtactcgtgctggttcaaagagccgtgattctctggttccacggcaggagagctatggcctcagcagtgcactatcctctccatgtggaagagatgagacacttacactatttcatgcattggggaaattttgcacaataagagggaaattaatggtggtgttgatatcgacctggatccattccctcttaaagaaaagctaagaagaaatttactcaaaatggatgttcctgaaaagattctttcacaagcacacggaaaagtacggacagtcgcagattttctttatgaaaatgttcttgatttcattgataatgaagctgttgatgatgcatgggctgtggtatcgtatttgagtgaggcagattgtcttcttgctggcagtccaatcacatcatacaactcagaaaacatggcacaactcattgctgcatctgttacagcacgaggggttctttttggaaatgctcatgttgcttcctcgaggtggcatactatccggagcccaaagctttggcaaactgagcagtcatttcgatctaataaggaccagattttaaatgaaagatttgattgttcaagttcctgtgcttcctgcaacttctctgacttggtcacagaattcagacccttggagagatggattggtcctcgcaacaatgggcctataagcagctcatggcatcatggtgtaggtggctcgcacttggtcaataaactcgatgctgatggaagtaactatgaagaggaagatgatgacgtgatagaagaatgctaaaagttagatcatgcacagtgcattatcctatgagccgccgccatgtcgttgatggatgctgcatagctgattttgtagtggttcagttgaagactagagcaggcaatgcggtaggatagctctcaccaaatgttagagcaggtgccaatgctggatgttcaattttggcgagctgatttatcatgttcatagctacaaatgatggctgacgctacagaatcatttattctaacatgtgaatcatctgaaccggtttccgtttacccttaccaaaaaaaaaaaa

SEQ ID NO: 4057 - DNA, 426 bp, Setaria italica
  Peptide Sequence Number=SeqID_70031
attcactggacttttttatctaacaaagtctcaagggcaagcatgataaagctttgtaaatggtgaattttttttcgttactctaaagtcaagggcaagaatgaaggctgggatttatagtactctttctataatggaaaaatatctggcttagcctctagaaaaaaatcagtccaaacttattacaaggtgatagccatcaagctgcgagcatcatgcatccatgaggaggaactatgacaaaagcaagcataaaaccttcatagttgaatgggagacattggaaaaatctattggagaatctacatccatgagaggcgaaaatctgcctgaatgttgtttccaacgtacaagacatgctaaaaccaccatctccttgtcttattcactgcggtgcagttaagaaagaatttattagattgcttg

SEQ ID NO: 4058 - DNA, 2645 bp, Setaria italica
  misc_feature (10)..(10): n is a, c, g, or t
  Peptide Sequence Number=SeqID_70032
gcaccgtggnggggtcccgcgggggcagccgcgggggccggagcggccgcgacgacgacgaggaggcgctgcgctgggccgccatcgagcgcctccccacctacaaccgcgtgcgcaccgccatcctctcctcctccacggaggcagaggccaacgatgccaagcccggcggcaagcagcagttcaaggaggtggacgtgcgcaagctagacgtcggcgaccgccaggagttcatcgagcgcgtcttccgcgtcgccgacgaggacaaccagcgcttcctacagaagctccgcaaccgcatcgacagggtgggcatcgagctgccgacggtggaggtgcggttcgagcagctgacggtggaggccaagtgccatgtgggcagccgcgcgctgccgacgctgatcaacacggcgcgcaacatcgcggagggcgccctgggcctctgcggcatccggctggggaggcaggccacgctgaccatcctcaaggacgtctccggcgtggtccggccgtcgcggatgacgctgctgctcggcccgccgtcctcggggaagacgacgctgctgctcgccctcgccggcaagctggacccgacgctccggtgcgccggcgaggtcacgtacaacgggttcgcgctggacgagttcgtgccccagaagacggcggcgtacatcagccagaccgacgtgcacgtcggcgagatgacggtcaaggagacgctcgacttctcagccaggtgccagggcgtcggcacaaaatacgatcttatgaccgagttgacgaggagggagaaggaggcaggcatccggccggagcctgaagtcgacctcttcatgaaggccacttcaatggaaggagtgcagagcagtctccaaacggattacactctcaggatactggggctggacatctgcgctgacaccatcgtcggtgaccagatgcagcgagggatctccggaggccagaagaagcgtgtcaccacaggagagatgattgttggcccaaccaaggtgctattcatggatgagatatcaaccggattggacagttccaccacattccaaatcgtcaaatgtctccagcaaattgtgcacctgggcgaggccaccatcctcatgtccctccttcagcctgcccctgagaccttcgacctattcgatgacatcatcctactgtcagaaggccaaattgtttaccagggacctcgcgaatacgttctcgagttctttgaatcctgtggattccgctgccctgagcgcaagggtactgcagactttcttcaggaggtgacatcaaggaaggatcaggagcagtactgggctgacaagcagaggccttacagatacatttcggtcccagaatttgcacagcggtttaaacggttccacgtcgggctccagctagagaaccacctctcactgccgtttgacaagagccgttgccatcaagctgctcttgtattctcaaaaccttaaggaagctaacgagcaacttctctaggcatcctttgacaaggagtggctccttatcaagcgcaattcatttgtgtacatcttcaagactatacagctcatcattgtagccctcatctcgtcaacggtgtttctaagaacccacatgcatcaaaggaatgtagatgatggctttgtctacattggagcactactctttagtctgatagtcaatatgttcaatggttttgcggagctctctttggccataacaaggttaccagtgttctacaagcacagggacctcctcttttaccctgcttgggtcttcacactaccaaatgtcgttctcagaatcccattctccataattgaatctatagtctgggttcttgtcacatactacaccatagggtttgctccagaggctgacaggtttttcaagcacttgctgctcgtgtttttgatccagcagatggcaggtgggctttttagagcaaccgccggactttgcagatccatgatcattgctcacactggtggagcactatctcttcttatcttctttgttcttggaggctttctcctgccaaaagatttcatccctaaatggtggatctggggctattgggtttcacctttaatgtatggatttaatgctctagcagtcaatgaattctatgctcctcggtggatgaacaagttcgtactggaccaaagtggtgttccgaaaagactaggtgtatctatgcttgaaggcgccaacatctttgttgacaaaaactggtactggatcggagcagcagctctcttgggtttcaccatcttcttcaatatacttttcacactgtcactcatgtatctgaaccctctcggcaagccacaagctgttatatcagaagaaactgcagaggaggcggaaggcaatgggcatcggacagtaagaaatggcagcacaaaatcaagggacggtggtcatagcaaggaaatgaaggagatgagactgagtgcgcgtctgagcaactcttcatcaaatgggatttcacgaatcatgtccgttggcagcaatgaagctgctccaagaagaggaatggttcttccattcaaccctcttgccatgtcttttgataatgtgaactactatgtcgacatgcctgcggaaatgaaacaacaaggagtgcaggataacaggct

SEQ ID NO: 4059 - DNA, 2420 bp, Setaria italica
  Peptide Sequence Number=SeqID_70033
tattagtctaaggtaaattgtaaggtagtattgtagtacttgtagttgtcgtcgttcttgagcaacttcttcatcaaatgggatttcacgaatcatgtccgttggcagcaatgaagctgctccaagaagaggaatggttcttccattcaaccctcttgccatgtcttttgataatgtgaactactatgtcgacatgcctgcggaaatgaaacaacaaggagtgcaggataacaggctccaattattgcgtgaggttacggggtcattcaggcctggagtgctaacagcacttatgggtgtcagtggagctggaaagactactcttatggatgtcttggctggaagaaagactgggggttatattgaaggtgatatcagaattgctggctatcccaagaaccaagccacatttgcaaggatttctggttactgcgagcaaaatgatatccattctcctcaggtcacagttagggaatctttgatatattctgccttcttgcgccttcctgaaatgattggagatcaagaaatcactgatgatatcaagattcaatttgtggatgaagttatggaactagtggagctcgacaatctgaaggatgctttagttggcctaccgggaatcacagggctttcaacagagcaaaggaaaaggttaacgatagctgtggagctcgtcgccaacccatcgatcatcttcatggatgaaccaacatcaggccttgatgcaagagctgccgcaattgtcatgcgaacagtgcgaaacacagttgacactggacggacagtggtttgcacaatccatcagccaagcattgacatctttgaggcttttgatgagttgctattgctgaaaagaggaggccaggtgatctactctggacaattgggtcgcaactcccagaaaatggttgagtattttgaggcgattcctggagtacctaaaatcaaagataagtacaatcctgcgacatggatgctcgaagtcagttcaattgctgctgaagtgcgactaaagatggattttgctgagtactacaaaacatcagatctgtacaagcaaaacaaggtacaggtgaaccggctgagtcaaccagagccaggaacatcagatctttatttcgccacacagtactctcaatccataataggacagttcaaagcctgcctctggaaacagtggctgacctattggcgcagcccggattacaaccttgttagatttttcttcactttgtttgttgccttgctgctcggctccattttttggaggataggcaccaaaatgggagatgcaaacactctcaggattgttatgggaggaatgtacacagctgtgatgtttgttggtatcaacaattgctcaaccgtgcagccaattgtttcaattgagaggacagttttctaccgagagagggctgctgggatgtactctgcattgccctatgccattgctcaggttgtcatggagatcccctatgtgtttgtccaaacaacttactacacccttatcatatacgccatgatgagcttacaatggactgctgccaagttcttctggttcttcttcatttcctacttctccttcctctacttcaccttctatggcatgatgactgtctcaatctcaccgaaccatgaggttgcagccatctttgccgcagctttctattcgctcttcaacctcttctcaggcttcttcattccaagaccgagaattcccagatggtggatctggtactactggatttgcccactggcatggactgtttatgggctcatagtgacacaatacggagacctggaagaggaaatctcagtccccggtggagaaaaacagacaatcagttactacgtaacacatcattttggataccacaggaattttatgccagttgttgcgccggtccttgtgctctttccagtgttcttcgcattcatgtacgcagtctgcatcaagaagttgaacttccagcaaagataggaccaaaatctggcagcaaagctcttgagattattgaaagaacatatccttttctccttccatttttggttacttatgtattgtcagtgtacatagggcgtagtttgggtattccacgcatagccaaatgtggcgaggtcctacacggcattctagccatttaaccatggaacattacaagagcgcaattattagtagaatttgttcatgccctatttattcactgggacttttttatctaacaaagtctcaagggcaagcatgataaagctttgtaaatggtgaatttttttttcgttactctaaagtcaagggcaagaatgaaggctgggatttatagtaaaaaaaaaaaaaactcgtataaggtttaagtaacaaaactaaaaattaaacctaaataaactaaaagtaaaacctaaaaaagtaaaactaaaaa

SEQ ID NO: 4060 - DNA, 1120 bp, Setaria italica
  Peptide Sequence Number=SeqID_70034
taacgtaccttctttttctcgcgtcgtctcccccatctcgcaggctcgcagcggaccgcgccaggccgccgctagggttaggggttgcgaggccggaaggcgggcttcagccatggcgctcaagttccttaacaagaaggggtggcacacgggggtccctccgcaacatcgagcgggtatggaaggcggagcaggcggaggaggcggagaagcgcaagacggaggagctcaagaagcaggtcgccgccgagaaggagaaggccgagttccgggccatgcaggagcgcgccggcctcaggccggcgcaggagagattggacttcctctacgagtcggggttggccgtcggcaagagctccgaagggttccaggcgctgcaacaatctgcaccaggggccgctgctgcatcctcttcttctgcgcaagctagtgcggctgattcttctaaggcagcaacgccaggagctttatttgaggataaacctcaatctgcaaatgatacatggagaaaactccactctgatcctctactcctaataaggcagcgggagcaggatgcaattgcgaggattaaaaacaatccaatcaagatggccgagataaagaaatctgttgaatctgagaagaagcaaaaagaagagaagaaagagaagaaaaagcacaagcatcgccaccataagtcaaagagcaagaggcatcactcagatgaggattcagatttagatgaaataagtgatggcaaggatgagagaaggaagagggttcattcttcccctgaccgaaagaaggaagagaaaaggtccaggcatgagaagaaacaccgcagacaagattcatcagattcagacaatgatgaaccacagagaagatggcaggatgtgtcagaagacgatgagagaaggaagagggttcattcttcccctgaccgtaagaaggaagagaaaaggtccaggcatgagaagaaacaccgcagacaagattcatcagattcggacaatgatgaaaaacagagaagacggcaggatgtgtcagaagatgatgagccaaggagaagacggcatgacgatgatgaaccaaggagaaaacgtcatgatgatgatgaacctaggagacggcatga

SEQ ID NO: 4061 - DNA, 131 bp, Setaria italica
  Peptide Sequence Number=SeqID_70035
gtttgggatcatttgagtggacagctcccaagctgtagaagattgtaccgtagataagtgactgcacaaggatgtaagggaactccacagtgaccagagaaaatgcaaaaggcaatgctgaatacatcctg

SEQ ID NO: 4062 - DNA, 459 bp, Setaria italica
  Peptide Sequence Number=SeqID_70036
ctcctagaatccctgtgtcgaatttcatctttggacacaacagcttgcagatttccaatagggttgagaatcgtcaagaacattgtgaacaagatgttcaaaacaatagcataaccaaacaatgctccaacaccaatccagaaccaatattttcccttgaataacccatatccagtgagtatcgcttcacccattgtaatgttctggtttgcaaattgctgaaatacagcaagtatgtatcagtagaaaacccctatagcaccataacaacaaaactaatatatctcaatcatttggtttatagccttggaactatttatgtgtatccatgttttgtgttgtgcacaacacaactataaacataacagattggtgccatgttgcgttcccggcatgagactcgggattaaaatcaagtgctaccttgctccatgaatgtcccatggaattcattgatgg

SEQ ID NO: 4063 - DNA, 355 bp, Setaria italica
  Peptide Sequence Number=SeqID_70037
agggggcggcgagcgatcatcttcgctggaagttgaggtacttaatggcgagggcgaagacgacggcgaagaggacgcagaagccggcgaccatggcggcgacgacgccgaggaagtcgtagcggaacccgaagtggtgctccaggaaggacgccacggtggtggaggtgacgccgtcggcgaggagtaggggctggtccaggtcgccgaactgcgaggtcaggaggccgtacagcgtccacgacaccgggttggcccagtagtaccaacgccaccacacggggatgcgctttcttgggatcatgaatccgcagaagagattccacagagtgtagaacggagcagcaataatagg

SEQ ID NO: 4064 - DNA, 462 bp, Setaria italica
  Peptide Sequence Number=SeqID_70038
gtccacgacaccgggttggcccagtagtaccaacgccaccacacggggatgcgctttcttgggatcatgaatccgcagaagagattccacagagtgtagaacggagcagcaataataggcgcaaccgtgtggtttggagtgatcgccgttgtcatcatgccgtagaaggtgaagtacaacaacgtgaagtacatgaagaacaggtaccacaggaacttgggagctgtccactcaaatgatcccaaactgtagaagattgtaccgtagataagtgactgcacaaggatgtaagggaactccacagtgaccagagaaaatgcaaaaggcaatgctgaatacatcccagcggctcgctctctgtatgatacaaatctttcgatggagatcacaggctgaacagaagtggcattggtaattcctatgaacagcactgctgcgtacatggcacccatggcattgaat

SEQ ID NO: 4065 - DNA, 843 bp, Setaria italica
  Peptide Sequence Number=SeqID_70039
acggaaagaattaatttaaccggacgaacaaaaatagtttactaggaacaaaattaaatgtgcggcgaactggtggtgacacgatgcggcgggcggtggtggtggtggtacattggcgagcaccgggggcggcgagcgatcatcttcgctggaagttgaggtacttaatggcgagggcgaagacgacggcgaagaggacgcagaagccggcgaccatggcggcgacgacgccgaggaagtcgtagcggaacccgaagtggtgctccaggaaggacgccacggtggtggaggtgacgccgtcggcgaggagcaggggctggtccaggtcgccgaactgcgaggtcaggaggccgtacagcgtccacgacaccgggttggcccagtagtaccaacgccaccacacggggatgcgcgggtgcatgtttatcccatacctttcttgggatcatgaatccgcagaagagattccacagagtgtagaacggagcagcaataataggcgcaaccgtgtggtttggagtgatcgccgttgtcatcatgccgtagaaggtgaagtacaacaacgtgaagtacatgaagaacaggtaccacaggaacttgggagctgtccactcaaatgatcccaaactgtagaagattgtaccgtagataagtgactgcacaaggatgtaagggaactccacagtgaccagagaaaatgcaaaaggcaatgctgaatacatcccagcggctcgctctctgtatgatacaaatctttcgatggagatcacaggctgaacagaagtggcattggtaattcctatgaacagcactgctgcgtacatggcaccatggcattgaata

SEQ ID NO: 4066 - DNA, 3714 bp, Setaria italica
  misc_feature (1)..(50): n is a, c, g, or t
  Peptide Sequence Number=SeqID_70040
nnnnnnnnnnnnnnnnnnnnnnnnnnnnnnnnnnnnnnnnnnnnnnnnnntttgttgcaggtgtgaaagaaagctggcttactgggggctatacagtttttacttttctcactcttcacacgctcccgtgaccgaccggaagattatttaccggcgacaaaatgtttctggacaaattaatgtgcggcgaactggtggtgacacgatgcggcgggcggtggtggtggtggtacattggcgagcacggggggcggcgagcgatcatcttcgctggaagttgaggtacttaatggcgagggcgaagacgacggcgaagaggacgcagaagccggcgaccatggcggcgacgacgccgaggaagtcgtagcggaacccgaagtggtgctccaggaaggacgccacggtggtggaggtgacgccgtcggcgaggagcaggggctggtccaggtcgccgaactgcgaggtcaggaggccgtacagcgtccacgacaccgggttggcccagtagtaccaacgccaccacacggggatgcgctttcttgggatcatgaatccgcagaagagattccacagagtgtagaacggagcagcaataataggcgcaaccgtgtggtttggagtgatcgccgttgtcatcatgccgtagaaggtgaagtacaacaacgtgaagtacatgaagaacaggtaccacaggaacttgggagctgtccactcaaatgatcccaaactgtagaagattgtaccgtagataagtgactgcacaaggatgtaagggaactccacagtgaccagagaaaatgcaaaaggcaatgctgaatacatcccagcggctcgctctctgtatgatacaaatctttcgatggagatcacaggctgaacagaagtggcattggtaattcctatgaacagcactgctgcgtacatggcacccatggcattgaatatgtcatgttgggtttcccttctagacccaaacttccagcaaatagttccaaacatcaatgaaatgataacagtgtagaagaatcgaactgcggtatattgagggttcctccagtatgataggttttgcttccataagcaagcaatatactgagcacaaaatggttgggcatactttgtggcgaaagtaagttctttcgattcactgctcggtctgctcaggacctcaaccatttctctggtctgctgaaataattttgattttcgatagtattcagcgaaatccactccaagaatctgctccatttgagtacttgtgacttccaacatccatgcagcaggattatagccatccctgattttaggcactcctggaattgcctcaaaaaagtcaaccagattgcgtgatttggcacctaagggaccagcatatataagttgccctccacgcttcatgaacaaaagctcatcaaatgattcgaatatgtcaatacttggctgatggatggtgcagacaatagtccggcctgtattaacaatatttctcactgtcctcatcacaatggctgcagatcgagcatccaatcctgatgtgggttcgtccatgaaaacaatagaaggatttgcaacaagctcaacagcaattgtcaaccttttacgttgttctgtagacaaaccgtttacccccggcaaaccaacaagagcaccacttaagggattcaactcaacaagttccatcacctcttcaacaaaagccctttgagtgtctgcatcaacatgagaaggcaaccggaggcatgctgagtataacaaagactcaagcacagtcaagcaaggtgaatggacatcattctgttcacaatacccggagatcctagtgaaggtctcctggttcttaggatacccagatatagtaatgcttccttctatgagccctccagttttccggccagctaaaacatccatgagggtggttttgccagctccactgactccaacaagtgctgttagtatccctggcctaaatgctccagtgacatcaacaagcagctgtaggcggtcttctgctataccttgctttttcaattcctctggtacatcaacgtagtagttgatattcctaaagcacatagaaaggggttgaaaaggcaacaccatccccttctgttccttgagattaccacttaatgaatttgagtgcagataagatcgtagctccagggctaccctatcattcttcctcctagaatccctgtgtcgaatttcatctttggacacaacagcttgcagatttccaatagggttgagaatcgtcaagaacattgtgaacaagatgttcaaaacaatagcataaccaaacaatgctccaacaccaatccagaaccaatatttttccttgaataacccatatccagtgagtatcgcttcacccattgtaatgttctggtttgcaaattgcttgctccatgaatgcccatggaattcattgatggaaatagcgttttgtgcgtacatcataggagagatccaataaccccaaatccaccagactggtatgctttctttggttatgatgaatcctccaagaatcataacaaccaacaaagcaaatgatccaaaggtattagcaactatcatattacggcccaaagatgccatgacccgaaaaagagccaaagatgtttggtgcagaaagaaaagcaacaaaaattgtcccaaaaatcttgtgaattggggatcatagccaaccacataatatgttacaagtacccacattcctgattcataaagtgaggttgggatgctcaagagccaagaaggaagtgtataagcccatggcgggtagaagtgcaggtccctgtgcttgtaaagaacaggaagctttgtgaccagcatcgagacttcagtgaagccattgaacagaatcatcactatcgcaaagtaaagggctcctagataaataatcccatcatcaactgaatcatggtgcattgttgatctgaaaaacactgtcattgtgataagagcaacaagtagaagctgaatgaatttgaagacatagatgaatgagttccttttcatgagcagacgctgccactggtagttggatttgagaagctcaagcctcttgacaccgtaacttgatgtacaaagagctgcaggatgattacgatatctgttgtatggcacagctaattcctcatgcaatctcttaccgataataaatgttttaaaggcttcagcaaattttgatacagaaacaaactggtatggataatcgtagtggcaccaatactgctgctgatctttcttggacaaaacttcttgcaaaaaatctgccacattttttctttctggacacttgaatcccatagcagcaaaaaaatcaacagcatattcacggggaccctggtatacaatttgaccttcagctatcagaatgacatcatcgaatagttcataagtctctggagctggctgcagcaaggatatgatcgtagtgccgtcaagtgcatgtgtggaatgccttaggtacttgataatctgatatgttgttgcactgtcaaggcctgtagatatctcatccatgaacagcacacgggcagacccaactagcaattcacctgttgtcaggcgtttcttttgccctccggagatccctttgatcatttcatctccaacaatggtgtcagcacagatgtccagccctaaaatcttcattatatactcagccacaaggcttgtcggtcttttgtttctttgttcttttaa

SEQ ID NO: 4067 - DNA, 304 bp, Setaria italica
  Peptide Sequence Number=SeqID_70041
gattatttctgttgtttcgtactttcgttaggatggaggagtttttttttgttgggtgtaaattgctgactaaatcctaaattgaaatggcacacggctttgttgagggaatcaagatcttgccaataacctcttgaatagcttagttgcaatgggctgtgcttcaatgtttctttccccaaaatcaattgctagctcttgatggttctgaatttcgcttagttgaaattgttctcttcactggtacacactcatataccaagctgattgaatttatctctccgcttagctgaaagtacaataa

SEQ ID NO: 4068 - DNA, 369 bp, Setaria italica
  Peptide Sequence Number=SeqID_70042
gcgaggagctcccgcgcgacgtccgggtcggcggtgaccacgacgcgggtctcgccgagcgagaacgccatgagccggcgcctggccttcccgccggcggccgccgccgccgcgagcttccggtgcgccaggcccgtcatgagccccatgctgccgagcaccggcagcccccggggcccagggatggcggcgccaatgcccaggccgcccctcctggcccaccagtaccacccccacgcgggcccgccaggtgccacccagtgcaggagcgccgtgacgacgaaggcggcggcgaagaccgcggcgaggccgagcaggcggtgggggtcgccgcatttcgcggccagggagaggtacagcagccagccg

SEQ ID NO: 4069 - DNA, 344 bp, Setaria italica
  Peptide Sequence Number=SeqID_70043
ctccctcttctcgcagaagggcaagaaggggcccaaccaggacgccgtcatcctctgccagggtttcggcatggaggacggtgtgttctgcggcgtcttcgacgggcacggccggtgcggtcagtacgtgagcaagctggtgcgggactacctccccttcatgatcctcagccaccggaacgcgctcctcctgggcgccggcgacgacgacgacggcgacccggccttcagcgacgcgtcgccgtcgtcgtcgacggacggcagcggcggcggctcgtcgccgtcgccggcgcagctgctggacgagtggcgggaggcctgcgccaacgcgttcgaggccatga

SEQ ID NO: 4070 - DNA, 279 bp, Setaria italica
  Peptide Sequence Number=SeqID_70044
taaggtaaaaatttaatttagtttacttgctgaaagatcagccagtcttgaattattcatttgcagtcattcagtcatacctcaacagcaacatttgcagctcatgaataccattctctatggcccggaaacaactcaggctgcactgttatctcacttgtgagccccatagaaatcccaatcttatcataaccatcgtcaatccattaatacattctcttagcaatatgttctgcaacctcttactgcctgtgacaatactaatcttattgcatccat

SEQ ID NO: 4071 - DNA, 418 bp, Setaria italica
  Peptide Sequence Number=SeqID_70045
taggacaatagggaagactaccccgaaggaagttacgtgccggagcggttcgccggcgacgacctgacgacggactatctgcttgggcaggacttcaggttcgtgccgtttggcgccgggaggagagggtgtcctggggtcgggttcgccgtgccagccatggagctcgcattggcgagcctgctgtaccacttcgactgggagctgccggccggtgggccgtcgaagctggagatggacgagctgaatgggctatcggtgcggcttaagacgacgctgaatttggttgctaagccacggtctcctcagtaatataaagatcaccatgtatttggatttgtggtttttggtagtaataagaactaataaacaggccagagcttgattgattttggttgcttgatcaaaaaaaaaaaaa

SEQ ID NO: 4072 - DNA, 395 bp, Setaria italica
  Peptide Sequence Number=SeqID_70046
cggatggacgccttgctcgagcgagtcatcgccgaacaccgccagaagcgccgtgacggccgctgggaggacgacggccaccgggacttcgtcgacgtgatgctggacgtgaacgaggaggcagagaagaacgccggaggagggggagtcatgtttgacaacgtagccatcaaggccattatcctggacatgttcgccgccgccacggacacgacctacaccacgttggtctgggccatggcggagctcatcaaccacccccaagagatgcgcaaggtccaagacgagatccgcggggccgtcggcggcggcgacagcgtcacggaggaccacctgccgaagctccgctacctcaagtgcgtgatcaaggagacgttccggctgcgcacgccgtt

SEQ ID NO: 4073 - DNA, 1590 bp, Setaria italica
  Peptide Sequence Number=SeqID_70047
tcccacggcccggtcatgctcctgcgcctcggccgcgtgcccaccgtcgtggcctcctcggcggccgcggcgcaggagatcatgaagacccgcgacctggcgttcgcaagccgcccgagggtgagcatggccgagcgcctcgtctacggccgcgacatggccttcgtcccctacggcgagcactggcgccaggcgcgccgcgtctgcgtgctccacctcctcagccaccgccgcgtccagtccttccgccacgccagggagcaggaggccgccgccatggtcgaccgcgtccgccgccgcgcctcgccgggcggtgatgccgtcaacgtcaccgcgctcatcatctcctacaccaacggcatcatctcccgcgccgcgttcggcgacgaacagagcttcgggcagcacgacggcggcgaggagctcaccgagctgttcgccgacttcgaggggctgctcgggacggtcaccatcggggacttcgtgccgtggctggcgtgggtcgacacgctcatggggctcgacgccagggcggcgcgtacgtccgcgcggatggacgccttgctcgagcgagtcatcgccgaacaccgccagaagcgccgtgacggccgctgggaggacgacggccaccgggacttcgtcgacgtgatgctggacgtgaacgaggaggcagagaagaacgccggaggagggggagtcatgtttgacaacgtagccatcaaggccattatcctggtacgcacacgttctcatgaactgctagagtactttaattatttgattgatgaggatgaactgcatgtaacatcacgcatgatgcattgatgcatcgatcttttatttgttaaacgcatgaatgtccaggacatgttcgccgccgccacggacacgacctacaccacgttggtctgggccatggcggagctcatcaaccacccccaagagatgcgcaaggtccaagacgagatccgcggggccgtcggcggcggcgacagcgtcacggaggaccacctgccgaagctccgctacctcaagtgcgtgatcaaggagacgttccggctgcgcacgccgttgccgctcctcctgccccagggagacaatggaggacaccgagctgctcggctaccacgttccagcgcgcacccgggtcatcatcaacgcctgggccatcgcacgggacccggcggcatgggagctccccgaggagttcgtgccggagcggttcgccggcgacgacctgacgacggactatctgcttgggcaggacttcaggttcgtgccgtttggcgccgggaggagagggtgtcctggggtcgggttcgccgtgccagccatggagctcgcattggcgagcctgctgtaccacttcgactgggagctgccggccggcggaccgtcgaagctggagatggacgagctgaatgggctatcggtgcggctcaaggcgacgctgaatttggttgccaagccatggtctccctgagtgcatcgcatcggcttacgttatataaagatcaccatgtatttggatttgtggtttttggtagtaataagaactaataaacaggccagagcttgtattgaaaaaaa

SEQ ID NO: 4074 - DNA, 407 bp, Setaria italica
  Peptide Sequence Number=SeqID_70048
gcacagcttaacttccgaatcgaagcacttgttttctagaccagctacattgcgtttgtaagaccagcagtgtgcagcagcaccgccttaatttcttcaggcacgagtccaggaccatccccgcattgctggagcagacaacagagatatgaagagggcgagtaacgttgggtttggttgaattgaatccataagaagcagaaatggttatgatgtggtgagcacagacctcagctcggaagacatccattgcaaacccattgaagcagctgatgactgcctgctcgatgtcgagacccaggccgtccagagctgtcattgtggacagcaggatgcctggcctacgcgcgcagaacatgtggatattgactgcaatgcccttccctcatcctaagaaaacttaaaaa

SEQ ID NO: 4075 - DNA, 620 bp, Setaria italica
  Peptide Sequence Number=SeqID_70049
tttttttattaaccttaacttaaagctgtttaagaacggaaacagattttccactttacgatcgacgcagactttggttcggagttgcagcaggagtgcaggactacacaaggcaaaaagcatgtaccgagaagaactaggacaggctaggagaatactgacattattttaaaaaaaaactctaagactctaattaaaagctgatggatggatggaatttgggtctgagaaccctgagagggccttcccaaactgttaaaagacgaaagctggttctgtcaccccctggaaccggagacacctgagcttgtgaattccttagctacgttgttttcttttttcttgcggtttggttgagccgtcttgttgtcctacatcacgccatggaatccggtggattgcaggaggacggtcttgatttcctccggcatgagcccagggccatccttgcacagctcagccttgaagacgtctagggtgaatccattgaagcaactgacaacagcctgctggacatcgaggccaaggccttcgatcgccttcatagcattaagcagaagaccaggcctgcgagcacagaacatgtggatgttcccggctcgcaaggcacacaggggata

SEQ ID NO: 4076 - DNA, 1229 bp, Setaria italica
  Peptide Sequence Number=SeqID_70050
atatcccagcttgcctgccacactgccagtgacaatcattgctggagtctatgtgcatcatctctgaccgacatggcactgaatctgattatatctcatcaccattcaccagatgtttaacacacgacatagattctattacatcacagtaccaaagagaaaattcgacattaaacgaaagagaatccatagttacatcatcacttcatatccctagatggcgagcatcatctcatctcttgaccaagaaaccgatgaacagcacagcttaacttccgaatcgaagcactttgttttcagaccagctacattgcgttttgaagaccagcagtgtgcagcagcaccgccttaatttcttcaggcacgagtccaggaccatccccgcattgctcagctcggaagacatccattgcaaacccattgaagcagctgatgactgcctgctcgatgtcgagacccaggccgtccagagctgtcattgtggacagcaggatgcctggcctacgcgcgcagaacatgtggatattgactgcatgcccttccctcatcctgacttcaaccgtggcttgctgcccattagggctagggaatgcggctgggcaaagctcctctttgacatgtccaggaaatgtttgcaatgtgggcgtcgacggatggaagctagctgatgttggcccaacaaccgaagagcttggagcagactcaatttcattgtgaagatcgttgatcctctgcaggagttccttcaaatactcaattgcatcaccaaggatggaagccctatccatcttgctgatcttgggcaccaccgagcgcagcatgtagaggcggtcattgagcttcttccggcggcggcgctccgccatgaggttcttggccggcagccccttcttgttcttgcccctcccgctgccgccgccaccgccacctccacccgtggccgcgcccgcagcattctccatggaggctgagatggccatggatgacgcgtcgacgctgtgctcgatctcctcgtcgtcgtcccagtccatcccgccgtggacgaaggccggggccgccgccggcgccaagaacccacctttctgcacctgctggtgctccgcctgcgccggcgggggcgcggcgaggaactgcccggcgtcgtcgaaggggttgttggaggtgaagtcgtggaaggcaggcagcgcggagccgccgccaccgccgggggtggaggaggagggcggggc

SEQ ID NO: 4077 - DNA, 1294 bp, Setaria italica
  Peptide Sequence Number=SeqID_70051
aacctttaactttaaagctgtttaagaacggaaacagattttccactttacgatcgacgcagactttggttcggagttgcagcaggagtgcaggactacacaaggcaaaaagcatgtaccgagaagaactaggacaggctaggagaatactgacattattttaaaaaaaaactctaagactctaattaaaagctgatggatggatggaatttgggtctgagaaccctgagagggccttcccaaactgttaaaagacgacagggttctcagacccaaattccatccatccatcagcttttaattccttagctacgttgtttctttttttcttgcggtttggttgagccgtcttgttgtcctacatcacgccatggaatccggtggattgcaggaggacggtcttgatttcctccggcatgagcccagggccatccttgcacagctcagccttgaagacgtctagggtgaatccattgaagcaactgacaacagcctgctggacatcgaggccaaggccttcgatcgccttcatagcattaagcagaagaccaggcctgcgagcacagaacatgtggatgttcactgctcggccttccctcatccttacctcaaccctaggttgctgtgaagtagggcttggcaatgcgcttgtgcacagctcttccttcacacgagacggcagagtgggaagcgtcggagtcagagggtggaagcttgttggtgttggaggcagtgaggctgtggatgggggcgactcaagctcattctgaagatcattgatcttctgcagcagctccttcaggtactcgattgcgtctccaagaatggaagctctgtccatcttgctgatcttgggcacgactgaccggagcatgtagaggcggtcattgagcttcttccggcgacggcgctccgccatgaggttcttggccggcatccccttcctcttgcccttcccgtcgcccgcgccaccggcagtcaccgtgctgttggcgttggagtccttgtcgtccttcttgccgctctcctcgacgcccctcgcgtcctcggagtcgtagttgagcccggacgcgtcgatgctcccgccgtcatcatcgtcggcgtcgtccagcactgcgtcgccgccgccagccgaggacgctcccgcggccgcggcgagggcctccgccttgcgcttcttgtcgtcgtcctcctcgctggcgttacggcgtagagcgcgcttctggaacagcgtcggctgcgcgcccacgggcgggaagatctccagcgggcggagcaccgccgccttcccgcg

SEQ ID NO: 4078 - DNA, 815 bp, Setaria italica
  Peptide Sequence Number=SeqID_70052
tgctattctatccttacacacagatacatctgattgttccacttctcacagcgaaatggatacagggaaaagaatacaaaacggcgtgtttgcaaaaattgacatagtacaggttatgacttggtttcgctgccagttgtgtcggagctgacagtgacgcatgggaaccaatatctgcgcttgccgtccctgtggccatcgtcgatcatagcaagtccctccttaagtaaagtttcaagggcatcaatggcacgaccagcggaccatgagaattccttttcaacttgttctactgtgacatagccttcagcctgtgctagcccaagtatcccactgtgatctttatttaattcagtaggaacagatcggaccagctttctcctcccaaccgaaattacttcaaagccactaccaaggacttttagcttacttatagcacgtaaacagtcatcttcagacaaagattcaagagtagcttttctcttctgacagagcagtttgcggagatctagcaagtcaatcagaccaccattatgtgatctggttgcaatgcatatgtctactatctgaactccaatctcatagtagaagtcaccaatccctagaagttctgcccaaactcctttattagatgccagcggatctactccaacttttgcacacatctcatggaactgctgcctaaatatcggatttttacggatatcactcttatgcttgcgagcgaattcctccagctgagaccggaatgttgccagctgctccttcatctgagacacgcaacagaggataggcaaggcacacgaggggatagg

SEQ ID NO: 4079 - DNA, 3031 bp, Setaria italica
  misc_feature (3007)..(3031): n is a, c, g, or t
  Peptide Sequence Number=SeqID_70053
ggcgtgtcgaggtaaacaggagcgcaccgcgcgagagagagagtgcggtgcggctcggtgccggaggattcattgagttcgcccccaagaattcgtgggacctgtggaaaggagtgagctttcgtcgccgattgcctggccggtgactgcgtcggcaagccccgagacgcgtggcgacccacccctttgagatgcctaggcgaataaggcgcgcggcgaggcgacgtcgtacagcctaacctacaataggataggatcaagaggccttgaggaaagaagaggaggtgcagaggccagaggaaagaagaggaggagcagaggccagaggagcatatacctgaggacttgaggcgcagagcagaggaggagcagaggccagaggcgcagagcagaggaggagtggaggacttcctgctcgccgggctccaggtgcgggcgggctccaggtgccggcggacggactggcgccggcggacggactgctgccggcggatctcctccccctcggcgccagcggattccaggtcaccagatatcagcacttgaggctcaagcatggagctctgcacagcatgtatctggacttcagcacagcggtctcatacattaactcctaacagacgagcatcataccatggatttgcgaggtcaatctccttggtgccccaaaggagaaggcgatcgaccctctatgtcacgaatgctgcgtcaactagtgctccagtctcatctcaaaacataacccaacttccacgcaccaaaagtatatccagcgacaaacccagcagtgcactggagcaacttgatattgaacgtggcgtttgtatcccattccggaagtacactccagaaatggtcaggaaaaaagtcatggattcaagaggctccatactatccctagctagtcggggagtggagataatttggaaacttggattttactggtcatctctagtgtatgacttcttggttggacgggacgaagaaattgttccatatcgcgcccgccaacttcgcaatcttttatgtgatctggggccatctttcataaaagcgggacaggttctagccaacaggcctgatattattcgagaggattatatgaatgaactctgcatcttgcaagatgatgttcctccagtccctaaccaggtagcttttgccataattgaggaggaacttggacagcctctagagagattgttcagcaaaatttcatcagggacaatagcagctgctagtttgggccaagtttaccgtgctacacttagagaaactggcgaggatgttgctatcaaggttcagagaccagggattgaaccaataatataccgagatcttttcctcttccgcactttggcttcatttttgaatgggattagtcttcagaaattagggtgcaatgcagagcttattgttgatgaatttggtgaaaaacttttggaagaacttgattacacactcgaagctacaaatatcgaggatttcctagaaaattttaaggatgatccaactgtcaagatacctcgagtgtataagcagctttcaggttctcgtgttctggtgatggagtggatagatggaattagatgtacggatccacaggctataaaagaagctggaattgatgtggaaggctttctcacagtcggagtgagtgctgccttgcgccagttgcttgaatttggtcttttccatggagatccacatcctggaaatatttttgcaatgcgcgatggtcgtattgcttacgtcgactttggcaatgtggccgtccttagccagcaaaataaacaaatcctaatagatgctgttgttcatgctgttaatgaagactatgctgaaatggcaaatgacttcactaggctgggttttcttgctagtggaacagatgtagccccaattattccagctctggaagccatttggcaaaactcagctggaaaaggcttggcggacttcaatttccggagtgtgactgggaagttcaatcagctcgtgtacaactacccaattcgcattccagaaaggttttctttggttatccgttcgttgttgacacaagaaggaatttgctttaccctaaagcctgattttaagtttcttgaggttgcatatccatatgttgcaaagcgtctgttgacagatccaaaccctgctctgagggaacgcctgattcaggtattattcaaagatggggcattccagtggaaacgactagaaaaccttatagtgcttgccaaggagaatgtgtccaagatgagcagcaatcctgcactgaaaaagaatagttcgcaagctatgagaagtcgtcaactggagagcaaacttgatctcagtgaaacaattaaagacggagcacggatgttccttatcgatgctgggatcaggagacaactcatactagctttcactgaagactccaagttgcatgtagaagagcttgttgatgtgtacagactggtcgaagatcaaatagatatgccttcactagcccgtgaggttctccaagatttgccttctgttgcacgtgacttcatgctttcttggagtgattccatcctgtcggatcgccaatactaaatagtgtaatcctcgttacagctagcatagaaatcagagcgacttttagacctttcaagatcatggtacctcaagacagtctgcacaaaaatagctagacaggcattcctccttgctctatagaattcgtttttcctgtaatttttgtatagctaaatctgcaacctgcaatttcttctttttttctagatcttctcagttcctctgcatgttttgtgtagcacaaaggaacttgtatatagattatagaatgggcttgtaatttcgaatgcagtaggtgtacacaaccagcatacaaatatatacattaggatcaacaatgtctatggacttcttcgtgtctctgaactctgaagtgtgttgtactgttgattgacgagacttggaggaaatggtcaattcagaatgccgcatgaatgaaacnnnnnnnnnnnnnnnnnnnnnnnnn

SEQ ID NO: 4080 - DNA, 217 bp, Setaria italica
  Peptide Sequence Number=SeqID_70054
cttcaacacttgcagagtgtccacaaatgggacctttcattggaaagagatgcagaagaggaagccgagttcagagcgaagatgaaagagcaggcaaatgcacctgaagatttacccccacaatttctcatcctgcttgaaaacagcttcagtgtgctccacgcaaatcacggctaaacagggatacacactactggatacataaacctggaagcac

SEQ ID NO: 4081 - DNA, 1764 bp, Setaria italica
  Peptide Sequence Number=SeqID_70055
cgttacccgagtagccgaccaccgccactccgctgttcccctccccgtccctcgcagtcgcagctccgcccgcccgccggccaccggctacctctgcggcgctctgtcctgcaatagtttattgatttctttcactcatgggtcgcaccatcaagaaggccaagaaggctaaatccaagaagaccaagaaagttgaagcttcatcgtcatctaatcctgtggttgcctctggtccggccaaggtctggcaaccgggtgtagatgcactggaagatggggaggagctccagtttgatcctgaggcttacaattatctccgagggtttagcattggctggtcttgcttgagttttgatgttgtgcgcgatcaacttggactcgtccgatcagagttcccccatacattctatggtgttgctggaacacaggctgagaaggctccatggaattatattggcattttcaagctttctaacataagtgggaagaagcgggaacctataccaccttcagcagttgatggtgacactgatgtggatagtgacagcagcagcgatgaagaagatgaagaaattaatgaggatacaaagcccatcttacatctaaaaaagtggcccatgcgggttgtgtaaatcggatacgctcaatgactcaaaaaaccacatatatgtgctacatggggtgatactggtcatgttcaggtgtgggacttgagctccttccttaattctttagctgagtcaggggcacctgcacccaaagaagatgacataatccacaaacacttacctgtgaaagtatttagtggccataaagatgagggatatgcaattgattggagtccgcttgttgctggaagacttgtttccggtgactgcaataagtgcattcacctgtgggagccaactccaaccaactggaatgtagatccaaatccatttgttggacactctgcaagtgttgaagatcttcagtggagtcccacggaagccgacatatttgcctcttgttctgtggatggtacaatagcgatatgggatatacgtacagggaagaaacctcgtatgtctgtcaaggctcataaaaccgatgttaatgttatctcatggaataggcttgctagctgcatgatagcttcagggtgtgatgatggcagtttctcagttcgtgatcttagatcaattcaggaggactcgttggtagcacattttgagtaccacaagaaagcaattacatctatcgagtggagtccacatgaagcatcatcattagctgtaacatccgaagatcatcaactcacaatttgggacctttcattggaaagagatgcagaagaggaagctgagttcagagcgaagatgaaagagcaggcaaatgcacctgaagatttacccccacaacttctctttgttcatcagggccagagagatttgaaagaactgcattggcacccacagataccctcaatgatcgtatcaacagcaattgacggcttcaatgtgttgatgcccagcaacattgatacaaccattcctggcaacactgatgcaacgatggcatctgctgagccatagatgtttttggtagcaccatgcaacttgcacttccaggtttatgtatccagtagtgtatccctgtttagctgccatttgcatggagcgctatgaagctgttttcaagcaggatgagaaattttgattggttgacattatatgctatgctatatagataagttttaatatgcacatgtttttgccaaaaaaa

SEQ ID NO: 4082 - DNA, 1811 bp, Setaria italica
  misc_feature (1802)..(1802): n is a, c, g, or t
  Peptide Sequence Number=SeqID_70056
ccaataccccgttacccgagtggccgaccaccgcccatccgccgttcccctccccgtccctcgcagtcgcagctccgcccggccgctaccggccacctctgcggcgctctatcctgctaaagttgattgatttgtttcagtcatgggtcgcaccattaagaaggccaaatccaagaagaccaagaaagttgaagcttcctcgtcatctaatcctgcggttgcctctggtccggccaaggtctggcaaccgggtgtagatgcactggaagatggggaggagctccagtttgatcctgaggcttacaattatctccgagggtttagcattggatggtcttgcttgagttttgatgttgtgcgcgatcaacttggactcgtccgatcagagttcccccatacattctatggtgttgctggaacacaggctgagaaggctccatggaattatattggcattttcaagctttctaacataagtgggaagaagcgggaacctataccagcttcagcagttgatggtgacactgatgtggatagtgacagcagcagcgatgaagaagatgaagaaattaatgaggatacaaagcctgtcctacatctaaaaaaggtggcccacgcggggtgtgtaaatcggatacgctcaatgactcaaaaaccacatctatgtgctacgtggggagatactggtcatgttcaggtgtgggacttgagctccttccttaattctttagcagagtcaggggcacctgcacccaaggaagatgacataatccacaaacacttacctgtgaaagtatttagtggccataaagatgagggatatgcaattgattggagtccgcttgttactggaagacttgtttctggtgactgcaataagtgcattcacctgtgggagccaactccaaccaactggaacgtagatgcaaatccatttgttggacactctgcaagtgttgaagatcttcagtggagtcccacagaagccgacatatttgcctcttgttctgtggatggtactatagcaatatgggatatacgtacagggaagaaacctcgtatgtctgtcaaggctcataaaactgatgtgaatgttatctcatggaataggcttgctagctgcatgatagcttcagggtgtgatgatggcagtttctcagttcgtgatcttagatcaattcaggaggactcattggtagcacattttgagtaccacaagaaagcaattacatctatcgagtggagtccacatgaagcatcatcattagctgtaacatccgaagatcatcaactcacaatttgggacctttcattggaaagagatgcagaagaggaagccgagttcagagcgaagatgaaagagcaggcaaatgcacctgaagatttacccccacaacttctctttgttcatcagggccagagagatttgaaagagctgcattggcacccacagataccctcgatgatcatatcaacagcaattgacggcttcaatgtgttgatgcccagcaacattgatacaaccattcctggcaacactgatgcagccatggcatctgctgagccatagatgtttttggtagcaccatgacttgtgcttccaggtttatgtatccagtagtgtgtatccctgtttagccgtgatttgcgtggagcacactgaagctgttttcaagcaggatgagaaattttgattggctaacattatatgctatacagataagatttaagatgcacatgttatagctaagtagtcttctctatcaaaatgtcttagaaaaccaaaaaaaaaaaaaaaaaanaaaaaaaaa

SEQ ID NO: 4083 - DNA, 4527 bp, Setaria italica
  Peptide Sequence Number=SeqID_70057
aaagccaggtcatgttgaggctgatatatattcgtcctcgatgaatgagcaagtgagaacaaaaaagaaactctctacacaaaacaacttcatttgttcaactcatgctttcctcttctttttttccaatcacgggctcacggccaccctctctgttaagcattgtatcctcctgtattattacatgttacgactttatataaaccacacattctacaagtgtctcaactcagtgagacagaagagctccgagcttctatttggtggaatgctggaactgatccatcgggcaaaccaatttaccggtcaatgccctcaatcttgtcttcaacctctgagtagagctccctgagcttttccaaattctcctctgatgtctcccaatagcctctgccgctggcttctaggaaggtctggaccagcttcctgaatgagttggggttggtctccatgagcctcttcctcatcgcctcatcttcaatgaatgtggaatttgcctcctcataaacccagttgtcaacttgtccggatgttgcactccacccaacagtgtttgtgagccgcttctcgatctctctaactccctcatagccgctcttcatcatcccctcataccactttgggttcagtagctttgtccttgcatcaagacgcaccgtctccgacagtgttctcacctgtgcatttgctgtggttgtatctgctatgtaagaggcaggtgcccgtccatccttccgcagcccttgcaccagctttgttgggtccgagtcgaagtagtggctcacatctgtcagtgagatctccgacgagtcgaggttctggaatgtggcatctgcagttgccagagcaagctcaaatgccttgcgcttctccttcatgcctgcccctggagcgtcactgtcgaatgcaaaggacttgcggctcaggtacatgtcctggagctgcttctcatcggtccatgatgcattctccactgccaaattcacatttgacgagtaggaccctgatgcatttgagaacacccttgttgctgcctctcttagtgggacacccagctcctctgcctgctcctgggcatgcttgcgcacatagttcatctctactggctcatctagttcagcgaccatcttcactgcgcggtccaacaggttcatctggttgatgaagagatccctgaagacacccgagcaattgacgacgacgtcaatccttggacgtccaagctcctcaaggctgacaggctccacacggttgacacggccgaaggtgtcagccactggccggacaccaatcatccacagcacctgggccaatgactcaccataggtcttgatgttatcggtgccccacaagacaagtgcaaactgtctcaggatacttgccaccattgtcagccttttgcctctccagcagacggtcaacaacgatcttggcactcttcagggcagctgcagttgggatggactgtgggtcaagggcatggatgttcttccctgttgggagaaccttcgggttacggatcggatcaccgccagggccaggctcaacatagcttccctcaagggcaagcttcaagctgcccagctcattgtcttgcacaatgagttttaagcactcccccaagaatccaaataagaccctcagcttctctctgtctgccctgatgaacttggtcgtggacaagtactgcacccatggttctgagagaccaaagccaagaatgttactgagattgttagtgacatttacgacttgccctttgctgtttgtggtcttctcaacaaagctagtgatggcaccacgagaagcttcagttatctgcctcagaagctcaacatcagccagtatgcccttgtcacttcccctgtacacatcttcaatgtccctgcccactgttgcagcaagtatgctgggcagtgagcttatgccctcttctgggcggtcaagggcggcaatgttcaccaatgtggccacagcctcaatagcacttggtggctcaccgatcacatgcagaccacacggcaggagccgtgattctatctccatgatcttcgcatacaccttcccaacaataaggtcccgctccttcggtgggagctcctcgccttcctcaggcaacgggacatccttgtcaaggttacactgtttagcagtgctgatgattgagctcacaatctgaggaccacgccctgtgtccttgagagactggtaagaagagatgagctctgacagctgcttgagccccttgtagagaccggcattctcagctggtggtgtcaggtagctgatggtgtttgcatagctccggcgcttggcgacggttgcctctgatgggttgtttgctgcatagtagtagatgttggggatgttgccaatgagactgtcagggtagcaggtatcactcatcccaacctgtttgcccggcatgaactcgagggatccatgtgtgccgaagtggagaacagcatcagcctggaagatcttctcaacaaaggtgtagtatgctgcaaagccatggtgagggctggcagactttgagaacagaagccgcatcgggtcaccttcatacccaaaagtgggctgcacacctatgaagacattgccatactgcttcccatagacaaggaggttttcaccatcagagttgaggttcccaggtggcttgccccagttctcctccagcaaggaggcataggaagtgagagactggtactcccgcacattcatgcggtaagcgacattgagattcggactgttgaactgggcctccttgtcatggatcacctcctcgatgagggcttcaggtgtgtctggaaggccctcaacgttgtagccgtccttcttgaggtctgagaggacagagtaaatggagctgaacacattcagatatgctgcagtcccaacgttgcctttgtctggtgggaagctgaaaacagtgattgccagtttcttctcctccttagttttcctcttgagtttagcccatctgattgctctggtgcagagctgctccacccttttgtgcagtgcatgtgatttccctgtcctggggtcccctgccggcgaacacgatgggctccatccctccgtcaagctccggcagcgcgacctgcagcgccacttggatggggtgcagccccaaggtgctgttgagccactcctccgtggtctggaacacgagcgggagcgcgacgatgtacggcacgtcgagcttctgcagcgccggcgattgccttggggtggtcctgcctggccggcccgccgacgagcgcgaacccggtgagcgacaccacggcgttgacgaacggcttgccggtgatcgggtcgacgaggtagcgctgcacgggcccggagaagtcgaggccgccggcgaagattggtatgaccttggcgcccatggcctcgagctccatgatgactgcgacgtagtggccgtcatccccggtgacaatgtggctcctctgcaggacgagtccgatgacgggcgcgtcggggtccgttgagcttgtcgttggcgtcccggcgcgtgccgtaccagttgaggtactccttgacgtcctcgtacatggtgggcgcgagcgggtgccagatgccggcatcgaggtagagcacggggtcgtcgtacttgatgccgccggcggccttgagcgccggcacgtatgagccggcgatcatcttgaggaagttctggaggttgtccggcgagccgccgagccagaactggaggctgaggatgtagagcctggccgtcctgcgccttgtcggagggcaggtacttgagcaccttgggcagggtgcggacgagcttgagcatgctgtcggcgaagttgctggagttggccttgttgcgcttgaagagctggaagaaggggctcttggactggccgagctgggacatggagaaggacccgagcttgttgaggcgcatgacctcgggcatggaggggaagacgaggacggcgtccatgcgctcgcggtgctcctcgacggcagccttgaccttgagcgcgagctcctcgacgaagatgagggagccgatgaagacgttggcgtcggcgaggtctgcgcggaaggtggcgtaggtgtcggcgtcgcggagctcctcgacgaggtagccgacgacctcgaaggaggcggagcggcgcgcgtcggcgttgagctgctgcacggcggcggtgatggaggactggtactgcgcctcgaggacgacgtagacgaccttgacgcggggcgagcgtgctgggctccgggaccacgcggcgcacctccggcttggtctgcgtgaagaggccgttgccgccggcgaccgcgcaccggattgtggtggcgccgcggcgggtggagggtggctggcggcggctactgaggaggaaggagtggagcggcacgggcgccgccagaagcttcttctgcgccgccgccccggtggcggtggcgaacactagggacgacgacatggaatgcaaaatcgtgggtgttcttggctgctggcgtttgttcccccttcccctccctccgagaaataaa

SEQ ID NO: 4084 - DNA, 271 bp, Setaria italica
  Peptide Sequence Number=SeqID_70058
gtggtgtagagcacggtgtggcggtcgagggagcggcggatctcctgggttagcatgcgaacgtgccagctcgcctcctcctggcgcttcataagcaccacctcgcggtcgagctcgtgggccttgatccagagcaggctctcgcggaccttgacgcgcagcagctgcgggatgagcgtgagcagcgtgatggcggtgaggaaggagacgagcgccgtgaggaacttggcggcagtgaggagcagcacgaccatgaacgggtggggctcgt

SEQ ID NO: 4085 - DNA, 633 bp, Setaria italica
  misc_feature (621)..(621): n is a, c, g, or t
  Peptide Sequence Number=SeqID_70059
tcagcagcacgacttaaatcatattctctctcagcagcctcaatctccaagttcaccctgtcagtctcttccttaattgatcctatacgagtcatcaaggacttctcgtattcccaatgttccgaaagatttttctgcttctgcttgagagattctagttcagcttcaagcttgctcagtcgttctttggaggctttatccgtgtcattcttcaacgagagcttttccatttcaagccttatgatttctctgtctacctcatccaattcaataggttttgatgttatctccattttgagcttagcagctgcttcatcaactagatcaatggctttgtccggcaaaaaacgtccagtgatgtaacgatctgataaaactgctgcagcaacaagagctccatctgatatcttaacaccatgatgcagttcgtatctctctcgcaaaccacgcaatatggaaatggtatcctcaactgctggctcaccacaataaacctgctggaacctacgttcgagagcagcatccttctcaatgtacttcctgtactcatccaatgttgtagctagactgcagcgtaaacaaagaacggaaagttaactaaaccaaaacggaaacctaaanaaacaaaataaa

SEQ ID NO: 4086 - DNA, 915 bp, Setaria italica
  Peptide Sequence Number=SeqID_70060
tttttttttgacagatttcttgatgatggattgccaaaagggaactgattaatttctcgctaattaacatccttgattcgcgtcgagctcaaacatagcaaagccattagcttttttcttttcttttcttttttgtttgagctcgatcttcttcttcctctctctattgcttgctactaggtgcttaggattcctacggcgacattagaagggcacgggagggcgttccttagaacatggcgcccgtgattaacggcctagtcaactctactcctctcaattggaggcgacgctgcagctgctgcctccattgctgctgctgctgctgctctcctcgtcgtcaccgtcctgctcctggtcgccagcctcggaggtgtcggtgacgcatgacgacgcggacgacggcgacgaaggctcctccgcatcgtcatcttcctggccgcggtgcgccgccggcttggtcctcttgaatatgcggcagaccacccagtcggccgccgcgccatggcagctcacatgggccgtgggggcgttgccggcggcagcgcagccgtggaaggggtggagtccggaggggaggaggcggtactcgtgcatggcccagtcggtgcgcgcggcggcgcggccgcggccgcggtagaagacgagggtccgcttggtgccgaccgggcgcttgcagcgcggcgagacgacgagcttctccttcccggacggcctccagaggccggtcccggccgccctcgccgcgccgccgcccttccgccagcaccgcgtcgccgggaggtggaagaagaagcgctccccgtcggcgtcgccgcctgctgctgctgggggcaggaggtcccacgggtggaggcgcgcgaggtcggcgtcggggatgatgccggcggggagcgggcaggcgagcgccttgcg

SEQ ID NO: 4087 - DNA, 571 bp, Setaria italica
  misc_feature (541)..(541): n is a, c, g, or t
  Peptide Sequence Number=SeqID_70061
caggagaaacataatgttaagataccctgcgaaatagatgctcagtttgctgggatggttgaagcctgggcttcagggttgacctggagggagataatgatggactctgcaatggatgatggagatttagcccgtctactcaggcgcacaatcgatttactagctcagattccgaaattaccagacatcgatccggttctccaaaagaatgcacaaattgcttgcagcgtcatggaccgagtacccattagcgagcttgccggttgaaggcctgaagcatgtaagtactacgaatgtggggtttctttctctggccgctcttttacatttgttataggtagaaaattctttgttgtatcatggcaaattattacccgatattaacgaagatgtcattttccaagcgattgatatcttcacatcagattttgtacaaattttaagtagaattctttttgctcctctcgatatggatcttgtataaagaaatgggcaaaagaccaatgaaaacattgctttatgtaaacaaaaaaaaaaaaanaaaaaaaaactaaaagagaactagaccaaa

SEQ ID NO: 4088 - DNA, 426 bp, Setaria italica
  Peptide Sequence Number=SeqID_70062
ctcccacgcaatccgcagccaatccagacggggggatggatttgtccaggttcgcatccggcgtcgggcccagccgcgcggccccgcggccgggtctgcagatcggcgccgccgggaatggcttccgcacctgctccctgcggcgaccgcggcatcgcggcggcggcggcgggggaaacggaaacctcatgttctcccacgccctccgcggctgcgccaccagcggcggtggcctcttctacttggcttccaagcacgggagccccctcggtttccgcatcagagggcgcccgccgcgctgccagggcaacgactcgttgggctacgtcgacggcccgctggaaggcaccaagggctccggcgaggttaacgacgacgaggccaccagctcagactccgacgatgagaagggcggcggcgggaggg

SEQ ID NO: 4089 - DNA, 1490 bp, Setaria italica
  misc_feature (1484)..(1490): n is a, c, g, or t
  Peptide Sequence Number=SeqID_70063
ctctcgagagccagcgcgagctcccagcagcgcacgagctgagcctgagagagccaccaacaggaataggagcaggatggcgtccaccgcctcatccttcctcgttgtcttcctgctcgtggcggcggccgcgacgacgccggcgcggtcctgcgcgccgagcgacctgcacgcgctgctgagcgtgaaggcggcgctgggcaacccggcgacgctgtcgtcgtggagcccgtcgtcgcccaactgctgcgcgtgggaccacctccggtgcgacgacgccgggcgcgtgaacaacgtcttcatcgacggcgccgacgatgtgcacggccagatcccgtccgcggtgggcgggctgtcggcgctcatgtcgctgtccctgttccgcctgccggggctcacgggcaccatcccgccctgcctcaccgcgctctccaacctgcagttcctcaccatctcccacaccaacgtatcgggccccatccctgaggccctggcgcggctccgcagcctcgactcggtggacctctccaacaacaagctgtgcggcggcatcccggcggcgttcgccgacctgcccaacctccggtcgctggacctccggcacaaccagctgacgggccccatcccggcggggctcgtgcaggggcagttccggtcgctgatcctgtcctacaaccagctgagcgggccgatcccgcgcgacgacgcgcaggacgagatcaacaccgtggacctctcccacaacaagctcaccggcgacccctcccacctcttcgtccccggccggcccatcggcaaggtggacctgtcgtggaactacctcgacttcgacctcagcaagctggtgttcccgccggagctcacgtacctggacctctcccacaaccgcatccggggcaccgtgccggcgtcgctggagcgcctctccacgctgcagaagctggacctcagctacaacaacctgtgcgggccgctccccaggggtcacggcgtgatcaagcacgggtgcaaaccgtacgcgcacaacgagtgccaccacgggaccccgctcgccgggtgccaggacctgtcgtgagcgcgcccgccgccgccggatcgagcggggggctccgtctccctcggcgtccgtgtgctcgctggccggtgctcttcgcgtcccgtacgtggtggtcgtggtaaagcacgacggtgcttggtgtttagctatagacaaagaggtgctgcgtggcggtaataccgatgcgcgcggctgtgaccttgagctgttaaagcgtgtacgtacgaaaacgacagctgtgtacgtgtattgtactgtactggagcgtgttatgtaccgtgtatttggtatggatccgatcggcctaatgtatcaaaggaatgttactaaatggtaattatgattgccttttttttctctaaaaacaaaaaaacactacattgtttgacactgtgtggtcggtaagactagccaacggacgacaccnnnnnnn

SEQ ID NO: 4090 - DNA, 775 bp, Setaria italica
  Peptide Sequence Number=SeqID_70064
gtcttccccgcgcgcgcccggaggctgaggtcccggagcacctgcacgtccggccgcgtcgggtacgcgaagtccacgtgcctgagctccacctcgccgcggggccggtcgggcacgggcgccgcgtccacgtcgtcgggctccacctccgtcttgcggtcgatggtctcgaacaaggagcgcatggcgcgcccgcccttgacgaagtccggcgccagcgtcagtgtctcggcggcgccgttggcggagaccatgagcaccatgaacacgcggatggtgcgcgagaagtcggacacgccgtgcttaaccagccacgccgcgtaccacagccccagcgcgtacgacgcgtagagcaggaactgcgccacgccgtagccgatgccggcgatctgccccttccacacgcaccgccgcagcgggccccgcaggttggactcgaagagccccgtgatcttgcgctccgcgttgaaggccgccaccgtgcgcaggttcgccacggcttcgccggcgatctgcgtggcccgggcgtgcgccgcctccaggtcccccgagaagcccttcatgaacatcttctgcagcacggtggcgcccaccacgagcgggaacacggcgaggagcaccagcgcgaggcgccactgcaggacgaaccccgccgtgcacgccaccagcagcagcgccgagttctgcacgattaccgagatgcggtccccgatggcggaccgcacgttctgggcgtccagcgccagccgggcggcgacgcgcgcgctcgcgttct

SEQ ID NO: 4091 - DNA, 452 bp, Setaria italica
  Peptide Sequence Number=SeqID_70065
cgctcccccacctgcgtccggtacccctccggcagcgccgagatgaacttgtgcgcgttcgcctgggccgccgcctccaccacctccgcctccgtcgcgccctcctcgcgcccgtacgcgatgttgtcgtggatgctcgccgcgaacaggaagggctcctgcggcaccaccgccaccacccgccgcagcgcccgtaggttgtacttgcgcacgtccttgccgtccaggagcaccctcccggagctcggctcgtagaagcgcagcaccagcgccagcacggagctcttgccgcacccgctcggccccaccagcgccagcgtcttccccgcgcgcgcccggaggctgaggtcccggagcacctgcacgtccggccgcgtcgtgtacgcgaagtccacgtgcctacagggaagcagccgacacccagcaccaagccgagccatgtaaccctccac

SEQ ID NO: 4092 - DNA, 424 bp, Setaria italica
  Peptide Sequence Number=SeqID_70066
cccaccgccatctctctctcttcccagccagcccagccttgtactgccgccactcccaatcctagccttagctcccttcttcttcttctccatcctctcgcctcctcccttttctttcccctttttctcacacccttctttccagtttgtgctgtctgctgtgctccagctttaatttctctctcgcacctccaccactcgccgtagcttcatgcgcgctcatggcagcttcccctagcgctctcccccagcacctcaattctgctctagcacaggcctagcgggacgaagcaagccaggaggcgccgggaaggcgcaggcttactactgttctgcccttcacgcacaagcccgatatgcagcagccgggcatgccgccattctcgcctgccgccgggacgccggtgggggcggccgccacgcc

SEQ ID NO: 4093 - DNA, 258 bp, Setaria italica
  Peptide Sequence Number=SeqID_70067
cggggatcaggcaatttttgtttaggggaataatgacagatcatgattggacacagctatacggattccttctgaagtaatgctattggtatactcctttcactgagtaatactattgatttactagttcttatgtgtgaggaataagtagatctgaattcgatttcccactggaattgggagatatctgcagcgcaattaagctattgtaattgtagtatttttggcctggggacaaggctagtttttgttagaggg

SEQ ID NO: 4094 - DNA, 371 bp, Setaria italica
  Peptide Sequence Number=SeqID_70068
cgaagctgagatggaaggccatgtagcaatggaggagtggaaggatcctaatccaccagaatccttgatgcggggcttccagaccggaacatttccaccagacgcagaggttgccaaggccggatttgagaaggaaggccggtcgctgccaatgaccccacagtttggccagaagtccagtccgggcagcagcctcgccgagagaatgcaggcaagagctggattcagggtgccaaagctcagcatgccgttcagcactgcagttggagttgataattcagtgccaggagctccatcgccctacctcacgatccctcctggtttgagcccggcaacactgctggactcaccagtcttcattccaatggcat

SEQ ID NO: 4095 - DNA, 248 bp, Setaria italica
  Peptide Sequence Number=SeqID_70069
ggacgcgcgtctgctaatccaggcgatgtggtactaaacagcagaccgacctcctacttgtgatctggcgcctggcggactcgaccaagttgtagagttgccgaattgggccttccctgcctatttcactcacgccctaatgatcatgggcctagtagttcggtcaagattcacatgggctctaaccatttggtgaacaaaaaggctcctctctccatcctgatgttcattcgattgcgctatattct

SEQ ID NO: 4096 - DNA, 336 bp, Setaria italica
  Peptide Sequence Number=SeqID_70070
cctattggtctcaacattatgtagccggtctatacatactcgtgaaggaataattgttaaagcattagactgtgctgctgccgcagctaatcgtgatgctctagcaaagactgtatatgcaagattatttgactggcttgtggagaatattaataagtcaattggtcaagatgttgattccaaggtacaaattggtgtcttggatatctatggctttgaaagcttcaaaaacaacagctttgagcagttctgcattaactttgcaaatgaaaaacttcagcaacactttaatgagcatgtattcaagatggaacaggaggagtacaaaagtgaagg

SEQ ID NO: 4097 - DNA, 383 bp, Setaria italica
  Peptide Sequence Number=SeqID_70071
gtatattgatccaagactacaacgtagtgtagaatttgctagagcttctgatgaccaacacatgtaccaaggccgtctccatgctcacatgcagcaaaccaacatgtctgctcttcagccattgctatctgtcaatgcgctccccaacattggagggagaatgtagaatgttcttatcaactctttatagataggaattgactagcttgggtgtatgattcaatgaacatatccttgagtgtgaacgatagcagagtagatggtaatgcttctgagcacgtagataagatgatgaaactttggagatgcactatatattttcttaggtggactaggaaatttcagttttgtattaaatcttcagtaaggaagtgcatgcaatt

SEQ ID NO: 4098 - DNA, 1105 bp, Setaria italica
  Peptide Sequence Number=SeqID_70072
aatcttaagccctagcgccgcccgcccgagctcgaaacctagcttgagcccgccgccgtcgatctcccgcctccctgtcgacgagaagccgcgccggactagggtgaggaggctcacaatgagaatctctgagcagctgggcagtggtgcctattacatgcaagtagatcagggagaggacaatgaagatgataagacagatcgccagccaactcaatgtctgaatctcgaaataagcggctcctttctgacttgcattaggctcatgctggctcgggacaggaatgctttttttcaaagcgaatataatgataggatcaaatatgaggagctcacagctgcacagaatcagcttacaagtactaagaattgcaagagagtttcgacagagctgcctctgctgacacttacaatcggcaacaagaagttcattcgtaagggtgattgcaacatactcgcttctttctgctacgtaacacagctagtcgtgtgcaagttgtgctatgaaaagctgattagaagggttgatatccccttttccgacatcacatctctccttgtctgttttgacgatataagatttgataccttgagaatagaggcaagatcttcactccaatatttctccactgataagcctcttcctggaaagtttactcgctggaaagtggacaactcaaaagaagatgactgttttcctgaatcaaaatttgtcttcgttgagatagagaaggggatgcttgaaaagggccttgcaaaactattgtatattgatccaagactacaacgtagtgtagaatttgctagagcttctgatgaccaacacatgtaccaaggccgtctccatgctcacatgcagcaaaccaacatgtctgctcttcagccattgctatctgtcaatgcgctccccaacattggagggagaatgtagaatgttcttatcaactctttatagataggtagtcagaacattgattataacatcattattttttgcttttgaacaccacttgactcttgatatcatgcataatttgcaggaattgactagcttgggtgtatgattcaatgaacatatccttgagtgtgaacgatagcagagtag

SEQ ID NO: 4099 - DNA, 618 bp, Setaria italica
  misc_feature (110)..(110): n is a, c, g, or t
  Peptide Sequence Number=SeqID_70073
atgacagaacaaggctacaacaccttatacaacacaaaaaagaaaacacacatgctcttattaggcgcatcagaaacaacaggttctgatcgctgcttttcttcacttcncaaccgaatcgggcctcgaccgcatcacccttcacagcaccgcagacagggcatgctgttgtctctgctgcagttctcgccacgcttgatgcttcatctccagagcaaggagcatctacgtcattggatgaaacatgtgagtttgtttcctgctgcaccggaggaagcctacggataagtgagtcattcgtttcaagtgccatcacagcaagctgctgtgcattttctagattctcttgcttcctctgcaactctatgcgcaagccggctatctcttcatccttctgaaccagtgcatcagttaacagaaggttcagtagagttgcattttgtatagagatttcctgctgctgcgacaaacgaacctgctcgttgtagagttggaggacctgatccaactgcagcctgtactgctcaagggagaagtgaaacggcgcaggatttgtgccatccaaaggaaggccatttgcttgttgcccctgaggttgatcggcatgttcagaatggc

SEQ ID NO: 4100 - DNA, 1382 bp, Setaria italica
  Peptide Sequence Number=SeqID_70074
ttgagaaatgagaacacagaaacatggcattgatacgatggagtacaggagaacagcatacaagaaacgatgacagaacaaggctacaacaccttattacacacaaaaaagaaaacacacatgctcttattaggcgcatcagaaacaacaggttctgatcgctgctttttcttcacttctcaaccgaatcgggcctcgaccgcatcacccttcacagcaccgcagacagggcatgctgttgtctctgctgcagttctcgccacgcttgatgcttcatctccagagcaaggagcatctacgtcattggatgaaacatgtgagtttgtttcctgctgcaccggaggaagcctacggataagtgagtcattcgtttcaagtgccatcacagcaagctgctgtgcagcttctatatctccttgcttcctctgcaactctacatgcaagctgactacctcttctttcaagctggctacctcttcaaccttctgaatcagcgcatcagttgtccgaaggttcagtagagttaagttctgtatagacatttcctgctgcagagacacccgaacctgctcgttgtagagttggaggacctgatccaactgcagcctgtgctgctcaagggagaagccaaacggcaccggatttatgccatccaaaggaaggccatttgcttgttgccctgaggttgatcggcatgttcagaatggctattgaggttgtccattgcagataccagagaccagactgaaaggtgtgttcgatacagtgcgaaggaggaaccttatataggagcggagtcgaggtgcacaattaatgccagtgaatccagaaagatgtatctcaaatatacttatttaattcgcagaagcgtttcagaacgtcatctgtccgggtactcttgactcttacctgtctaatatacatctccactggagttttgttcaacacaaagttggtcaaacttaccgttgataatttaatgacgtatgctccataaatcttgtcgcattgtatttagtaatatatgcatggctttaatctaataaatttgctacttatttggtagaggatttgtagcccaaaggctggcacttgcttaagccacggcgcatgcatgtttgttcattgtctatataaataaacataggatatatgctttgtttggtgtctattaaacttaactaaagactgaagtttgaaaatggttgagattgttagcattcattggcaagcatctagtgaaggaatcttttccgagccacctcatgcttaccaaagtgcaagctatatccagcaattgaagccaaataaaagggcaaaaaactttctataagtaaccgaagatggaacctaggtcttggcaaatggagaaacataagctc

SEQ ID NO: 4101 - DNA, 454 bp, Setaria italica
  Peptide Sequence Number=SeqID_70075
aaggtaaataaactaaataataacaagtaacaatgttcgattgactgtgaagaaaacgaaaagaggattactgcttttgtccagaggcacccggaatttgccatacactctgtttgtggatatgttcctacagaatttgtcacagatgaaggtttctattcctcaaatccaactaagcactctatggatggggcatttgctgctcgtcttgtccggtcaatggactaagattctaggagtgccacaaggccacaactagtctgcattaagaagtatggtgcttttacttcaagaaaagaaacatggtcaaattcaggtgatattgcttcttgtacagcatccagattagcttcatcatgaacaagaattgtgaagctgccctgacgaagtccattttgatgatgagtaccataataatgtatgttgcaagctacggtacctgtaactacacttg

SEQ ID NO: 4102 - DNA, 494 bp, Setaria italica
  Peptide Sequence Number=SeqID_70076
ctgatgaggatggtgaatgggtcacatgaggccttataagaattgtacatgagggagttttcattgacacgaatggaagatagatttgtaaatcaagcaattctttatatgcaggtcacaattgttaaggagtctggcaagctggttgtagaggaataccgtttaccagaagtcaaagcgagtacaccactgtattttgattttcctgatctgcaacaagatgtccgttgtgttatgtttagattacttggagatgtcactgcctttgttgatgacatttctgagcttgacggcttaaacttgcgaaatcttcctctggcatctggactgtctttgtcaaataagatcaagttgtactactacgcagatacatatgagatgggaaagatcggcagtctctcagcagtataaaatatctgagaagaaagtttcagttgataaaggatttttatgataaagctaaaatgcataacataaattgggttatcagttat

SEQ ID NO: 4103 - DNA, 560 bp, Setaria italica
  Peptide Sequence Number=SeqID_70077
ctcagatattttatactgctgagagaaagtttcagttgataaaggatatatgataaagctaaaatgcataacataaattgggttatcagttatcacctctcttctcgcttaagctacctacctccacatgtggattgaatgttgaatgattggtacttaacatccttgaggtcgtacatgccaacatgggatattaacaggtggtagaaggttcttgtcaactattgtttctgtactctgccttgatgcgcggctgttgcgacaaatacatgatgcctttttggaccattctttttctttggttttcacgatcagatgatgatccaatttgagggatcatgggattttgctagtagaatttctggaagttcaattttaggtagaatatctggaaattcagtacgattgcagtttcagaaactgccaggtacatttgtcaatatctgcactgtattctttttcgctcatacgtattttaagcactgaactttaccgattgttcatttgtatgctacacggcaatgctgaggttaccattctcttaacttgaacatttgata

SEQ ID NO: 4104 - DNA, 2487 bp, Setaria italica
  Peptide Sequence Number=SeqID_70078
cgtctccatcttggtctttctgccgtgaaagggaccgggcattgttatcaattggtgttattcctgccacagtagatccaaaccgttcagttgattattcttacctgttgaagctgtccagcttagctgataatctagcactgctgggccatgcagtccttgaggatcgtgttaatgcttcaatagggcttgaaaagggcagtggacacgctatagatttttggaacatcagtgaaaatgatgattcctgctatgatggggcatgtgaagtccgtgctccatcttcattacaggcttcagccactagagaaaatcaatcagtatttgtggaatgttcccagtgtgaaaggacagtttgcaaagcttgctgtgctggtagaggggccttccttttgctcaacacctatagggatctgaagatatatggtgggagtcaaggtggtggctattcagcactcgcagatagttttgtgtgcaaatcatgctgcagtgaaatcatcaaacgtgcattgtatgtggattatgttcgggttcttcagagtttacggagaaaatatcgtgcagagaaatcagcaatggatgctgtgaatcaggtctgccagctggagtccagcaaagtatctgatttatcgcaaagtattcaaactggtcagagacaattgaagcagatccttgatggtgaagagtcccttgcagaatttccatatgcaagctttttacaaacggttgaaactgctgatgactctgaaccactgctttcgttactggcacctcttggtgccggagattacaattcttactggaaagctcctggggctaacacttcagtggagttctcgattgttcttggtggtttatcagatgttgcaggagttgccataattgtcagttcttgcggttacacatctgactgccctattgtagagatatgggccagtaatagaatacagcgagaagatcgtacattcataggaaagtgggatgtacaagatataatatcttcatctccgcagctttgtggacctgaaaaatctagtagaataagtggagaaccaagacacattaaatttcacttcccaaatcctatccgctgtcgtatcatttcaataaaaatgacacttccccatattggttctcattcaaccaagtttagtgaggagtttgatcttctgtcattgggtgatagctcattttatgaatcaaagccaaccagtccacagaattcatttatccatgcaaaaagaattattgttttcggtagttctttgaggaaggagatgggttctgacacatctgggggaataatgagaatgaaaagttatttagacagatcaccgcccttggggagatttaggattccagttgaagctgagaggctaagagataatgatcttgttcttgagcattatctcttacctaattcacctggaatagctggattccggcttgactttttcagtattataaggcctcatgtgacccattcaccatcctcatcagaattgtacatgagggagttttcattgacacgaatggaagatagatttgtaaatcaagcaattctttatatgcaggtcacaattgttaaggagtctggcaagctggttgtagaggaataccgtttaccagaagtcaaagcgagtacaccactgtattttgattttcctgatctgcaacaagatgtccgttgtgttatgtttagattacttggagatgtcactgcctttgttgatgacatttctgagcttgacggcttaaacttgcgaaatcttcctctggcatctggactgtctttgtcaaataagatcaagttgtactactacgcagatacatatgagatgggaaagatcggcagtctctcagcagtataaaatatctgaggtcgtacatgccaacatgggatattaacaggtggtagaaggttcttgtcaactattgtttctgtactctgccttgatgcgcggctgttgcgacaaatacatgatgcctttttggaccattctttttctttggttttcacgatcagatgatgatccaatttgagggatcatgggattttgctagtagaatttctggaagttcaattttaggtagaatatctggaaattcagtacgattgcagtttcagaaactgccaggtacatttgtcaatatctgcactgtattctttttcgctcatacgtattttaagcactgaactttaaaaaaagtgagggattccaggtaagtcttgtagtaggtcttaagtagttatttaatttgttatttcttttgttttctaaactctgtgctatgctatcataacttgtactcctgtatattgtgctgccctttgttataagtacattctgctgtatttataacactgttgtgttttcccatggaccatgggaatacagttataaattggccttatgcgtatcattctttttttcttctaaagatgcctacctcctattttattttcttgtatgaagtttgacagat

SEQ ID NO: 4105 - DNA, 3012 bp, Setaria italica
  Peptide Sequence Number=SeqID_70079
aatccatcacggaagcatcgaccaaggaggtgatcctgggcacggagagcgggcagatcttcgagatggctgtggatgaggctgacaagagggagaagtacgtgaagccactctttgagctcactgagcaaagagagggcatcaaggatctgcagatggaaaccgccgtggttggaaattccacaaggtactatgtgatggctgtcactccaacgcggctttactcgttcactggcattggttcactagaaactgtttttgctagttattccaatcgtgccatacactttatggagctcccaggagaaatacctaacagtgaactacatttctttatcaagcaaagaagggctaaacactttggatggctttctggatctggaatttatcatggtgaactgaattttggagcgcaacacagctctactagtggagatgagaactttgtggaaaattaagggtttttttgactactcaaaattgggagattctggaactaaaccaaggtcatttgcattgtctgaattccattttctgcttctgattggggacaagattaaggtagtgaacagaataagccagcagatggtggaggaacttgtagttgataatacacctgaaacttcaagaggaatcgttggcctctgtagtgatgcatctacaggacttttctatgcatatgatgaaagttctatattccagatttccacttctgacgagggtcgtgacatgtggcaagtttacttggatatgaatcattatgctgctgctttatcccattgtcgcaaccctttccagcgggaccaagtctatctagtgcaggctgatgctgcatttgctgcaaaagagtattacatagcagcttccttctatgcaaagatgaattacatcctgtcgtttgaggagatcagcctaaaatttatatcaataggtgagcaggatgctctcagaactttcttattgagaaggcttgacaacctcaccaaagatgacaggatgcagattacaatgatctcaacttgggttactgagctgtacttagacaagattaatcgcctcctgttggaagatagcactggcaccactacaaattcagtagcagagtcaaatagctcggaatatcgttcaatagtaaatgagttccgtgcttttcttagtgacagcaaagatgtattagatgaagcaacaacaatgagactattggaaagttatggaagagtggatgagctagtgtactttgctggtttgaaggagcaatatgaaatcgtggttcatcattacattcagcaaggagaagcaagaaaagcattggaagtgcttcaacggcgcaatgttcctgtagatcttgtgtataaatttgccccagatttaatcatgttagatgcttatgagactgttgaatcatggatgatggcgagaaacaagttgaatccagggaaactcataccagcaatgatgcgttatgtgagcgaaccacatgcgaagaacgaaacacacgaggttattaaatacttggaattttgtgtgaaagatttgaacaacgaggaccctggggtgcataatctgttgctatcactgtatgccaagaaggaggatgaatcccagcttttgcaatttcttgacaccaaatttggtaaaggacaaacaaatggccctgaattcttttacgatcccaagtatgctctccgcctatgtcttcaagagaagagaatgcgtgcttgtgttcgtatttacagcatgatgtccatgcatgaggaagctgtggcacttgctttaaaggtggacttagaacttgcaaaggcagaagctgacaaagtagaagatgatgaagagcttaggaagaagctgtggcttaaggttgctaagcatgtcatcgagcaagagaaaggtgtcaagagagaaaacataaagaaagcaatagaattcctttcagagaccaataacttgttaaagatcgaggatatcttaccatttttcccagacttcgtattgattgacgacttcaaagaggaaatatgcaaatctctcaaggactacaacagccagattgagctgctgaaacaggagatggatgatgccacacgtggggcagacaatatcagaagtgatattggtgcccttgctcagagatatactgtaattgatcgtgagcaggactgtggggtttgccggcgcaaaatattgactgttggagggttacatcaggtaggaagaagctacacatctgttgggcacatggccccattttatgtgtttccctgtggacatgctttccatgcgaattgcttgattggacatgtcactcgttgcagtagccaggcgcaagctgagagaatattagaccttcagaaacggcttagcttgatggatagaaaagcagcaaaagacaatggggcaaatgtaaatggtgaatctattatgagcaccaccccagttgataagctgaggtcgcagttggatgatgctgtagcaagcgagtgccccttctgtggtgacctgatgatcaaggagatttcacagccattcattccccctgaagagtcggatgaaaaggcatcatgggaaattaaaccacaaccaacacctcagaagattctccccatgaccatgtctatatgaggctatggagtatacagcctgagatgatgggtgttgaatttctaccatgctcgatctctttttgtgacatggtcgtgcataactttttgctgttggtggatttggttttgataattgtctacccagtttgtgtattcgtttgaccggtgtagggtgttcaggtagtttttgtatagaaacatcagttgcctcccatgtgattcttgtaaatgtagctattgtggtgccgcagtggaagtatccacgacacagttttgaactgtaagttaatgaactgaaattgtacaataatgaagcatgcttgttacatatgtgaagaaaattttgcattcttgcaacggacaatgtaaacctgcatgaaacaattgtaaagttcaactaaaaaaaaaaaaa

SEQ ID NO: 4106 - DNA, 383 bp, Setaria italica
  Peptide Sequence Number=SeqID_70080
ctcacggcgccaccgaggctcaggtagtggttcatgacctgcccaaaggtgcccttccggaggacacggagctcgagggctccaatggtcttgatcttcctcgagccgacgtaccccgcgtccacaaaggccaggtccatgctgttcgcgcagctgctcaggacctcctcgctggcgttaccagagctcagctcccagaagatgacgtagtgccccgggtcgctggatctgtccacgaggctcgtgaagtccaccacctcgagcttctcttcggccaagagcttctctgcctcttcgacggctagctgcaggtctttctccgtgttcttgtcgatgttgatgctcaggactaggcttctgcgacatatgaacttgagctctgg

SEQ ID NO: 4107 - DNA, 1905 bp, Setaria italica
  Peptide Sequence Number=SeqID_70081
gtaagtaactatttatccttggatcataacataattgcactagtcccttgtgccaatgatatgttcccaaaaccaacacaatgaaaccaacaattttgcgccatcaaaagggcacatttcaatacatatgctgtgtatgcgtagcaccacaaatctggcaacatcgtagaaccaggcacgccagaaatacattcggcacatcaaactagcagagcagcatagcaattattccccagcacttaatcacgggtagcatggctgaagaacacaagcagaaatagtttcatgaattcacatctcttcacctatcaagagaggacgaccctgagtagtaaatcaacaaccagaaacttatgagaggagccttttgtgtgctaattgagattagcgctcctcgtgtgccaccgtttgacagagcaacaattggacatctccacgcaggaacagttgaacatcaagatacagcacggcgcttcattgaggccatgataccttcttgagctgtgtcatcatggcacatgtaatatgtgtgccaagggatcagtagccgtttatcttccgctgggaagggctggagtgtaatgctctgttgtcagtgagcctggaaaacccagactgatccctaccacctgggctcggaggaacccttggactaggaacacttgtcaatcggctctgtggcaaggtatcagacatggatgttgagaaggcttgggcgagctccaatgcagttgctgccttcccgaaacggggtgttgtaacttcaggcttcggtggctccactggcttacgccaggtttcaggctctgggcgtggttgctccggcggcttctccacatctctggcgaccctcctgttgtcctctcgacgagtaggtctatatgcatcagccctgtctgtatcccgcttgtattctttcctatcgccattcattgggtctctatgaccagctggaaaaccctcacccctttgaacagaagaagggttaatggacatagcttcaaccttctgctcaacttttgcagattcacctttagacctgccaacaggtgaagtcttttcaagatcactggccaatacatctactccacgttctttgagaacttgttcccgggggcgagcaccaccaaagagggattgcctttcctttacagtttcaacagactgtcctgtcagattcgaacgaggtttcagattcagccgtggtcgttctgctaccctgctctcagtctcagcatctgctcctaacactcctgttttagctgccatcacattctgattcacatcatgaacagcctcaaccttcatgacattcacagtaacctggacctggtgcacctgcttatcttcaacataggtaggagatggttcaggagcctcgactggcttggatcgaggaagcagcttcaactttggtctctccggcacctccgcgactctcccatccccaacccttccttcatgcgacgcgggtctcactggtgctgcgcccctctcgaccccaccatccacctctctcacgccaacagaccttggcctctccatctgcggcggggccacgggcgtctccaccactggagccgacactggcgccggcggagacgagggcttcgacgggtgccatctcccggagatcaccttctccaccgcgctcgcctgggcgatgcgtgtcgctgaccagatctggccgccggtggaggcgggggcgggaccaaccggggacgcgaccggagcggcctccctcctcgggccccaggcgttcccgggcccggatctggcagggaccacaacgggggcgggggcgaacgacgtgggcgacggcgccgggcggcgcggcgcggcgggctcgaagggtgtgcgctcgtcctcgtcgaagtggcgcccgatgcgggacggggtggtgag

SEQ ID NO: 4108 - DNA, 1045 bp, Setaria italica
  misc_feature (998)..(1045): n is a, c, g, or t
  Peptide Sequence Number=SeqID_70082
aactaaaagaaaagacaaaaatagcatgacaagaaagagcagctttgtaatatcagtcaagcattggctgtgcttgcatctgcttcatctgttaccaaggagcgccaggagtttttaagccttgtgaacaaggagatagaactatataacaacatgcttgcaaaggagggtacagatggtgaagaagaagccaggagagcatacagggctgctagggaggaatcagaccatgctgcagaagcagcagtaggggaaaaggtctcttcagcattggtagatagggttgatgctatgcttcaaaagttagaaaaggagattgatgatgttgatgctcgaattggcaatcgctggcagctgctggatagggaccgcgatggcaaagtgactcctgaagaggtaacagcagcagcaaattatctcaaagacaccatagggacggagggtgtccaagagcttatcagcaatctttccaaagacaacgaggggaatatccttgtggaagacattgtgaagctggcatcacaaacagaggaaaacaatgatcatgaagaagcgccacgatgatgtgaacagcagtcacattcttggctgttagaactcagcggtccactcatttcgagggaacttaacccagtgagctcatctgctcgtggttccattcgtagatcaaaaggcaggacggtcattctttttgttccgactggctgctgcggagaaagttttgtccagtagcatagcttgctgttactgtctggcattacatccatacagttttttttatattaacatacattcacagttagcaccggtgctcccgatcaccaggtgaagtttaaaaccgagataaaatggcaactgaaatttagaacagttgccctggaaatgggaataagctagtggagcggtccgatctttttctctgtaatatgaataaaagtatatgcactgaataagcttaactttattgctttttgaatgagaatggattagttttgacnnnnnnnnnnnnnnnnnnnnnnnnnnnnnnnnnnnnnnnnnnnnnnnn

SEQ ID NO: 4109 - DNA, 1307 bp, Setaria italica
  Peptide Sequence Number=SeqID_70083
ttttttaaaccaaagccacaaattgctgctagtcgtaactttatttgctacgattgatcctcatttgcgtaattacacagctttaacaagggtacacctcaagccgattgatcgcggccgtcatagtgccggcgttattactcactgctcactcaccgtccgctcgctagaccttaacatttacaacgcgaactgatggctaaaaagtattactaccgagtactaaccaaaccaaaggatggttcaccgggcagcgatttcgccgctaccgtcaacggacacactctcgccggagtagtcggcgaagtgctcgtccgccttggacagcgtgtaagccacgtccaccatgctgggccgcttggacgggtccttgtgcaggcacgccctggccacgctgaccacgctcgcgacgctccccggcgggcacgtctgctccttgagcgccgggtccatccacgccgccacgcgggcctccagcctctcgtcccgtccccggaacaccctgtcctccgcgtccgcccacagcggctcgccgccctcgtcggcggcctcgcgcccggacacgagctcgagcaggacgaccccgtaggcgaacacgtccatcttggtggtgacgaggccgtcggcgaggtactcaggcgcgatgtacccctgggtgccgacgatgtgggtggtgacggcgttgtggcccgtcttggcgagaccgaagttggcgatcttggcgcgcatgcgggcgtccagtaggacgttgctgctcttgatgtccttgtgcaccacgcgaggccaggtgtgctcgtggatgtactgcaggccttgggcgaggtccaacgcgatgtggaggcgcgcgcgccagtccaggcgccgcgcgcggtcgcggtcaaggagccacaggtccagcgagccgttctccacgtactcgtacaccaggtagcagtcgcccgtcgacgagttgatgcagaagccctccagcttcaccaggttgctgtggttcaccttctgcaggatcttgagctcctcgcaggcgtcccacttcatcttcttcaccgcgaacacctcgccgtcgatgttggccttgtacacgctgccgttgatgaggtgcgcgtcgtcgaatccccccgtgccgcgctccagctcctcgatcttgaacaccctgtacttgtccagccactccgatatgtcgctgaccaggaacctctccccgccaccgccggacgagctcttggcgaacctgccgccctcgacgccgtcgccgttcaccaccgcgtcccctcgtcgtcccttcgccttgagccgtctgcacaggcagg

SEQ ID NO: 4110 - DNA, 249 bp, Setaria italica
  Peptide Sequence Number=SeqID_70084
ggggtggctggacatgtggccgccgagggcctggtgggaggggaaggacttgccgcagacggagcacctgtgctcctgcgcgggaacgcggggagcgcgggcgtcgcgctgcccgcgcgccagcatgaggaggcagagcgcgaggtgctcctcctcggtgggcgcgcggcggaggtggcgccgcctggagcgcttccccttcgcgcacctctcctgcgcgtagacgacagcacgctcctcctcgtcgtt

SEQ ID NO: 4111 - DNA, 1054 bp, Setaria italica
  misc_feature (1)..(65): n is a, c, g, or t
  Peptide Sequence Number=SeqID_70085
nnnnnnnnnnnnnnnnnnnnnnnnnnnnnnnnnnnnnnnnnnnnnnnnnnnnnnnnnnnnnnnnnggtttgtctccccaaacatcgtagcctttctgccaataaatatcacttcagcatcaaagcaatttgtttcaacaaacaaaaaaaaagctcactgaatcctggtacagcacagatgcaagcaaacacgagtgtttctatgaagcgacagctttaggcatacatcccaagtccagggaacacgttggaagcaaatggcagctgcagcacaagtaacagctttagtccttcctcagctcaatgtactcacgcttggtcccagctttgttaatgactacgatttccaacttgtctccagtgtagatgtctctctcagttgcagatgcaaatacatccttgactagatcgatggcctctgattccgacaaaggcgtgacagcatctctggcagggagtaataaagggctaggtgatttaagttgattgtccaagactggcatgatcaaagaagatcctgttccctgagcactgtaaccagtcctctcataggaaccaacagcatcataggtgaacacgcatcctttcccctcactgtcaagcccaccaagcacattgaaggcataatacgggaagaaccgcttgtagtacagggtattggagagcagctgtgccatggcaggacagctcatccttttattgtgctggtgttggtatagcaattctctggcagctaggttcttgtgcagagccttaatatcaccttgaaagccagaagatgctagtacacatttgtcagccaggtcgcagatcttggagtggtcgcgcgtgaggatgctgtatccgacggagaggcgggtgtcggctgcgacgacgcagtaatcagcgccggcgatggccacgcaggtcccgccgttgttctcgtagacccaatcgccgcgcctcgacatcgcggtggccggagtggactggctgctcggacgacgggtggtggtggagtcgccggagttggaacaccggaaccacctaaagagtagttctagtttggttacgtt

SEQ ID NO: 4112 - DNA, 301 bp, Setaria italica
  Peptide Sequence Number=SeqID_70086
ttgttttttttttttttttttaaaaatagaagctattccatcgattctctctttaaaaaaacagagtacaaagtacagtacacatggaggaatcaccagttcgtcatcctcatcaccgtacacactattccaatttccaaagtagcagagcaggctacgagtacagtacaagtttttcttttattgcaactattttctatcgtcgatgcgtgcgctcgaaatagtggcgcacgatcatcactcgccggagaacctaggagcgcagcaggcgagccgcggcggcgccaggatccgcgcccgg

SEQ ID NO: 4113 - DNA, 897 bp, Setaria italica
  Peptide Sequence Number=SeqID_70087
tttttttggtaatgtgatcatttcgcatgaacaaaacaattacaatgtcttcatgtgctaattcagttgttgtaccagtcaagaaaaagaacagagaaagtgagaacaaagaagaagaggaggagaaaggttctactgctgctgttgcgctggattgcctgggatagctccttgttcccgcgctccacattattcgtagcttcaacagcctggtcatataaatactgaatttgttgagcttgttgtagaacatgcgttgacataagatgattaagtgctgacatttccatcatctttgtctcagtttcttggacagcatcaagaaggcttgtcaactccacctggagagctcttgtttcatcatccaatagttgttcttgaaccctcatgggtgcagtagatacttcctgatccccaatctttgatacatcagattttagaacaagattagacttggatggttcagcaggtttgatttctggtttcttctgaattttcttcctaggcattgctctattaatagcgtcttgaaaacgcatggaccgaagacgatcaaactgtgcagttaccgagtggagacgctcactcaaaattagaaccacaccatgctgatgagctatcaagtccaaacgggaactctcatccctagtgccaagccatgtctttgcacctccatttttctcttcttcatggatcctgttctttaggatatcaatctgttccttgcatgcttttacaaaaacaccaacttcatgttcgatgttgtccctctcttgctccgtggtgcgatgcaggtccacatagtctcttctgtgcttcactatgaacctctccagttccctgatactctcaagcgtcttgatcgcggcattagtgaatggcgacgtgggggacggc

SEQ ID NO: 4114 - DNA, 900 bp, Setaria italica
  Peptide Sequence Number=SeqID_70088
gtgtgtgttgttatagctttacagcatttcttagttatgcttgaacaaagttgtataggtgattaagatgtcaaaagaagcaaaatgaggaggctgtattatctgaagtatctcatgttgatacaagattcatggtcttcaaagttctctgattgtttccttgaattattattctatcaaagcataccagtttatactttccagtttggcatactattgtatcgttttcgtaacctttttgcacgagttctttacgaatcaacatattggcatgatcgcctaatgcctcttttcgtctcaaaacaaaattgaggtgactcttgactgtgaaggtcttgttgtcaaatatatgatttttaaggtttggttgtgtcctcattccagtttcatcctttctctggtgaagagtgaaacagattgttatgcattgcttctttgctttcccagaatggctttgtttggtcactgtcatcattttgtattagatggctgatattgcaaacaaattagtttggagctatataaaatgtcttactaattacacttaaaatgacctatatttgggaatttatctctggttttgcagcagactgactaaggaacattttttgtctggtttgttgatctttgcctgcattgcagtactaaagtatttctgtatatggtgaatcattgcatattgcacctgatgggtgagtgacctttgctattgatccaaggggaagctagcaatctcatcagatcagaatgcctggagactattgtattttctatttttttcaagtacttgggctgatgttctaattggtgtaacataaggtccgagttgatatgacatttgtaaagggatcattcatccacgccaatttgcatcgtatagttttccgccgttgtttatct

SEQ ID NO: 4115 - DNA, 278 bp, Setaria italica
  Peptide Sequence Number=SeqID_70089
ggggcgggcggggtcgaaggagaggagggagacgcggttgtggaggtcctcgaggaagctgccggaggcgaggacgggcgcggtgggggagaaggcgagcgcgtagatcgagtgcgggagctcgcaggtgaaggcgtgcgggttcggcgcctccgaccccgccgacgaggcggccgtggacggcggcttggggaggtccatggaggagtcgggtggagtggattgatccggtagcggagtcggaaggggagcgatggtgctgggaattgagagggaga

SEQ ID NO: 4116 - DNA, 841 bp, Setaria italica
  Peptide Sequence Number=SeqID_70090
tcattttttccatatcccttatttcggtagtctaatttgaggatgattcagatggtgaaattttcattcagatgttgggacttagaaccttatctgaactgtagttttgctatttcattatatcatagatttgtgcaatcagacttagcagtctgttaaaactagggttggattgttttctgtttcccagtacttgtgtgtttcatagatttcttggttcgttcatatcatgtggcacccttaaaaaaatttccaaggcagcacagtggctgcttaaaagtcagaattttccagccccttgaatccctgattcttcttttgttgctggcagacagcgacgtctacaaattgttaatattttgatgccaagagattcccatgaagtataaaagatatctatacatttgcagtttccatgcagcctaaccatgtaatttgtgtactgatcaaatggaatgcttgaggcatagcttgtaagcttcaccttttgttgcgtagttacacattttgacaaacattgaaacgagaaagttgaggcaaacgcattgttgccttgcaacatggtagagggaaagaattggaatttagttcgtcatgctttttatttgcctgttgtgctatatatggtgacatgttgtattgatttagcaacttttcgaattccacatgttagcagagttcaaataaatgcatgcacatcatattagcacaaacttatataagtatattttataattgcaattttgcagaccaaaattgttcctgcaaagtacatcatgaaaacagatgatgatgcttttgttaggatcgatgaagtgatgaatactacaaagacctagaa

SEQ ID NO: 4117 - DNA, 782 bp, Setaria italica
  Peptide Sequence Number=SeqID_70091
ggcgaatcggccgccgtgacggtggtcggggtgcctagggagggggcggcccggttcatggtggagatggtgggtgcgggcggcgaggtggttctgcccgtcaatgtgagcctgggagccgcggggatgctggtggagcagaattcatggacaccccaggaggggtggggggagtgggagcggtgcccacaggttggtgatgtcggcagcagcaatagcagcttacagcgaagtctagttgatgggcttgttcgttgcaatgagaaaatgggttccagcatcatccaggagaataacagtaccatgataaatgttactgcgaaccaacctggagatgggcagagaccaaaagagcgcagtcagttaagtggcagcttctcaattgttgaaggagagccttttacaataacagtgtgggctggtgtagaggggttccatatcacagtaaatggccagcatgaaacatcatttgcctatagagagtggtcagagccgtggttgatagcagaagtcaaggtttctggtgatttggagctcttgtcattcttggctaatggattgccagtttcagaagaaatagacatggctagtgtcgcacttctgaaggccccacctctgccaaagaagcgagcttttctactggtgggtgttttctctactggaaacaacttcaagcggcggatggctctgaggcgaacatggatgcaatatgaggctgttcgctcaggcgatgtagtagtgcgatttttcgctggtcttcataagagtgagcaagtcaatat

SEQ ID NO: 4118 - DNA, 612 bp, Setaria italica
  Peptide Sequence Number=SeqID_70092
aacatatattataggctccattttgcatccgtcaatgtattgttttcaactctaatccagctcctaagtatgcaagacatcttcttgcaatacaaatgctcttgacagcatgaatcgtgtccatttgtattccttaatattggaccttctctccttccatacaactgagcttgttatctaagctactttccatattcagttattctcaatgttaatcaactctagttccattcttacatcatctttctttatgcccaaaatgcagcataagagtgagcaagtcaatatggaattatggagagaagctcaattgtatggtgatatccaattgatgccctttgttgactactatagtttgatcacttttaagaccatatcaatttgtatttttgggaccaaaattgttcctgcaaagtacatcatgaaaacagatgatgatgcttttgttaggatcgatgaagtgatctcaagcctgaagaagagcaactcccatggccttctgtatggtcttatttctttccaatcttcaccacacagagataaagatagcaaatggttcatcagtaggaggaatggccttacgacatgtatccaccatgggctcatggtccc

SEQ ID NO: 4119 - DNA, 1186 bp, Setaria italica
  Peptide Sequence Number=SeqID_70093
gctatatatggtgacatgttgtatttgatttagcaactttttcgaattccacatgttagcagagttcaaataaatgcatgcacatcatattagcacaaacttatataagtatattttgcagaggtgtctccttcagaagtgagcttttctactggtgggtgttttctctactggaaacaacttcaagcggcggatggctctgaggcgaacatggatgcaatatgaggctgttcgctcaggcgatgtagtagtgcgatttttcgctggtcttcataagagtgagcaagtcaatatggaattatggagagaagctcaattgtatggtgatatccaattgatgccctttgttgactactatagtttgatcacttttaagaccatatcaatttgtatttttgggaccaaaattgttcctgcaaagtacatcatgaaaacagatgatgatgcttttgttaggatcgatgaagtgatctcaagcctgaagaagagcaactcccatggccttctgtatggtcttatttctttccaatcttcaccacacagagataaagatagcaaatggttcatcagtaggaaggaatggccttacgacatgtatccaccatgggctcatggtcccggatacataatctcacgtgacattgctaagtttgtagtccgaggccatcaggagctgactcttcagctattcaaactcgaagatgtggcaatggggatttggatccaacagtacaagagcagtgggcagcaagtaaacatcgtgaccgatgaccggttctacagtgaaggatgcgatgctgactatgtccttgcgcactaccagagcccaaggcttatgatgtgcttgtgggagaagcttaagacggaatatcaagctatatgctgtgaatagcatctgcatcaactttcgcaagtaggagagcgataggttagcctcgttgtacaacacattactgagattttgacgcttagtggaaagttgttgggactacgcacgcaacactttgtaacattgggtaactcactgaacagatgttgaagagagttgtaaagcatatgcttgagaggcagttcccacctgctgatagttattattctgccacgtgtacaaatacgttctcttttgcattgtcgtgttagtagggatggctataagagtttaatgatagaacaaaaaaaatttaga

SEQ ID NO: 4120 - DNA, 509 bp, Setaria italica
  Peptide Sequence Number=SeqID_70094
gtaccattaggagatgaatatatgaacattctcatgtcatcattagaatctaatgctaccagaaatcttaccgcatcttttgactgtgtcaaaattatgaccaacctcatgaacctagcatgcttggtgatagtgcaatctaaccatagcctgagcaagaggaatgctgtagatgtattatccaccattataaaggaatgtctgcacaatcatttgtacattacgagggcaaacattgcttcacatctgcaattttgttttgatggaagttcatgttgctatctcactgaagagtgggaaggtgaaaatgttctcctattttatggtctcatggtgctgtataatgtgctgaggaaagtcagctttgtttgtattcactgtaaaaagaatttggatgccgggattcgtgtgccatgattgcagagagtattacaatgaaggttttattagagtccttgagcatgcattctgtcagaacttgagcccaggacccaagtcttatatcgcac

SEQ ID NO: 4121 - DNA, 367 bp, Setaria italica
  Peptide Sequence Number=SeqID_70095
cgcgggcgcgagggcggcgggggcggcgccccccgggccggcagcggcgacggggaggcgagggatggcgggacgaactcctcggccatggggttgagcttggagaggagctcctccagatcccgcatctcgcgctccccggcgtcggagccggtgccagcgccgggcgcctcctcctcctccgggcgcggcgcggcgtggtcggcggcggcggcctcggcgacggccatcggtcggagcctggagggacgggtcgcggagagctcgggaggaggggggaggggttctggaaggttcttgggcggggtcggaggcgccgaggcgggggctggcgcgggtatatatagaggcaggcgggcgggcgggg

SEQ ID NO: 4122 - DNA, 453 bp, Setaria italica
  Peptide Sequence Number=SeqID_70096
taaagaaccgtaaggaactacgaccaatacaatttggtggccgctcatcatccttcggcgctagggacagtaagatgaggagcggctaccaaaggatgaggagcggtttgattttctcccaccacctgaccagtcatcctctgaccaactatcgttgtcagatctgaagctccggccactatcattgtcagatctgaagctccggccaccacggcggaatcgatcctcgccctctgaatcccaaccaccccgtcctcttgcactgccgccacccctggacctcctgttcttagaacctcggtcattcgaaaagcggccatagctatcagcaggaggaccatcatcttgcaacgcaggcagctgaaagcaggaaataataaaacagccatcacaaactcagaaaaccaaaatcacatctgcaacagtggaaatatgacgcactataaaaatcaa

SEQ ID NO: 4123 - DNA, 260 bp, Setaria italica
  Peptide Sequence Number=SeqID_70097
tccaccacctgaccagtcatcctctgaccaactatcgttgtcagatctgaagctccggccactatcattgtcagatctgaagctccggccaccacggcggaatcgatcctcgccctctgaatcccaaccacctccgccacgctccacgtccgcctctccgccgcgaccaccatccacaaccacccgaccccgccgctgctctcctgcccgctcgatctgtcccccgtcctcctcagggggccctcctcgccggcttccgg

SEQ ID NO: 4124 - DNA, 470 bp, Setaria italica
  Peptide Sequence Number=SeqID_70098
ttttgttttggttcgggtacgttctagtagtgagcaagattttggcacgctgactaccagtattacaaaaagagtaaagcccgtgtgacatgaactccttttgtaatactggtagtcagcgtgccaaaatcttgctctgacgaaacgaccaaacaaaactgtagctaccgcacggtggctgtcagccagcaataacgtcagctggctctcgggcgtgtattgatcagcaggggtggagtgggcttaggcctcttgcttggcgtgtttgattgtccagccgcctgttggaagccgatcaggaccgaaaggagcgaccccgtgcggcaggaaagaatgcttcatctctaccatctacttgtttgggcagtctgatgcacggtgaccggattcgccgcagttgaagcaagcaccgctgaagtttctgtccctagcgccgaaggatgatgagcggccaccaatgatggcgagcc

SEQ ID NO: 4125 - DNA, 336 bp, Setaria italica
  Peptide Sequence Number=SeqID_70099
actctggtaagtgctgaagcttttctgtaaaatctttgatttctaatgcttcatcagatatatcagttcccttccccttagcttctgcaatgctgcctcaaatgcacctggatgtccaaaccttgcctgagatacatgatcattgtcaagcattattccaatttccaagtgccaaacttgtgggttctagctaatgatatgaaccttaaggaaattatgatcagaaaaagagacgatttaacacttctttattgtttggtctttatacaaaacgtgctaaggcacggtggcgaaaaaaatatacaaaccttaccataactgctgatttctaagttt

SEQ ID NO: 4126 - DNA, 1587 bp, Setaria italica
  misc_feature (1)..(14): n is a, c, g, or t
  Peptide Sequence Number=SeqID_70100
nnnnnnnnnnnnnntttttttttttaagaattaaggagccagaatcgctggcacgcactttgcaatacagtatgcattatatctgttattggaaaaacatgatatacaacctcctatgtgtctacaaacaatagcattccagatatttggctatctaaactagacaagcaaatcatttctgaaagggtcccgttaaggacgagttcatggaggcttgaatctcttctagggttcttcctttggtttccggcactagccgctccacaaacacgaccgtgaggccacagacggttgcaaagatgaagaacgtgccataagagttccactccaggagaaagttgaaggcgtacgagatgatccatgagccgagccagcttactagggtcacaaggcttcctgctgctcctttcatgtttatgggaaagatctctgacattataacccatggtattccccccatgcctagtgaaaaggatcctgtgaaaatcagaatgcctgccaaagccagcaatatgttcaggtcctttccccagtgatgttccttcgctaagaatgacaaaccaactagtaggcaacccaggcatgttccagctgcagagaccatcaaaagtggcctccttccagccttgtccattagaagtacccctaatcccgtcatcggaatctggacagcaaccatagcaagcattcctgtgtttcctgatgagaaaccagctgaaacaaatatttcactggcatagaagcaaatggcattcactcccccaaactgttgaaggaccattagcccaactccaactgtaacagcacgaatataagccttttgaaacaggtccaacatctttgactctggtaagtgctgaagcttttctgtaaaatctttgatttctaatgcttcatcagatatatcagttccctttccccttagcttctgcaatgctgcctcaaatgcacctggatgtccaaaccttgcctggtttacagttgcgaaccctcctctaagattctttggtgttatctctgatatatagactggaaccacatatgaaagaaggccaattccacatccaattgagagccttccaatgtcaagccaccaaaaattctgggaaaaggttatcaggagatatccaagaatgcagagaagatctgatattgccattgcgaatcttcgaccgacacggtctgccacggtgccactgacaatagctcctagcattgctccaatcgttagtatggagccaaagacagagtactcggctaaggagaggtcgagatcacgcatgatgcccggctgggaaggcgacgagtagcccaccgagatgccgaactcgaaggatccggcgactgcgacggcagtgctggcgaccaccaccgcaatcgaagaggaagaggagggagacgaagctccctgacggccatcaccgctgcttccggccgccgccgtggccaggagaggcttctgggcttcttgatcctcatgctccatcggggcggcctgggttctccccctcagtcggccgtcgctcttggctcttgcctcttggtatggtgtgtttggagctgagctgacgacttgacgaggacgac

SEQ ID NO: 4127 - DNA, 1725 bp, Setaria italica
  misc_feature (1690)..(1725): n is a, c, g, or t
  Peptide Sequence Number=SeqID_70101
tcccgtccgtacatccgacgcccgcaggtgcaccacgacatgtcccacccgctctcccactacttcatctacacgggccacaactcctacctcaccggcaaccagctcagcagcgactgcagcgacgtccccatcatcaaggcgctgcagaggggggtgagggtcatagagctcgacatgtggccaaattcagcaaaggacgacatcaacatcctacacggcaggacattgaccaccccagtttcactcatcaaatgcctgcggtccatcaaagaatatgcctttgtggcgtccccctatcctgtcatcataacgctcgaagaccaccttccggctgacctccaggcaaaagttgccgagatggtccttgaagtatttggcgacatactcttctaccccggaaccgatcatttcaaagaattcccatcacctgaagagctcaagggccgcgtcctcctctccaccaagccccccaaggagtaccttgaagccaaggttggcaccatgaaagagggtgacgctgacccacatcctggcaaaggagctgctgatgatgccgcgtggggaaaagaagtaccggattttcagactgagattcagtctgctaataagcatgatgatgatggctcagatcaccaaagagatgacgaagaggacgatgacgatgatgacgacgaggaacagataatgcatcctcattcagctccacagtataaacagcttattactattagagcagggaagccaaaaggctctctggctgatgccttgaagagtgatccagataaagttaggcgtctcagtttgagcgagcaacaacttgccaaactggcagaggatcatggaactgaaattgtgaggttcacacagagaaacatattgaggatataccccaagggaactcgtgttacttcatccaactacaacccatttcttggttgggtgcatggtgctcaaatggtggccttcaatatgcagggatacggaagagccctttggctaatgcatggattttataaagccaatggtgggtgtggttatgtgaagaaaccagatttcttgatgcagacagaaccagaagtgtttgacccaagggaacgccaacctgtgaagaaaaccttgaaggtcaaggtgtacctgggtgatgggtggcggatggactttaagcagacacactttgatcagtattctcctccagatttctatgcgcgggttggcatagctggagtcccagcagactcgatgatgaagaagaccagggcgatcgaggataactgggtgccagtatgggaggaggagttcaccttccccctgaccgtcccggagatcgctctgctacgggtggaggtgcacgagtacgacatgtcggagaaggacgacttcggagggcagacggtgctgccggtgtcggagctgcggccggggatccgggcggtggcgctcttcgaccgcaagggaaaccagtacaaccacgtgaagcttctcatgcgcttcgagtttgtctagtctgagtgccgacgccctttctgtttgcattatatgtttaatttgtgtgaatatgcataagtgattctgggagttgagtgtgctctctcatcgtttctttgtacatagattggaattggaattggattgtatggttgttctgaatccaggacgctgcctattgcgttgatcgatccttaaaagnnnnnnnnnnnnnnnnnnnnnnnnnnnnnnnnnnnn

SEQ ID NO: 4128 - DNA, 276 bp, Setaria italica
  misc_feature (267)..(267): n is a, c, g, or t
  Peptide Sequence Number=SeqID_70102
tcttcactccccgtcactctcgcaccacctcgtcgtcgtcctccgccgcagtcgccgccgccgacgatgccgcgcaaggcctcatccacatcagattcgcgcctaaaatggcgcaagcggaagcgcaactccaacgcgtccccatccaagccctccacctcctccgccgccgcggccgaccactccgacgagtccgactccgccgccgcgaacgacgacgagtacgccgctgcgggggacggggccgacgacgacgaggccccccgnggacgcccg

SEQ ID NO: 4129 - DNA, 1012 bp, Setaria italica
  Peptide Sequence Number=SeqID_70103
gcttcaaactggactgttaaggaagttgctgaaactgtgaagaatgattttggcagcattgacatcctcgtgcactctcttgctaatggtcccgaggtaacaaagcctctgttggagacatcaaggaaagggtatcttgctgcaatttcggcatctagttattcatttgtttctttacttcaacacttccttcccataatgaatccaggaggggctagtatctctttgacctacatagcttctgaaaggataattccaggctatggtggtggtatgagctcagcaaaagcagcacttgagagtgatacaagagttcttgcgtacgaagcaggtcggaaaggcaaaatcagagtgaacacaatatcagcaggtccactgggaagtcgggctgcaaaagctatcgggttcatcgagaagatgatagagtattcttatgtcaatgcgccactgcaaaaggaactattggccgatgaagttggcaacacagcagcgttcctcgtgtctccgttggcatctgcagtcactggctcaactatttacgttgacaatggactcaacacaatgggacttgcactcgacagccctactttatccacataaacgccaatttcagttggatatggtgcagttgggtttaaagcggagtaacctgcgcagccacgcaggtgagagaggctgtctgcttgtggaatcagatcaaaggatggtagatttgcaggaaattcagtttattgatttcattgatttggactatcagttgccattcggaagtagaattctaggatgcagtctattggtccgtgtaatgctaggctttagcgcttttgtaggaaactgagctttctttgatgccgtcaccttgtgtttgtgtaagtaaatcgtccaaagtttggaccttttgtggtaaatgttttgcagttccatccagtccgtttgtgtgcgccgatcagatcaatgtctgtgctgttcagatcaatgtactttgaacaaatttctgctgtgaacattgcaa

SEQ ID NO: 4130 - DNA, 258 bp, Setaria italica
  Peptide Sequence Number=SeqID_70104
ttgtcgggtcttgttccctgtcttaagaccccggcaaggtcttttttgtcaggaggcagctgaggcccatgtcgcagacgcaggagtctgcaggagcccacgaagatcattttgcagggcagggcacggggtgagtaataatgtttcgcaaaagaaaaaaaaaacagcgacattccacgccagctgtctttctaacagatagatgtatataaacaaatcagaaaatgaaacggacagctcttgcttgtggcttcggct

SEQ ID NO: 4131 - DNA, 565 bp, Setaria italica
  Peptide Sequence Number=SeqID_70105
gacggtagaaactgacactttaaagaagtagtggcatatcattgcttgcaagcttcctgaacatctctgttccacaggttcttgttcagttggaagatgataggcaggtataattgagcagacaaatgctgaatgttctcgtataagttagtgctagatgtccacccattaatccattatacgcatctgcttcacaaaagttgaataacaattgaaagctgataattgatttatgtacttctgtttagtctttctgatagattgcttttgcaagtgcttacgcctaggtaggcttttatttctttttgactctgttagaacccagatgctgcaattctgtgacagattcgatccacatagctatcatcctttcaatccaatcaggcacaagttgacgacaggtgaattgaggctttgtgcttgaaagagcaaagatcctttctcttcaatagtcacgcttgactcaacagcccgtgtatatgataatcctaaatcctctaccaataatccccacatgagcaagctccttgtactatatggtggatcctattggtgtctttgttgt

SEQ ID NO: 4132 - DNA, 408 bp, Setaria italica
  misc_feature (378)..(378): n is a, c, g, or t
  Peptide Sequence Number=SeqID_70106
ccagccaccagctcaggcatcctcgacgccgtcccgctcttcgtcgtcgtcctcctcgccgtccacgttctggccctcgtgttctggatgtacaagttggcctccgagaagcagccgccgcggaggaagacgcagtgacgcccgccgatccacgcaatcgctggcttgcctctttggtgggttggatttaggacagaagtgatgctccagaaggtttaggttgttcattgttcagagatatctatgtagcattttaatttgtctgccataattgttacatattggattttagttgagaacaacttgctgcatttggattttgcatattgctcagagaggcaatagtctatattaaccattgtcctttgtatgataaanaaattttcatcgctttttttttcctagtat

SEQ ID NO: 4133 - DNA, 1133 bp, Setaria italica
  misc_feature (1085)..(1133): n is a, c, g, or t
  Peptide Sequence Number=SeqID_70107
tcgcgtagaaggagaacagttgatagcagccgcagcgatccctcattctctccccagcgccgccgacatggtgcagcagcagccgcagccagccaccagctcaggcatcctcgacgccgtcccgctcttcgtcgtcgtcctcctcgccgtccacgttctggccctcgtgttctggatgtacaagttggcctccgagaagcagccgccgcggaggaagacgcagtgacgcccgccgatccacgcaatcgctggcttgcctctttggtggctacatcttctctttaattaaacgtcaaatctttcttcagttttcatacggctctgcactttcttttatgggcagcattaataaatggtggcatatctgggcaaatgccctacaagttctgatgtacaaatgacactccctgtggttcagattcttgaaagacatcatctctatgcaaaagatttaatgtctggaaccatcaatcctttatgccgaagtaggctggtacattatgtagtttgtcatgacatatattccatgaataataatagaagttttgctttgttatgttgtcttaaattgttttttatcctcaaagtcttcatatggaaatggctgcatgccctatctcttgtcaagtaatttctttggttggttgaatctgtgctattgtgaacttcttctttagagtagtggcaaatgcacaaattaccatttttgtttttgcccagtcagttattttctctctttttttcttttttgcctggcttctcttttttgttaaaggagctaccattcttgtaggctttaactacttattacaaatcagcccgcatatgccattaattcttcctctcatggttgtaggttggattttaggacagaagtgatgctccagaaggtttaggttgttcattgttcagagatatctatgtagcattttaattttgttctgccataattgttacatattggattttagttgagaacaacttgctgcatttggattttgcatattgctcagagaggcaatagtctatattaaccattgtcctttgtatgataaataaattttcatcgcttttttttacccagnnnnnnnnnnnnnnnnnnnnnnnnnnnnnnnnnnnnnnnnnnnnnnnnn

SEQ ID NO: 4134 - DNA, 911 bp, Setaria italica
  misc_feature (831)..(911): n is a, c, g, or t
  Peptide Sequence Number=SeqID_70108
cgggcgtcccggaggccgacctcccgcgcgttctccggcgccggccgcgcctgctcgtgtcccccgtcgcggcgcggctccggccgacgctctacttcctccgcgcgctcggcgtccccgacctgcaccgccgcgccgacctgctgtccttctccgtggaggacaagctgctgccgcggatcgagttcctcgagtcgctgggcctcccctcccgcgccgcgcgctccatggcgcgacgcttcccggcgctcttcggctacggcgtggaggggaacatgcggcccaaggcggagtacctcctgggcgccatgggccgcgacgccgacgagctgttcgagttcccggagtacttctcgtacgcgctcgccacgcgcatcgcgccgcgccacgaggcgtgcgcggcgcgcggggtcaggctgccgctgcccgccatgctccggcccggggacgccaagttccgggccacgctcgccggatgcgtcgggtcaacgcctccccggaggcggtcgccgctatggcacgccacgtgggtggacgacgacggcggcgacgaccaccaccaccacgccggcgcggtggcgaaggaggccgcagcggcggtgtgacggccggccggacggcgtcgatcgacacgcgcattggtagcggggcgagtggttctgggtggtgtaacatgtgcatacggattggcattggctgcttgtaactttgtaagtatggtacaatgaatctagttggttccattgtgccgcgacatgatgtgaacaaaggcattggctacttacgttgcatagaactgaaatgagatacgtatgtaatccttcaattttnnnnnnnnnnnnnnnnnnnnnnnnnnnnnnnnnnnnnnnnnnnnnnnnnnnnnnnnnnnnnnnnnnnnnnnnnnnnnnnnn

SEQ ID NO: 4135 - DNA, 338 bp, Setaria italica
  Peptide Sequence Number=SeqID_70109
cgaaccgcagcgcgcaggcccggcagcctcctgctcccgcggccgcggcggcgcggctcgcgcaggagcagacgccgccgggcgtggcgcgcatctgcctgacggcctcctccgtgtccgcttggatccggctctccgcggagcttctcttggccagagcctcctacatgtccgcatcaacgcacgcgtttgtcacgactagacactatggcgcgcacgatcgagatgcagcaaagaacgcacaaatcaattggcttgacaaggagacacgatcttattctctagaagaatgattttatttcaaattattgtgattcaggttcattcaacagcagcag

SEQ ID NO: 4136 - DNA, 384 bp, Setaria italica
  misc_feature (28)..(28): n is a, c, g, or t
  Peptide Sequence Number=SeqID_70110
ttcttctttagttttttttttttttttnttttttttttttttttctttttttttttttttgtctctggcaaaattttactaacacatgatgcaccaaaacaagtcaacatgggttttgttttgtaactgggagacgtctattttacaatttcctcagtcctcactaacatatgctaattacaaacaaccatgaaggacagaatcctgcaccgctgcgttgaaccttcctcccgataaaagagggataaggtacaacatgaagtttggtgctcaatcaccacagaagcagaaaaggagaataaaaaggacaccttttcctctagggcaaacatttacaacttgagaggaaaatacgtgaccctaccactaattctactaagtact

SEQ ID NO: 4137 - DNA, 679 bp, Setaria italica
  Peptide Sequence Number=SeqID_70111
ctttcaacaatgaggtggccatttgtttgaccaacacttgttggccgccccgttgcccatccctgcgttcttcaatgagattttgtagcttttggggaaggtcattctctactgagtttgttggagaaagaaccaccttctcgacatgtatctggacaacttgattacgttcaccacatatctggattgggaaggcatgaaaccattctgccattattacatgcgtcaacagagaggaaaacaaatggtgaacttgacttgataatggcagaatttgctgaggtttctagacatggaagggagaatggccatattgaatccagtgcaaaagattcaaacagagttcaaagtatgaaatatgcaccttcagcaggtgtctctaatgaaggagcatcgacttctggagctgcatcgcaaacagcatctggtgtgttatctggatcaggagtgctcaatttaagaccagggagtacaacatcatctggtccattagctcagatgttctcttccatgagcgcagatgttgcacgtgagtatcttgagaaagtggctgatcttcttttggagtttgcacaagcagacaccgtggtaaaatctcttatggccagccaaagccttcttgcacgtattttccagatgttcaacaagatagaacctcctattcttcttaagattctta

SEQ ID NO: 4138 - DNA, 1171 bp, Setaria italica
  Peptide Sequence Number=SeqID_70112
tagcaaaacgaaaatagtagtaatatttacagaaaagcacctacactgtttgtctctctctctcctctccaccttcgtcttcctgcttcggtgcttcccccatcctccaattcccttcccacccaaaccctagagcaagtgaatggctccagccgcaaagctcgcgagagactatgctccgccgctgctgatccacccgcccccgcgcggccgccggcggccggcccgtgcaacggaggaggcgaccagatggcgtcgaggcagcacaatgcgcagttccataaatccaagacgctcgacaacaaatacatgcttggagatgagatagggaagggggcgtacggtcgcgtgtacaagggacttgacctggagaatggcgatttcgtggccatcaaacaggtctcgctggagaacattccgcaggaggatctcaacataataatgcaagagatcgaccttctgaaaaatcttaatcacaaaaatattgttaagtatcttggatcactgaagacaaagagccacctccatattattctagagtatgtggagaatggctcacttgccaatataatcaagccaaacaaatttggaccttttcctgaatcgttggtggctgtctatattgcccaggtgttggaaggtcttgtttatctacacgaacaaggtgtcatacatagagatatcaagggtgcaaatatattgactaccaaagagggccttgtcaaacttgctgattttggagttgccactaaattaactgaagctgatatcaacactcattctgtagtcggcaccccatactggatggcccccgaggttatcgaaatgtctggcgtttgcgctgcttctgatatctggagtgttgggtgcactgtaattgagttgctcacatgtgccccaccatattatgatctccagcctatgcctgcactattccgcattgttcaggatgtgcatccaccgataccagaaggattgtctcctgagattactgattttctccggcaatgcttccaaaaggatgcaatgcaaaggcctgatgcaaagacattattgatgcatactttgttgcaaaactcaagacgagctttgcctgcttcccttcggcaacctactccattgaggaacatcgatggggatgatgaaggctcaagtggccataatactgctg

SEQ ID NO: 4139 - DNA, 1989 bp, Setaria italica
  misc_feature (71)..(71): n is a, c, g, or t
  misc_feature (219)..(219): n is a, c, g, or t
  Peptide Sequence Number=SeqID_70113
ataatactgctggtttttgtggcacaccaggagattctcaaacacctatcatttctaatgttgagcagganaacgggagaaaagaaccaattactggaatctgctgcacaaaataaacctgatgagctttatgatggaattaaaacccatcgagggcagtagctcaaacaatctggcgcttatgaaagataacatagttcctaataaagatccgacacnggttttacatgagaagctaccagctgaatcttcatctggagatgctgatttgaatgacaaagtaatgccacatgaactgcaagttggtctgccaagtaagatagagcctgaaagtaaagaaagttcaagtcttgaggatgttgatgcgttctcctttcaggctggaagacagaatattgactaccaaaaggtggttgaaccttcagcagttgaggtgccgaaagagctgagtagatttagtgacaaacctggagatgcctcgttggaagatttattcccaccaatcgacaaacagggcaattatgtagctgaagcttcaacatcaactactggccacgaacttccatataatggtgtatcaaatgactttgcaaaggccctcaatgctagggtggcagagaagcaaaaaggaaatgatagcgagtccatgaatggtgggaaactaattgaatatgcagatcgactacaagatattgatgcacagggttttggtgatattggtggagagagtcttttcccttggcaggaatacagcaaaatagtagcacaactgaaacctggggaaagtgaagatgtgatattgtcagcatgccaaaagcttctagtatacttcaatcaccggcctgggcaaaaacagatttatgtgacacagaatggtttcctcccgcttatggaactccttgaacttcccaaaaaccgtattttaagctcagttctgcagctcatcaacaacattgtaaaagataatacaggcttcctagaaaatgcgtgccttgttggccttattccagtggtaatgaattttgcggagccaaatcgtccaaaggatgttcgggtgcaggcatccttgtttcttcagcagctttgtcaggccagcaccttgacattgcaaatgttcattgcatgccaagggatccctgttttggtgagctttttggaacctgattatgcaaagtacagggatatggttcatcttgcaattgatggcatatggcaggtcttcaagctacagcattcaactttgagaaatgatttctgccgtatagcggcaaaaaatgggatacttcttaggctggtgaatactcttcatagcttgaatgaagcaacaagatttgcctccatctcagggtcaggcgcttcggtaacacaaaatggctcaaccccccgacgtagatctggtcaattagacccttcatttattgaaatttccaaggcgaggctggatcatcaccactcatctggttctctgcaatccctacaagcagatgcggataagcaccatatgttaatcgattcctcatcatctcctaggtttagtgagaaaactggtgttggtaacttagagaggaatgagaatgacttggttaggccacagaggcttagtgtttctgcaggaaggacatctacagacagatcaccgaagcacatagaactagtttcaaatggtcataatagcggtcaacatgaccaagtccggcctctactgagtttgttggagaaagaaccaccttctcgacatgtatctggacaacttgattacgttcaccacatatctggattgggaaggcatgaaaccattctgccattattacatgcgtcaacagagaggaaaacaaatggtgaacttgacttgataatggcagaatttgctgaggtttctagacatggaagggagaatggccatattgaatccagtgcaaaagattcaaacagagttcaagatactcacgtgacaacatctgcgctcatggaagagaacatctgagctaa

SEQ ID NO: 4140 - DNA, 794 bp, Setaria italica
  Peptide Sequence Number=SeqID_70114
tgtctagtactaccgttggttaaaattcttctttattggtcctagtcctaaagtcctttctttgtctacgttatttgaaataatagacaacccaacaagagcaggtgtctctaatgaaggagcatcgacttctggagctgcatcgcaaacagcatctggtgtgttatctggatcaggagtgctcaatttaagaccagggagtacaacatcatctggtccattagctcagatgttctcttccatgagcgcagatgttgcacgtgagtatcttgagaaagtggctgatcttcttttggagtttgcacaagcagacaccgtggtaaaatctcttatggccagccaaagccttcttgcacgtattttccagatgttcaacaagatagaacctcctattcttcttaagattcttaggtgtattaatcatttgtcgggtgatcctaattgtctcgagacacttcaacgcacagatgctatcaagcatctgataccgattcttgaacttcgtgatggacctctggtttatcaaatacatagtgaggtcctcaatgctttgttcaacctttgcaagattaacaaaagaagacaggaacaagcagctgaaaacgggatcatccctcacttgatgaattttgtcatgtcggactcacccctaaggcaatatgccctgcctttgctgtgtgatatggcccatgcttctcgcaactctagagagcagttgagggctcatggagggctagatgtgtacttaaatctgttggaggatgatgcgtgggcatgcactgcattagattcta

SEQ ID NO: 4141 - DNA, 485 bp, Setaria italica
  Peptide Sequence Number=SeqID_70115
aggaggggagctggggaaaaggaaaagaaaagaaaagaagaagaagaagaaatggggtagaagaaggctgtgtgatgtgaggggaaattacgtaggacataagccaaatccattgatttctcccagctgcttgagctgagttgtttgagtggtctgcgaggacacccttgagctcgccggttgaactgccagtgtgcaagcttgcttcttgcctttttcatgactattttcttgccttttctctctaatttttcctagctatcctaatttctgaagatttcttggaagaattctctggttcatttctcagacggagatctctaatttctctgttttgtttaccaaatcctgaccatccccattattttctatttttatcgtgctttaccccttcttcctcccattttcgttttccatttccccctcttcttccccgccattccaagctgccaccagcctacgctgtaaaatctgtgctgctctgt

SEQ ID NO: 4142 - DNA, 290 bp, Setaria italica
  Peptide Sequence Number=SeqID_70116
ctatgaatgtaaagggagctgttgcatcccctgtagcaactgcagagaatgacagaattccagccgaaatagttgtgcacaccagttgagaccaaaatcccagggtacccagattcttaaaataccgtgctgttttctttagttttttgctaactgtgaagggggtggaggaggccgccgctgccgactgggagtcgcgcagaggtcgcgccgccgggaaggctgcaggcaagacgcgccgccggtcgctgctcctttcgcgtggacttgttcctccttccgcgagcgag

SEQ ID NO: 4143 - DNA, 707 bp, Setaria italica
  misc_feature (3)..(4): n is a, c, g, or t
  Peptide Sequence Number=SeqID_70117
ccnncgactccagtgagctcgatagcccaaggaaatgcgagagaattgtgttggctgaagcctgaacaagaaaaatatctaaagcgagaacaggactttggccagggggtattccctggtagtagggcactgatgaggtagcgagggctttggctaccaaagcacctacagttgcctgcaggccaagaactgcagcacccattccaacaacattaaacatgatactatttctcagattcttaaccacgtcagcacgaggaggagccttagcaggttcatttgctgctcttctaagcctttccgaaaggcggatataaccaaatgaccggaatactgagataaaggccgcaatgataccaactgaagttgctatgaatgtaaagggagctgttgcatcccctgtagcaactgcagagaatgacagaattccagctgaaatagttgtgcacaccagttgggaccaaaatcccagggtacccagattcttaaaataccgtgctgttttctctagttttttgctaacttgagcaagcttggcgcgctcgacctcgtcctccgcagagagaggagtggggtccgaaggtccggacggcgccgccccagcccccgccgcggctgccgcgtcgaggtgacgcggtaaagagcctcggccggcagcataagatgaggtaccagtaccaacgatggcggccgcgcggctggagcgg

SEQ ID NO: 4144 - DNA, 722 bp, Setaria italica
  Peptide Sequence Number=SeqID_70118
tcaagagccatactgtcggtaaaaaagttgcaataaatatgacgatacctgaatgatcactgattcgtttcagccatttttcatttgttctgttctggattgctgttatcatcagagtagtttagttgtcttatatgaggttctatcattgtgttttgatgcatccaccattatagagacatgtttccagtgataaaggtgaaaaatgcagagtgtgataaactagacctgggttaattgctccactgaagatgctgagaagatgttgaaaaagacatttggatggatccactcgccatattggagtgaaaaggatgaggttccaaatgctgagttggtaacttgagtattgaactatacaaggagtctcgtgctatctgatgaagtccttcacaggttgctgaagaaatttccaggaagttcttgggtgtgatcttgacagcgaggtgaagctgaaagtgagcaagctggacagtgaccgtgaaataatgattgcagattgcatgtcacagtgtgttcattgttgggtttggttataaatgttctgttctatatgacaacgttattgttcagaaacttccgaggacattttgttggtgtgaaaaatttggatgacatttcactgagttttttatatctataaactagcacctggcaaatatagaaacacatttgtaattgatggatgtaccctatttagttcatgtactctacatattcaa

SEQ ID NO: 4145 - DNA, 1165 bp, Setaria italica
  Peptide Sequence Number=SeqID_70119
ggatggatggcgtgtgcggctggaggcggctcgcaaggggcgcggtggagatgcgaccccgcgcaggagccctcctcgcctcccgtcctcctcctacccgccgagacgctgctgtgatgcgggccagctagactcgtgtagaagaagcacaggcgaaacaaggagaagccggcggagacaaccggaggcgcgcaggcggccgagccaatccacctcgatgttggcaaaatcaccagcattgcctttagtgactgcggatactactgcatttcgcttctgtactactggcaatatcttgagtccaccggttgtgaaactctctcacaataaatgccaaggaagattgaatgtccagcaaaacattgatcttggtaaacctcaagatgcgactcggaaatggcgggtgctatcagctgatcaagctcaagcttctgtcgtagatgttgatgaagagtgcaaacaggtgctcacttcactaaatttctccactgaagatgctgagaagatgctgaagaaggcatttggatggatccactcgccgtattggagcgaagagagaaagaaagaggttccaagtgctgaggtggtaactggagtattagactacatcaggagtcttgggctatctgatgaagaccttcacaagttgctgaagaaatttccagaagttcttggttgtgatcttgacagggaggtgaagctgaatgtgagcaagctggacagtgagtggggaataaatgggaaaactttgcggagtcttctcctgagaaatccaaaagttttgggctacaatattgattgcagaggggattgcatggcacagtgcacccgttgttgggttaggttctaatgttccattctacatgactacatcactatacagaaatcccagagggcattctgctggctgtgaagaaatgcagatggcattttactggccatttttctgtaaactagcacctgccaaatacaaatgcatatccgtagttgatggatagacacttgttacttcatgaatgcatattcaagagccatactgtcggtaaaaaagttgcaataaatatgacgatacctgaatgatcactgattcgtttcaggtatcgtcatatttattgcaacttgattgctgtttgaatgcatattcatttcaggtatcgtcattatt

SEQ ID NO: 4146 - DNA, 260 bp, Setaria italica
  misc_feature (239)..(260): n is a, c, g, or t
  Peptide Sequence Number=SeqID_70120
ccaagtatcatatcaagatccaatctaccacgtgcttattgtaactctcacagcaagtatggaactgcgacttccttgtaatccttcatcttctatgagcctggaagatttgaaaatttattgaagtgatgtgttcagactggctcatgataatacaaatgttccctactatctatatgtaaagttacttctgcaaaatgaactgaaagctgaagctcttttttacttttaattagttnnnnnnnnnnnnnnnnnnnnnn

SEQ ID NO: 4147 - DNA, 566 bp, Setaria italica
  Peptide Sequence Number=SeqID_70121
cttccttgtaatccttcatcttctatgagagttcaatagcacgtggtagattggatcttgatatgatacttggtgaagatggttacttaatcgtgataataagcctgcaggtttgggttgctcacaaggaatcgtcttggatatcaactgccatttggattgtcttgttgatatgctttggaagcatcacaacatgcggctacattgctctccaacttttccaagtatcatatcaagatccaatctaccacgtgctattgaactctcacagcaagtatggaactgcgacttccttgtaatccttcatcttctatgagcctggttagcttacagctgtctaaacttctgcttgacatttggtcattgatcagccattcataattcacatctgttttaaatgtaggaagatttgaaaatttattgaagtgatgtgttcagactggctcatgataatacaaatgttccctactatctatatgtaaagttacttctgtctaaaatgtaacttgtaaaagtcttgttaagttcttttcttttttttattttttgtttttaaaaaaaaaaaa

SEQ ID NO: 4148 - DNA, 871 bp, Setaria italica
  Peptide Sequence Number=SeqID_70122
gcgggccgtttcctctcgaggggtgatcatggcggcgcagggatccctagtcgcgtggagggtggtgttcgcggcgctgggattgctgatggtgggcacgctggtgtacacctgcgccaccgacggctcgcctttccgccccgagctgcttacgccgtggatgaatgcaacactgattgatttctatgtgaatgtaattgcaattgcggcgtgggttatctacaaggaagaaaactggattagttctgccgtgtgggtggttctgttgttttgctttggcagtgctgctacttgtgcttatattgttacaaagctttttgaagtgacacctggagggccatctcacgatccacttgatcttctgtttatcaggcagggtaatctgtcccaaagaaagtgctcttatgtcataattggaaggattatgttcagcattttggggatattcatggctgccgttgtcacatatactgtcatcactgatggacttccttttaggaaggaattattgacaccgtggatggcggcaaccttaattgatttctacataaatgtctttgcaatatcggtttgggttgctcacaaggaatcgtcttggatatcaactgccatttggattgtcttgttgatatgctttggaagcatcacaacatgcggctacattgctctccaacttttccaagtatcatatcaagatccaatctaccacgtgctattgaactctcacagcaagtatggaactgcgactaagatttgaaaatttattgaagtgatgtgttcagactggctcatgataatacaaatgttccctactatctatatgtaaagttacttctgcaaaatgaactgaaagctgaagctcttttattgt

SEQ ID NO: 4149 - DNA, 411 bp, Setaria italica
  misc_feature (287)..(287): n is a, c, g, or t
  Peptide Sequence Number=SeqID_70123
ttagttactaaagtaacacagagtcagaaagcacaagaaaagggagtaagcagtcatttagcaatagccgtcatttgcatgttgaatcagttgaatcatcgattgaagtgttcaagcagccagagcttgagcagcttaaatcactacatacctacaaggaaaagttttctggagtcaagactgaatggcctgcaactatccttgtttttgatattgaaacaactggtttctcacgtcgtgaggacagaattattgaatttgctgttcgtgatcttatggggggaaanaatagcacttttcagacactcataaatcccgagaaagatgtgagaaatacgtacattcatggtattagacaacagcatgctctgcaggcctgatgttccaagatttggagaccttatccccatt

SEQ ID NO: 4150 - DNA, 276 bp, Setaria italica
  Peptide Sequence Number=SeqID_70124
gcttgcgtcagagtaggcctccggaattcatcgccacccacatcagccgccggcgatgtctccgtccgccgacgccgccgcgccggcctccacctcggcgcccccgctcgcgcccctcatcgccgcgcagctcaactacctcatctcgcactccaagcctcccatcagggtggggcagatctggtccggctgccgcaacggccgccactccgatcggttcacgctttccatccccttctgcctcgactacgtccactgggatgtagcgcattgtac

SEQ ID NO: 4151 - DNA, 1856 bp, Setaria italica
  Peptide Sequence Number=SeqID_70125
gctgctgacaattttcaatatagattgccaaaacataactcatttatattagatacaaatatacaaagtgcagaagtatcatctgctgctgacatgaagctttagattgccaaaagatcaatcatttatcagatacaaatatgcaaagggcaggaggagccctttcctccattttctttctacctactaaatacagttccggtcattacagcctcctatgattcctaatgaagtttgttgttatcaaagaaagcaccgcgtcacacgcataagatgccgcggctagcacggccgacgccgccagcaagatacccttccactgcctggtcgccgccaggatggacgcggccacggccgccgcggcgaggacggcgaaggcgctcttgagcgaggtgtacttcttgacgctggccctgcactccttgcagtgcacgacgtggcggaagtacctgttggtcgggttgggagcgtgcaccgtgccgacgccgccctttgccgggaacgtggccgagatccccgcgacggcccccgccggcgcttgctcgacgacggccggcactggcggcggcgccaggctgctgtggccgaagtagtagggcatgccgtggcccgccctgtccatccacttcctgtactcggcgacccaggtgtcggaggatcggaggttgaggtagagctcccttgtgggcaccttctccctgatcagcacctcgttctgcgacgacaggaaccccatgtcctgctcgaacaccttgcaggcgttctggtggaagtaccatgacgggaggagcttgacgatgggcgacctgacggtggagccgaagcgcacgatgagcatggacttgccctgccccgcggggcggcagaggaagtgcgcggagaagcactggtccttgccgtccttgtccgtaaactcgagcgtgttggtgagcacgcagggcgcctcgaagcggagcaggttgcggaggtgcggcgtgcgcgtgcggccccagtagcccgcgaacccgcgcgcggtgcgctcggtgacgtcgaagaagagcgcctgcgcgtcctcgcgcttggccgtccagtcggtgcggtcgtgggagatgggcacgtgcgccgggtccatgaggttctccagcaggatggaatggtcgtaggggagctcgtgcaccgtcgacaggtccgtgaacccctcccgcgcgtacggctcgaaccacgggagcttccggtcgtcgggagggttcgcgtccgacatccacacccataccacgccctgcgagtcgcgcacctcgtagttgcgcgcgcacgcgctccgcgggatcttggcgccctcgggcagctgcggtatcttgacgcacttgccctcgccgtcgaactgccaaccatggtagaggcactccagcctgccatcgacgatctggccttccgaaagcttcgctaacctgtgtgggcaccggtcctcgtgacagcggagcacgccgtcgccgtcgcgccagagcacgagctggcggtcgaacacggtgagcgggagcgccgcgtcgtcgggcacctccttggccaagtacagcgggtaccactcttccttccagtcgtagcgccccgctgccgcggtggccgcggcatcatccccctccttggggagcagcaccccgtcctcctgcgcgcctgcctcctccaccaccgccgcccggcacctcctcttcctcctccccccgccgccacccgcccaccgcacgccatggacggctcctcccgctggtgctgtcgccgctgggttcttgagacgtggagctgctgcagccacagcggaggaggggcggaggaggaggaggggcgggagggcaccgtggcagcgggcgtcatggttggcc

SEQ ID NO: 4152 - DNA, 361 bp, Setaria italica
  Peptide Sequence Number=SeqID_70126
ctctcctcggcagaaacggacaccaaaaggtggcagaaacaactaaaacagagctcctcaacagctcccaaaaaaaatacaaaactgaagcaaagatgatgtgcacatgctaacaaggacagaggacgaacggatagagctttcgcattccctctcacacacactatggcctcaagtcatccctttcttccaagcccttcccggcctttaagtacggcattacaagaagagctgaagaaacctatctgcactgaataatggtaaaaaagagacagagaaaagaactgcagaaaccgacgccttcttccaaattccaattccccgcgcaatgcggcaacgccggcgtcttccaagatgactt

SEQ ID NO: 4153 - DNA, 333 bp, Setaria italica
  Peptide Sequence Number=SeqID_70127
cttctctccttcttgcatcttgccagccaggccttctgctctctgtctcggcgtgcgcccacagaccaaaagccagagccttccattctacacacacaagccaacgagagctgcgcgcattggagcggcgccgggagaaatacttgatggcgggcctcgggttcgaggagaccgagctccggctcggcctgcccggcggcgggaacgacgccggggaggccgcggcggcgaggaagaggggattcgaggagaccatcgacctcaagctgaagctgaggcagccggcggcgtcgcccgcggcgcgcgtggaggaggaagcagaggaggatgagg

SEQ ID NO: 4154 - DNA, 522 bp, Setaria italica
  Peptide Sequence Number=SeqID_70128
ccttcttccggaacacgcggcacagcacccagccctcggccggccgcgacacgtcggcgttggcggcggcggcatcgccaccatctggctggacggcggcgcggcggcacggcgcgagcccggcgcccgcgaggcggtactcgtgcatcacccagtccgtcttactccccgtcgggggcttcccccggtagaacaccagcgaccgcttcatgccaaccagcaccgcctgcgcctggccctgcccgcccttggacgccggcgccggcaccgccacggcgacgggtttctccttgccagtggccttccagtaaccggcccccgtggcgcggttcgcgcgccgccccttcacgtacttggcctccttgcacgtgaagaagtagcgctcctgctcgctccaacctgggggcagcaggtcggaggggtcgtgcgccaggatgcggacgtcggggatgtccacggcggccgggagcggggaggacagcgcgcgccgccggaggtagtgaacaaccagctcctcgttcc

SEQ ID NO: 4155 - DNA, 222 bp, Setaria italica
  Peptide Sequence Number=SeqID_70129
gctggcgtaggctgcatttcaccaagataacctgcacctagattatttacagaagcacttggagctgaagcacccaaaaagttactcatcatgatcccatccacaggctgctgcatctcagtgaaagggtggtatctggagcttgctcgacaattatctggctctgactagcgaaagagtttgaacatgcaggactatcagcactagataatcctgcattct

SEQ ID NO: 4156 - DNA, 313 bp, Setaria italica
  Peptide Sequence Number=SeqID_70130
ctggcgtaggctgcatttcaccaagataacctgcacctagattatttacagaagcacttggagctgaagcacccaaaaagttactcatcatgatcccatccacaggctgctgcatctcagtgaaagggtggtatctggagcttgctcgacaattatctagtgctgatagtcctgcattctcttcagcttctttagcacgattgaaattttgtttaccacccttgatttcaaggtagtggacaagaacgatattcatgaaaccctcttctagcagccaatatgtccgtctttggaagttctcattatcctcccc

SEQ ID NO: 4157 - DNA, 276 bp, Setaria italica
  Peptide Sequence Number=SeqID_70131
attgcagtcatgaggctgagctaccaccatagaacaaaagaaatgcaagacttttttttttcgttgtttctatctacagaggaaaaaataggaaaaataatgggcacaaaacaatctgcaaaaatacttcttcgagcacaatactgacggggaaagttacaacaatagactagaacctcctaagttgcaatccaaaccacactcctccaagaggggaccatcgttcttcgcaaggaaaggatcgatccggacccagagcagcgagaagattgaacg

SEQ ID NO: 4158 - DNA, 274 bp, Setaria italica
  Peptide Sequence Number=SeqID_70132
cgacccttgaggaatgggtacaggtggacgatcacccagaacgcgaagaagagcttcccgaacagggggccccacgactcgtacccgttgttgatcgcattggagatgcccgcgacgacaccgatgaagttcagcaggagcagcgtcgtcggggggatcaagagggtcgtccacttgaaggtgtacaactctgagaactcttcatcatccccagcctttgatgtgacggtgaagctggtgtacgaataaccggacaaaagaaccttacaagaaa

SEQ ID NO: 4159 - DNA, 207 bp, Setaria italica
  Peptide Sequence Number=SeqID_70133
ggcgcggggctcgccgtccttgagccccctggcggcgttatacgcgtcggacctctgcttgatgtcgtgctcgaggccgttcgatccttgccttgaactcgtcgtactccttgcggacacggggaacccgcacacgcacccgtgcctgttgttaccgttcgcctgctcgccgttgttccgccggccgtctccgccgccgggcaatta

SEQ ID NO: 4160 - DNA, 510 bp, Setaria italica
  Peptide Sequence Number=SeqID_70134
tatggactcggcgacatactgcgagtcgtgcttgtccgaccagttgaactcgttctccaggtcatcgacgccgtcctccctcctcatcccccgggacacgcgcgcaccctgcaacaacaacggaatccccgcgagacgtgagacaggactccggcaaaatcggcgagcgatcggttgctgcattgcgggtgagggacttgcccttgaggcgcttgaagcgggtcttgcactgggggcagttctgcgtgccctcgcggcgctcgtactcgtagcagtcccggcagatggggaaggcgcactcgttgcaggcgacgaaggggttcccccgtcgggggttgagccccacgtcgtcgccgcaaatctggcacacctgcccgttctgctggttcatcggcttcggctgcaaagcaaaacaaacaaaaatcagcaccgcccccgcgccggagagcagggaacccccgccagcgaggtcggcgaggcgcacgtacccctggctcgccatcgcggtct

SEQ ID NO: 4161 - DNA, 205 bp, Setaria italica
  Peptide Sequence Number=SeqID_70135
ttgttcttggagaagaagatctcgagggaccccgtggaccagcggagcacctggtagaggcgctccgtgaggttgatgggggcggtgccgatgaaggcgtgcgggtagatggagcagtagcgggagcgccacccctttgattgttgtctattccggttaccccgttctaccacgtcctccgttctacggtttgttccgtttactt

SEQ ID NO: 4162 - DNA, 202 bp, Setaria italica
  misc_feature (158)..(158): n is a, c, g, or t
  Peptide Sequence Number=SeqID_70136
ttacaacgaaggaattaattacccaaggccaatggtgtaccatcttgcatgatccagccttcctcaggtgtcttctgcgctttggcaaccaaagcatttatcctcaccttgtattcttcatagtccctcttcatagccctacgctccttaacaaaagnggggtgtatcttgtccttcaagtagtcaatcttctgcgagaaat

SEQ ID NO: 4163 - DNA, 319 bp, Setaria italica
  Peptide Sequence Number=SeqID_70137
cggcagatctattcctgccttattgagaaacaactttgcagatgtagagcagttcatactcaaacgactttctgttcggctcacccataagtatccaccaaaactaataaagaatgctgaacaatcaacacaggcatttggtttctatattcgtggccgaactgcacaaggttgtcacagcctcccgtttgcccaatattgcagtcatgaggctgagctaccaccatagaacaaaagaaatgcaagactttttttttcctctgtagatagaaacacgaaaaaatggaaaaatatgggcacaaaacatctgcaaaaatac

SEQ ID NO: 4164 - DNA, 627 bp, Setaria italica
  Peptide Sequence Number=SeqID_70138
gtaggtccaggctataaccatcataagaaggctggtgccatgaatgcactggttcgtgtctctgctgtcttatcaaatgctccatacctattgaacttggattgtgatcactacatcaacaatagcaaggctgtaaaagaggctatgtgtttcatgatggatcctttggtggggaagaaagtgtgctacgtgcagttccctcagagatttgatggtattgaccggcatgatcgatacgctaacaggaatgttgtcttactttagatgtaagattcagcttccccaacacattaagttatccatgttgttattatcggtgccacgtaggtttttctaacatttgcatcatacagatcaacatgaaaggtttggatggtattcaaggacccatctatgtgggtactggatgtgtctttagacggcaggcactgtatggttatgatgctccaaaaacaaagaagccaccatgaaacacatagcctcttttacagccttgctattgttgatgtagtgatcacaatccaagttcaataggtatggagcatttgataagacagcagagacacgaaccagtgcattcatggcaccagccttcttatgatggttatagcctcgcctcttttctct

SEQ ID NO: 4165 - DNA, 444 bp, Setaria italica
  Peptide Sequence Number=SeqID_70139
tggaaaatccgccggctcaaactgtaaccagaacttcccaaagactaacaagtgcgattcctgaactttgcatgatattgttcaactcactgactaatatttgtatcttttggggtcttgcaggttcttctatgcctcgagtgcgtgcatttacccagaattcaagcagcttgagacaaatgtgagcctgaaggaatctgatgcctggcctgctgaggtgtgtttatctttcagcctcaagatgcctatggcttggagaagcttgcaactgaggagctctgcaagcactacaccaaggactttggcatcgagtgccgtgttggccgtttccacaacatctatggccccttcggaaccatggaaaggtaaatctaccattctctggtgattgagccatacattagctcgattaatgaggcgataattcagtttgtttgttacatt

SEQ ID NO: 4166 - DNA, 405 bp, Setaria italica
  Peptide Sequence Number=SeqID_70140
atcgagtccacgaacgcctccgacttgccgtacgacttcttgggcaggggcaggaacccgtgcttacccttggcgacgacggcggtggcggcgcccttggcggtgctcatctcgagccccggcttctcgtacttggtcttggcgaacatccctcccagcgacgggaagcactggccgccgacgttgatcctcggcgggtcgaagccgtagagcgtgacgcggcggaagaggcaacccgtcccgacgtagatgggcccctgcatgccgtcgagcgcccggagcgtgccgtcgaagaagatgcggttgtggttggcgtacaggtccgtggggtccacgccctcgaaccgctgcgggatctgcttcatgctcggccgcgacagcgacaccgttcgtcctttcgttcct

SEQ ID NO: 4167 - DNA, 311 bp, Setaria italica
  Peptide Sequence Number=SeqID_70141
gagaagcgcccgggcttcaaccacgagaagaaggccggcgccatgaacgcgctcacccgctgctccgccgtgctcaccaactcgcccttcatccttctaaccttcgtactgcgaccactacatcaacaactcccaggcgctgcgcgccgggatctgcttcatgctcggccgcgacagcgacaccgtcgccttcgtccagttcccgcagcggttcgagggcgacggtgtcgctgtcgcggccgagcatgaagcagatcccggcgcgcagcgcctgggagttgttgatgtagtggtcgcagtcgaggttgagg

SEQ ID NO: 4168 - DNA, 852 bp, Setaria italica
  misc_feature (337)..(337): n is a, c, g, or t
  Peptide Sequence Number=SeqID_70142
tacgaaatttaaggactttagaaggtcttggtcttcttcttggttttcctgttaccaaaacagcaacagcagatgcaccactttggccagcagttgcaagtcctcgatggtggcttctttgttttgggggcatcatagccgtataatgcctgtcttctgaagacacatccagtaccgacataaatggggccttgaataccatccaaacctttcatgttgatatcgaaaaagcaacattccggttggcgtatcgatcatgacgatcaatcccatcgaacctttgaggaaactgcacatagcaaactttctttcctagcaaaggatccatcataaaacncattgcttccttaaatagccttgctgttattgatgtagtgatcacaatccaagttcagcaaatatggtgcattagttagtacagcagagactcggacctgtcataggagccaaaaacaaggaataagaaacccaaattatgcttctacaatgcatagaggagtgagagtagacacatcaatcaaggtatatttaccaatgcattcatagcaccagccttcttatgatggttgtagcctggccgtttttctcttgaaacataaaccaatcgaggcagctcattccttccacatcatggccaccgctttgaccaaggaagacctgaatcattccaggatgatcacgaacgttgtttccaggccatggagttccatcctgcattgtccatccttcctccggtaccttttgggctttagcaaccaaggcattgattctgaccttgaactcctcatactctctcttcattgctctccgctccctaacaaagttctgtgccaccttattcttttctaagta

SEQ ID NO: 4169 - DNA, 230 bp, Setaria italica
  Peptide Sequence Number=SeqID_70143
ctcaacaggatagtccacagcaagaatagacaacacagtgtttgcagtgattagtggaggctctttcaatggatccactgtactgacaaagaaatccacaggtgccaacccagaatcttcaccatctccgtatcgtgcagtcagcctatcaacatcagtcatatgtgagatctggtttgctttctcctggatcttggatcaattccccaagtggtatcctatcaatcgag

SEQ ID NO: 4170 - DNA, 409 bp, Setaria italica
  Peptide Sequence Number=SeqID_70144
aggggactagaatacccttagaaatagcgggtctcaccggcatgcagtagatggatctccagccacgacagtgcatcttaaacccagacagaatatcctctgtaactgaaccgtagatccagccaatctcttttccccattcagtttttcttcatatccacagctaatgacatgaatggcttctttaattagcgtagatgggtttgcagattcagggacacccccattctccataagagttgattcaatgaagactgaggacaggccaaaagacttctcaaagctcatctgagagatcagcatggacctctcatactcatcgtagttgtcaatttcccgaagattgaaaatggcagactcaaggtcttctcgccgagagtctctgttgatttccctctcgacttctttc

SEQ ID NO: 4171 - DNA, 1760 bp, Setaria italica
  Peptide Sequence Number=SeqID_70145
ctgaaagcccaattagtggacagatttcggaatatgaagatgctgaaacagataattgtcgagcaagctccagataccaccttcactgagatgcagcagcctgtggatgggatcatgatgagtaactttttgggtgcttcagctccaagttgcttctgtaaataatctaggcgacggcgtcacggagatcgcccaccgccccgttgcctgcggcagcgtcaaggccatcacggaggcacagctcaactacccgtccctcgtcgtgaacctgctgtcccagcccatcacggtgaaccgcacggtgaccaacgtgggcaaggcgaagtcagtgtacaccgccgtggtggacatgcccaaggacgtgtcggtgatcgtgcagccgccgatgctccggttcacggagctgaaggagaagcagagcttcaccgtgacggtgcggtgggccggcgagccgaacgtcgccggcgccgagggcaacatcaagtgggtctctgacgattacatcgtgaggagcccccttgtagttacagggaagggcgagtagcgttcaaaatcagccgcctgcctttgaacgctactcgcccttccctgtaactacaagggggctcctcacgatgtaatcgtcagagacccacttgatgttgccctcggcgccggcgacgttcggctcgccggcccaccgcaccgtcacggtgaagctctgcttctccttcagctccgtgaaccggagcatcggcggctgcacgatcaccgacacgtccttgggcatgtccaccacggcggtgtacactgacttcgccttgcccacgttggtcaccgtgcggttcaccgtgatgggctgggacagcaggttcacgacgagggacgggtagttgagctgtgcctccgtgatggccttgacgctgccgcaggcaacggggcggtgggcgatctccgtgacgccgtcgtccccgagccccagcccgcagaggtaggggatgtagtcatcggcgtggaggtcgtagacaaggccggggtcgaaggcgagcgccgggttcacgtagcccgcgcccatggcgtagaacgtggcgtggcggtactgctcgtccttgatgggcaggccggtgcgatccacggcgtcggacgtcgtcatgatcgccgacttgatcgccgcaggggaccagtccgggtgtaggctcttgaggagcgcggcgataccgctcaggtgcggcgtcgacatggacgtcccggactcgacgaagaaggagaggtcggcgccgccgtcggagaactccgtgtgcgactcgctcggcgcccacgccgcgaggatgttcatgccgggccccgtgatgtccggcttcaggatgcccgggctggccttgctgggcccgcgggacgagaagaaggtgacggccggcgacgggtacgacccgatgaccgttcccctgaagtcgatgctcgccgtcgcgttgcccgtggagttgaggtaggagatgatcttggtgccggcgtcgtagctcacgtgcgacgccgggaggacgtgcgcgtcggcgaaggtggtgtacccctccgccgctctgttcatcacgatcatgccgacgccgccgtacgccgccacggtctggcccgcctcgacgcggccgctgaggcccctgctctcgcagaccaccaccttgccggtcacctcggagccgcggagcacgctgcagtcgcggctggcgtcgaagccgtcggcgcccgggtacacgagagggagcggatccgcggcggagttgttcccc

SEQ ID NO: 4172 - DNA, 1150 bp, Setaria italica
  Peptide Sequence Number=SeqID_70146
ccctccgagcacgcggccggcctgacttcccaccccgttcccgccgttaaacgcctccccgtcaccgccgtccgccgtcgccggcgaagatgatgtccggcggtgggtactcctccctcgacgaccccaaggcctccggatccgttccggcggcggcggggccagatccgccggccatcaggttcacggactccaacctccagaccttcccgccgtcggatgccagggggaagatctccggcgcctaccgcccgcccaccgacgccgacgataccttctcgtccaaggccggaggaggaggaagcggcggtggcagaggcggcagcgccgggtcggacgacgccgcgcagagcggctggttccggatgttctccgtggcggcgtacaagccctacttcgacgtcgacacctccgacgtcgtcgagaggatctgggaatccgtcttccccttccgcggcacattcaccgagaagacctccgagaaccccgacctgtatgggccattctggacatgcaccaccctgattttcgttgctgcatctatcgccacttttgtcacctacctatcgcacaaatggcacaagaaagagtggaactatgacattaacttggttacctggtctgctggcttattctatggttatgtgacatttgttccccttctcctatatgttattcttaagtacttctcagcacctgctggtctggtgcaattgtggtgcctctatggatactctctgttcatcttcattccagcatcgcttctgtcaatcgtgccgatagaaatattcagatgggtgattgctggtgttgctggtttcatgtctgctaccttcgttgctgtaaatctccgagcccacattgtaaattccggcgagcggtggttcctgatcgttgcagggatattcttgttgcagttggggcttgctgtcttactgaaactctatttcttcacgataactgtatagggtcgttacatctatgcttgtattagtcaggaatacacacaaattttccatgtcgaatcgattccatattcattgaacattgatgtaattttccaagtatacatctttcttacatgtagacctttggcagcctccgaaatcgtattacagcagctaaacatgtactgtgattcctaggaggt

SEQ ID NO: 4173 - DNA, 791 bp, Setaria italica
  Peptide Sequence Number=SeqID_70147
ttgatgggcgccgaccccttgaacgccgcccgcttcggcatgcagtacacggagcgccacccgcggcagtgcatcttgaacccggtgagaatgtcctccgtgatcgacccgtagatccaccccagctccagaccccagtcagtcttgtcctcgtagccgcagctgatgacatggatggctgagatcgtcctgagctttgaggataggaagctgcccatccaccacatccctggtccagagggggtccgtgggcgcaactccgacaacactctcatcaaggaaaagcttgggtgggccccgacaatgaagctcaaggatgggcttcggtttacgtacttctggattaaggagcagatcgagaaggagaagacccagggcatcgacatcgcagcatacgggtcctccaaggtggtgtcgacccaggcgcctgtgcagctgggctccctccgtgccgccgacggcaaggagggcctgtgagtccattactcatcactgcgtacggaactgttggagatttgggacagtagagagattatagcagcaaacataccttttatcccctttgggggtttagagaccatcgtgttctatgcagtatttaccacccccattaattttggtgttaacttgcgtgtgtgtttaccttgattattgtactcgatcctttagcccatgatgatggacaataaaattccttgcgttgttactatgtatgatacggcttgttgtaataagccctgcgccaatttacttgtcggtggcattggacttaaaaggaaaaaaaaaaaaag

SEQ ID NO: 4174 - DNA, 1584 bp, Setaria italica
  Peptide Sequence Number=SeqID_70148
ccccccgccgtgcgcgcgctctcgcggcgacgactgggcgacctcagccgccgccctgaaccaggtgcccaggtcctcgtcaggaacttcgccggcgacgagcacccgcccaccagaatggggagcagcgagaagaccgtcagcacttatggtgagtacacctatgctgagctggagagggagccctactggcccagtgagaagttgaggatttccattactggggctggtggtttcattggatcccacattgctcgccgtctgaaaagcgagggccattacatcatcgcctctgactggaagaagaatgagcacatgactgaggatatgttctgccatgagttccaccttgttgacctcagggtcatggacaactgtctgaaggttacccaaggcgtcgaccatgtattcaatcttgctgctgatatgggtggcatggggttcatccagtcaaaccactctgtcatcatgtacaacaacaccatgatcagtttcaacatgcttgaggctgcacgcatcaatggtgtgaagaggttcttctatgcctcgagtgcgtgcatttacccagaattcaagcagcttgagacaaatgtgagcctgaaggaatctgatgcctggcctgctgagcctcaagatgcctatggcttggagaagcttgcaactgaggagctctgcaagcactacaccaaggactttggcatcgagtgccgtgttggccgtttccacaacatctatggccccttcggaacatggaaaggtggccgtgagaaggcaccggctgccttctgcagaaaggctcagacatctaccgagaggtttgagatgtggggcgatggcctccagacacggtccttcaccttcattgacgagtgcgttgagggtgtcctgaggctgaccaagtcagacttccgtgagccggtgaacatcgggagcgatgagatggtgagcatgaacgagatggccgagattgtcctgagctttgaggataggaagctgcccatccaccacatccctggtcccgagggggtccgtgggcgcaactctgacaacacccttatcaaggagaagctaggctgggccccgacaatgaagctcaaggatgggctgaggttcacctacttctggatcaaggagcagatcgagaaggagaagacgcagggtgttgacatcgcggcgtacgggtcctccaaggtggtgtcgacgcaggcgcccgtgcagctgggctccctccgcgccgccgacggcaaggagggcctctgaggccatggactgtgactgatggctttgcttggttcagcactgcatacacacggaattgttggaagatagagttttggcagcaaccataccgttttgccccttctgagattggagacgatcttgttctagcattcagcgccccattataaattttggtgccatcttgttaattgcatgtatgtgttcactttcagtctttcaccgttgtactcctttcatcctctggacaatgatggacaacaaaattcaatcccctgtgctttacactttactgtgcatgttgtacaataaaaatcctgttcttttccattgaaatgtgataag

SEQ ID NO: 4175 - DNA, 1080 bp, Setaria italica
  Peptide Sequence Number=SeqID_70149
cccaacctctcctccccgtgttcgtcgtcgcttcgtcctgccacctcgccgacaaagcagagaatggggagcagcgagaagaccgttaccgcttatggtgagtacacctatgctgagctggagagggagccttactggccgagtgagaagctgaggatttcaattactggggctggtggtttcattggatcacacattgctcgccgcctgaagagtgagggccattacatcatcgcctctgactggaagaaaaatgagcatatgactgaggacatgttctgccatgagttccaccttgttgacctcagggtcatggacaactgtctgaaggttacccaaggcgtcgaccatgtattcaatcttgctgctgatatgggtggcatggggttcatccagtcaaatcactctgtcatcatgtacaacaacaccatgatcagtttcaacatgcttgaagctgcacgtatcaatgatgtgaagaggttcttctacgcctcgagtgcatgcatttaccctgaattcaaacagcttgacacaaatgtgagcttgaaggaatctgatgcctggcctgctgagcctcaagacgcctatggcttggagaagcttgcaactgaggagttgtgcaagcactacaccaaggactttggcattgagtgccgcgttggccgtttccacaacatatatggtccctttggaacatggaagggtggtcgtgagaaggcacctgctgccttctgcagaaaggctcagacatccaccgagaggtttgagatgtggggtgatggcctccagacccgatccttcacattcattgacgagtgtgtcgagggtgttctgagattgactaagtcagacttccgcgagccggtgaacattggaagcgatgagatggtgagcatgaatgagatggctgagatcgtcctgagctttgaggataggaagctgcccatccaccacatccctggtccaggagggggtccgtgggcgcaactccgacaacactctcatcaaggaaaagcttgggtgggccccgacaatgaagctcaaggatgggcttcggtttacgtacttctggattaagga

SEQ ID NO: 4176 - DNA, 3431 bp, Setaria italica
  Peptide Sequence Number=SeqID_70150
aagtcgaactataaagtccattgtattagctatatcatatatggtgtccaacggtgagaacagaccatctagtaacaggaatttacatctagtctggtaaagaacgggtcactgcctaactgatctagtaagctcaatgtcatgaaatagtcgacattggcgcatcaccatcgccccggcacagctcctccagttcagccattaaatcacccccatcggtgccagctgcgtcactcagcatcccatcctgcattgcctgggactcctgcagctcgttaacacaggtttgcagcctgcggtactggtcccttgcttcaggatactgggtcatggaatgcacacgagcgagtgctctttgtagccggccttcagcctgtttcctgccatccttcaagtaatcgtattcatcctcagcctcagactttgcaggttggatctgcgatgatgggccttcaagttgtttctcagcttggaaacctcgcaagccccttctctttctcctccacctcagtatgactttctccacgatgccaacagaccagaccaccttccgatagtttttccttacattatgtcctcgtacatgggcctgtatcttcacaattttctgtcggataatcataaactcctttcttcctttccaccctctaaacttgttttgaatacgaactgcagcagaatgcataggcatatcactgtgtccaggtttcgcatttttaagcgaaataagtgaaagcgtgcgttcatcagataatccacaatcatcatctccatattcgatcactttctttctgtggaatgattccaccctaaaagcttgaaatattctggctgcagcttgagttgatttacgaaccgcaccaagtgaatcttttaaggactcttcctgagaatccacacaagcgagctgagcagaactaggctctgcaaactcttcagctgctgttaatccacctatttcttccacattgccaccctgcgattcttttagtgtaagagctgaaaggtgatttgtcaaagcagactcggcaagaaaaccggctatgcctttgtgtccattttctgatgctaaatcagcaggagtcgcagatgggaactgctgtgttggatctgtcaaagcaccaggatcagctccgtttgctatcagtgcaccaactgtacgctcccttccacaagatgcagcccagtgaagcgcagtccatccacgaatatccctaaagtttacttttacgcctgcagcaactattggttttatagcccaatcatagccaagtgcggctactaaatgaatcacaccttgtccttccttgcctagcacatttggaccttttccatcatcatgtatcttatggataagccaataatacagcttttctttcacctgtttctcaacattctgatcccgtacagtcgataattccttctcaccagaagacaatgccatatttgacaatttatcgtcgagcattaaggaattaatagtgtcaaccaactcagacttatttccattactcaaaacatacttttcatagtcttctggccccagggaaagtaacttgtcaagacgaatatgtagatgcatttcatttatgccagtagtatgcggatctgaagtctccatataatgggtctcagaatcacggaactcaaattctcgcacttcactgcaagctactctgtttgaacatgtcacataaaatggaacccgtccagaatgatgcactggcgtataacaacgcaaggagccatccactaaaacttcagcagctacttcaacatccccaaacatacaagaccacctggaattttccacatcttctttttttgccaagaatgtaccagtaattaagaccttagtcttcgtgccattgtatgcccagcttggagatacatcaatgatgctgaagagctggtcttgggaaagcgaggggctgactacaaatgcatctaactgctcattgataggtatactagatccatcagcaacattcacagtttcagtagtactccagaaagcatcagaactggacttaatatccaaatcagcaacctctgcaagttcattgctcatccaccttgagaagctgtcaaatttcttcaaaccatctggctcaatcttaaagagatctaatgaagactgctttaaaagtggatatctggcactttgatctgtataaccatcattctcagcctgtgaagatgttatgccagcagcattcagcgcgtcaacttcgttttgagtgaggttgttggtgtaaagtgcctcagacataaatgtctgcaaactatcatccagattgttacccactgtagcaacagaagaatagagtgttggctccgtgaagccacctggatattctggaaccggttcaccaaaccgcattgaatcaattggagttttgggaccacctcttaacccagctccagtttcattgaaagcactagatatgtcatcgtgagtgacaaaatgattggtaaagttagctggcgtaggctgcatttcaccaagataacctgcacctagattatttacagaagcacttggagctgaagcacccaaaaagttactcatcatgatcccatccacaggctgctgcatctcagtgaaagggtggtatctggagcttgctcgacaattatctgtttcagcatcttcatattccgaaatctgtccactaattgggctttcagcatccatagattgggaggctacctggctctgactagcgaaagagtttgaacatgcaggactatcagcactagataatcctgcattctcttcagcttctttagcacgattgaaattttgtttaccacccttgatttcaaggtagtggacaagaacgatattcatgaaaccctcttctagcagccaatatgtccgtctttggaagttctcattatcctccccatgtgcatagtagcaatgaagtacatcaacacttccaactttaagcttctcgtgagcttctttgactgtctttccatcctttttctttctccagttgtgtccgtcctttctgaagtatctcaatattttccgatcaaacagaaacagcgaaccacttggaggtctgttcggcggctcaggtgacaatggagaacttcttgtagtttgacaagatttggcagatttcggtgggccgcaaccacctattctgagcttccagcagtatctgagcaatatctgggggctggttggacatggcgtacttgcgaatctccgccatgccacgatccgaccggggccgccgcagccgccgccgccaccgccggctcgaatcgctgggtttgggaggctaaaaatcgcagggctctcgaggggattggggatttttgtctgcgcggcgaggtgcctcacggatttgaggacacggcgccgtcggatctgagacacgcaacaggggaaggcaaggcacacaggggatagg

SEQ ID NO: 4177 - DNA, 2240 bp, Setaria italica
  Peptide Sequence Number=SeqID_70151
ctttcctcaggaatctaccactgtcatgctgcttttgtatctctcctgacagcaaaagtttttttttcttacctcgagacagtaagcagaaatcccagcaatatattgtttgtatccagccacattcatccttagaacttttcttctatgacgaaaatgtcacgaaaacaaattgtgacgaccaaaaacacgcctttacagttcacacacttttaactatagaaactaaccactaatattctgtttttctagtatatatagacgaacatgtaatgagcaagcccttcaatgggcaggcaaacaaacaaacgattcgccgcataaatactgtgcatgttgctctgttccactggcagatgcattcccgcctgccttattcagaaccaggtttgtacatgggagcagcgcagacctttctcttcggctcacccaatcaattttgcgcccaataaagaatgctgaacaataaaacgcttgcatttgctgtattccacggcccaactgcacaaggattaccgcagcctccattttccccactatgtcccagacatgaggctgagctaccaccatggatcaaaagaaacgagacatttcatgtctctatctacagaggggacattgtaaacatttcttcaagcattcggtgatgggggagctgatatgctgacctcctagttgcaatccaaaccacactcctcaagaagcgggccatcattctttgctaggaaaggatcgacccggacccaaaggagtgagaagatagaagccagcagaatggaccagacgatgacaattgttggggtcctgttttgccttccaaccaaacctttcaggaatggatacagatgcacgatcacccaaaatgcaaagaacagcttcccgaagagaggcccccatgattcatatccgttattgatagcattcgaaactccagcaaccacaccaatgaagttcaacaggagcagagtggtgggaggtatcagtaaggttgtccatttgaatgtatatagctctgagaactcttcatcgtcaccaccctttgatgtcacagtgaagcttgtatctacaccagctatgaccttgagaagtccttggaacacagcaaagaggtgcgaggacacacctccaatgacccaaaactgctcattcctccaccaatcatcaatgccaacaccactccatctcatttctaggatgcttgtagcaaaaatacagatgaaaagtgacatgaaccagaggctggcaacattgtttagctctggagtgataaattttcccgtcagcaaacaaatggcaggcaatgtacagtaagccaagaggggaatagacgtccaaggatatacgatggagttgatgtaggaaaacctttccaaaaatttcaaaccaccaccatacccataccaaagagggcaatggttgctgaagaaaatttcaatagacccaagagcccaccgaaggacctgatgaagacgatcagaaagattcaggggtgcagaacctttgaacgcgggccgtttagggatgcagtaaattgaccgccaaccatgacaatgcatcttgaagccagtaagaatatcttctgtaactgatccatagatccagccaatctcttttccccagtcagtcttgtcttcatatccacaactaatgacatggatggcttctttcaaaagagaagctggacttgcactcttcaaggtcccaccattctcaagaagggtggatgtaacaaaaacagaagactggccaaatttcttttcttaatttttgttgatttacaataccagccttttcattttctgctcctggagcagcttcgtcaatttcaccaagagcatatgcaggggattgattttcttctttcttgaaaaataataatctctttttcttctctgttttgggtttggtagtcttcttcttgtgctttctgttaccaccgcagcaacagcaaaagcaccactttggccagcagttgcaagtccttgatggtggcttctttgatttaggggcatcataaccatataatgcctgccttctaaatacacatccagtaccaacatagatcgggccttgaataccatccaaacctttcatgttgatatcgaaaaagacgacattcctattagcatatcggtcatgacgatcaatcccatcaaatctttgagggaactgcacatagcaaaccttctttcctagtaagggatccatcataaagcacattgctttcttttatagccttg

SEQ ID NO: 4178 - DNA, 3173 bp, Setaria italica
  Peptide Sequence Number=SeqID_70152
ctagtcgcaaactcatagttatcactcatgcaaccatatgctgaacaccactgcaaattccaggttccatccatgtcagtgatcttctctttcggtatgaaagtatatcggttcattcttcccacgttcctatgatttacacacacttaaaacattgccttttcacaattcaggcgacttttaacgctttaacaccaaaacttttcgtaatacagacaaaagcaatgaacaattggatgccaaatagtactaatctacaccgcctctctcagatcctgggggcaaaagcccagagacgacagagggaggaaaccaaccgtcctccatcaggcagcgacatctgcaacgccagaaagacatcgccggcacaccaccggctgagcggcggtccctcagcagatgactgtgttgcagttggtgctactgacaggctcggtgcctccgacgaatgggtcgatcttgaccccagaggaggggagaagacggaggcgagcaggacggaccagagcacgacgatggtgggcgtgcggttctgcttgcccatgagacccttgaggaacgggtacaggtgcatgatcacccacatggcaaagaacaccttgccgaagagcgggccccacgactcgtagccgctgttgagcgcgtcggagaagccggccaccacgcccaccaggttgagcaccaggatggtggtgggcgggatcagcaccgtcgtccacttgaacacgtacagctccccgaactcggtgtcgtccgtcgccttggccgtgaccgtgaagttggtgtccagcccggcaatcatcttgaggataccctggaacacggcgaacaggtgcgcggacacgcctccgatgacccagaactgctcgttgcgccaccagtcctcgatgccgatgccactccaccgcagctctaacacgctcgtcacaatgatggagatgaagaggccaagaaaccatatcgttgcggcgttggacagtgtcggaatgatgaactttccggtgagcaggcaaatggcaggcaggcaacagtaggcaatgagaggaagagaagtgaacgggtagacgatggtgttgatgtaggatagcctctgaagccatttcagacggccaccgccgtaaccgtaccaaagcgggcagtgacgactgaagaagatctcaacggaaccaagagcccaccggagaacctggtgcagacgatcggaaagattgataggggctgatcccttgaatgcgggtctcaccggcatgcagtagatggatctccagccacgacagtgcatcttaaacccagacagaatatcctctgtaactgaaccgtagatccagccaatctcttttccccattcagttttttcttcatatccacagctaatgacatgaatggcttctttaattagcgtagatgggtttgcagattcagggacaccccccattctccataagagttgattcaatgaagactgaggacaggccaaaagacttctcaaagctcatctgagagatcagcatggacctctcatactcatcgtagttgtcaatttcccgaagattgaaaatggcagactcaaggtcttctcgccgagagtctctgttgatttccctctcacttctttcaatctttttcttggggcagcagcaacaacaccatgaacagatcgaagactttggaagggcaggtagagatggaggcccataaccgtacagagcttgcctatagaaacaacaaccagttcccacataaactgggccttgaagcccatcaagtcctttcatgttaacatcaaagaaaacaacgttcctgttggcatatcgatcactgcggtcgatgccatcgaacctctgtgggaattgcacatagcagacatctctgccaacagtagggtccatcatgaagcacattgcttcacggacggctttgctgttgttaacatagtgatcacagtcaagatttagaatgtagggagcatttgtcagaacagcagacactcggaccagagcattcatagcccctgcttttttgtggtgttggtagcctggccttttctctcttgaaacatacactaaccgcggaagttcatttccatcaaagtcccgggcaccagtctcaccgaggaaaacctggatcatgccagggtggtcacgaggattattcccaggccatggtgtaccatcttgcatgatccagccttcctcaggtgtcttctgcgctttggcaaccaaagcatttatcctcaccttgtattcttcatagtccctcttcatagccctacgctccttaacaaaagaggggtgtatcttgtccttcaagtagtcaatcttctgcgagaaatagaactcaggagctcgtggctcaatggcatatttcttgcaaaatggaacccactttctagcaaattcggcagtctcggcaagtgattcaaatgtgagcatagcagaaccatcgtcagatacatagcatgagatcttctcaacaggatagtccacagcaagaatagacaacacagtgtttgcagtgattagtggaggctctttcaatggatccactgtactgacaaagaaatccacaggtgccaacccagaatcttcaccatctccgtatcgtgcagtcagcctatcaacataagtctctcgattgataggataccacttggggaattgatccaagatccaggagaaagcaaaccagatctcacatatgactgatgtcatccagagaccaaaggcactgtaaacaggattggtgatacggtagtgaaagaagagcccgagaactaccaaacgcataatgataaccgctctgtaaggtgtgagcttgttctttgatatagggatgacacgggagagtggctcatacgcgtctgtcaaatccttttcatccatgatctgttcttcgacaggtggaggctgtgcttttgctgcagcctttttggctgaggctttcttctcgttcttcttctccttccaactctccaccctgttcttccagatgggtttcccagattcatcattcagttcactaccaattcccgacaggctgctcatggtcctggcatggcttacttcatcctggcgatcattgaggtggctgcccatggtgaccctctcacgcaggccgccggcggcgtggtggtcctccgacctcctccgcttcagcgccctcattgccatgcg

SEQ ID NO: 4179 - DNA, 3489 bp, Setaria italica
  Peptide Sequence Number=SeqID_70153
tttttttttttgttaagaaaaatgtcctttcttttaatttgagtgaactccgatccaccacagttcttacaaccccaacactttatctcactcgatcacaaaaacttagtaaaaaaacaagtcgaatatgagtagaatcctggcccaaaagtgcatgtccaaacgcacggtcgcgtccgtacacgcaaacaactaattaatccatggagcatcagagcagcaggctcgttcagcactcgactccgcacggcttgaggacggggcccttggacttggggatgaaggggtcgatcctgacccagacgagcgagaagatggaggcgaggaggatggaccagagcacgacgatggtgggcgtccggttctgcctccccatgagccccttgaggaaggggtagaggtggaggatgacccagaaggagaagaagagcttgccgaagagcgggccccatgagccgtatccgttgttgacggcgtcggagacgccagcgacgatgccgaccatgttgatgatgatgagcgtgggtggggggcgaccagcagggtggtccacttgaagaggtagagctcgccgaagacgtcggtctcgtcggcggcccccttggaggtgacggtgaagttggtgtcgacgccgcccagcaccttgagcaggccctggaacacggcgaagaggtgcgcggagacgccgccgatgacccagaactgctcgttgcgccaccagtcctcgaggctcaccccgctccaccgcagctccagcacgcccgtcgcgatgatggacaggaacaacgcgatgaaccagatgctggccaggttgttcagcgtggggatgatgaacttgccggtgaggaggcagacggcggggatggtgcagtaggcgatgagcgggatggaggtgaaggggtagacaatggtgttggtgtaggcaaagcgctccagccacttgagccggccgccgtaggcgtaccagagcgggcagtggcggctcatgaagatctccacggaacccagcgcccaacgcagcacctggtggagacggtcggacaagttgatgggcgccgaacccttgaacgccggccgcgtcggcgtgcagtacaccgacttccacccgcggcagtgcatcttgaacccagtcaggatatcctctgtcaccgacccgtagatccacccaatctccttgccccactctgtcttctcctcgtagccgcagctgatgacgtggatggcctccttgatgagcgcggcggggtcggcggcggcgccctgcgggagtccgccgtcctcgacgagcgtggaggcgatgaacaccggcgactggccgaaccgcttctcgaagctcttctgcgacatgagcgacgagcgctccagctcgtcgtacccctccaggccctcctcgatctcctccagctcgaacgcgcgctggtgcttcttgtacttcttgccgccggccaccgacccgccgccgagcttgtccttcttgcttcgcttcctgtagaacccgagcagcccgcggcgcggctcgtcgccggagtctccgccgccgcctcctttcttgtccttgcgcgccttcccgcgcttgccgccgccgaagcagcagcagcagcagcaccacgacggccagcagtcgcacgtcatcttgggcctcttctccggccgcggcgggtcgtacccgtacagcgcctggcggttgaagacgcaccccgtgcccacatacacggggccctggatgccgtcgagccccttcatgttgatgtcgaagaagacgacgttccggttggcgtacctgtcgtgtcggtcgatgccgtcgaaccgctgcgggaactggacgtagcagagcttcttccccagctgcgggtccatgaggaagcacatggcctcgcgcacggccttgctgttgttcacgtagtggtcgcagtcgaggttgaggatgaagggcgcgttggtgagcaccgccgacacgcgcaccagcgcgttcatggcgccggccttcttgtggtggttgtacccggggcgcttctcacgggacacgtacaccagccgcggcagctcgtggccctccacgtccagcgcgccctggctgcccaggtagacctggatcatgcccgggtggtcgcgggtgttgttcccgggccacggcgtgccgtcctgcatcacccacccttcctcgggcttcttctgcgccttggccaccagcgcgttgatccggaccttgaactcctcgtactcccgcttcatggcgcggcgctccttcacgaacgtcggctgcaccttgtccttgaggtagtcgatcttctgggagaagtagaactccggcgcccggggctccacggcgaacttcttgcagaagggcacccaccggcgcgcgaactcggcggtctcggagagcgtgtcgaagaggagcatggacgcgccgtcgtcggagacgtagcagctggtgcggtcgacggggtagtcgacggcgaggatggagagcaccgtgttggcggtgatgatggggggctccttgagcgggtccaccgtggacacgaagaagtcgatcggggagaggcggcacgcgtcgccctcgcggtcgtaacggagcgccaggcgatccaggtaggtctcgcgcgtgacgggggcccacttgggaagctggtccaggatccaggacagcgcgaaccagagctcgcagatgacggacgccagccacagcggcaccgcgtccgtcgccggcgtcgtgatacggaacttgaggaagaagcagagaacaacgagacggagcacgatgacgatgcggtacgggttgatctggctcgacgggatcgggaccttgcgccacagcggctgacgggcctcggcaagcagcatgtactcgtcgtcgttcttgtcgtcgtcgtcgtcgctgtcgtcatggttgagcttgcccctcttctcctgcttggtcttccacttgtcgatgcggtccttccactccatgctcccctccatctccctctcggcctccaggtccttcccggccacgcttccggtgaaggaggacagcgtctgcccccccgtccgccacttctgcggcggctgctccccgttctccgagtagacgtcgaaggcgacgggctcgtggggcttcttggggctcttgacggcggcggggaactcctcctcgaagtcgtccatctccgggccgtcgtcctcgtccccttctaccctcgggcaccctttgtgtcgcttgtagcgggtgttgcactgggggcagcactgcgtgccctcggcgcgctcgtactcgtagcagggccggcagacggggaagccgcactcggagcacgccacgaagggctgcccgtcctcccgcgccccgacctcgtccccgcacacgcggcacgtcttcacgtcggcgctccggccggccggcgcctcctcgtggccgcgcatgacgtgcagctcgtcccgcaggtgcgagcccgcggcgaggccaccggtgtccatggcgcgggggggtgaggatcggagtgtgat

SEQ ID NO: 4180 - DNA, 3496 bp, Setaria italica
  Peptide Sequence Number=SeqID_70154
ttttttttttttttttggtttactatgaatatcatttgatttaacattcaaaccttgtcctttgttcaattcctcgtccaacaattctggatcccagaacattacacaaaacgtagcataagcttcaaaacatcaacaatacaaaatttctaaattgttctgtctccctatgcacaagctccagaattttcgagtcccagacgcgctcagcaattgatgccacactgcttgacatcgggccccttggtcctgacgatgaaggggtcgatcctgacccagagcagggagaagatggaggccagcagcacggaccagatgacgacgatggtgggcgtcctgttctgtctccccatgagacccttgaggaacgggtagaggtggacgatgacccagaaggcaaagaagagcttgccgaagagcgggccccacgactggtacccattgttgatggcgtcggagatgccggcgacgacgccgatgatgttgatgatgagcagcgtggtgggcggtatgaggagcgtggtccacttgaaggcgtagagctcggcgaactcgtcgtcctccgtcgccggtggccttggaggtgacggtgaagttggtgtcgatgccggcgaggaccttgagcaggccctgcacgacggcgaagaggtgcgccgacacgccaccgatgacccagaactgctcgttcctccaccactcctcgatgctcaccccgctccaccgcatctccaggatgcccgtcgcgaagatggacatgaagagcgcgatgaagaacaggctggcgaacgtgctaatcgatggcatgatgaacttgccggtgaggaggcagacggcggggagggtacagtaggcgagcagcggcagcgaggtgaaggggtagatggtggtgttgatgtaggcgaagcgctcgagccacttgaggttgccgttcttgtagccgtacagcaaggggctgtgccggctgaagaagatctccacggaccccagccgcccaccggagcacttggttgagaacggtcggataggttgatgggcgccgaccccttgaacgccgcccgcttcggcatgcagtacacggagcgccacccgcggcagtgcatcttgaacccggtgagaatgtcctccgtgatcgacccgtagatccaccccagctccagaccccagtcagtcttgtcctcgtagccgcagctgatgacatggatggcctccttgaggagcgcggcggggtctcgacgacggagggacgccgccttcctccatgagcgtcgatgtgacgaacgctgccgactgcccgaaccgcttctcgaagttcatctgggacatgagcatctccttgtcaccgtccattccgacatcggccgtggtctccggcagcccgtccttggcgtgcttccgcttcttgcggccgaagcacgggcagcagtcgcaggtcaccatcttgggcctcttgggtcccttgggagggttgtagccgtagagcgcctgccgccggaacacgcaccctgttccgacgtacaccgggccctggatgccgtccagccccttcatgttgatgtcgaagaagacggtgttcctgttggcgtatcggtcgtgcacgtcgatgccgtcgaacctctgcgggaactgcacgtagcagaccttccggccgacctgggggtccatgaggaagcacatggcctcccggatggccttgctgttgttgatgtagtgatcacaatccaagttgagcatgaagggtgcgttggtcagcacggcggagacgcggatcagagcgttcatggcgccggccttcttgtggtgctggaaccccgggcgcttctcacgggagacgtacactaggcggggcagctcgttgccctcggtgtcgtggccgccgctgtggcccaggaacacctggatcatgccggggtggtcgcgggtgttgttccccggccacggcgtgccgtccttcatgatccacccctccgccggcaccttcatcgccttcgccaccagcgcgttgatccgcaccttgaactcctcgtactccctcttcatggcgcggcgttcctggacgaacgctgtctggaccttgtccttgaggtagtcgaccttgagcgagaagtagaactcgggggcgcggggctcgatgctgaacttcttgcagaagggcacccatttgcgcgcgaactcggccgtctccgacagcgcctcgaacgtcagcatggacgcgccgtcgtcggagacgtagcaggagaccttgtccaccgggtagtccacggccaggatggagagcacggtgttggccgtcaccagcgggggctccttgagggggtccgaccgtactcacgaagaggtccaccgccgacagcagcgacggctccccttccctctcgtacctgagggagaggcggtcgaggtaggtctcgcggtcgatggggaaccacttggggaactggtcgaggatccaggagatggcgaaccagatctcgcagatgatggagacgagccacaggccgatggcgtccgggacggggtgcaggatacggtagcggaggaagaaggcgaggacgacgagacggaccacgatgaccatgcggtaggggttcaccttgctcgacgcgatcgacaccttcctcgacagcggctgccgtcgcctcgtcgttcaggggcacgtcggcgtccatgtcgtcgggatcggcgccgccgagtatgcccctgcttggacttccagtcgtccatcctctccttccagctcacttctttcttctcgtcccacttcgcactccctggctcagacacagggtacggatggatgcgcttgtgcagggatgacgagagctcgctgtggccatagccgttggttatcggaaactcaccgctcaccggcacggagcgggagccggtgatgatcggcgggatctgcggggtgttgttgccctcgccgtcgtcgggtcccctcccgtagctcatcttgccgtgcagcatcgcctcggtgatctggctgttctgcatgttgccctgcagctgcttctgcttctcgtcgtcgatgttgaactcgtgctccaggtcgtcgatgtcctcctcgtcgtcgtccccggccaccctcgggctccccttgaggcgcttgtagcgggtcttgcactgggggcagttctgcgtgccctcccgtcgctcgtactcgtagcagggtcggcagacggggaagccgcactcgttgcaggcgacgaagaggtcgccgtccaccgtgagcccgacctcgtcgccgcatatctcgcagacctgcccgctcagcgcccgcagcggcttggggtcctcgtgcccccggatgagcaccagctcgttccggttgtgcgagccggccaccagcccggcgctcgcctccatcgtcgctgccgcacccggcgagcagaggcccgatgctcgagctctcggcctccgatccctccgctgaggtgctcgcgacggccaaggcaacgcaagtgtgagcggtgctctgccttgtggcaggggcttg

SEQ ID NO: 4181 - DNA, 3970 bp, Setaria italica
  Peptide Sequence Number=SeqID_70155
ttttttttttgtctccaatctttcttctttcatcaaaaaatgtcaagagcaactggatacaagagtttctatacgattacagaagcaaaacagcgctgcccaccgcgtcttcggcgactgggcagcagatcatcttacaacacggggtgggcggggatggcatcgctaccaaaagaataacaaactcctaaaaaaacaatcaatctgttttcttgctaatgtaccaactgagagggaatggaatggacacttggacaggacatgctctgcaatgtgcatcatatataacttaactcttttaatttactcaatcaacaaacaattgccggcttcctcctgctccggtcggccggcggcggatcaatccggtgcagaaccagcagcaggccaggcggctgtcttcggtagaagaagaagagctgcacaaggatgtcaccgcctcaccatggaacagcagaaacgccagggtggatctgtgtttctatctacaggaaagaatttaccaaaaaaaaattcgggcgtaattcgcctgcaacggagcttctccaaccacatgcctcttcctcagttgcagtccaggccgcactcctccagcagcggcccatcgttcttggcgaggaacgggtcgacgcggacccacagcagcgagaagatggaggccaggaggatggaccaaacgatgacgatagttggcgtccggttctgcctccccaccagacccttgaggaatgggtacaggtggacgatcacccagaacgcgaagaagagcttcccgaacagggggccccacgactcgtacccgttgttgatcgcattggagatgcccgcgacgacaccgatgaagttcagcaggagcagcgtcgtcggggggatcaagagggtcgtccacttgaaggtgtacaactctgagaactcttcatcatccccagcctttgatgtgacggtgaagctggtgtcgataccggcaaagaccttcagaaggccttggaacaccgcaaagagatgcgaggaaacacctccgatgacccagaactgctcgttcctccaccagtcgtcgatggccacaccgctccatctcatctcaaggatgccggtgacaaagatgcagatgaaaagagccatgaaccagatactggcaacattgctaagctctggtgtgataaatttcccagtgagcaagcaaatggcaggcaatgtacagtagaacaagagcggaatggatgtccaggggtatacgatggagttaatataagaaaacctctccaaaaactttagcccgccaccatacccataccaaagggggcgagtgcttgctgaagaaaatttcgacagatccaagagcccaccgaaggacttgatggagacggtcagaaagattcagaggtgcagaacctttgaatgcaggcctctttgggatgcagtaaatagaccgccaaccatggcagtgcatcttaaatccagtcaagatatcttctgtaattgatccataaatccagccaatctcttttccccaatcagtcttgtcttcataaccgcagctgataacatgtatagcttccttcagtagagaagccggacttgcactcttcagggtcccaccattctcaagaagtgttgatgcaacaaatacagaagactgcccaaatttcttttctagcttctgttgatttacaattccagccttctcaacgtcagcacctggagcaccttcctcaatttcacccagagcgtatgcaggagatggattttctgctttcttgaaaaacaatcttttcttcttctccgtctttggttttgtggtcttcttcttattcttgtttctgctgcagcagcaagagaggcaccacttgggccagcaattgcaagttcttgatggtggcttctttgtttttggagcatcataaccatacagtgcctgccgtctaaagacacatccagtacccacatagatgggtccttgaataccatccaaacctttcatgttgatatcaaagaagacaacattcctgttagcgtatcgatcatgccggtcaataccatcaaatctctgagggaactgcacgtagcacactttcttccccaccaaaggatccatcatgaaacacatagcctcttttacagccttgctattgttgatgtagtgatcacaatccaagttcaataggtatggagcatttgataagacagcagagacacgaaccagtgcattcatggcaccagccttcttatgatggttatagcctggcctcttttctctcgagacataaacgaggcgaggcagctcatttccttccacatcatgaccaccgctttggccaaggaacacctgaatcattccaggatgatcgcgcacgttgtttccaggccaggggcttccatcctgcattgtccatccctcctcggggaccttttgggctttcgcaaccaaggcattgattcttaccttgaattcctcatattctctcttcattgccctcctgtccctaacaaaggatgcggcaaccttgtctttcaggtagtctatcttctgctggaagtaccactcaggagcacgaggctcaatattaaactttttgcagaaaggaacccatttctttgcaaattcggatgtttcagacagtgcttcaaacgtaagcatcgcagcaccatcatcagaaacatagcaggagaccttttcaaccggatagtccacagcaaggatggaaaggacagtgtttgctgtgaccaagggaggttcctttgagggatcaaccgtactgacaaagaagtcaattggagcaagttgagagggttggccttccttgtcaaatcttagtgataaacggtccaggtaagtctccctctcaattggaagccattttgggaactgatcaagaatccaggacatggcaaaccagatttcacagattacagaaatgagccataaagcaaatgcatcgttcaccggatgcatcacccggtagtggaagaagaaccccaaaaccaccaaccggataatgataatcatcctgtagggattaatccggcttgatggtatcggaacttttctggacaatggctgtcgagcttcatccattagcggcagatctgcatcttcgccctcccaatcaccgccgccgtcgctcctggcatgctgcaggcgctcctgctgctgcttcttccagtccttcatcttgtccgcccaggccacgctcccgtagccgtagtcggccagggccttggacgggtccatgggcctcggttgcactgggaggctcggatctgcgaaggggagcgggtggatcctcttgggcccgccgcccatgtaggacggcacaagcgcgtgctgctccggcgggatgtcgtcgaccatctggccgttggtgaggagcgggacgttggggacggggttgaatccgtgcgccggcgtcgccgcggccgtagctcatgtgcgcccgcagcatggactcggcgacgtgctgggggtcgtcgtcgccgccggcgccggcgccgccgccgtggaggccgaactcgccctcgaggtcgtcggcaccgtcctcctcctcgtcgccggcgacgcgggggcagcccttcaggcgcttgtaccgcgtccggcactgcgggcacgcctgcgacccctcccgacgctcgtactcgtagcaggcgcggcagacggggaaggcgcactcgttgcacgccacgaagggctccccgtcgaagcccaccccgacctcgtccccgcatatctggcacggcgcctccgcccgccgcgccgcgccgccgcccccgcccccgggctcgcggcggatcaccaccagctcgttccggttgtgcgagccggctatcagccccgcgctcgcctccatctccgccggatctcgcgcgcgggcgctcccagcagaatgcgcgcggctgtgtcctctcctctagtctcccctgcgggcgccgtctcacatgcgccggctgtgtccgcgcctgcgctctgctctgg

SEQ ID NO: 4182 - DNA, 3866 bp, Setaria italica
  Peptide Sequence Number=SeqID_70156
ggggggggggggggcaggaaggaatgcacaggcccttcaaatgggcaggcaaaggtacactcatcatcactacataaataatgtgcatcttcctctattccagacggcagatctattcctgccttattgagaaacaactttgcagatgtagagcagttcatactcaaacgactttctgttcggctcacccataagtatccaccaaaactaataaagaatgctgaacaatcaacacaggcatttggtttctatattcgtggccgaactgcacaaggttgtcacagcctcccgtttgcccaatattgcagtcatgaggctgagctaccaccatagaacaaaagaaatgcaagtactttttttttttcgttgtttctatctacagaggaaaaaatggaaaaatatgggcacaaaacatctgcaaaaataacttcttcgagcacaatactgacggggaagttcacatgctgacctcctagttgcaatccaaaccacactcctccaagaggggaccatcgttcttcgcaaggaaaggatcgatccggacccagagcagcgagaagattgaagccaagaggatggaccagacaatgacaatggttggcgtcctgttctgcctcccaaccaaacccttgaggaacgggtacagatggacaatcacccaaaatgcaaagaagagcttcccgaagaggggtccccaggattcatatccgttgttgatcgcattggaaataccggctaccactccaatgaagttcaagaggagcagagtggttggaggtataagaagggtcgtccatttgaatgtgtacagctctgagaactcctcatcatctccaccctttgatgtcacagtgaagctcgtgtctataccagctatgaccttgagaagtccttggaacacggcaaagagatgtgaagacacacctccaatgacccaaaactgctcatttctccaccaatcatcgatacctacaccactccatctcatttccaggatacccgtaataaaaatgcagataaaaagtgacatgaaccagaggctggcaacattggtaagctcaggtgtaataaatttccctgtcagcaagcagatggcaggcaatgtgcaataggccaggagtgggatggatgtccaagggtacacgatggagttaatgtaggaaaatctttccagaaattttagcccaccaccatacccataccaaagaggacaatggttgctgaagaaaatttcaattgaaccaagagcccaccgaagaacctggtgaagacgatcagaaagattgagaggtgcagaacctttgaaggcggcccgtttaggtatgcagtaaattgatcgccaaccatggcagtgcatcttaaacccagtaagaatatcttctgtaactgatccataaatccaaccaatatctttcccccagcctgtcttgtcctcgtagccgcaactgatgacatgtatagcttcctttagaagagaagctggactggcactcttaagggtcccaccattctcaagaagtgtggaagcaacaaaaactgaagactggccaaatttcttttctaacttctgttgatttacaatactagccttttcgttttccgctcctggagcagcttcgtcaatttcaccaagagcataagcaggggcttgattttcctttttcttgaaaagtttctttagcttctcgaatttaggctttgaggtcttggtcttcttcttggttttcctgttaccaaaacagcaacagcagatgcaccactttggccagcagttgcaagtcctcgatggtggcttctttgttttgggggcatcatagccgtataatgcctgtcttctgaagacacatccagtaccgacataaatggggccttgaataccatccaaacctttcatgttgatatcgaaaaagacaacattccggttggcgtatcgatcatgacgatcaatcccatcgaacctttgaggaaactgcacatagcaaactttctttcctagcaaaggatccatcataaaacacattgcttccttaatagccttgctgttattgatgtagtgatcacaatccaagttcagcaaatatggtgcattagttagtacagcagagactcggaccaatgcattcatagcaccagccttcttatgatggttgtagcctggccgtttttctcttgaaacataaaccaatcgaggcagctcatttccttccacatcatggccaccgctttgaccaaggaagacctgaatcattccaggatgatcacgaacgttgtttccaggccatggagttccatcctgcattgtccatccttcctccggtaccttttgggctttagcaaccaaggcattgattctgaccttgaactcctcatactctctcttcattgctctccggctccctaacaaagttctgtgccaccttatctttcaggtagtctatcttctgttggaagtaccattctggagcacgaggctcaatactgtaccttttgcagaaaggaacccatttctttgcaaattcggatgtttcagacagtgcttcaaatgtcagcatggcagcaccatcatcagaaacatagcaagaaaccttatcaactggataatccactgccaggatagatagaacagtatttgctgtgaccaacggaggttccttcaagggatcaaccgtactgacaaagaaatcaactggggcgagttgagaaggctgcccttccttgtcaaacctcaaagtcaaccggtcaagataggtttccctctcaataggaaaccactttggaaactgatcaagaatccaagacatggcaaaccatatttcacagatcacagatatgagccatagagcgaatgcatcaggcaccggatgcatcacacggtagtggaagaagaaccccaaaaccactagccgaattattataatcattctataggggttgatcaggcttgaaggaagtggaatctttctggacaatggttgcctagcttcatccattagtggtagatctgcatcatcaccatcatcgttgccacctccgtcgttcctcatctggtgcatcctctcctgcttctgcttccagctctccatcctctccttccatgctacactcccgtagccatacgcagcgagatccttggatgggtccatagaccttggttgcacaggaaggttcggatccgcgtatggaagagggtgaatcctcttccccccgccgcccatgaatgacggcacaagggcgtgctgctccggcgggatgtcatcaaccatctgcccgttggtgaggaggggaacatttgggatgggctggaagggctgcggcacgccgtcgaagtcggcgccgcggccgtagctcatgtgggcgtggagtatggactcggcgacatactgcgagtcgtgcttgtccgaccagttgaactcgttctccaggtcatcgacgccgtcctcctcctcatcccccgggacacgcgcgcaccccttgaggcgcttgaagcgggtcttgcactgggggcagttctgcgtgccctcgcggcgctcgtactcgtagcagtcccggcagatggggaaggcgcactcgttgcaggcgacgaagggttccccgtcggggttgagccccacgtcgtcgccgcaaatctggcacacctgcccgttctgctggttcatcggcttcggccctggctcgccatcgcggcggatgacgacgagctcgttccggttgtgcgagccggcgaccagcccggcgctggcctccatccccctcgccctaccagatctccagatctcgagggggttcctcctctctgtctaccccgccgaccgaccgagggagtaaggcgcgcgcgcgtgcggcggcggcggcggcggctgcaggag

SEQ ID NO: 4183 - DNA, 3590 bp, Setaria italica
  Peptide Sequence Number=SeqID_70157
cagtgtgagtagtctcccccttctcttctctcctctctgtgtgtgactccactccagtagcatgtacagtacagacagacagacaagacacaccccggccccacccgctcatcctctcacttacaagtgatgatccttccttcatcctcttcttcttcgcgtaatgtatataagtagtaggtacatgattaattaccacaggtacggtaattaaaaaaaactaaatcaaatcaacaccatctttcaatttctggacaaaactaaaaaaagaaccaaagaaaaaagaaagaaagggcaaaaaagaaaaatcaaattgtggtggcgggtacgtcgtcgatctcttgtttgtagtagtcttcaccagcagcaggtagaaatggaatggaatataacagaacggaacgtactcttctcttcacggtcgtagtcggttgatcacccaatcggatgtggtatatgtgcttcgatcgatccatcacggccagccgtagacctccgagtaaccgaacttgctgccggcgtggtgtccgtgggcgtgcttccccagcgcgccgccgtgcccgtgcttaccgccgggtccgtggatgtgtgggatgttgatgtagagcacggcggtgatgacgaaggtgaacgcccaccacaccagcaccacgaccggggtcttgccgtgcttcccgaggatgcccttggcgaacgggtagaggtggaacagcacccagaagttgaagaagacgccgccggcgaccttgagccagtgcgtccactcgccgtcgagcaccttggcgaacgccacggcggagccgatgatgttgacgaggatgatgatgatgggcatcaccatcagccacgtccaccgcaccacgtacaggtccgcgtaggggtccttcttctcgtcgcccgccggctgcttcgacgtcagcttgaacgagatgtcccgacggaacaccaccttcaccaccacctggcacacggcggcgaggtacgcggagcagctcgccgtcatccagaactgcccgttccggaaccactcgaagacggtgacgcccgcccacttcacctccaggaccgccaggatcagcagcgtgcccagcacgatggcaaggtacacgtagaacatggtggtgggggcgctgcacgatgaagtgccccgtgacgaacgacagcgccggcaccgtcgtgtagaagatgaggaacagcgccgtgaacgggtaggtggtgatgttgatgtaggcgacgcgctggagcgggtgcaggaacgtgctcccgaacagcgggttgttcttggagaagaagatctcgagggaccccgtggaccagcggagcacctggtagaggcgctccgtgaggttgagtgggggcggtgccgatgaaggcgtgcgggtagatggagcagtagcgggagcgccaccccttgatgtgcatcccggtaccccgtcaccacgtcctccgtcacggtgcccgtacacccacccgatgttgctgccccacccggtcttcttctcgtacgccgccgtcgtcaccgccacggcctccgagatggtcgcctcgtcggtcagcacgccggcgtcgccggtggcgttggcgaacggcgacgggtgcgacgcgcgcgggatcgagtccacgaacgcctccgacttgccgtacgacttcttgggcaggggcaggaacccgtgcttacccttggcgacgacggcggtggcggcgcccttggcggtgctcatctcgagcccccggcttctcgtacttggtcttggcgaacatccctcccagcgacgggaagcactggccgccgacgttgatcctcggcgggtcgaagccgtagagcgtgacgcggcggaagaggcaacccgtcccgacgtagatgggcccctgcatgccgtcgagcgcccggagcgtgccgtcgaagaagatgcggttgtggttggcgtacaggtccgtgggggtccacgccctcgaaccgctgcgggaactggacgaaggcgacggtgtcgctgtcgcggccgagcatgaagcagatcccggcgcgcagcgcctgggagttgttgatgtagtggtcgcagtcgaggttgaggatgaagggcgagttggtgagcacggcggagcagcgggtgagcgcgttcatggcgccggccttcttctcgtggttgaagcccggggcgcttctcacgggacacgtacaccagcatggggaggcggacgtccaccatgctgaagtccagcgggttgtcggcgctcgccggcgggccgaactggcggccgtggctcgggtggttcaccagcaccaggacgatgccggcgtggtcgcccttgcggtggttctccgacggctcaacccaggttccctcccactggttcccgtcggccatccacgtggcgcggggctcgccgtccttgagccccctggcggcgttatacgcgtcggacctctgcttgatgtcgtgctcgacggccgttgatccttgccttgaactcgtcgtactccttgcggacgcggcggcggtcgttgacgaagtcctcctgcgacctccccatgtacgggtgcgacttgagctcgaagtagctctcgggcccgcgcggctcgatcccgtgcttccggcagaagggcacccacacggtggcgaacttggcggcctccaccatggcctcgtaagtgagcagcatcccggagtcgtcggagaggtagcaggtgttcttctcgaccgggtagtcggcggccaggatggagaggatggagttggccgtgctgagtatgggctccttgaaggggtcggcggtggtgacgaagatgtcgagcccgggaaggcgggaggtgccgtccgcccggtcgaaccgctggcggagcaccgcgaggtcggggacgcggttgatcgggttcagtttgggcagctggtcgaggagccaggagaagccgaaccagaactcgccggcgatggacgtcacccacagccactgcgcgtccgggttccggtgcgagatacgccagatcacgaacagcgtgaacgcgatcaggcgcacgaagatgagcaccctgtatgggtggaggaggacgcccttgatcttctcggtgcggaagacggggcggtcctcgatggcgacgccgtcgtcgccgccgtcgccggagaggtcgtcgctgaggtcgacggccacccagctctcgtcgttgacagcgccgatctggccctcggtggcggccaccgccaccacgcggtccatgtcggcggacgacgccgcggaggccaccgccgccgcgcccgcgcacgcgcacacggggaacccgcacacgcacccgtgcctgttgttaccgttcgcctgctcgccgttgttccgccggccgtctccgccgccgggcgccataatgcccgccgcctgctcctcctcctcctcctcctccttggtggtggtggctcttctctctcgaggcaagagagaagagaccggccggggaaggaaagagggaaccaagaatgggaagcgagcaagcgacctctgcgtgctagctctgtgctctggcctcgtggggatggtggtggtggagggaaggggagagaggagctctccgcttctctagagggggagaaggaaggaagcca

SEQ ID NO: 4184 - DNA, 249 bp, Setaria italica
  Peptide Sequence Number=SeqID_70158
ttttatttcaaagcggtcttgtgtttctattcatcgcttctgtcgtgcaggggaggacgaggatccaagaggagctcgtctcgtggccgatgcccgagccccgaggccgttgacctcaagactcaagagctcaggacgcaacgcctcttcttctgcgatcaagtggagaaggagaaggagatgccgccgccgccgcccatccgcctgggccctccgcacccgtacctgaagacccacggaggcaaggtc

SEQ ID NO: 4185 - DNA, 1462 bp, Setaria italica
  Peptide Sequence Number=SeqID_70159
caaatacacacgccacagatgcagcagcagctgctttgcttgcttcccctgacgaacaagcgcgggaagctaatctgaagccacgagcagtagcagcaggcggctaccaagtcttcggccttctcttcgacgaacccccgcggccggaaaacccctggcacccttcccaacctgctctgcctggggaggacgaggatccaagaggagctcgtctcgtggccgatgcccgagccccgaggccgttgacctcaagactcaagagctcaggacgcaacgcctcttcttctctgtcctgtccgatcaggcgatcaagtggagaaggagaaggagatgccgccgccgccgcccatccgcctgggccctccgcacccgtacctgaagacccacggaggcaaggtcgcgacggtgcacctgttcgactgggtcgtgctggccctcctcgtcgccatcgacgtcgggctcaacctcatcgagccgttccaccggttcgtcggcaaggacatgatggccgacctccggtacccgatgaagaggaacaccgtgcccgtctgggccgtgccgatatacgcagtcatcgggccgatcatcatcatcgtcgggatatacatgaagcggaggaacgtgtatgacatgcaccatgccattctaggcctcctgttctcggtgctcatcaccggcgtcctgaccgacgcgatcaaggacggcgttggccggccgcgccccaatttcttctggcgctgcttccctgacggagtgccgaagtacgacaacatcactggaggagtcatatgccatggagtcccgagcgtgatcaaagaagggcacaagagcttcccgagcggccattcttcatggtccttcgcggggctaggcttcctgtcgtggtacctggccggcaagatcaaggcgttcgaccggcgcggccatgtggccaagctctgcatcgtcctgctgccgctgctgctcgcggccatggtcgcggtctcgagggtggatgactactggcaccactggcaggacgtgtttgccggtgggattctcggattggtggttgcgtccttctgctacctgcagttttttccaccaccctctggtgaacaaggattttggcctcatgcgtactttgagcacattcttaaccccgagggcgagggacaagtacagtcaacaaccaactcgaatcaccatcaatcactgtccggaggcccagttgcaatggagatgagaagcacgggccaagaatcgctggattccatagaagaaggccgcagagctcggtgaccggatgctgccgctgccgttatgaacagaattcagtcgttttttcttgtttgatactagatttttcccatttgttaattgcgtcttgtaaataaaggtaggtgaaattcatccacaatgttcgtatgtttgaggagatgatggccaccacaccaaccaacgcgtccgcatgattagcaac

SEQ ID NO: 4186 - DNA, 490 bp, Setaria italica
  Peptide Sequence Number=SeqID_70160
cagagaaatattcgtaattgttttttgatgttgtaaaaaagaaattaacaaagtccatctgacagtctcagtgataatatctgatagactcgttttagtttgccatctggatcatgaatgttagaaatttagtactattcatttgtgccagcaacactgcaactatcactgcaggccatgctttttggaagggccccaggcagcctaagcgtgaccaagccaaaaactaggtgccagtgcagtgtctgaatagcccctattgctttcttaaaacaaagtcagtaagcaatgtgtaccattgagggaaacaatacatagtagtaggaaactgatgcaagcatcctgctcaagtgtttaagacttaaacgggcatgattcagacacaatccccatgcaggttatgtagcaacaggacctatgacgggggcagtgtgcatacatgaatgtaaatgaaccacagcatttgctctaatagtctaggcaagcagta

SEQ ID NO: 4187 - DNA, 228 bp, Setaria italica
  Peptide Sequence Number=SeqID_70161
atgtgtgggcagcgttacaaatgcgcacacatcagagagccagagcctagtggagaagaagcctctggggcaggttctctgcggcctctgcttgcttcgtcgagcaagcgattcatcctagccttcagatcttgtttcgggttcaagaagttgtgggagatagctgtagaggaggagaaggcggcacttcggcggcgcaaagctattcaggattgcagcatcatacga

SEQ ID NO: 4188 - DNA, 381 bp, Setaria italica
  Peptide Sequence Number=SeqID_70162
gcatccctcggcgccgccgccgaggatggcctccatgacggcgcggagctcctcggcggtgatgcggccgtcgccgtcggcgtcgaagaccctgaacgcctccatgagctcgtcctccccgccgggtgcgggggcctgcgcggccatggcggccacggcgtcgagctcgtcgtcggagggctcaccgtggccgaggcgccgcagcacggcctccagctcccgccgcgggatctcggccggggacagcggcatcagcacggaccgcggcgtggaggaccgggcgagcgtttcgtcggaggaggacgaggacgccgacgcgaacgacggcgcctcgctgcgcgacagggagcgcttgccgctcccgtccttcttgccgccgct

SEQ ID NO: 4189 - DNA, 365 bp, Setaria italica
  Peptide Sequence Number=SeqID_70163
agctgccgctactctggccggcgccataaccaccgccaccgccagagccgccgccccatccaccgccgcgggatctcggccggggacagcggcatcagcacggaccgcggcgtggaggaccgggcgagcgtttcgtcggaggaggacgaggacgccgacgcgaacgacggcgcctcgctgcgcgacagggagcgcttgccgctcccgtccttcttgccgccgctccacgaccgcttcggggacgggagggagagcttcctggccaaggactggacggagagcttcatcttctgctgcgccgttgctggcggtgggaatgggtttccgggaggctcgggaatgggggaaaggcggtggtggggtgg

SEQ ID NO: 4190 - DNA, 297 bp, Setaria italica
  Peptide Sequence Number=SeqID_70164
ggttccgctcctccagcggccttggcaaggccatcaacgttgccgccgacggccggatctacacgggccaccaagacgccaaggtccgcgtgtggcggcgggcctcctcgccgccggaggaccccgcggctgccgcgcaccgccgcgtgggctccctcccgcggctccgcgatgttctcaaaagctccctcctcccatcgcaatacgtcgagacgctccgccaccgcgcgggggagacggaagcgacgggggtggccagcgctgccggaaccatgcttgccgagtgctgtcgccgct

SEQ ID NO: 4191 - DNA, 510 bp, Setaria italica
  Peptide Sequence Number=SeqID_70165
agaaattagaaggaaccaataataatggcttgtgatagagaaagggtgttaaccactcatcatatttaaacatttccaaattggggacaaagtttccaaccatttcctggggataagaagcctatcatggactggcagaaatctcacaaaattaggttctaattgagcaaaatagtgaggtggttgaagacttgatgttccttttctgtcagaatgattaaggattaggatccttcaaatctggccttaatggtggagctaaccacctatgcactagcttttctccatcatacagggcaccatcaccagaccgcagaacaaggcaacctgcacatggtctgcggctttctttatatttcttctcctcttcaaagaaagaaattttgtccctttgcccccacccactcattgcagagtatccaaatccataatccattgattaattagtgcctggactataggattccgcttgcgtgtgccattctccacgctgctatatagatgctggtt

SEQ ID NO: 4192 - DNA, 523 bp, Setaria italica
  Peptide Sequence Number=SeqID_70166
acggtggcgggagctaggggagggcggcgtggctcgccggtggcgggatccaggggagggcggcgcggttcgccggcggctggagccaggggagcgcggtgcgcttgtgcgtggaggtaggagtgggagcgattccatccagtaccgagggtgttgggctggtattgcgggtgatggggtgggagtgggctgaatgccggctggtattgggctccatttccaattccgaattccagagcatccaaacagccgacattcggaactatcaatgccaattccgaattctgaggctcaatatctacatccaaacgctaccttaagtttatgccaattcatattccctccaagctggttgaccgagtgacattactatcatgcggtgttcgtcatgtctcagctcatcgcttatagcatggagaggtgagaggtgtaatagatacaagtgtgagtaattgtaccagagctcacttgagtgtagaataaaaaggacaacggtggttagatttgaggtgagcagattttg

SEQ ID NO: 4193 - DNA, 744 bp, Setaria italica
  Peptide Sequence Number=SeqID_70167
ctcctgtgtgtctcggctatttgttacttgtttctctctcttatctccatttgcttaatttgcatctgaattcttgttgcacatagctctcctttttcatgagaaagcacctacggaatactagctaggatgtggcattcctacttccttttcagctgtaactgttttgtgcctttgctttccattttactcgtttgacagtactaatgcagtgcctgtttagtatgacacctgtgcttatttgagcttattgtaggtgaaactagagcaaggtctggagatgctgaagatctttaagaaccatgatgatgatgcatcaatccttgatgatttttacttttatgaggagcgtgagaaagccctgcaggaaaataaggcacgccttcatcagcagcatatacccagttctattgctattgaacccagaaacccttgactgtgcccactgaccttgttggccatatcaccaagagttttgctcaggctgtgcggcttggtgaggccaaggccgtaagcccttcggctgagaaagtgtctgggggcgattcatctgttcctgtgaagccagtcgaagttaagcagagtggtctatcataggagctcttgatcgatgcgattgggctgtactcgaagtatcattcctggtctaaatgttgggacagaatatgcagatggatgttactgaaaactaagcttccatcaaggctggcaaagatctatcctagtgtacatgaatgcttgacc

SEQ ID NO: 4194 - DNA, 859 bp, Setaria italica
  Peptide Sequence Number=SeqID_70168
acacctgtaccgactgctgttagtggagatgggtgagacaatgataccgactgacccaacacaaggaggtttattgctgatactctgagtccgaacagcttcctttttggcccaagacctgagtggttcagatcttcagaaggagctgggtcatttccatcacctgcagcttcacctcaacctgctggtggtgtttcaggggccattggccaaagcaactttccaatggcttcaggaatggtattctgttcacactgtgtttctctcccctcaaataagatttaagagttcatgagtgtcatgggaatcttgtggttgctcgttcacttcagaaacaaatctagcttaacattatccaaagaagaacaatgtaaaaacctaccctttggtatatagtaactaatgctttttgatattcgttgccaaaaatgcatgtagttgatatttaaacctcagatttgattgttgccaccagctgcgattcaaactctgctcttgcctgcatccatctgccactgctcaccattcacttggaattccaagttgctgtttttatgctgatgcatataatatgtcaaaaggactggaaaatcaattctaaaagacagggatgtatgcgatcagttgaatttgctcgtggatctgccatttgatatttattcggttccctcaatttcagccatcgcctcaccagaagcccttctacggttttggatccccatctgactcctttggacgaggtttctctcatggtgggatgttcccacaggccagtaattatgggggatccttcctagtctttggccttaatggtagaagttcatttccatcgagaaagggcgcaggagaggagggtaat

SEQ ID NO: 4195 - DNA, 2469 bp, Setaria italica
  Peptide Sequence Number=SeqID_70169
cccttttctctcctctcctctcctcatcagatcacgagccagccaagccacagacaggtgtgggatcccgatcgagcccgatccgatcgccagatccgccggcctccgcgccgatccgggcgtcctcccaccgctcctcttcccctccctatcgtagcaggcgcgcgcccccgtcgctcactggagcggagatccctcccagcccccggactgatcgattccttcttattattgccggctccatggagaagcaggagccaatagctgatgttgaacaaaagattggtctcactgagaagcctacagagcagcctgttcccggtaaggatgataaagcaactctgcccccaatttcagttgattcaaatgctattgatctaccaagtgaaggccaaacccaagctggtacatcaaacatagatggggaccataatgctgcatatccacacaacttctatgcttctcaggcacagccattctattaccaaggatacgaaaaccctccacaagaatgggatacataccctccttacatgagtgttgaaggattggaagtgggtccaacagttgtatacaatgaggacccttcattgatgttccatggtggctatggctatgatccatatgctcattattctcctattacaacacctgtaccgactgctgttagtggagatggtcagctctactcccctcagcagttctccttctcggctccttactaccagcagtcagtaccacctggcatgccatatttaagctctcctactccaatatcacagggtgagacaatgataccgactgacccaacacaaggaggttttattgctgatactctgagtccgaacagcttcctttttggcccaagacctgagtggttcagatcttcagaaggagctgggtcatttccatcacctgcagcttcacctcaacctgctggtggtgtttcaggggccattggccaaagcaactttccaatggcttcaggaatgccatcgcctcaccagaagcccttctacggttttggatccccatctgactcctttggacgaggtttctctcatggtgggatgttcccacaggccagtaattatgggggatccttccctagctttggccttaatggtagaagttccatttccatcgagaaagggcgcaggagaggaaggggtaatgctcttatttgcagctgcaatggtccgctcgactttctcaatgagcaaagtcggggcccgcgtgctactaaacctaagaagcaaccagagggtgacagtaaggatgagaagccttctgcaggagttggtcgcgagttatacaacaagcctgactttgttatagagtacacaaatgccagatttttcataataaaatcgtacagtgaagataatgtgcacaagagtgtcaaatatggtgtttgggcgagtaccacaaatggaaacaagaaactggactcggcttatcgcgaagctaaggagaaggaagagcagtgccccattttcctgttgttttcggtgaatgctagcgcacaattttgtggtgttgctgagatgattggaccagtggattttgagaaaagtgtggattactggcagcaagataagtggactggtcagttccctgttaagtggcacattgtgaaggatgtccccaataacctcttccgccatataattcttgaaaacaacgacaataaacctgtaacaaatagccgagacacacaggaggtgaaactagagcaaggtctggagatgctgaagatctttaagaaccatgatgatgatgcatcaatccttgatgatttttacttttatgaggagcgtgagaaagccctgcaggaaaataaggcacgccttcatcagcagcatatacccagttctattgctattgaacccaagaaacccttgactgtgcccactgaccttgttggccatatcaccaagagttttgctcaggctgtgcggcttggtgaggccaaggccgtaagcccttcggctgagaaagtgtctgggggcgattcatctgttcctgtgaagccagtcgaagttaagcagagtggtctatcataggagctcttgatcgatgcgattgggctgtactcgaagtatcattcctggtctaaatgttgggacagaatatgcagatggatgttactgaaaactaagacatccgtgaagatggcttcttgcgcgtttggtcaagcattcatgtacactaggatagatctttgccagccttgatggaagcttagtttcttataaatagtttctccttccctccatccttccgtagtatttctcaccttctctctgcatcatatgatgattccttagtggctagccttaagaagagctgcagtttttgtgcaagcctctgtaagtttccctgttcgatcgcatatgaataaggtcattttgcttactttcaagtaaaaatcccgcttatctgctgttctgtgactgtttcaccctt

SEQ ID NO: 4196 - DNA, 1028 bp, Setaria italica
  Peptide Sequence Number=SeqID_70170
gtgcaaatgccaagagacaaccccaatagtaagcagactcaaccaaaatgcgaccaatgccagcttaaaatttgaatccttggtacgttgtagtactgagctccattggcaagtgtggtcactgcgaaatgctgagtgctggtcacccacaatgcccaagtcccaacattgtgctgctctattgaaactgtgatcactttttgttcagaagaatgagtactggagcaactggcctattgaccatttgaagtttgcagctcgcccaggtatcaagcggaaggcttgacgcaaatgattcaacaacatcgagttcatcccttccacctggatgcccgatgtagacaagaacacttattagtcccccagaactgagaattctgctggcagcttgcaatgctagctcagttgtcctaggtactgtgattagcgttttatctcctcctggaaggtagcccaaattgaaagctacaagcctgacaggagcatctttgggaacaatttcctccattctactatgacatatcggaaatagctttactagttcccgctgatggtcatcatccacagccattttcagaaaagaggaagtgctctctattgccgaatcttgaatgtccatcccatacacacacccctgcgctctttcatcagccaccatcttaagcaaagcaagcgtgtcgttgccattcccacatgtggcatcaaccactgtatcccctttccgaacaatacttctccacaccctaaccataaaaacacacacaaaattagctactggagaaacatggagatagtttcttttacacatctcgcttgatttctatactgtgggcaatggagtagatctccttccacagctctcagtagtacataaggctaaaattggagtgcaaggctagcttcagaaaatattccatgatgtttcagcgttggatagaagtttacagcatacacatctaatcaaaaatggggactagtacctactaggcctgccactggggagggtatggacaaacccactcttgtta

SEQ ID NO: 4197 - DNA, 549 bp, Setaria italica
  misc_feature (533)..(533): n is a, c, g, or t
  Peptide Sequence Number=SeqID_70171
attaaaagtctggcatgtggacagcaagatggggatatggtgctaggtcatggtggcactatgatatgcaggggacaggggtcatgtaggcttaactgaatatttgtctcatttagaacaactgctcatcactagctggtcacttcacaccagaagtctcatcaatttaagatgaatatagatgagaaatatcgaacaaatacctgatggttggtattaggtgacaacttacaaaagtttacgcatgttcttataacactctcattcactcaggtgtgccttctaccgggaaatgtcttgaccataacaatgtcgaaaccatatggatttcgctacagaagtgggcagtacatatttctccagtgtccaacaatctctccatttgaatggtatgcctgactcttcattcaccaatcaccctcgccgccaatataatgtcctttggtactgttatccctgatactctgttccacacttgcaaggcatccttttccatcacttcagctcctggagatgactacatcagtgtccanatccagaccagggggg

SEQ ID NO: 4198 - DNA, 1248 bp, Setaria italica
  Peptide Sequence Number=SeqID_70172
tggtcacgctcatggccgtctccttcaccctcgccacgcgccccttccggaagcgggaggagatggccaagggcgccgccgcagccgccgccggcggtggcggccggcggctcctccggtggtcgttcccgctcggccacctcgccggcttcaacgccttctggtactcgcaccacctcctcatcgtcgtctacctcctgctgctcgtccacggctggttcatgttcctcgtcgacaggtggtaccagaggacgacatggatgtacatttctgtaccattggtgctttacgttggggagcggacgctacgtgccttcagatccaaggcgtatgctgttaagatcctcaaggtgtgccttctaccgggaaatgtcttgaccataacaatgtcgaaaccatatggatttcgctacagaagtgggcagtacatatttctccagtgtccaacaatctctccatttgaatggcatcctttttccatcacttcagctcctggagatgactacatcagtgtccacatccagaccaggggggactggacccaagagctcaagcgcatcttcgttgagaactacttcacgccatgcgtgcccatacgagctgcattcggggagctaggcgcggcggagcagaagagtccgccaaggttgctggtcgatggcccctatggtgcccctgcgcaggatttcaggaactatgatgtgctactcctcgtcggtcttgggatcggcgccacaccttttatcagcatcctgagggatctgctgaacaatatcaagctggctgatgagctgatggacctggcaatggagaccagcaagtctgaggacagtgccaacagcttgtcgaccgcgagcagcagcaacaagaggcgggcgtacaggacgagctgtgcgcacttctactgggtcacaagggagccaggatcattcgagtggttcaagggggtgatgaatgaggtcgctgaaatggacaagaagggtgtcattgagctgcacaactatctgacaagcgtgtatgaggagcgtgatgcaaggacaacgctactgtcaatggtgcaagccctgaaccatgccaagcatggcgtagacattgtatcaggcaccagggtcaggacacattttgcaagaccaaactggaaggaagtcttcgcaagaatcgcttccaagcacccgaattccacagttggggtgttctactgtgggagacctacacttgccaaagaattgaagaaactgtcacttgaca

SEQ ID NO: 4199 - DNA, 504 bp, Setaria italica
  Peptide Sequence Number=SeqID_70173
taaccaaccactagcagtttagcatgactcaagtgaatatagttctgttcataagattttattatgcatgcaggggtgttctactgtgggagacctacacttgccaaagaattgaagaaactgtcacttgacatgagccacaaaacgggaacacgcttcgattttcacaaggagtacttctgatggagaatacactcctgaattccatagtagtagtagatacggataaaacagccacaaattttgcatagaagcaaactgaccctcttcaccatatgtaaatgtacatagtacaaggcggagggtagttagaagcatttttattaacaaaacgggagggtaaagatatttcgtgtgttctcagacaggcattggttactggtttactacaggtatacatgtatagctcatagctactcattgtatgctaagcatacaagagactgaggccaccaatctgaatgtatatcattcaattagtagttcattcgttactttatactc

SEQ ID NO: 4200 - DNA, 807 bp, Setaria italica
  Peptide Sequence Number=SeqID_70174
gtttaacatcatgcacacacctgatcccgatgaggacaaggcattggtggattgcacttgatatgagaaaaaagactctaaaagatgtggctgattttggctctggaaggcctctgggttacactttcacctaccttcaaagtgggatctccaagcatctgaacatttggtcctcctccagatctgggaggaatgctggtgaaacaagtagggatggatgtctggggccatgcaagctagaagttctatgggtgaacgctgaacagcagccaaacgcaacctaagtctaaacttggaagcaaagcacaaagggtactacttagcatggtgatcactaaattggtgtgcaagttgaaacaaagcccttcacacctcacccgtggtgtgatgtctatgaggtgttgcattattgatggacctgtattacattagcttgcatcgtgtcaactatgtttgcggactatatttgttagtcatcgaggactatgtggcatgctagccgtgtgagggctgttatttatggatgaatgcatttttttaaacacatatttcattacctatttatggatgaatggccattgtcaacaatatctaagcatcttccgagggtcctaggagtgctgctgacctctctgcatgatgtatggatgtctgcatggtgtaattcaactagtttgtattatagagttcacacctgtaattgtactaaagtgggcatccgggatgagttggtacaatcggggtgtgttttgttgcttttagttaattacaattttagttaatttaatttagaattacaaaaaaaaa

SEQ ID NO: 4201 - DNA, 1673 bp, Setaria italica
  Peptide Sequence Number=SeqID_70175
atgcaagctaatgtaatacaggtccatcataatgcaacacctcatagacatcacaccacgggtgaggtgtgaagggctttgtttcaacttgcacaccaatttagtgatcaccatgctaagtagtaccctttgtgctttgcttccaagtttagacttaggttgcggttggctgcggttcagcgttcacccatagaacttctagcttgcatggccccagacatccatccctacttgtttcaccagcattcctcccagatctggaggaggaccaaatgttcagatgcttggagatcccactttgaaggtaggtgaaagtgtaacccagaggccttccagagccaaaatcagccacatcttttagagtcttttttctcatatcaagtgcaatcaccaatgccttgtcctcatcgggatcaggtgtgtgcatgatgtaaacaacatcagcgtcatgcaagctcagagcagggtaacccgcacagagtctcatcaaggttagctttgtatttttaacctgtttcagattaggcagcatcagcattcgagcaaacttggggctgtccactgggatgtcagaaaatttgaaagtgcagtcctcttcccagttgttcccagaaccaatatctgaaattttcattttctttgttgcagccaccaaatcttgagttgcagacgtgagtccagagcctggtctgacgtcgtaactcatctcgaaatacttgatggcaatctccaaccacaacaatgtcccggaaacacatcggataacccttgagcagcttgggcaccagtggcaatggtaatggaatatagcgaagactatggttgtcccggagaaggtcacagataagcatgccccgccagagatcgacccagcccactgaaccgaactcacctccgatggtgaccgcaatgtttggatatgaataattcacataattcactgaatcaacaaactgattctcagtgttccatgtacctgtcttggagttgtacaggtggagatcaaatcgcttgccgttcttaggatcgatgatcctatgaagcagggcgaagtagaacatatcttggtcgcggcaacgcaaaagcacaacctcgttgttggagaacttgatgtcgcacgggatgggtaacatcttaagtgacggccggttgttctcggtgccggcctggtagacgaagtagtggcagctctcagcgtcgaggctgtcgtcctgacggaggatggggatgcggagcaggacgaggtcgtcctccgagtagatgaccgtgggcaacttgtagaacgcggagggcttcacgtcggggcaatggacagtgaagcaggagacccgcggcgggctggccgcccagaaggtgacctggattctcttgccgtccgccgtgaagccatcggcggtagtgccgttgaggcgacagctgaggtagccgtatcggtcgaggaggatcgactcaggaggaggagaacccggatcctcggtgtggataagcggagggatcctgaggaacggattgacggacgagtcggccatgggaagatctggtgtgtgggcggagcggggagagtcgacgcggaggtgaggggatcggatctgagcggcggtctttggtcttgtccgtaaaggttaccgtattgttatttttgttttgttttaggttttagtttattttcgttt

SEQ ID NO: 4202 - DNA, 1740 bp, Setaria italica
  Peptide Sequence Number=SeqID_70176
ttagagcaaccaatcacaccttccatttatcaagagtaacctgttaagaatcaactatacagaattacccacccttccaagaactacatgttatattatatacatccactccccaactaaatcaacagaaacaccattaccgatgtctcataatcaagctacacgacttccccttcaaattttaaatgcacttccagtcttatagtttctcaacccatcaatccatctccaagtatagaacatcatgtttgaagtgggggtctctttaacatcatgtttgaagctggtgcagacacgtggaaaacaaaaaaccagcgcgtttatctaaaaggagaaccttagcagtgtgtacctcttgaactgaagatgcgtaaggggcactacaaccagcacaaacaagcaataacttatgccatgggtggctggaaaagctgggctgattccagaagacccaaaacaaagccatgcacctctcaccaattgttgtgaatggtgagctattccccaaaggcaaaccttacttcagtcttaagatgtcctatcaaaaacagaagctgcccatatccctactgatttttgtagaatggtactcattgtaattcagatacccccagaaacgggaaaggccaagctccccatattttgaagacttggaatgcaaaatatacatatctttgatgttaccctcaaacctcgttctaattgcatccacctgagagaagtttataagagaatgcagattactgagttgattttctggtaaatcacaagtgttaccaagaatctgaaaacatgatcgtaactccaaagccagacgcagcatgcttttgactattgtggcaacttgttttgactcatcagataggaaacatatgtcaagtgcatcagtaatataacacatatgcacatactccagatccagtatatctctcacctgatttttaagggaatgttgaaaacgacgccatgatatatcagataaatggcaatggagatactgctgtagtgttgatagaaaatgataagctttatgcctcactctcattacaaaattcaatttcttcatcacatcaggtctactatggctggagcgactgatgagctgtgtcaactcctttagaaatctccatacttcagttagtgagaacaccgcaaacctgacttgaagaagataacagaatatttcagcatatattttaagtgtgtcttctctaatgacaatattcaccggccattcagctttataacccaataagatatcatccagcaaatcaagaccacatgcagaggcatcaaaggaaaaaatgggttgctctctcatgtatataaacaatctttccttataaggatcataatcgcatgaagacctctgcaaagccaattccataagcccttggatctctgctcttttctgctcaggcttaacgaatgaccatttcttatgataaattgaaaaataaaggaatctgtccagtcagctaattccatgaaatgataccgccgcagagctagcagatgtgcatgaagatcaaacccctcctcaagcaatttcattgtgaagctgctaacatatttatattgaagcaaaacttcttgcatgatgcacttctcaataacaatatcaaggggcatatcaaactccgagctaaaatccccagctgttttttcttttgatttatcattatattgtaatgacttctcccagaatgcgccaccagaagcactttcttgaagattaac

SEQ ID NO: 4203 - DNA, 529 bp, Setaria italica
  Peptide Sequence Number=SeqID_70177
caaaaagccaatctcgtagcttgtagtttacctttttctttccatagccattactctctagccactcgataactttctgagcagcatctttggaaagcattccgttaatatccaatccagatgaagaattgcatgagtttatcatgataccatcatctgcatatgcctcagctggatcacaactgccattgggtggacttacaaccttaatgattggaagttcatattgcacggcaaattcatggtcacgggagtcatgtgcaggaactgccatgatagccccagtgccatagcttcctaaaacataatctgccacccatattggaatgatctccccagttgctgggttcttagcataagaaccactgaaaacaccagttttttccttctgaagatctgttctttctagttcactctttcttgctgcgagttctttgtatttcttgacgtgttctcgctgttcctcagatgtaagagatgacaacaaaacatgctcaggtgccacaacaagatatgttgcacctaaaaa

SEQ ID NO: 4204 - DNA, 871 bp, Setaria italica
  Peptide Sequence Number=SeqID_70178
actgattccacaaagaaaaaaaaactagagcatagatccttcgttgtcctaaaaattttactttcctagctaacctcaaagaaatcaggtaggcaggctggcaagaaaaggggttacagtctataacttgccacttgtaaatccaataactcttctgtcagattccagaatgccgtaactgcctgtgagttcagtaaacaatcctacatatggagggaagcatcaagtttttttcaggtactattttttttcccacttgatacatatatatgtacttggcatttgcattggtggcagtacgtctttgaaaggagcaggcatgacagacaagattgacagcatggttccaactgctaaggcctgtctacatattctagtttagagaaagaaaacaatttcccaagatgtcatgcattgcatcctctgctggtgtattttccaacggagcaataggcagactgatggaggttccaaaggcacacgcagaggaagccacggagcaaaagcataggaatatgcctgacacatggatctgcatctcgaaggtacagaagaacacaacatcgatggcgggcacatgcgcgtgtatccaccaaccatttaacagtaagcttatacggtaaatgatgcgcgctctgacggaaaactggggggaactacctaatcgggacccctttctcctcagaaaagcataattaactgggacccaaagaacagaggtgcatgctccaggaagtatggagcatcggcttgagcctactagcggcaacgcatcctgcattttcatgagtgatgtaatatgatgattcagccgttatatacttatatcctgatgaatcatcatattactctaatcggcaattaaaccagg

SEQ ID NO: 4205 - DNA, 281 bp, Setaria italica
  Peptide Sequence Number=SeqID_70179
tccttcagagcatcccattcagattttatctgatgcctgtagctcgatatgctgaaagtaacatcagcagttacagcagaaggtttaacttcaccaatgtttggctgcttcacttctttaatcttaaattccttgattggaacagccattctggaccatccacggaaggcagtctctccctcattgttgatatgagcatgtagatgaggaacagcttcctgaatatcttcaccgatttcataggttgattcaagacgaaacagattgaaatttcttaacaa

SEQ ID NO: 4206 - DNA, 648 bp, Setaria italica
  Peptide Sequence Number=SeqID_70180
gggaggagtgggtgggcctgggcacgctgttccgccgcctggtggagccgctggacatcgccaactactacaggcactccaagaacgaggaactaccctcctacctctccaaggggcggccgcggcggtacaagtacacgcagaggtggcacgagcagctgcagcgcgcgcccgtcgggtccagcctcgagtcatgcttctgggcggtggtcgaggagctccaggccgagatggccggcggcaggacgttccaggacctgagggatagggtggtcaagctcgagagcgatgcgcatggatggtataactctggaagtctgggcaaggacgtgtttctggggagctcttcttttgtggcgtggtggaggacgctccccgaacagcacaagtcggcgtcctgcattgcgaaacttgtgtcgttgtaacgggattttcaccgacgaggtagctgttcctcgtcttgtgggaacagatgtagatgtatattgtagcctcagatccatgtatgctgctctgtatgtagtatcttactatcttttacaataggcagacacggtggtgttagttttcaacctgtctagttaactcataaatcaaagagatcatgttcggaaactggtgcttgagattcttagtgttcaatgtcaa

SEQ ID NO: 4207 - DNA, 1077 bp, Setaria italica
  Peptide Sequence Number=SeqID_70181
gcttccgcctaccccaagtcccagacccccacctcctacctctgcttctgctccaagactgcagacccggctccggacccctggatcctcccccactcctgcggcgatgtttgcggtcgccgcctcaatgcaaatctcgactccggctgtgaacacacctgcctactgctgtgccacccagggccgtgtccaccatgcccggctgttgtgccaaatgcgccgtgcttttgtggggcacactgggagcctcgacgctgcgcacatcagcgttactcttgtgcagggaaatgtaacaaacgtcttagctgtggactccaccggtgtccggtgaattgccatgatgggccctgcccgccgtgtgcagtgcgggggaaacacaaatgtgagtgtggagagacaatggaggagaaattgtgctctgaaagggttttccagtgcaagagggagtgtggtgggatgttagattgcaggaagcataagtgtgagagggggtgccatgggggtaagtgtggggaatgcccactccgaggtcggcgcacttgcccgtgtgggaagaaagattatccgaagttggagtgtgatgcagaggctgccacatgtgggtctacttgcgagaaggtgcttggttgcggacgacacaggtgccctgagcgctgccatcgtggtccttgtgatgagacttgtcggcttgtgatcacaaagtcctgccgttgtgggggtctgaagaaggaggtgccatgctaccaagaattgacatgtgaaaggaaatgccaacgtttgcgaaactgtggccgccatgcttgtaaacgacgttgctgtgctggcgattgcccaccctgctctgagacttgtgataggaagctcagatgtgggaaccataaatgcctttcaccatgccacagaggtgcttgttcaccttgtcctctgatgaagaccatttcatgcgcctgtgggaaaacatgctttgaggttgaactcggtagactctcagttctgtcattcatttcctttgaataacttatgtttctgctgtctgcttcattggataaggttgtttgctaaaaatttttataggcc

SEQ ID NO: 4208 - DNA, 492 bp, Setaria italica
  Peptide Sequence Number=SeqID_70182
cgctcttgatggagctgatggaggacctgccgccctcggatatggcagatggtgatgtggatcggctgagccacgtcatccggtcgcttgaggcagagatcggtagtggcggtgatgtggcggtgaggatggccgatggcgagagcatggccggagagtcgagtgaggattgtggcaggctccaagacatgctcttggaccttgatgatcactatgaaggtggatcgtttgggtattggcctgaggtgtccttaatggggcatgagacggagggttggtatgtgtactctaatgggtatgagggtggtattgtggggtatgaggcgattgatcaccagtaccattgttgtgtggagggctctgttgagcaggtgtatagccccttgtgggaatgatcggaaaggacatcatcatgtatgtaaatagttttcttttttaatttgtggaagaaaaaataagaaaaaattagtaggagaaagatgagacgcagac

SEQ ID NO: 4209 - DNA, 1123 bp, Setaria italica
  Peptide Sequence Number=SeqID_70183
ttcatatacgaccggtaatctagtaaacagcaccacaaacagtatggataacaactcccagaatatcacacacaccagagctgtcgcagcataacctgcagggttggaactgtcttaagagtaccgaacccgaaagagccaaccaagagatgtaaaaatcaggataaccaccaggtattactcggtcttcatgagccaaccaagggatgtaaaacgcagcataaccaccagaaatatctaactaccaagtccaaaagagctgagcaagggatttgaaactcaggataaccaccagaaacatcaagctaatccagccaacgggaatggaaacattgcttccaccgctttgtcctccaagccacacttctgggtgcaactaatatgtacatcagaatgcagtaattgagatcaaacagtgcgtctcgacatgaagatcactttgtagctgaagcccccgctgacttatcatcattgggcaggcccaggtcattgtcaagcaaattgatattcaagaactttggcaggacagatttcacatcagaagttgttgccgacttctcattctgcagatcttgattggggttgctgctactctcagacacttcagcatggtggtaatcgtcaccaggtaggccctggccatcatgcaggtcattgatatcttcagcatcatcatgaagcatatcttgtgagctcagctcgtcaagcatatcaacagtcagatttatgtcaaaatcatttgccttgagtaactcatcaatgaaatctgtggagacatttgggaacattgaaaagaccatattggctagagcaactggatccatgtcattttcctcatacttcgaaggatcaaaagtgtcaccagaagtttcaccctttgatgatgactctgcttggttttcaagggccttgtcttggttttcttgggccttgtctgcaactgcaaatgaactcagggatccaggtatgaaaggactggcatttggattcaacttgaacaacccttccatggtttgatcaacaaatctcgggacgatcggcgggaggcgaggcgaggcgggggtcgccggtatcggcgcttgtcgcgggttggggtggtggtctggcaaagtgtgaaggcagc

SEQ ID NO: 4210 - DNA, 273 bp, Setaria italica
  Peptide Sequence Number=SeqID_70184
gccagggaggaagggagggagcgcgcgagtattgtggaaatgccactcccggcgttcctggcggcggcggcgaagctcgccgtcctggtggcggccgccgcgacggcggccaacgcggcctccttcgcgcggtaccggcgccgccacctccgccgcatcccgaaccccatcgacgagtccgccgaccccgtcgccgacttccgcgccctcccctccgctggcgccggcgacgactcagaagacggcagtttcttctttgggctagcgaccgcg

SEQ ID NO: 4211 - DNA, 384 bp, Setaria italica
  Peptide Sequence Number=SeqID_70185
cggttgtcgtcgcgggcgagcacgtggtcgagccgcgcgtgggagcggagccagtcgacgccggcggggcggagcagccactcggcggcggacggagccttgccgcgctttccgccgccgccggagaagtatccccgggagcgcaggtggaagaggtcccccggcggcgacgcccagccgttggctccccggtcgaggtcgacctggcgcagcgagccggcggccgcggcctcctcccgccagctcctgtcgccggagccggcggcggcggtcttattggcgcgatcgggcgtcgtcgggcacatcgccgccggggggcgccggcgagggggcagtttggggagagattttgttgggtgggcttagcgcgaatggaggagcggg

SEQ ID NO: 4212 - DNA, 3515 bp, Setaria italica
  Peptide Sequence Number=SeqID_70186
acttgttcccagggcttgaaccatgagggctggcttctcctggcgctgaagagccagatggtcgacactctccaccacctggatagctgggatgcgaggcatccaacaccgtgcgcgtggaggggcgtcaactgctcgtcggcgccagtcccagcggtggtgtctctcgacctcaacaacatgaatctctcaggcaccatcgcgcctagcattggcggcctggctgagctgacgcacctcgatctatccttcaatggatttggtggtcccatccctgcacagattgggaatttgtcgaaactggaggtgctcaacttgttcaacaacaattttgtcggtataatcccccctgaggttgggaagttagctaagctggttacacttaatctgtgcaacaacaagctctatggtccgatacctgacgagattggtaatatggcctcacttgaggagttggtaggatacagtaataatctcactggttcactacctcattcacttggcaagctcaagaacctgaaaaatattcggttgggtcagaatcttatatctggcaacattcctgttgagataggtgaatgtctgaacataacagtgtttggtcttgcacaaaacaagttagagggtccgctacctaaagagattgggaggttgagtttgatgactgacttaatcctatgggggaatcagctttctggtgttattcctccagagataggaaactgtacaagtcttggcacagttgccctctatgacaataatctatttggtcccatacctgcaacaattgggaacatcacgaatcttcagaagctatacctttatagaaactcattaaatggtactattccatctgagattgggaatctttctcttgcaagagagattgacttttcagaaaatttcttaactggaggaataccaaaggagttgggcaacataccagaattgaatttgctctacctcttccagaaccagcttacaggctctattcctacagagttgtgtgggttgagaaacttgagtaaacttgatctatcgatcaattcactcactggcacgatcccatctggttttcagtatatgagaactctaatccaattgcaactcttcaacaataagctctcaggcaacatacctccaaggtttggcatttatagccggctttgggtggtggatttctcaaacaacagcattacagggcagataccgaaagatctttgcaggcagtcaaaccttattttgttgaatttggggtctaacaagcttacagggaacattccccgtggaatcaccaactgtagaccattggtgcagcttcgtcttggtgacaacagtctgacaggaagcttccccactgatctctgcaatctggtaaatttgacaacagttgagctgggtagaaacaagtttagtggcccaattccacctcagataggcgattgcaagtctctgcaaaggctggaccttacaaataactatttcacgtcagagttacctcgagaaatcggtaatttgtcaaaacttgttgtcttcaatatctcatctaatagactaggaggaaacataccactggaaatcttcaattgtacagttttgcaacgccttgatctcagccagaataactttgaaggttcgttgccaaatgaagttggtagactgccacagctggagctgctatctttttctgataataggctagctggccagataccacccattcttggtaaactatcacatttgacagcactgcagattggtggcaacctgttgtctggtgaaataccaaaggagttgggcctgctgtcaagcttgcagatcgccatgaatttgagctacaataacctctctggcaatattccatcagagcttggtaaccttgctctgttggaaagtttatttcttaataataacaagctgactggtgaaatcccaactacatttgccaatctgtccagtttacttgagctcaacgtttcctacaattatctctctggtgccctcccgtcaataccgctttttgataatatggctgcgacctgttttattggaaataaaggactgtgtggtggacaacttggtagatgtggatcccagtcatcatctagttcccagtcatccaattcagtcggtccccctttgggcaagatcattgcaattgttgctgctgtcattggagggatttcacttattcttattgcaataattgtgtaccatatgagaaaaccaatggagacagtggcccctttgcaagacaagcaacttttttcaggtggttctaacatgcatgtttctgttaaggaggcatatacatttcaagaattggtcgccgctacaaataactttgatgagagttgtgttatcggaaggggtgcttgtgggacggtgtacagagcaatcctgaagactggacagacaattgcagtaaagaagcttgcttctaacagagaggggagcaacacagacaacagctttcgtgcagagatcctgactcttggaaagataagacatcgtaatattgtgaagctgtacggttttatataccaccagggttccaaccttctactctatgagtacatgtcaagaggcagtcttggtgagctacttcatggacaatcatcttcttcacttgattgggagacacgcttcatgatagctcttggagcggccgaagggcttacatacttgcatcatgattgcaagcctcgcatcatccaccgtgatataaaatccaataacattttacttgatgagaactttgaagcccatgttggtgattttgggttggcaaaggtgatcgacatgccatactcgaagtcaatgtctgcaattgcaggttcatacggctatatagcaccagaatatgcttataccatgaaggttactgaaaaatgtgacatatatagctatggtgtcgtgctgctggagctgctaactgggcgtgcacctgtgcaacccttagaacagggaggtgatctggtaacatgggtgaagaactacatcagggacaattctttgggtccaggggtccttgataaaaacttggatttagaagaccaaagcgttgtcgatcatatgatcgaggtcttgaaaatcgccttggtctgtactagcttgtctccgtacgagagaccaccgatgcggcatgttgtagttatgctaagcgagtctaaagataggacaagggtgagctctgcatcctcacctgcctctgatgattcttcaaagaagggtagctcatgatgtatttataatatgttcaattagtcaaaggcaataccctttttttctgcctgttcttagttgctgatggtagggtcctgggagactgcattctttgtgtcagtaattttctagtgagataaataatagtggttcatagtttcttacaattctagtgagatagatagtagtggttcatattttcgtcatgttgtataccggtgtctctcagaaagctgtccatcggagttcagactaacatgaagcattggaagaagagctcttcctgctgc

SEQ ID NO: 4213 - DNA, 496 bp, Setaria italica
  Peptide Sequence Number=SeqID_70187
acccccctacaacatcagtgttgcccaggaacctaacctgcccatatccagccctcccaatgacaaaagttcggaaccctgctgcagtagccaggatcagcctcctccctctcaaccagctcatcgatcgacggccttgtgaagtactcggaggagcgcagaacagggaacacagtaccggcggccatgggtgatgatgaggtgataacccagagtcagcagccgtgagtgagggatccctgccgtgctcccaagtacttcattgctccatgcccaactagcccgtgggcgtcgccgcgtcggccggcgagagggggaaacaggggaggtaccgagggaggacgcggcagcgtaggtaaggcaccggcgacgggcgagtcggcgaccgcgggacgagccgaggacgtacttgcggcctgcaaccgacctcaaagaggggaggtctgcgagatcccagtggcggcggcggcggcggcggtgacgaggacgcacgggg

SEQ ID NO: 4214 - DNA, 468 bp, Setaria italica
  Peptide Sequence Number=SeqID_70188
acagcttcagtttcgagcaacttcttgcagctatagtgatcgaccggccgccgtgactcgtgagcacatcaaggtcacccccccatggcctccgcctcaggtctcttcgccacggcgctcgtcatggcgctcctcatgctcagcggcacgagccacgccgcgcgccgtctcggcggaggacgacacggctccggcggccgcgccagccgccatcgtgccgggtatccctgccgtgccgaagccgcctgtgcccacggtgcccaccgtgcctgccgtcgccctgccaccgatgcccaccgtgcctgccgtcgccctgccaccaatgcccgccgtgcctgcggtgggcgccgtgccagcgatccccgcggccaccgtgccgccgatgcccgcggtgccggcggtcccggcggcgaccttgccacccatgcccgcggtgcctaccgtcccccgcgccgaaggtgacgctgc

SEQ ID NO: 4215 - DNA, 263 bp, Setaria italica
  Peptide Sequence Number=SeqID_70189
gcggcgtgcgcgagagcgggccccgcgagccctcgtaatgcgtccgagctaagcgtgggaataagagatagccttctctttcctccacgtaggcaaaatgctgagttggctctttatgagctacaatagctgcaaagagaggcgggccggggcccctcccccgagctgaagataccctgtgacgctgcctaaagcatgcaaagcgctgcccgccggcctacctagcgcagcaacgtcgccaccaccgccgtccacagccccac

SEQ ID NO: 4216 - DNA, 808 bp, Setaria italica
  Peptide Sequence Number=SeqID_70190
aaagttgaaactccaacaagagattagtctctaacaatggtcacaaactaactccctgaaaccttagaaaccacacctctaggatttcaggcttcttagcttaaactgtgaagggtgatagatgtctgcgtgcaacatttactaaacaggaccagccacattcactcattccgattcgttgagatatataaatgacagttatcgatgtctgaatttcctcaaccatgatatggataggagcagggaagagcctgatggttggtacctaaggagccgcagcacaagtgcgagagggccactacatgagggttgaggagagcttgaggcactcgctctggcacctcttgaggcagacgtcgttccagttgggcacctggtgctggttgacgcagacggtgcgcgcgcaggcgtcggcgcaggcgtcgagctcggagacgccgcagacggtgacgcaggtctccgggatggggtccttggagaaggcccccaccttcttgagcatccgcttggaggtgcagacgcgctcgcagacgaagacctcgtcggagctcttctcgcggccgcgcgccgccttgaggcgctgctcctcgtcgcggcggcgcttgatgcggatgaactggcccgccaccagcgccgggatcgccgcgcccagcaggggccaccacgcgtccaccatcgcctcgcgagccttgagatgaaccgattgctcgcccagacgtcgtcgggtggaggagaggagggaaaccggtggagggaggcgaggggtttaggcgaggacgacgaggtggcgccgcttcctttccccaac

SEQ ID NO: 4217 - DNA, 1021 bp, Setaria italica
  Peptide Sequence Number=SeqID_70191
ttttttttttttttggttatctcatagcgaactgtgttgctctctgctcatagagatagtagcatacaggctccgggcccaagaggcaaccactcctgctcatacactagtcaggtctcaaactagtcatgctcctaaccaaccaccccaaggaggaaaatccctacaccaacagccaaagtaacaaaaatcccatctttctcttctttacatccaagtaccaatgacaaattaagcaaaagccttcttttcatcattcaggcaatccttccttgcatcgcaaatgtccccctaccaagccccgttgccttgccctccagaatggctcggcctcagtcgagatcatcgtatccgctctgcatttgaggaccaccgccacttgcctcatggtcgttattgttgccatcatcgttggtaggattgctggactcagcctgtgccgcaccgaatgcggccctgagaggccaaggcagcgatatcctgaacctcctctcggccaccctgggggaggaggcagcagcgggagcgggagcgggagcgggagcaggagccggagctggagcggacgccgcgcgctgctgctgctgctgatggtagtccgggtcgtcggtgggtagctcgtagcggcagactgggcaggagctgtggaggtcgagccacgggaggatacagtccttgtggaagacgtggttgcaggggagctgcttggcggcggcccctaggtggaagtcatccatgcagacggcgcactgcgccccaccgtcggcctgcatcatgtcggcggagacggcgacgtcggggagcgcggcgacggcggacttggcggcgggcggggtgccgtagcggttggggtcgttctcggcgagctgctggatgagctgctcgaggcccgaggggcccatgaaatagtcggcgaggctgacgcccggggcgaggaggggcgcggcgaccccgccctcgaggacgatctggatggtggcgccgccggagaggagcccgccgaagtggtcgtggaggaagt

SEQ ID NO: 4218 - DNA, 577 bp, Setaria italica
  Peptide Sequence Number=SeqID_70192
ttttttttttttggagaaaacagataccacgcagagctagttacaaaaaacccaagggacagggtatacatcttcataacctgaaacgaaatggttttattcttttcaactctccaaaagtcatacccctcccagaccagaccaataagacactattctcaacacaagcgacaccacatccaccctacaatccttccggtataaggtaacattttcaagtaaactaggggcagaaaaacttttggtatgatgctgatgacagcacgggtgcaaaatgtacacataggagactcatcaagcctcgcatcgcaggccaaaggaagaggcctcagggaaccgaggtgaaggctggcaacagccagccgcgcccagtcgcgagctccacgtacgccccaaacttctcctgcgcgttcgggatgtcgaggaccaggtcgtccaggccttccttgacacgggtgaagcctttggtcatctggttgatggttatcagcccctcgccgaagcactcctgcagcaagggaccaagtaatagacctagacgtacgttactagacttactaccaatacgaccaataga

SEQ ID NO: 4219 - DNA, 1554 bp, Setaria italica
  Peptide Sequence Number=SeqID_70193
catcatgaaggggttcataatgctcttacagtctggctgccactgctgttcggccgaagcttgctgctgatctcatccaagtttagcggaatcagtacttcatcaatcactgccctagctaggaagagggcaagctcactgggagcatccacaatgtcaagggcagtgtcttctgctgactgcaagagcattatgaacccttcatgatgtcatcagtggaaaacagctccaagctgagcgaagaaagtagtacagatgccatctccttctctctgttctttctgtccatagcaagcgtaacaagcttcttgaggaaaatgggattgtattctggggcagaaagctcttcaaggcttcgaatgagttcagggacatcatctgagagaaaatactcatgaattatgtgaccagattcttccttgaaacgcttcaccttatcagcacttgtattccgcatctcttcctcagaggcagcagatttactaaaagaagcatcaagccatccttcagatatggctgttgaaaccagtttgtcaaaaagatctttagcagaaggaatatcaagactcaggtcatcaacactctcagctagtcgagaaaaaccctttgatatttgattagaactaatcaagcaacctgcagctgcctccctcaataacttcaggattaatggctgcgaggatatgttctccataccaagggtgagagcacgcttcacaacctcatgatggaagaacggtagactaagctctcttatgcacctgaaggcttcatctatgtcaccactttcaatatactctctcagaatatcctgaatcctcttctttgcctcttccacagtaaagtgtgtgcttccaccccatttgcgttcaactaattctgcatgatggggagctgacaaatagctcttttcaacaacctgcagaacttgaatacccttggaaaattctggaagcagtgctctagctcgagcgaggaatacaggaggcaaaatttcatcaacaacagcccgtgcaataaaaactgccaagagatcaacggcatctggtatatctacagtcagatcttctatagactccagaagcatcataaaaccttcactgatcatgtaggaactcagtagatcagcatacaaagatgataacagaactgatgccatttctttttctttgtcatgacggtccattgccattgatatgagcttcttgacaaagtaatgctgaaactgatcagatccaagactccttagctcagaagatgccaattcaacatctccggtactaaaatactcctcaactattggaactacaagccttgcagcattctggagggtagatcaaaccttattgtttccattagctagttttttcaactcttgagatggtaaagaatctacatcctcatggttgtcttgttcagttttcccaccaacaccatctgaaagcaaaatccatggagttagcacaatatcagcatagaatattaacaaagataaagtgaataacaagaacctatctcgtaacaaaaaagaagattgcaatgacacccagtcca

SEQ ID NO: 4220 - DNA, 1308 bp, Setaria italica
  Peptide Sequence Number=SeqID_70194
tttttttttttacttttaacccctaagggtactagggttattactacttcttcataacctgaaacgaaatggttttattcttttcaactctccaaaagtcatacccctcccagaccagaccaataagacactattctcaacacaagcgacaccacatccaccctacaatccttccggtataaggtaacattttcaagtaaactaggggcagaaaaacttttggtatgatgctgatgacagcacgggtgcaaaatgtacacataggagactcatcaagcctcgcatcgcaggccaaaggaagaggcctcagggaaccgaggtgaaggctggcagcagccagccgcgcccagtcgcgagctccacgtacgccccaaacttctcctgcgcgttcgggatgtcgaggaccaggtcgtccaggccttccttgacacgggtgaagcctttggtcatctggttgatggttatcagcccctcgccgaagcactcctgcagcagggccagtatgcctgcgtcgttctgcttctccatcgccatgaccagcgccttcttcaccacctcgtggttgaagaagggcatcccaaggtcgcggatgcatctgcaggcttctcccaggtcaccgccagtgctgtactcctccagaagcttagcgatcttgtccttggcatcttccacggcccagccggtgccaccgccccagcaacgcagaatccgctcgctggagtggcgagctgacagcagggctcgggccatctggacagtctggctgccactgctgttcggccgaagcttgctgctgatctcatccaagtttagcggaatcagtacttcatcaatcactgccctagctaggaagagggcaagctcactgggagcatccacaatgtcaagggcagtgtcttctgctgactgcaagagcattatgaaccccttcatgatgtcatcagtggaaaacagctccaagctgagcgaagaaagtagtacagatgccatctccttctctctgttctttctgtccatagcaagcgtaacaagcttcttgaggaaaatgggattgtattctggggcagaaagctcttcaaggcttcgaatgagttcagggacatcatctgagagaaaatactcatgaattatgtgaccagattcttccttgaaacgcttcaccttatcagcacttgtattccgcatctcttcctcagaggcagcagatttactaaaagaagcatcaagccatccttcagatatggctgttgaaaccagtttgtcaaaaagattcttttaagtctaagtaaaggtaaattaattactaaa

SEQ ID NO: 4221 - DNA, 572 bp, Setaria italica
  Peptide Sequence Number=SeqID_70195
cactctcccatactccaatgttagattgtagttgtttcgttttacaatcttttccttgatttgtttcccggatcatcttcatatatatctcaaaacggtatgcacagggtcgggtatctcagaagttatcttccagaggaaaatatgtttctgtaaacattggaccaattcgtgtagtttctagcgagcaggtccaagccgtgtatcgtgccatgagaagagataacaggatgaagtacttcttaatgaagtgacaaactacacatcagctatgtttcattcttcgttccattttgtaacattagagtctgtcatgcattctgccatacttgtaagtaccgaaccaaatgggaagtttgcgttaattgcctgatttctagttggtctcatgttatgtagtgcgttgcttatttgcaggctggagctccagtgaactgaacaaaaatgtgagacgtattactgttgcactcgagcccaaacagaagcggctgaaatgattcgatacaatgtatctttgttggtttgggttacattctgtagtgtagtggtcatgtgtagatactacgcatggc

SEQ ID NO: 4222 - DNA, 721 bp, Setaria italica
  misc_feature (703)..(703): n is a, c, g, or t
  misc_feature (716)..(716): n is a, c, g, or t
  Peptide Sequence Number=SeqID_70196
tccaaaggaagggttgcactcacaacaaatatggtcatgggtggtactgtgacggatgacaaaagtgatgagtggcttgttctggatcagaaggtaaattcataccccacagatagaggatttacagcaattggtactggaggtgatgactttgtccagtcaatggtagttgctgttgaatctgttcttcaagaatccattcccaagggtcgggtatctcagaagttatcttccagaggaaaatatgtttctgtaaacattggaccaattcgtgtagtttctagcgagcaggtccaagccgtgtatcgtgccatgagaagagataacaggatgaagtacttcttatgaagtgcaactacacatcagctatgtttcattcttcgttccattttgtaacattagagtctgtcatgcattctgccatacttgctggagctccagtgaactgaacaaaaatgtgagacgtattctgttgcactcgagcccaaacagaagcggctgaaatgattcgatacaatgtatctttgttggtttgggttacattctgtagtgtagtggtcatgtgtagatactacgcatggcttcagttacattatgttcaataatgtatttttattgtttttatgttatagatatttcatattataatgctgtatattactgttttacgttatagatgtttcatagtacaaaaaaaaaaaanaaaaaaaaaaaanaaaaa

SEQ ID NO: 4223 - DNA, 267 bp, Setaria italica
  Peptide Sequence Number=SeqID_70197
ttaccgcgcggggcaaccgcgcaccgtgctgcacttgtagtatcccctgcagattcccatgtcaatcagcgacgattcattcggctgtgggttggattggaattggatggagccgtcgctgctcaggcaggcactcaccgcgggtatggagatcccttgatgggcttctgcccgtacttgcgccacgagtactcgtcggcggggatgtccgcaaccttcgggctgatcgccggcacgcggatcgtgcgcttcaccctgtgcttcctg

SEQ ID NO: 4224 - DNA, 901 bp, Setaria italica
  Peptide Sequence Number=SeqID_70198
ttgagaaatttggagctgctaaacccaagcctaatggtgattttgattaagagctactagtactagtaattgacagagaaggtatgccgaaaaaaaagaagatgaaaattttaatggttgggcagctccggcagcggggcgagcggcggcgggtcctggccggcggggctgtggcggtgctcgccctcgtaggtcacgatcagcatcgacggctcgccggggtcgcgctccacgtgcttccgcgcggggcaaccgcgcaccgtgctgcacttgtagtatccccgcgggtatggagatcccttgatgggcttctgcccgtacttgcgccacgagtactcgtcggcggggatgtccgcaaccttcgggctgatcgccggcacgcggatcgtgcgcttcaccctgtgcttcctgcgcttggagcagtggcatcgcccgccgttggccccgtacttgccgccggcgacgttctccgagtgcgcgtgctcgtggcacctgcgcttctgcccggcgccggacgacgacaggggcggcttcccgcagctggccgccccggccgccggcgggagcatcagcgacgacgacccgccgccgccgcgcccgttcgacacgctcccgtcgccggtcgtcaccgacgacaggaacgacgagctggcgccggacacgctgaacccggagtcccggctgtacccggacaccgacttggtgaagtccagcgtcacgggcctcgccgccggggctgaccgcgccgggagcgccgcgggctcggagcaggcggccgccgggcccggagactgcgccaccatggggccgcgccggaaccgggcgtggcccgtgcggttcaggatggagatcaccttcttgaacttggacaccgtcatgtccgtgatctcgcggcagtcca

SEQ ID NO: 4225 - DNA, 425 bp, Setaria italica
  Peptide Sequence Number=SeqID_70199
agaagcaaaagctcaagctgagaatgctgctcatctctcagtagcactagcggagaatgcaatagtcattctgatgcttgtggaagatcatctgaggtcacaaggtcaacatttttgcacatctcttgcaggtgatagcattgtatcttccacttcattggcttcattggctgccagtcggtcaaattctttgggcacagctggtaaagaacctacggcagctggagcctccagacggtcatctttgtccagcgatgctggtggccttccgctagatttgcttacttctatggctgatgcaaatggacaaatctctgctgccgtgatggaacgtcttacagcagcaacagcagctgagccttatgaatctgtcaagcatgcatttgtgtcttatgggagctgcatagcagtatcgttagggaagt

SEQ ID NO: 4226 - DNA, 1212 bp, Setaria italica
  Peptide Sequence Number=SeqID_70200
cttagcattatgtaattatgtacaccttttttaacaagaacagaattctattgccaatcgataacatttgggttacaaagctgcacgtggagtaaaataacaatagttacattgcttcatacatgaaggggaaaaagaataaacaaaagaatgaatgtaaggcatttcaaatgttaaaattcattactacttttggttcgtcagctcagtgtcaaatatttcaccaagctacaaccaagtcagagccttttctgacagggtcaacatcttgatatggaagcaatcatttggcattttgacgcgaatttgcagaaactgcatttccacctctcctcttcagtcacaaatttaggctcccgtgaaccttgccagaagccaaggacttgctggatttgatccttgaaccacctagcatcataagtgaactggtattcttcaagcagggaatggtctgcctgtagttcatatctcaagaacagcaattcttgagaccgcggtagagtatggcaggtaaccttgtaatagttcaatacatcttcaaaggtctttgcatcgaatcccaatgtgctgatgtactgcttgacatcatccgataacaagtagttggggtccaggccaaaatagctgaagaaattatctgctggaaatctctcagcaatcaaattgtcccatagatatttgtaacacatcagctgaagccttccatttcttttttgtgcttctgagggaactgtgggcctgacacgtgtctttgtatctaccaagataggttgaaatgaaatgccatccatgggcatttggatttcatcaataatccctaccatccacgaaccttcaacaaccccaatcactggaagctcccgtgtgatgccctcgaacattaactggtttgttcccatgatgaagttcatgaattttactgcccaaaattcttccgcggatttaatggtcacgtccactctttcaacaacctcttgctcgagctgcgcgtggcggtccgaacctgctttcatggcctcggtcctctccggcttgccgtgttcgagcacgaactccatctgtttctcacaccattccgtagcggtgatgtcagtaacggcgagcgcgcggcgctcccggaaccgggcgagaagcgaccgccggggcagaggggagtcctcaatgtcgccgccggcggccgagtaggccgcgcaggagagcggggcggcggcg

SEQ ID NO: 4227 - DNA, 298 bp, Setaria italica
  Peptide Sequence Number=SeqID_70201
agctcacctacgtcacgctcttcctcctctactccaccggcgccgcccgccgcaaggtcttcctgctcctcgccgccgaggtcgccttcgtcggcgccgtcgcggcgctggtgctcagcctggcgcacacccacgagcggaggtccatgatcgtaggcatcctctgcgtcctcttcggcaccggcatgtacgccgccccgctctccgtcatggtacgtaccccgtgtagtactagtattgtaggcgattgtcggcgtcagaagattttttattgaaccacctggagtgattactaact

SEQ ID NO: 4228 - DNA, 341 bp, Setaria italica
  misc_feature (6)..(6): n is a, c, g, or t
  Peptide Sequence Number=SeqID_70202
tcgganaagggagagggaacgcgaccgcgagctagagcgggagcgagccagggacagggagcctcgaagggaagccagagaatcctcagcggccgttaacgatagtacctcgatgaggcggaaggatagggcgcggtcccattcccagccggacaggtcggagcgcgccccgccgccgccgtccagccccgaccaccggcactcgcggcgctccccgcaccgctcctccagctcgggcaagaagcgctcctcctccgaccgctacgacgacctcccgctgccgcctcccccgccgccgcccgcgtcgcggcacgagccggagcccgccaaggcgcaggcgg

SEQ ID NO: 4229 - DNA, 674 bp, Setaria italica
  Peptide Sequence Number=SeqID_70203
agcactagcatcttgcacaagggcagcgaccgatgatctcccggacaccatccgcacggccatcggcgtcatcggtgagttgccgccgccgccgccgccaactgtgcgtgtggtcgcttcatgaacgcatatatgcacacggagcagctgcaacacgcagcagaagtgctgtgtggagcctgcctgtggtagatggcactagccggtcatgtggggtgtcgggctcttttcatactccttccttgcttccttcctgcacgcccacgcccgcaacgttcatccgcccatccattctttctttttttcgcggagcagtactcgccgatcccatacgtggcgacgctgctcaactgcatgatgtggggtgctgtacggcctgccgctggtccacccacacagcatgctcgtcatcaccatcaacggcaccggcatggccatcgagctcacctacgtcacgctcttcctcctctactccaccggcgccgcccgccgcaaggtcttcctgctcctcgccgccgaggtcgccttcgtcggcgccgtcgcggcgctggtgctcagcctggcgcacacccacgagcggaggtaccaatgaatcgtaaggacaatacctactagacgtacctactttacggtactaaccggtactaatttagtttaacgttaccgtttactta

SEQ ID NO: 4230 - DNA, 438 bp, Setaria italica
  Peptide Sequence Number=SeqID_70204
taggtctaattgggtaccgtccctttgttgtcttctttccttcttcccctagttgttaagaattcaatttaaaacatagcaataattactatgatgaaatatggataacgtaacaaaaattgtattttttccaaaccatagcaacaaatgaacagatgtcagtatacaaatactcgtatacaattcacaatacacacgtatatactatacgcacgtggcacgtacttatacacaaataccttgcaggccaacgttcatccgcatctggaagaaaggctccgtggagcagtactcgccgatcccatacgtggcgacgctgctcaactgcatgatgtgggtgctgtacggcctgccgctggtccacccacacagcatgctcgtcatcaccatcaacggcaccggcatggccatcgaactcacctacgtcacgctcttcct

SEQ ID NO: 4231 - DNA, 641 bp, Setaria italica
  Peptide Sequence Number=SeqID_70205
cagggacagggagcctcgaagggaagccagagaatcctcagcggccgttaacgatagtacctcgatgaggcggaaggatgtatgtcttttcctgtcaatcgcttatcttgcaaagttttgtactgttgtctgttccatggtaaacatatggatcgccgcggtagtagacgaggcaggaagagaagcgcacggagtcctgcttgattctggtgttgcagaacgagaaagggactaagttgaactctgcttacgaccaggcagcgcccttgccttcttgttggtttgatgcttcctgccaagctctgttgctccgatcacaagcagaggttgggccagcgggagcactttgctgctttcctgggttcgctgccccttggagatgcaccggcagaaagatttttacttatatttatttatgtttacatttacattctatgtttttttcctttgggactgggttgctcttactcgttttgccttttcctttacctttcatgtttttgctttctgaaagaggacggattttcctactctttagttggtagctttatttacttttgcatttcatacctgcttggagcacatagaactagaatgctaaggtgaatatgcttgtagaccccacacagctatacgggcgc

SEQ ID NO: 4232 - DNA, 1675 bp, Setaria italica
  Peptide Sequence Number=SeqID_70206
cacaagacacctcctccaggttatgtttgtcacagatgtaaagtgcctggtcatttcattcaacattgcccaactaatggtgatgctagatacgatgtgagaaggatgaaacccccaactggcattccaaagtcaatgttgatgcaaactccggatggttcatatgcactgccaagtggggctggtgctgttttgaagcccaatgaagctgcttttgagaaggagatagagggcctacccaccacccgctctgttggtgaacttccaccggagctacgttgcccattgtgcaaagaagtaatgaaggatgctgttctaactagtaaatgctgctttaggagtttctgtgataaatgcatcagggactacataattaacaagtcagtgtgtgtctgtggtgccacaagcatattagctgatgatcttctccccaataaaactctaagagaaaccatcagccgcatattagaggcaccaccaactagcagcacagaaaatgtgggaagcatggtccaagtacaggacatggagtcagctctaccagtacaacctaaggttagatctcctgctgtttctgctgcttcaaaggaggaggctaaagcacccacacctgtagaagagtctccagatgctgagagcctcaatggagcaaaagctatgaacaacgaggtgagttcttcagataagaaggctaccataattccggatgtcggtgaagggaccatggagtcgaagaacgtgaaagaagataaaccagtagaagtgcctcctgttgccaaggattctcaagaaaagttgcctgcaggggaacaagcagtaaagaagaagaaaaagaagaagccacgtgctccaggtaatgctgatgaacaatggaaaaattttcaagattttggagctgaaaattttgcgggaatgcctttgggtccaactggagctttcaacccttactggggtggaggagtgccattgccaatggattacatgggtgcaccatttccaggtcccatgccttacatgggttatccaccagctccatttgacccttttggtgggggtgttctcccacaagatccatttatgcccccaggatacatgatgcctggagttcctagggatctttcggaattggcagttaaccctatgggaataaatatgggcccaccaattgtgagcagggaagaatttgatcccaggaaacctgatcatagaaggagacgtgaaatggatcgattcaatgaaagggagagggagcgtgaccgttctcgggagccgcgtggccattccatggagagagggagggagcacagggagagggagagggagagggatcgttcccgggagagggagagggaacgcgaccgcgagctagagcgggagcgagccagggacagggagcctcgaagggaagccagagaatcctcagcggccgttaacgatagtacctcgatgaggcggaaggatagggcgcggtcccattcccagccggacaggtcggagcgcgccccgcgccgccgccgctctgattttatattttgcttactactagtaaccttgaaggaaaacaaaaacaagagaactgcagaacgagggctgcactgcactcctgcgctcaccttctatcatcatataatatgatcatcttccggtgcagtaaagttaaaaaaaaaaaaaaaaa

SEQ ID NO: 4233 - DNA, 1489 bp, Setaria italica
  Peptide Sequence Number=SeqID_70207
aacagtacaactcactcaccaagaacccagagaaagagagggagggaggggaggagctcagctctttcgtttcttcctcctccgtctcgtcggctccagccatcacacatttcctctcccgtctctgttatctgtccgtggagagctagatttggcaaccagcgcgagcgagcaccgtccccgccgtcgaaagctcgccaccgacgaaccgaccatggtctcggccgaaaccatccgcacggccatcggcgtcatcggcaatggtaccgcccttgtgctcttcctctccccagtgccgacgttctaccgcatctggaagaagcgcgcggtggagcagtactcggcgatcccgtacgtggcgacgctgctcaactgcatgatgtgggtgctgtacggcctccccgtggtgcacccgcacagcatgctcgtcatcaccatcaacggcaccggcatggcgatccagctcacctacgtcacgctcttcctcctctactcgacgggggccgcccgccgcaaggtcatgctcctgctcgccgccgaggtcgccttcgtcggcgccgtcgccgcgctcgtgctgaccctcgcgcacacgcacgagcgccgctccatgatcgtcggcgtcctctgcgtcctcttcgggaccggcatgtatgccgcgccgctcgccgtcatgaaaatggtgatccagacgaagagcgtggagtacatgcccctgttcctgtctctggcctccctggtgaacggcatctgctggactgcctacgcgctcatcaaattcgacctctacatcaccatccccaacggcctgggcgtgctcttcgcggtggcgcagctgatcctctacgccatctactacaagtcgacgcaggagatcatcgaggcgcgcaagcgcaaggccgaccagatcgccatgaccgaggtcgtcgtcgacgccaccaccaccagggcctccaacaccaccgccggctactgatgacggcggaaagacaccggcggcggacaaccaagctactaccgtcctcctctccttcccgaagggatggatcgatgtgtctgcgtatgcatcctatgataacgctgccgtcgccgccgccgccgccgccgccgccgctctgattttatattttgcttactactagtaaccttgaaggaaaacaaaaacaagagaactgcagaacgagggctgcactgcactcctgcgctcaccttctatcatcatataatatgatcatcttccggtgcagtgttacagctgctgttagtggagggcctttgcttgttctgatgacgcagcccatagctgctcgatcggttttccagtaatttcagtactattctaatgctctgtttttcctttcctttccttttcttttcttttcttttctcttcttttgttgccccttctgccttcctctcttctatgctgtaaatgggaggatggtactgctgaggattaaaaaaagatttctgaagaaaatatcatgctgct

SEQ ID NO: 4234 - DNA, 1355 bp, Setaria italica
  misc_feature (1323)..(1355): n is a, c, g, or t
  Peptide Sequence Number=SeqID_70208
agaagtagcacccaaagagcttcagctcgatcagctcattcgtttcgtcctcttccctttcgcctgcttctcccatctctctagagcttattcgtagagatcgctcctgctagctagcgaacaactatctccatagctgagcactagcatcttgcacaaggcagcgaccatgatctccccggacaccatccgcacggccatcggcgtcatcggcaatgggaccgcccttgtgctcttcctctccccagtgccaacgttcatccgcatctggaagaaaggctccgtggagcagtactcgccgatcccatacgtggcgacgctgctcaactgcatgatgtgggtgctgtacggcctgccgctggtccacccacacagcatgctcgtcatcaccatcaacggcaccggcatggccatcgagctcacctacgtcacgctcttcctcctctactccaccggcgccgcccgccgcaaggtcttcctgctcctcgccgccgaggtcgccttcgtcggcgccgtcgcggcgctggtgctcagcctggcgcacacccacgagcggaggtccatgatcgtaggcatcctctgcgtcctcttcggcaccggcatgtacgccgccccgctctccgtcatgaaaatggtgatccagacgaagagcgttgagtacatgcccctgttcctgtcgctggcatccctggtgaacggcatctgctggactgcctacgcgctcatcaaattcgacctctacatcaccatccccaacgggcttggcgtgctcttcgcggtagcgcaggtggtcctgtacgccatctactacaagtccacccaggagatcatcgaggcgcgcaaacgcaaggccgaccaggtcgccatgaccgaggtcgtcgtcgtcggcaagaccaacaaccacgccggcgccggccactactgatgaagtgatggtgcttaattagttaccaagcttatggaagcggcagtataatcaatcaagtcgccgctgggtgttatgtattgtgtgattgtgatcttcaattcccacaagggatgaaggcctgtatgtgacatgttgttggcctagtgcagcttggcagtgtcacgtacgggcctcttaggtgggacgacaaaggtgggggattttagctaattccacctttggactagggcttagcttaattccgctgtttagcggtacttattgatggtctcttgttgtctcgaatgtctattgatcaccaaactcttcccatggtcatcaatcaaaagcatgttcatgaatcacgacttcttgattacgttatgaattcaatggatggagatctacaaaaaatnnnnnnnnnnnnnnnnnnnnnnnnnnnnnnnnn

SEQ ID NO: 4235 - DNA, 449 bp, Setaria italica
  Peptide Sequence Number=SeqID_70209
cacctcaaatcaacgcgaacacgaggtaacattaggaagtttgtcgcattccagatattctttttgctgttttagtaggtttccatttttctgctttgatgagttgccacaaagatgtgcccggtttccttgtatgttgtatgatgacggcatgctaacatgtatgcattcagatacttgtttaagctctgttccatttcttggcgtgtttccagtctaatccttctgttgctgagcctgagcaaagaggcaaaatggagggtgtgccaggttctgttgtagatgccgatcaagcatcatcaccaggaagaatgttttcacgccccataaaaactaacctgagggttggcgaatcgtctgcgtttctagcatatgttaagtcaagcaccccagccaccagctcatttgatagtgaattacaaagaggtggcagtcggttagattctttg

SEQ ID NO: 4236 - DNA, 2236 bp, Setaria italica
  Peptide Sequence Number=SeqID_70210
aaggagagagcggacgccatcgccagccgccaccgccggtgccgcccctgaatagattaggcgcggataatggtgggggcccgaccgcgacgggccgaggagcgcgccgccgccggtggcgaccccagccgctgctgattgctgtactcgcctaccatcatcggtggtggtggtagctcgccaggcgccggattgattggggggacgatgctgccggcctcggggacggaggaggaggcgcccgcagatccagcgacagtccacgtctccggctccggccggtgctgaatcggacgcttcgggttggtgtcgcgcgcttggtggaggagcgcgtggttggtgcgtggggggtttgacggtttgggtatggtgggcggcggcgagggggatcgcgttggcggcggcgccggggtggggggagggcagcagttcgtggaccggagcaaggtcaggatcctgctttgcgacggcgacgccaccagctcgcgggaggtgctgcggctcctctgcaactgctcgtaccaagtaacttgcgccaagtctccgcggcaggtgatcaatattctcaactacgagggcggcgagatagacatcatcctggctgaggtcgatctgccggtcacaaagtgcttcaagatgctcaagtacattgccaggaacaaggacctgcgccacatccccatcatcatgatgtccaacagagacgaggtctccgttgttgtcaagtgcttgcggcttggggcagcagagtacctggtgaagccgctgcgcacaaatgagctgctgaacctatggacccatgtgtggcggcggcgacggatgcttggtttgcccgagaagaacttcttcaatgacaacttcgagttggtgctctcagaacctagtgacgccaataccaatagcaccaccctcctctcagatgagacagatgataggccaaaagaaaacatgaatcaagaaacgggcacctcaaatcaacgcgaacacgagtctaatccttctgttgctgagcctgagcaaagaggcaaaatggagggtgtgccaggttctgttgtagatgccgatcaagcatcatcaccaggaagaatgttttcacgccccataaaaactaacctgagggttggcgaatcgtctgcgtttctagcatatgttaagtcaagcaccccagccaccagctcatttgatagtgaattacaaagaggtggcagtcggttagattctttggataaccagggtaattgctctagcgcaactgacagaagtgacactggtactgatgtaaatattcgggataaagaaggctttgagatgcctgtacagtaccctatggtatgcttttcttcctctaacacacatatggagcgaagcaatgaaggccaaaatgatacttcaggaactccgcctatgtaccagtacccattttattatccagggatggtagagcacagcatagcactttcttcggcgcaaaattttcaagaaaacataaacaatgctcaagcatatacaccaccaacaatgatcccacagtacaatgtttatccccaatgccatgctgtacctatgatgtcatcatttcagtttaatcctgctggtatggttatgcactcaagtcatataccgacacaaaacatgtggtcatcagtgtcaagcaccccagtgcctgaggaaacatgcagtcgctctgaaaggagggccgcagcacttgccaagttcaggcagaaaaggaaagaacgctgttttgacaagaaagtgaggtatgtaaatcggaagaaacttgctgaaacaaggccaagggtacgagggcagtttgttaggcaggcaagcaatactgatgttatcagcactggagatgatatctccgaagatgaagatgatgatccatcatccagggaggtagagattatttcttctccagagtagtggtggaaaggtcctctatgtgaaaagatagagtgcagatgattactgctcgctttgttacaactcagtagacctaggcaatacattcttctactgggaaaggcaatacacccttccgctcacacagtataccctttttgtccctgaaaaacatgttacatgtggcaataccaccattgttactctggacattttggagaatcatcttttgatagttttgttgtagttatgctaattagtgatgcacagaccagtgtaagtcaatataatcttattgcagaccgatatctgcctttttgagggtaaaaaaaaa

SEQ ID NO: 4237 - DNA, 2432 bp, Setaria italica
  Peptide Sequence Number=SeqID_70211
gaatcaggaagagtcgagattcttaagtttggtggccttgttgaggacattgtgcactgtacagagcttgaatttgttccctcagctgtggatgctgcgctgttgacagctgctaatatttcagtgacacctgagttgcaagatgctctgctaagggctggatttttatggtatgtactgcccctgctgcttcaatacgattcaacagcagaagagaatgagacaagtgaggcacatggtgttggggcaagggtgcagattgctaaaaatttgcatgctgttcatgcaattgaggctttgtctaggctttgtggtctcagtagcgatgagatacgttgcccatctaacaaacctgcatacaatgcactaaaggcacttcttactccaaagcttgctgacatgctgagaaaccacccacctaaagagctattatcaaatctaaattcaaatttagagtcacctgagatcatatggaattcttccaccagaggtgagctgctcaaatttgttgaccagcagcgtgctagtcaaggccctgatggttcatacgatttgacagaatcacaatctttcacctatgaatctttatcaaaagaattgaatgttggtaatgtatatttgagagtttacaacaatcagccggattttgaaataagtgatcaggaagaattttgcattgctctgcttaaatttatagcagagttagtacaacagtggaattccattaatttggaggaaagtacgattgatcaacatgtttcacttgttgatacatctgcttctgaaaattaccaagtcggtgattctgctgatgaaggaaaaatggatgattcatcagaaaaacaaagtacagggactgatggagattctaaagttattacaaacctccaaagtgggctaacatcactacagaatcttctgacaagtagtccaggcctggctgctgtttttacttccaaggagcgtctgattcctctttttgaatgccttgcgctgcatgttcctcctgaaagcaacatcccacaaatctgtttaagtgttctttctctgttgacaaagcatgctccttgtttggaggccatggttgcagaaaggatgagcctcattttgctatttcagatactccattgcaatcctccttgcagggatggagcacttgctgtactgtattctttagccagcactccagagcttgcctgggctgctgccaagcatggtggtgttgtttacattcttgaacttatgttgccacttgaagaggaaatccctatgcaacaaagagctgcagctgcatccttattgggcaaacttgttggtcaaccaatgcatggtcccagggtggcaatcacacttgctagattcttgcctgatggttggtttctgccattaaagatggacctggggaagctgttgtttcatctcttgaacagacaacggaaactcctgaactggtgtggacacctgcaatggcagcttctctttctgcacagttggcaaccatggcatcagacctctaccaagagcagatgaaagggcgtgttgttgattgggatgtacctgaacaagcatctggccagcatgtaatgaaggatgaaccacaggttggtggaatttatgtaagacttttcctgaaggaccccaagtttccactgagaaaccctaaaagattccttgaaggactgctggatcagtatgtctcctctgttgctgctacacattatgaagcaaatgctgttgatccagagcttcctttgctgctgtccgcggcactagtctccttgctacgagttcatccggcacttgcagaccatgtcggttacctaggttatgttccaaaacttgttgcagctatggcctatgagggaagaagggaaactatggcatctgggcaggccacaagtggattgcaggcagaacctagtgaacatgacaattcaggtcactctgaaaccaatgtgcagactccacaagaacgtgttcgccttagttgtttgcgtgtactacatcagcttgcatctagcacaacttgtgccgaagctatggcagcaacaagtgcaggaactcctcaggttgtaccactgcttatgaaagcaattgggtggcaaggtggaagtatactggcattggagacattaaagcgtgtagttggtgctggtaatcgagctcgtgatgcacttgttgcacaggggctaaaggttggtcttgttgaagtactccttggtattcttgattggcgtgctggtggaagacagggactctgtaatcaaatgaagtggaatgaatcggaggcttcaattgggcgtgttttggcagtggaggtgcttcatgcttttgcaacagaaggtgcacactgtgctagagttcttgacgtcctgaattcctctgatgtatggggtgcttacaaggaccagaagcatgatctatttctccca

SEQ ID NO: 4238 - DNA, 1709 bp, Setaria italica
  Peptide Sequence Number=SeqID_70212
tacacagtatggcgtcagcacactctgatcttgatgacgcaggtgaaatagtaaccccaactcctagggtgaaacgtatattgtcaagtccaagatgccttcctcatgtggcccaggttatgcttactggggaaccaagcattgttgaagcagctgcctcattgcttaaggctattgttacaagaaaccctaaagctatgattcgcctatatagtactggtgccttttactttgcattagcgtatcctggttcaaatctcctatcaatttcacaactgttttcggccacacatactcatcaagcttttcatggtggtgaagaggcagcagtatcttcatctttgcctttggcaaagcgtagtgtactaggtggactgctcccagaatctttgctgtatgtcttagaacgtagtggcccttctgcctttgctggtgcaatggtgtctgattctgacacaccagaaattatatggactcacaagatgcgagcagaaaaccttattcatcaggtcctgcagcatctcggtgattttcctcagaagttggcacagcattgccattcattgtatgattatgctcctatgccacctgtgacttacccgaatctgaaagatgagatgtggtgtcatcgttactaccttcgtaacctatgtgatgagattaggtttcctaactggcccattgttgaacacgtggagtttttgcaatcgttgttggtaatgtggcgcgaagagttaactcgtcgtccaatggatttgtctgaagaagaagcctgtaagatactggagatttctcttgatgatcttgtgcttggtgagaatggttgtagcaagcagtcatctgagttaagtgtggctaattctggaaacaaaattgaaaacatcgatgaggagaagcttaaacgccagtaccggaagttagcaataaagtaccatccagacaagaaccctgaggggagagagaagttcgttgctgtgcaaaaggcttatgagcgattgcaggcaagtatgcagggattacagggaccacaagtctggagactgctactcttgctcaaggcacaatgcatcttgtacaagagatacggacatgtcttggaaccatttaaatatgctggttatccaatgttgctaaatgcagttactgtagataaggatgacagcaattttctttcatccgatagggcgcctcttctgatagctgcttcggagctaatttggctgacatgtgtgtcttcttcattaaatggagaagaacttatacgagatggtggtattcccttgttggcaacacttctttctcgctgtatgtgcattgttcagcccacaacactggcaaatgaaccagctgcaagaatagtcaccaacataatgcataccttctccgttctcagtcagtttgaatcaggaagagtcgagattcttaagtttggtggccttgttgaggacattgtgcactgtacagagcttgaatttgttccctcagctgtggatgctgcgctgttgacagctgctaatatttcagtgacacctgagttgcaagatgctctgctaagggctggatttttatggtatgtactgcccctgctgcttcaatacgattcaacagcagaagagaatgagacaagtgaggcacatggtgttggggcaagggtgcacaagattgctaaaaatttgcatgccaatagactagttacaatagacaaatta

SEQ ID NO: 4239 - DNA, 1003 bp, Setaria italica
  Peptide Sequence Number=SeqID_70213
ttcgttgtattgtctactttgtttgtctaacaaggaaactacctataaggttgtaccactgcttatgaaagcaattgggtggcaaggtggaagtatactggcattggagacattaaagcgtgtagttggtgctggtaatcgagctcgtgatgcacttgttgcacaggggctaaaggttggtcttgttgaagtactccttggtattcttgattggcgtgctggtggaagacagggactctgtaatcaaatgaagtggaatgaatcggaggcttcaattgggcgtgttttggcagtggaggtgcttcatgcttttgcaacagaaggtgcacactgtgctagagttcttgacgtcctgaattcctctgatgtatggggtgcttacaaggaccagaagcatgatctatttctcccatccaacgcacaatcctctgctgctggagttgctgggctcattgagagttcgtcatcaagactcacctatgcccttacagcacccccgcctcagccagcattggtccggctaccatcttcagctccctctcccccaacagctcctgcaaatcctagtggacggtattcgtaccatcattcgtagcacgacaaacaaattccttaatcatggttccttttggagatatgtccatttgaagttggtatcatttgtagagtgaagccaccataactgggctcgttacagcagcaaaatacagttcacgcctccataccccaccaaagagcagcttatgagtggctgcatttcagtacatagcatgtacagttttccattacataggggtcggttttgcgtttgttgttcctagtacacatgtaaagcatatgctcctttttttgtaacatagatgtccatagaatactcgagctcggaaatgtgtatcgattcttggctgggtggataccttctcttatggatttacatgactggcttgtcattttgacacgacggaagaaagatggatgatttttgtaaacaaaaaaaaaaaaa

SEQ ID NO: 4240 - DNA, 309 bp, Setaria italica
  Peptide Sequence Number=SeqID_70214
ccggataattggcaaaacgctcagtcattacatcatagtgttgcttggcaagtataatcgttggcgcgagaaccatagcttgatatcctgcagatataacaatgaatatagcacgcattgcaacttccgttttgccaaagcccacatctccacagattaatctatccattggtgtttccctttctgtcagatctttctcaacatctataaaagcctggcattgatctggagtaggttcataaggaaattcagcagcaaactcttccattgccacaggctttgggtatggaggtctgctctgcctcatca

SEQ ID NO: 4241 - DNA, 567 bp, Setaria italica
  Peptide Sequence Number=SeqID_70215
tttaggttaaaaaccttaaggttacctttagttgtcgtacttgtcgtagtagtaagtcctaggggtctaaaacttcaggcgacgcgacggcgatggcgatggcggcgctgcgacgcgaggggaggcgcctcctcctctcccccaccgtccccatcccctccccggcggccgcggccgcgcggtcctccgtcgtctctccaccggagatggctccacttggtgcgcggttcgtttcaactcaaattgttaggaaccggatgaagactgtcaagaacattcagaagatcacaaaggctatgaagatggttgcagcgtcaaagcttcgggctgttcagacaaggactgagaattcgcgtggcctgtggcagccgtttactgcccttcttggggatgctcccagcgttgatgtcaagaagaatgtcatcgtgaccattacctctgacaagggactctgtggtggcattaattcaacatcagtgaaagttaagacaagggacccttacaacaaaattaagaacaataactaaggtaaccaaagaaagaaaaagaaagaaagttaaacgttaa

SEQ ID NO: 4242 - DNA, 462 bp, Setaria italica
  Peptide Sequence Number=SeqID_70216
tgtagtagtagttgtagtaagggggtataaaaccaggtctgcgactgcgagagaagccagggcaaactcaggcgacgcgacggcgatggcgatggcggcgccttgcgacgcgaggggaggcgcctcctcctctcccccaccgtccccatcccctccccggcggccgcggccgcgcggtcctccgtcgtctctccaccggagatggctccacttggtgcgcggttcgtttcaactcaaattgttaggaaccggatgaagactgtcaagaacattcagaagatcacaaaggctatgaagatggttgcagcgtcaaagcttcgggctgttcagacaaggactgagaattcgcgtggcctgtggcagccgtttactgcccttcttggggatgctcccagtatgtatacatatgaagtttccaaagccaatggatggcctcttttctagtttctttcaaatgttctg

SEQ ID NO: 4243 - DNA, 1422 bp, Setaria italica
  Peptide Sequence Number=SeqID_70217
tggttaaattaaaacgtcttgggggggggtattggggtacggttgggggtagtaaaagaagaagaggggggaaaaacccaggcctgcgactgcgagagaagccagggcaaactcaggcgacgcgacggcgatggcgatggcggcgctgcgacgcgaggggaggcgcctccctcctctcccccaccgtccccatcccctccccggcggccgcggccgcgcggtcctccgtcgtctctccaccggagatggctccacttggtgcgcggttcgtttcaactcaaattgttaggaaccggatgaagactgtcaagaacattcagaagatcacaaaggctatgaagatggttgcagcgtcaaagcttcgggctgttcagacaaggactgagaattcgcgtggcctgtggcagccgtttactgcccttcttggggatgctcccagcgttgatgtcaagaagaatgtcatcgtgaccattacctctgacaagggactctgtggtggcattaattcaacatcagtgaaagttagcagggcccttcacaaattgacatctggtccagagaaagagagtacgtatgtcgtactaggagaaaaaggcaaagtgcagctggtgcgtgactcgaagaaaagcattgaaatgaccataactgaactacagaagaaccctatcaactatacacagattgctgtgctcgcggatgacatcttgaaaaacgtggaatatgatgctctgagggttattttcaacaagttccagtctgtgatatcatttaagcccacagtggcaacaatactgtcccctgaggttgcagaaaaagaatcagaagctggtgggaagatgggtgacctggattcttatgaaattgaaggtggcgagacaaaagcagagatattgcagaatctttctgagttccagttttcttgtgtcctctacaatggtgccctagagaatgcgtgcagtgagcttggagcccgcatgtctgccatggacagctctagcagaaatgctggcgatatgctagaccgtctcactctcacttacaacaggacacgccaagcatccatcactactgagctcattgagattatatctggtgcatctgcccttgaaggatgaagaaactatttggacaatttccttttcccttttttactcccaataagggcttcgtttcttctggacctggaggcttagttttgacttttgacccttatcatttcacttttccttgagagaaacaaactgtcatgccaagttgcaataattaccgacaactatgatgctgatgtgcgcccatggcatatgcagaaaaaatgttcaacagctaatgcggtatgactggtttgcgtaaatggtgttaaaccgaaatatatgtattgctgcacatgaatggcaagttttgttatattggtaaaaaaaaaaa

SEQ ID NO: 4244 - DNA, 735 bp, Setaria italica
  Peptide Sequence Number=SeqID_70218
gtcaagaatgcagcggcgccatcggagaacggcgatgcggcgaacggcaagtgtggcgaggcgacgccgcattgccacgacgacgaggaggaggaggaggaggcccccaaggtcatcgacctcggcccccgggtcagcatcaaggaccagctcgagaaggacaaggacgacgagagcctgcggcgatggaaggagcagctcctcggcagcgtggatttgaactccgtgggagagacgctggagccggacgtgaagatcatgagcctgtcgatcctgtcgcccggccgtcccgacatcttcctgccgctaccggtggagcccaacgccaagggcgtgtggttcaccctcaaggaaggctccccctaccgcctcaagttcaccttctccgtcaccaacaacatcgtctccggcctccgctacaccaacaccgtctggaagaccggcctcaaagttgacagggccaaggagatgctcggcacgttcagcccccagctggagccctacacgtacgtgacgccggaggacaccaccccgtcgggaatgtttgcccggggctcctactccgccaggaccaagttcctcgacgacgaccggaagtgctacctggagatcaactacaccttcgacatccgccgggagtggccgtcgacgagctgatcacagcagctatcggcggcggcgaggccggcctgctcgagtccctgcttcaacgttgctgtgccggagcagaccact

SEQ ID NO: 4245 - DNA, 455 bp, Setaria italica
  Peptide Sequence Number=SeqID_70219
ccctccggctgcttcctcgtgggtgaagaagatcttccagtaatacaatttcgttgtagtgcgatcctggatggttgaacggaactgaatctgtgatcgcacttctggtctctgaattctgatccgatcctgacgaagtggcagaccgatttgttttctctagtcgagtcagttatcccctggcgacaagtggtgtccaaatcgcgtcagatccgagccaacaaccgacgacgaccggcgagcggcatggccgccaatcaggagcaggagcaggagcagcgccgccgcctcctcgacgtcgcgtcccgcttccctctcccgagcggctgcaggttctcctatggcacggcgggattccgcgccgacggcgccaccatggcgcccgccgtctgccgcgccggcatcctcgccgcgctccgctccctcaagctcgccggcgccgccgtcgggatcgt

SEQ ID NO: 4246 - DNA, 1109 bp, Setaria italica
  misc_feature (1)..(43): n is a, c, g, or t
  Peptide Sequence Number=SeqID_70220
nnnnnnnnnnnnnnnnnnnnnnnnnnnnnnnnnnnnnnnnnnnttttttttttttttactattgttgtcttgtgctggtataatgaatgaactcaatcatgaatatggacaagccactgaatgtatacaaaatttcagaacagaacaagagcccattacatttttagaacacagaaattacaatgcacaataatgaatgacaagctgcacattgaattttgaaacccattacattttagaatacagaagagctcactgcatggttctagaagacattcatctgtgaacttcttttacaattgcatcttcaccaacagaagatgttggaagcaggtgtttgtcttccaagtcatcttcatcaaaattatccttgcttgttgtgtgggaatcatctgagaaacgacagtccgcaagatgctttgtctcagttgactcaagccgcatgctttctggcagaagacaattgcaaaaggcccctagccttgcaagtcgattaacccaaccaggaattgtttttcctgtcaatctggtgctaagatcatccgtgaagtggttacagttcttggaaatgaggtggtaagtatctccatgatattctgaggccattctctgaatgaattctcgaaattccaagggattcatagttgtgctgccaatgaaaatcgtacatctgtatatgaagcccgggcagttctttggttccacctcaaagaccccacttgatgggtgatcatgtgctccaaaactgtactccgatccatggacttcgacggcggagtggaagatcccgagcccgcaccagtggaggtagttgttgatcggcgtcaggtcgtacacgttgagaacgaccgggtacgtcgtcgcccccgccgcgtccccgaccgccgcgccgccggagaccgccccgcccatcggccccagcaacctctcccacggcccgccccgcccctaactccgcgaggagatctctcctgcacctcgcccgccggggaccgacctaccgcgcgcgcagcagccgccggcgcgcgaggcaccagctccgcgaggcgagatcccgaggggcgcgcgatggagacggagcaaagggaagggaggtggatgaagaccca

SEQ ID NO: 4247 - DNA, 441 bp, Setaria italica
  Peptide Sequence Number=SeqID_70221
agtacaggttccaagttttccttttttgaaaaaaaataccattctccatctatcctagataaaggtatgagcaactacatgatcttggcgaaaatctcgtcgagggcggagacgatgttgccgtagtattgccgcacctggacctcgtccttgtctctggccgcgtagtccaggctggtgacgctgttgaagaggtcggagtagagcctgcggagctcggggcgctggtccgcgggcctggcctggatgatggcgtacaggtcctgcttgaggttggacgcgctggcgcgcagcgccgcctgcagctcccgccacgccccggcgtcgacgaactgcttcacctgcagcaggttccgcgcgtgggtccgcaccacggcctcggcctcctcgctggactgctccggcagcgtgagccgcaggtcgaacgcgccggcggcgatg

SEQ ID NO: 4248 - DNA, 431 bp, Setaria italica
  Peptide Sequence Number=SeqID_70222
tgcatcgttgcgtgatcaaccaatgaccttcagagctagaggaaggctctgcagagtgcagaggccttcctctagctctgaaggtcattggtgcatcgttgcgtgatcaacctcctaagatatggctgagtgccaagaaccggttgtcgcgaggggaggctatttctgactcccatgagaccaagctcctggagagaatggcggcaagtgttgagtgcttgtcagagaaggttagagattgttccttgatctgggctgcttcccagaggataagaagatccctcttgatgtgttgatcaacatttggatggagattcatgatcttgatgaaccagatgctttcgccatcttggttgaagactttacaagaacaaagaaaccttacttaactacttagtacaaaacgtaattagtactaactaagtaaacta

SEQ ID NO: 4249 - DNA, 115 bp, Setaria italica
  Peptide Sequence Number=SeqID_70223
agatcttgcgcaggttcttcagcgggatcgtggtctttggcagcggtgggagtgtgatcttctccatgctcagcggcctgaggagcctctggttggagaagatcacactcccaag

SEQ ID NO: 4250 - DNA, 2507 bp, Setaria italica
  Peptide Sequence Number=SeqID_70224
gacgaggccgacgcgcggatcgggcggctcgagcgcagtatcgaggaaatcgccgcggccgcgcacccgccgccgcccgcgctctccttccccgtcgcgccgccgccgcagatgcacaagggcctgccgatgcagatgcccatggacgcgccgccgcacaagggcgtgccgatgcccatggacgcgacgctcaccaaggcctccatggccgctatgccagtggacgcgccgcccgccaaaggcatggccatgcccgccaaggccggagtgatggccatggacatggagctcgccgacgggcacgaggacgaggggatggtcggcggcggcctcaaggtggccaaggagaaggtgaaggagatggtcatgagcggcggcggcggctgggaggtggtcgggatctccggcatgggcggcagcggcaagaccacgctcgccatggagatcttcagggatcacaaggtccgagcctactacaacaacatgatcttctttgagacgatctcacaatctgcgaacctggaaaccatcaagatgaagctgtgggagcagatcagcggaaacatcgtgcttggtgcatacaaccagatcccggaatggcagctcaagctagggccgagggaaaaaggaccagtccttgttatccttgacgatgtgtggtctctctcacagcttgaggatctcgtcttcaagttccctgggtgcaagactcttgttgtatcaagatttaagttccccacgttggtaaaacagacatatgaaatgcagttgcttgatgaggaggaggctttttctgtcttctgccgtgctgccttcgatcaggagtgtgttcctaagactgctgacaagagattggttaagcaggtctctgcagagtgcagaggccttcctctagctctgaaggtcattggtgcatcgttgcgtgatcaacctcctaagatatggctgagtgccaagaaccggttgtcgcgaggggaggctatttctgactcccatgagaccaagctcctggagagaatggcggcaagtgttgagtgcttgtcagagaaggttagagattgtttccttgatctgggctgcttcccagaggataagaagatccctcttgatgtgttgatcaacatttggatggagattcatgatcttgatgaaccagatgctttcgccatcttggttgagctttcagacaagaaccttcttactcttgtcaacgatgcacagaacaaggctggagatttgtatagtagctaccatgactactcggtgatgcaacatgatgtgttgagagatcttgcactccacatgagtgggcgtgaccctctgaataaacggaggcggttggtgatgccaagaagggaagaaactcttccaagggactggcagaggaacaaggacactccgtttgaagctcagatagtttccattcatacaggtgaaatgaaagagactgactggttccagatgagcttccccaaggccgaagtgctcatcctcaacttcgcctcaagcgtttactacctcccaccattcatcgcaacgatgcagaacctgaaagccttggtgctgatcaactacggcaccaccagcgcaaccctcgacaacctatctgccttctccatgctcagcggcctgaggagcctctggttggagaagatcacactcccaccgctgccaaagaccacgatcccgctgaagaacctgcgcaagatctccctcgtcctctgcgagctgaacaacagcctaagagggtcgacgatggacctctccatgaccttcccccgcctgtccaacctcacaattgaccactgcatagatctgaaggagctgccatcaagtatctgcgagatcatctccctcgagaccatctccatctcgaactgtcatgacctcaccgagcttccatatgagctgggcaagttgcattgcctgagcatccttcgggtctatgcctgcccagcgttgtggcggctcccgccgtcggtgtgcagcctgaagaggctgaaataccttgacatatcccagtgtatcaacctgacagacctcccagaggagcttggtcacctgacgaacctggagaagatcgacatgcgggaatgctcgcgcctaaggagcctcccaaggtcgtcgtcctccctgaagtccctcggccatgtcgtctgcgacgaggagacagcgttgctgtggagggaggctgagcaggtaatccctgacctccgggtgcaggtggcagaggagtgttacaacctggactggcttgtagactgatgtcacgttctgggggctctgggcttccaaactgaccatgtacatatgatgtttatatgttgccctgtgtagtgcagcaagagtaatcaatccactggccaattttgacaataaaaagtcagtgttgatgcttcgactcggtgacaaagcctgaactcgttccaaaatagaaatacagggactttttttacttagttactttacttagtaaccgttagtactttagttacctttttacttta

SEQ ID NO: 4251 - DNA, 487 bp, Setaria italica
  Peptide Sequence Number=SeqID_70225
tccggtttccaccccacggaggaggagctgatcgagttctacctccggcgcaaggtcgagggcaagcgattcaacgtcgagctcatcgccttcctcgacctgtaccgcttcgacccatgggagctccccgcaatggcggtgatgggcgggaaggagtggttcttctacgtgccgagggaccgcaagtaccggaacggcgaccggccgaaccgggtgacggcgtcggggtactggaaggcgacgggcgccgaccggatgatcagggccgagaacaaccgccccatcgggctcaagaagacgctcgtcttctactccggcaaggcgcccaagggcgtccgcagcagctggatcatgaacgagtaccgcctcccgcccgaccacaccgaccgctaccaaaagaccgagatctccctctgccgcgtgtacaagcgcaccggcatcgacgacggccatggccatccctcggcgcgctcgacgccctcccgcc

SEQ ID NO: 4252 - DNA, 764 bp, Setaria italica
  Peptide Sequence Number=SeqID_70226
ggaaggcgctcatgtacttcggcctcttcctcgccaccggcatcttcttcgtcttcatcgccttcgcgctcttcctccccgtcatggtgctcatgccgcagaagttcgctatctccttcacgctcggatgcgcgctcatcatcgcctcgctcttcgcgctcaaggggccagccaaccagctcgctcacatgacctctaaggagaggctaccgttctcagtgggatttgttggatgcatggtcggtacgatttatgtttctatggtgcttcacagctatttcctctctgtgatcttctcagtccttcaggttctggcccttgcatactataccatatcctacttcccaggaggatctagtggattgaaattcatctcgtctggcctcttgtcttcggcgacaagttgttttggtcgataatgttagtttgccgtacatttacttgtttttgtatgtagttgctgatcatcccctcgatagagatttcatgaccccaacacccctatactcatcacgcttgtttctgtctagacttggatgggtgttggatatcgattatagagtgaaaaggaattcgtggtgtctatgtatctcaatgttccttgtgtcttcattgtgcaaagaaatttgttactcccatcgggctcgaggcacggacgctctgggccgatgttgtgtcttcattgtgcgaagaattgctgatacccgaagtggcattgagcctacaaatttataatttctgaagacttcaattttaaaaaaaaa

SEQ ID NO: 4253 - DNA, 250 bp, Setaria italica
  Peptide Sequence Number=SeqID_70227
atcatctggcccaacataatagcatcatctcttccttgactcctcacatcaccttcgtgcccatctcttcgcatgtatccgcagagcaactggtcgagccgcgccactgccggcggcgtcggggtctgcttcttggctccctgagtccatcccaggacggcgccgccggggctccgcgaggccgaggagcagtggaagaatccgccaagcctcaggttcgttggcggcggcgtcctcaacgaggggacgg

SEQ ID NO: 4254 - DNA, 250 bp, Setaria italica
  misc_feature (203)..(250): n is a, c, g, or t
  Peptide Sequence Number=SeqID_70228
acatattttttttctttttgcccaacagtctgtgtaaaaatttccatggatagaagatgttaaatccttctgttgctgttgtgtgtaccatatattcttgcatatatgatcatacagacacaaattaagtttatatgtaattcacagatcggtttagtgtttatattacaagagcagatttacggaaaaaaaaaaaaaaaaannnnnnnnnnnnnnnnnnnnnnnnnnnnnnnnnnnnnnnnnnnnnnnn

SEQ ID NO: 4255 - DNA, 1568 bp, Setaria italica
  Peptide Sequence Number=SeqID_70229
tttgtatcctttctaatgacaaagtcacctctggcaccatttcttttgaggatggcattgaaaatattgatattggtgggcctacaatgatcagagctgcagccaagaaccataaggatgtccttattgtagtggatcataacgattatcctgctttactggagtaccttaaaggaaatcaagaggaccagcagttccgcaagatgttggcatggaaagcctttcagcatgttgcctcttatgattctgctgtgtcagaatggttgtggaagcaatccaacaaaggagagttgttccccccaagctttactgtgccactggagctgaagtctacacttaggtatggtgaaaatcctcaccagaatgctgcattctatactgacaagagcctttctctagtcggtgctggtggcattgcaactgctattcaacaccatggaaaggaaatgtcttacaacaactacttggatgctgatgctgcatggaactgcgtatctgagtttgatagtcctacttgtgttgtggtgaagcacacaaatccatgtggcgttgcttcaagacaggacattcttgaagcttacaggttagctgtaaagggagatcctgtcagtgcttttggtgggatagttgcattcaacactacaattgacgaggatctcgcgaaggaaattcgtgagttcaggagtcctacagatggtcagacacggatgttctatgagatagtggttgcgcctggctatacagagaagggtcttgagattctccaaggcaagtcaaagacgctgaggatactcgaggcgaagagaagtggaaaggggatgctttcactcaggcaggtcaatggtgggtggttggcccaagagtctgatgatctaactcctgaagatatcacctttaccacaggatctgagagggctccacaggagaatgagcttgctgatgccaagtttgcctggctttgtgcaaagcatgtcaagagcaatgccattgtgatagccaagaacaactgcatgctgggaatgggcagtgggcagccaaacaggcgagagagccttagaatcgccttcaggaaggcaggcgaagaggccaagggagctgcattggcaagcgacgccttcttccccttcgcctggaacgacgccgttgaggaggcgtgccagaacggcatcggaatcatcgctcagccgggaggcagtatcagggatgaggacgccgtcgcgtgctgcaacaagtacggggtgtcgctcgtcttcaccggcgttaggcacttcaagcactagcgctgtgcgtgtccatggcttctcgtcttagcctagggaagaaatgaataagagtgcaagcttcgaagttggaggctgcaggttgggtatagcctttttggtcgcggtactacgaattttgagttcaggctgtaacgatatttctgatgagaaggcttttgttcggtgagctgcggaacgttactcctggccatggagctgaataagctgatgtatcgttagtgccaattgtcccaacctaaactcttgcaagttgcaatatatgagctaattaaccgaaaaaaaaaa

SEQ ID NO: 4256 - DNA, 294 bp, Setaria italica
  misc_feature (222)..(294): n is a, c, g, or t
  Peptide Sequence Number=SeqID_70230
tggagcggtggagccgatggcctacaaaaaggctggtggggattagtcatgcagaccgtgcagttgacgacctgctcgccgccgctatacctggtcgtcttcttcttgttcatttctagtttctaccaatctgtaaagatcagatacattgtgattttggttttgaaatgatgatatggctacaagatggccaatgagaaaatgaaaaaaaaaaaaaaaaannnnnnnnnnnnnnnnnnnnnnnnnnnnnnnnnnnnnnnnnnnnnnnnnnnnnnnnnnnnnnnnnnnnnnnnn

SEQ ID NO: 4257 - DNA, 421 bp, Setaria italica
  misc_feature (407)..(407): n is a, c, g, or t
  misc_feature (415)..(415): n is a, c, g, or t
  Peptide Sequence Number=SeqID_70231
gccttctcttggctgttcaccctgtcgcaccacacggcttagctggtgataagaaggatccttctcccgcagggttcttaatattttcatgaagtttcttgagaactcgttgtcacattctctcaactgaatctttgatagatcaggaaagtttgccaagctgactccaagaatgttgttcacaagttcaggtgggagcatcctacctaaccacactaggaaagtgaatccatcatcaaggaggtacaaacctcctgtactctaaacactgcattgttaatggcaatcgctgcagtgaaccatcaatcttatttggttccattgttaaataacttacaatacctactactagtaataagaagaaaggaatatagtagaatagaagacaagacttttttaacaagganaataatanaataca

SEQ ID NO: 4258 - DNA, 2933 bp, Setaria italica
  misc_feature (1)..(9): n is a, c, g, or t
  Peptide Sequence Number=SeqID_70232
nnnnnnnnnacggtaaggaacgtcagaataaaacagcatgaaggttaacagagagctctcctattacaaagactaataatagccaaaaatgagtttacacaatgaacttccaaatgctaagtaactgaatccgactagaattcttaacatttaagaacacaagattaagaaacgcgcaggccactatacgaccccagttgtataatatacccacggtatctgttgcctacttattctgatacagcagctgtattctcactctggaaaaaagaataatcacaaggacaaatattaacagtaaaagctttgtttgccagtcaaatgctgcttacaggacgacatactggaccactggcttgcgaattagatccgggatggtgttgcgagaatgattaggaactggcagcaactgaatctacattctgcagcagtttacaccaaggcaaaaatttcaagcatcgcttcctgttcgttcatcgtcattagctttgtgtctgacggtgaatttgcagtatccaatcgacgtagctgcttgttccagccatctggtcctcaacaaggttagacagaagcagaaagccttctcttggctgttcaccctgtcgcaccacacggcttagctggtgataagaaggatccttctcccgcagggttcttaatattttcatgaagtttcttgagaactcgttgtcacattctctcaactgaatctttgatagatcaggaaagtttgccaagctgactccaagaatgttgttcacaagttcaggtgggagcatcctacctaaccacactaggaaagtgaatccatcatcaaggaggtacaaacctcctgtatctaaacactgcattgttaatggcaatcgctgcagtgaaccatcaatcttatttggttccattgttaatacttcatcaactctgtatagagaaggataaatgaaattgagcagcttttttacaggcaatatcatcatgctgaaaccagcagcacatcgttcatcaagagagacatctgcataacctccacggagagcaagagatttgcagatggccaggatgtataatggcaaaaatcttagagattctggaaaaatcagtcttcctcctatccggtgttgtacaacatataagttccggtattccttcaaacttctcacaagctttaactgtaattgctgtcggacactgtccagcttatcagacagtgaattttcaaccgcaattctacccaataatgacacaatggcgccagtatctgcttgacgatacatttcactaagatctgtgaccacaggtgcagctgctgtgtggaccctgatacgcctttcaccagaggaggatgtgtatagcaatgccacttggaagtatacagtctgggtggtcattaaggtctcctctagcgacagttgcattgcaaaagctttatcagagtcaacggctggaagggctaacaggtctgtggatcttagcatgaaatgaccatgataggttgtgaaccgtaccccttttccacatctgatgcgcataacagattcccaggcagtctctcgtgtaaggtctctactaagctcatgtttaagtttatccccgtgtgtagctgcctggaacgatggataatggtacacctggccaccagtatattttgccaaagatcctaaggaagctatatcggagtacttctcgctgaaagaaaatatgtccacagcaatctgatttttcgtaaattcagcagccatctgtttgtagaaggggtcttctggcaccctcagagtatgctccttatcagttccatatgcacgaacatcatctcccctaagtctcaaacgtccaataccaagagatggcaatgtactctggaagacaagcaacttccccccaatttgactcataaccatgaaagctgctttaagtgccggaccaagagcagactcaacatttaggttgtcatggaacatatttggcaagctatcaagaaatgactcaacaacatgtctggagtcgaccaaattaaccaagaggtcatcaggcaatggcagaaaaacatcatccaaatcagcaacaaccatcatttgaggctgtgacaaagaagacttgaagttatgaaaatgcaaagtgctgtcaaaggttaagaatcctatctgtgttcgcggaaagcctggaagttcatcaaggcatgatttgattgtctttgcaacaacctcaagcaacccactccgaactgcagatactgacacatcgataagaaagaaatatgatggtggcattggtggccgcaccatatattctgttggagcaacaaactctactgttcccttagagagttcaggtctttgatcattatcacaccttctgccactagcatcaagagcacaaaagtactctccaggaacatcattgagcaaggtgcaaagattgcagcgccatttccttccagcatctgcaaatgttgcataaggatttatatatgtcctgcatcttcgacagcggatgacaccagcagacccaaagttgataaccggcacttcctccccatcaggtgattctgcaagagggtgaaccacagccccaaggggcaaatgccacctggagaccaatgactgagatgccggaatcgcatgggttgtcagccggaaatacctcgggtggcaattcaatgggtatgcctccgaaagcttaactggctcctcatcaccatgcaatggccttggcagcccctttacatcaacaccagggtcaagtgaccccggcgctgaactcagtgccaatgactggaagtcctccactaagctctggagtgtgcctccgactggaggcccagcactcggatatgccgcctggttaccaaacgtggcagtaggtcccattggagggggcggcatagtctgcactggctgttgaaatcctggtcttgggaattgagggttcgcaggcgg

SEQ ID NO: 4259 - DNA, 722 bp, Setaria italica
  Peptide Sequence Number=SeqID_70233
ttcttcgcacttgctgagatgccttttcaaggtctcgactctggtagctttcttcagatgtactaaacctagcatagggtgccaatttttccctagactcttcatcgaccgtgctgattgacatgagtgggaaatcttttagttgacccagttcagtttttgacacatgaataaattaagtacttttttgtttgatgcatgaaaggataatatagtaaatgaggaacctgcaatttctcaagaaatcgttgtagcacaaacgagcaaagcttttctgtacaagctgcaccaagcaaaaacttgtagtaaggaaagcagataacacaaaaaaaagaattactttgcagagagaagaaaatgttaaactgcctttgtaagaccattgctgtaaagccacttgtcatgtgcactttgctacagagatgttaaaagcatgtataatagggttttacttgtattaccttgttgtatggagaatggaatacaacataatctgcatcaaaaattgaaaattgctttccctcatgtttttcatactttttacaaaatacattataacaggaatccaatgccatgagatagcatgtctgtgatagctttccatcaaccaccggatattcactcgcaagatcaggcttgtagaagtcgtatgcatgggccatatgagatcccctatatttgctttacaaaagaaataggagcattaggtccaatcaacattg

SEQ ID NO: 4260 - DNA, 1717 bp, Setaria italica
  Peptide Sequence Number=SeqID_70234
cctataatcggagtattaactgtattagaacaagcaatcattctttttcaccagcataacttaaatctaaccagtaccttggcagattattcagaattcttgcaacccagcagtgtgcttgatttgaatttcggaagcactgcgattcctgctagtgctaagcaagcattacaacaatcacgtagctctaactaactttacaaccttagaactgggtagagattgatctatgccccagcttcccctcctaacagataatctaagaacactcgcatgcttaatacactgcctctgttattgatttgttgcagcttcaagctgaagacaaatcagtggccattggacactgcagtggtgacaccgtcatctttcgcagcgtagaaccttcggtacatggagtcgacgtgtgtgagataataagtgcctgcaggtaacaagcttgtgtcctgactggtcacaaaatcctttgccccatagcggtgctccatcagtttcagtgcctcgacaaatttcttcggggggaccacatgtcttgcctccagtttcttggaaacatccagtacgtttgcaatgtttagcaggctgaatggatgctcgccttcattaattttgaaagagaacattgttgatgtcaagccacttccatatgaaaacataacaatcctctggcctgccagagtttcatgtctattatagataactgaagcaaaagccgcatagagtgatgctgtatacatattcccaacttgttttgggatcaatgttgttggttgaaccttggactcgtacaggttcttcgcaacttgctgagatgccttttcaaggtctcgactctggtagctttcttcagatgacaaaccagcatagggtgccaatttttccctagactcttcatcgaccgtgctgcaatttctcaagaaatcgttgtagcacaaacgagcaaagcttttctgtacaagcttgttgtatggagaatggaatacaacataatctgcatcaaaaattgaaaattgctttccctcatgtttttcatactttttacaaaatacattataacaggaatccaatgccatgagatagcatgtctgtgatagctttccatcaaccaccggatattcactcgcaagatcaggcttgtagaagtcgtatgcatgggccatatgagatcccctatatttgctttcaaaagaaataggagcattaggtccaatcaacattgcaatagcagctgcaccaccagtaggacgagccggaccttcagcataaaccgcactgtctgtgcaaacaacaagtccataacgcccgtcccatgagttgctttcaacccagttaacacaattaaacaacgcagctgttccaccatagcatgcatttgaggagtcaactccttcaatatcagtgttgccatattcctcaaatatttgcatcagccatgtctttatagacttgctattgtctataactgtttcactgccaacttccaaacgtccaatgcacttcgggtcgatgttataatttttcaggagggacttcacaactgtcaagctcatagaaataacatcctcaacgtcagtgcagaatgccatgctatcctgcccaagcccaatggtgtatttccctttgctcacgccatcatgagtttccaactcttcctggagcacgcaggtgggcgggaagtagatgtccatggcgaggatgcccacgtccttggcctccg

SEQ ID NO: 4261 - DNA, 421 bp, Setaria italica
  Peptide Sequence Number=SeqID_70235
gaagacttgagcctccccatgcgcgcgcggcgggcgggcgcgaaccgaacccccggaacgggtcgtcggggaataacgtctccgccaggcccgtccgcggcgcaaacacacgggcgcccttgagcaaggtgtcgtcgtgttgagatcacaatccaattccttcgccacggccacgccacaccacaccacagtgttgtgctcgcctggccggccgccagcgacctgcttaatttagccccgagactgtgcgagaggagatactgaccgcacaacgatcgcgtcgtcgatccgttcctcccgttctcgtccccgtttccgcgggcgcgcgcgacgattgatcatccggtccggccgatcgtcgccgacggcatggggacggcggcggccggcgatggcgtccgccccctcggcgcgccgccgg

SEQ ID NO: 4262 - DNA, 635 bp, Setaria italica
  Peptide Sequence Number=SeqID_70236
gtcggtcttgggcgtgaagtgcttcatccccagcatccccttgagctgctgcaagatgatgatggccgccgtgccgcccatgaacccggtgatcgtcgaccgcgacaggaaatccactataagccctaacctaaagacgcctagcgcggtctggatgacgccggtgaagaatgcggcggtgtagaagagctgcaggtacagctgcgggttctcctccggcgggacctccgcctcgatgatggacgccagcagcagcgacgccgccgccaccgtccccaccgccaggttgttggagctcccgaacaccgcgtacagcagcggcggcacgaagctcgaatagagtccgatgatgggcgggaggttggcgagcttggcgtaactgatgccctgcgggatggcgaggctggcgatggtgacgccggcgaggaggtcgtacttgaacttgtcgagggagtagcgcggcgcccactcgagggccggcacgaagtacttgagccctccccatgcgcgcgcggcgggcgggcgcgaaccgaacccccggaacgggtcgtcggggaataacgtctccgccaggcccgtccgcagcgcctccacgaacggccgccgcgccgacaggttcaccttgtgctccgccg

SEQ ID NO: 4263 - DNA, 442 bp, Setaria italica
  Peptide Sequence Number=SeqID_70237
ccgccgccggctgcagctggagctccagatcctcaaccgcgaggtcgacttcctcaaggacgagctacaatcacttgaaggagttccaccagtttctagaagctgtaaagaggtaaatgagtttgttggtacaaaacaagatcccctactaccaatagagaaaaagaggcacagatcctgcggtcttttttggtggatcggatcaaaattgtgcatatgcgtgccatggatctgctgctcctgccagtgcttgcccaagtgcaaaaggccatgttgcttcgattgctcttgctgttcatgccctgatgtgtcgtgctgcaagcctagctgcaaatcttgcaacaagccgtgctgcgggccgaacagctgctcatgttgtaacgtgtcctgctgcaaacctgattgcccatcctgtagtccaagctgcagctcgtgctgaaaa

SEQ ID NO: 4264 - DNA, 281 bp, Setaria italica
  Peptide Sequence Number=SeqID_70238
taaattttcggccaccgcacttgtttgttgactatttggagcaagttctgtttatattatgctaacatcctcattcaaaacctgccagggtaaatgagtttgttggtacaaaacaagatcccctactaccaatagagaaaaagaggcacagatcctgcggtcttttttggtggatcgggtacatattctgttatactttttttctttatggattacatggcaggttaatgccaatcttgattatgttttattttgtttcacctctcaaaaaaaaattgtgg

SEQ ID NO: 4265 - DNA, 418 bp, Setaria italica
  Peptide Sequence Number=SeqID_70239
cgagcgcgacggagcaggcgacgcgacggccgaccggcggcggagagcgggcgcaagcgagggaacgggtgagcggaggaagcggcggcggcggaaagggagcgagagagagcgacgggcgtatgtggcgtctgtggatgaggacgggaggcgacagggatttgggaggaacgcgtcggtggagcagccgctcgaacggcgtcggtgaagcgctccgaacggctgggctgaaaagcccaaccggaagaagcccagcgcagcagcagaagcccaccgaacgggctgataacttgcaggtgaaagaagcttctctggcaggcgaaggcggagggtgcgtgtggatgctgcggcggtggctggtgccggcggcgacgccgtcgagtccgcctttgattccgcttcggcttccagattccag

SEQ ID NO: 4266 - DNA, 239 bp, Setaria italica
  misc_feature (236)..(236): n is a, c, g, or t
  Peptide Sequence Number=SeqID_70240
gagcggcagaggagatggcgaagcagcagcagcagcagctttgcgtggtgttcctggtggcgttcctcgtcgtatctgccatgaacgctgtccacgtggacgcagggagggcgctggcgcaggtgagctacggagccctgatccccggcggcacaccgtccgtgcctcgtggccagccgtactctggcagcgggtgcgccaagatctacggatgtaaaccacctccggctggggcncca

SEQ ID NO: 4267 - DNA, 304 bp, Setaria italica
  Peptide Sequence Number=SeqID_70241
tcatcataaagcaaattcattgatttagaacaaggattttttgggaaatgtagcctataaaagaactcaattttactactgtgagcttatatttgtgaatgtttcacctcatatatgctcatctctatgttagagtacctataaaagaactaactactctcattgatgctcgctatttgtgaagagtttatccaaaaactttgagtatttctatgtgattaacatagtgtaatgcaaattgctccctttctgaatatgtaacttgaaggaagctgtaatattggttagaccgcttatcctgctt

SEQ ID NO: 4268 - DNA, 1166 bp, Setaria italica
  Peptide Sequence Number=SeqID_70242
tcagaagatcacgacgaaacgtgtcctggctctgaactctgaactgtgttatccccttccgttggcggtcgcgcggggaagaagaaggtgggtgaaccatggcgatcgtggccgtgctcgtcgcacccaccaccgcgccacgccgctgctggcgagccgcggcggcttcctcttcggcggcgtccggggtggacctcaaggcgctgcaggccgccatcgacaagaagagcagcgatgatgtgaagcaggcgctggaccagctgagggagctcggctgggccaagcggtggagttcgcagccgtacgtgtcgcgtcgcacgacatctctgcgggaactcactacccttggaatcaagaatgctgagaatttggcaattccaagtgttagaaatgatgcggcgtttttatttacggttgtcggtaccactggattcttagccgtccttgcaggccagctccctggggattggggcttctttgttccctatttgattggaagcatttcattgatcgtattggctgtcggaagcgttgctccaggtcttctgcaagcagcaattggagcgttttctacggtctttcctgactaccaggagagaattgctaggcatgaagctgctcacttcttggtcgcctatttgattggcctccctatccttggatattctttggacatcggaaaggaacatgttaatttgatagatgagcagttacagaagctaatatacagtgggcagcttgatggaaaggaactagacaggttagcagtagtttcaatggcaggactggcagctgaaggtctagaatatgacaaagttgtaggtcaatcagcagaccttttcaccctccagaggttcataaacagaactaagccgcaactaagcaaagatcagcaacaaaaccttaccagatgggcagtcctgtttgccgcatcacttctgaagaacaacaaagcagcccatgaagcacttatgtcggcaatgtcccagaatgccagcgtgttgggttgcattgaagcaatagagaatgcctcctgattgcaatgaacttgagtaccctaacatgatcggatttgggactgttgaagaaaacttaaaaagatgttgaattcatgctctaacaggaaaaggtcttttcttaccattaagaaaaaaaaaaaaaaaaaa

SEQ ID NO: 4269 - DNA, 550 bp, Setaria italica
  Peptide Sequence Number=SeqID_70243
tttttttttttttaagttttaattgatcattcttatataatctactgattatagtgagattgagttgttggtacatcagataatctgtggcaaaagattgaacaaaacttgaaaattttggtcacagggtataattttacagcaaaattgtgtaaaactacaatacaaagtcaaaggaaatctccatggtacacctaaactgatatcctagaagcatcttggacactgtcatgataggtgacatgtggattcagggataaagtaatgttaaatctcggaatacatctctaaaaatatatatttgatcttccaaaagaatgcctgcaaagagctctttcagctaagtcatatgatcaaggcagagagcagatcagcagttgaatgtgaggtagcaagggagataaatagatataattattcatacaaaagaaatgatcttctgatcatgtgctcgcaatgatgcactgttgtataacctcatagtgtaccatgtgggatagaacccatttcgatacattgcatccatccacctctcagcttcatttctgca

SEQ ID NO: 4270 - DNA, 1035 bp, Setaria italica
  misc_feature (1)..(58): n is a, c, g, or t
  Peptide Sequence Number=SeqID_70244
nnnnnnnnnnnnnnnnnnnnnnnnnnnnnnnnnnnnnnnnnnnnnnnnnnnnnnnnnntttgaaaaaaagagaagagaccaaaccatgcatccagctgctgatatacatcgatcttagtagtccatcaaagaacactccaatacagcttcaagcatgcagttgctactataacaacacgcattcttatcacagtacggtacagtttaggtttagcttcgccttttgtgtcgcccaccacattcttcaggtctcctgcacggcgttgcttcaggggtggtcggccggcaggctggccacgtccaccacgtacccgcggagcgacggcgaccgggcggccagctccaccttgcgctgccgccggttctgcacccgccgccgcgcgatgtagccgcgcacccagggggtcacgtcctcgctgatcttgatcatgacgaagaagaggaggcggtagatgacgatcatgctgaacagcacggccaggtccagccacttggaccggttcacgtcgatctggaacacgttctccaggatgtactccccggggatcttgggcagctcgtcgtcctggttgtcgaacaccaggcccttgagatcgttctggtactggccctgcaatgcccagtagtggaagctgatatatgacatggggctgagactgaaaagggctttgggatatcatgtggaagcctgaagtagcctgatacaagcatgaatatgccctgaatccctgcgccggataaatgatgcccatgaggaagttgggggatcacgctggcaatggccatcatcaggctgtcgacaacagtgacgctggcatagagggccaggacgaagaagaggtagtgcatgaagcccgggtggaggcgcaccatgaagtagcacagcgtgcccgacacgaaggtgatcaggatcaggaacggcatcgctgacagcgtgttgctgaatagaacaaaacgaccaagacaacaaccgtaaagtaagaacccaaattaaagaaaagaaacctaaactaaaccctttaaagaaaaaagaaa

SEQ ID NO: 4271 - DNA, 1336 bp, Setaria italica
  Peptide Sequence Number=SeqID_70245
ccgtgttgcagtcaaatatttttaattcacctgtgtggttaccagccgcaactcgagatgcatctccaagaaatgtcatgcaagtcagcagtgatgcctcatcacggcaaacacggcattgcttgaaccgactgtatataaaatggcgatccctacgaggtatctggaccccactaaactgcctacttatctcacggcttcccatacgagcagctatgtttgctggtgcgctaaggctgcgactgggctcggggcaaacatgagggtgcactagagaaagtggtggcaaagttgtaactggagcaggacactggcgatgttgatgtttcaagtattgtaccaccagcgagtcaagtgtcatacgctccaaatttcctgattgttgatcattcacaccaggatgggctgtggttgtcactgttcccggtgtgccttgagaattgtccaagttgtcagtagaaatgttgttgaagtttgtccgaccacaatgaaaggaagtaggagaatctactgctaccgacagacctttgcgagtagcagcaggagtttggaatgcagaaggttggtatgtttgatcagctgttgcagagcgcttcgctgctgatgaagaattaagatccttcatgtccacaagcttcctcttaagtggcagcgacagcggagttttatgcaatgtgtctgcatctccagtatcagacccaataggtacaggacttttaagggggttgttgcttgctctattaagagaaacgggatgcggagatagagttctctgagagaaactagatgagaaggtcagtgcctttttcttagatgaaggcaggacagaatcagatctctgggcagactgatctgtggatatatttgttttatctgagagaaaaccatggacacgtccagagggccactgttgctgaacagatgatgcttctagggcagaaacttggtgggcaggaagcactgctgctgtcagtggcaaaggtgcaaggccagcctccttctgcagcatggcagcagtggcggtgaaaccagacccaaggaggtgttcatgtattagctgcatcagttcccttgagtggtaggagataggagtagcagcagctatcccagctcgctcaatgcgcctcaatgctggagcagcagcatcagttgctgctaatgtagtttcttttccagaattcgtcaagaccccaattagttcaattgccacttgggtcagctcagcttgccatcttccactatcacccccagatgtctgggcactggtatcgcggatcagttctgataatttcttgcccacctggagctttgtcagtatatgtgcaattgcatcgtc

SEQ ID NO: 4272 - DNA, 816 bp, Setaria italica
  Peptide Sequence Number=SeqID_70246
acaattttaacacatacataactgggaactgctatagtggcaccgcttttctgggatatatttgctcaccaggtcagttctacttaagtgtatttattattgattatatgctcatctctctcaaagacactgccttctcaatttgtgcgtgcttttttaaatggtttgataatagttcatagattatttattctaaaaccatccaatgttcttccttgcttcttcatgttaagtgcatgataacatttttctgataggatttttgtcctattatcgccaatggaaaatatctcattctggaaacagaagaagaaatatgtgaaggatttttgtaacacaaataatttacattctttgttagatcgaaagagtacttaccggatttattaggaatcctgctagtttacaggtcaaccattcagctaggggtgtcagcaattctcaagagtacacaatacatgatctgtgttgtcactttatccatatggtgtgcaattttctaaacctggccagcaatgcccctctaaatgaagctctgattgtttaccatgagctgccacatgaatgttctcattttcagtgggagtgtaatctgtcatgccttgccatggttgttgcactccaactttgattccaaagtgtgagtttacatcatgtgttaaacattacagatgtatatgggaatcaatagtaatttagcattttcctatcaaagtctttatataactttgttatgctttcaggggcttgagaacactcgaatattattgacatgccaagacttgaattcccaagtaaatatccagtataactctt

SEQ ID NO: 4273 - DNA, 1588 bp, Setaria italica
  misc_feature (1481)..(1588): n is a, c, g, or t
  Peptide Sequence Number=SeqID_70247
cttattttggtggtatttggcataaaaacagaatatggactggtacttcaagtggcgttggtcttatactcatagaaccagtccagctctcctatttcaatcgtgatatgttacgtggctaccctgatgactttgagcgattttcctatttttcccgtgcatcgttggattatattgtaaaatctggaaagcagccagacattttgcacatacataactgggaaactgctatagtggcaccacttttctgggatatatttgctcaccaggggcttgagaacactcgaatattattgacatgccaagacttgaattcccaatgcctagaggagccaaataaggtggagatgtgtgggcttgatcctcgtaagcttcatcgtgctgatcgtctgcaggatcctaataagacacatctagttaatattcttaagggaggaatcgtttactcaaataaagttgttttaatgtcctcaatccattcgagagatgttcttatacagggttcgagacatgggttggaagcaacattaactgcacataaggagaagatattggttgcttctcatggattggatggtgaactttggtatccatcaaaagacatttatcttcctcggaggtattctgccaatgatattgaggggaagtccatttgcagagaagcacttaagcgacgacttgggttcagcagtggttcgtccattatagtaggatgtatctgtgatggttattcagatattcataatctcaaggaagcagttcatgttgctctgcgcaaaaatgctcaggttaggatctgtcgtgaactcaactgtgcgggcattaaaggaagagtttatcaatcttgatgatgacatagcattcgtcgaggaatacaacgagacacttgcacatttaatatatgcaggctctgatatcattctttgctcttcctttgaagacccatcgcttcaaatagcagtgaaggcaataaagtatggatgtgcaccggtacagataaactttcccaacgatggatccaggcaatctgaggggcgtgattgccgcaacagagtaatgtctaagtatatcatctcaacctatggagagttctctcttcttcaagcacttgatagttttaagaatgacccttccagttgggatcagcagataaaagatgggatggctaagggtttagcatgggatgctgagtgctatgaccttcactgggaggcctattcctctttaaggaagctgtgaattgggaatccgtcaagaaagcattaggcaccagatccccaaataaaaggtacaatgtttgcacttaatcctgtaaatttagtttttctaggttaactataaatcaagctaagcaattcgttcattctatttgttgtaaataagtaaatagtgaacaacggttcataaagcttgtggttttcctatacttgtaacgaatggcctcaaaccattgttaaatcatgtcgttttgtccaaaaagnnnnnnnnnnnnnnnnnnnnnnnnnnnnnnnnnnnnnnnnnnnnnnnnnnnnnnnnnnnnnnnnnnnnnnnnnnnnnnnnnnnnnnnnnnnnnnnnnnnnnnnnnnnn

SEQ ID NO: 4274 - DNA, 425 bp, Setaria italica
  Peptide Sequence Number=SeqID_70248
ccttctcttattgaggcctcttcatcaccaaccatcatcgccattgccaatccaccagtatgaagaagctactctgtgtagtactagtctcgagccttcttctcgccactctttcaggcgcttcttcatcatctctcacttcctccctcgggagagatcaagcacaagttctaggccgcaaaggcgcagtccattacgagcatctgagcaggaagatgcagcagcccgaggaattggccgtggaagtgaagaaaccaacggagacgaaggccggctggacggtggacaagggtgcggacgccgaggaagggctgatctacagcgcggactacagcgcggtggccatgcacgctgggtccccgccagcccaagcacaggcaccccaaaaccatagggaatctgttcgtctccgtgtacaaccttta

SEQ ID NO: 4275 - DNA, 255 bp, Setaria italica
  Peptide Sequence Number=SeqID_70249
tcttaactaatgtcttcttttgagctcatctagagcatagagataagattggataagaaataacaatcatatcatagcaagatctttaatgtatttggcaccactttacatggttaacacagttcttggtgttacctatttagtatacttgatctataactgttgtatttccttgttataagcgtgatacacttcatcattgtaagcctaaaattccactttttgggcatgcttctgtaattattgttgtatgcg

SEQ ID NO: 4276 - DNA, 892 bp, Setaria italica
  misc_feature (836)..(892): n is a, c, g, or t
  Peptide Sequence Number=SeqID_70250
gtatatacaaacgcatcacccgatccttggaccttgcgtgtcgacggtccaccccccctccgaagtaatcgaccgcgaaagaatcgagccgccgaggggcgagcgagagcagcgtcgtcggcggcatgggtctgcaggaggagtttgaggagcacgccgagaaggccaagaccttgcctgagtctaccacgaatgcgaacaagctgatcctctacgggctctacaagcaggcaacagttggtgatgtcaacactgggcgtcctggcatcttcaacatgaaagacagagccaaatgggatgcttggaaggctgttgaagggaaatccaaggaggaagccatgagcgattacatcaccaaggtgaagcagctgctggaggaggctggtgcatccacttcctaggctatggaaacaccatcatccgtagtgctgcgtacatagttatgttattatgcatgaataagtaataagattgttatctgccagatggcgcttatgatgtcatctgtacatgtaactgttcgtcgtcattgatgttcagcgtcgtttataaggctgtaaaactcttgtgaaaacacatggatgctacctcagctcatcactgtatggatcttcatctctgttaaactggcagccacatttgcagccatgtttctgcaggaaccattgataatctgctgcacaagttcaggatgtggtcctcttcacacatcttcctgtatcctgaccatgatatgtgtatgaggaagatatgtgtctaattagacactgtttattttgtgttttctgtgaaatttggtcatgattcattgatttgtgaaaccaaaaaaaaaaaannnnnnnnnnnnnnnnnnnnnnnnnnnnnnnnnnnnnnnnnnnnnnnnnnnnnnnnn

SEQ ID NO: 4277 - DNA, 456 bp, Setaria italica
  Peptide Sequence Number=SeqID_70251
tcaacaaagcaagctaaggttggaacccaaaagacacctctcaaaggatttgctggagacaacattgacatatcagcacaagacatacaaggaagctgtcaaaaggcaaatgtcacaggcttcagcgtcgagttagataacccgatcctcggatggaaaagtggtgacaggcgctcaatcagagcgcagccacaggtgtaatgatgttttggaagtcggatacgtatacgctagtaatcgtttttgaggctctagttgctccctagatgtccatcttgttagattccgtgctgctatcaaggggaagggatgttatccgtatggcagagttgatgtactccatccattgtactttggttgctcctcgtgctgtgtcaagtcattctttggaatcatttcattggcgagagctgttattgttcgtatgttgcaacctgagtcagtttattagttgtg

SEQ ID NO: 4278 - DNA, 1672 bp, Setaria italica
  misc_feature (1659)..(1672): n is a, c, g, or t
  Peptide Sequence Number=SeqID_70252
ggccaccgccaccgacatcgcctcgtaacccgtcgaatccacattccccgaaccccacgccgccaccacgcgcattcccgatccgaccgcgccgcgtcgccagcccaccaaggggaaggagaggatgtcgtcgccctcgccggcgcccgcccgcctggatctggacggcaaccccgtcgcgcccctcaccatctgcatgatcggcgccggcggcttcatcggctcccacctctgcgagaagctcatggccgagaccgcccacgtcgtcctcgccgtcgacgtctactgcgacaagatccgccacctcgtcgaccccgcgccgccgcacctcgcaggacgcatctccttccaccgactcaacatcaagaacgactccaggctcgaggggctcatcaagatggccgatctgacgataaacctggcggcgatctgcacgcccgcggactacaacacgcgccccctcgacaccatctacagcaacttcatcgacgcactcccagtggttaagtactgctccgagaacaacaagcgtctcatccacttctccacgtgcgaggtctacggcaagaccatcggcagcttcctccccaaagaccaccctctccgcaaggaacctgaattttatgttctgaaagaagatgagtcaccctgcatttttggtccaatcgtgaaacagcgatggtcctatgcatgtgcaaagcaacttattgagaggcttatttttgctgaaggtgcagaaaatggccttgagttcacaattgtgagacctttcaattggattggaccaaggatggacttcattcctggtgttgatggccctagtgagggtgtgcctcgggttttggcttgcttcagtaacaatctgctccgccgagagcccttgaagcttgttgatgggggccagtctcagagaacttttgtttacattaaggatgccatcgaagctgttgttttgatgattgaaaatcctgctcgagctaatggtcacatcttcaatgttgggaatcccagcaatgaagttactgttagggagttggcccaaatgatgacagaggtctatgcaaatgtctcaggagaggcaccactggatgaacccatgattgatgtgagttcgagtcagttctatggtgaaggatatgatgatagtgacaagagaatccctgacatgactataatcaacaagcagctaggttggaacccaaagacacctctcaaggatttgctggagacaacattgacatatcagcacaagacatacaaggaagctgtcaaaaggcaaatgtcacaggcttcagcgtcgagttagataacccgatcctcggatggaaaagtggtgacaggcgctcaatcagagcgcagccacaggtgtaatgatgttttggaagtcggatacgtatacgctagtaatcgtttttgaggctctagttgctccctagatgtccatcttgttagattccgtgctgctatcaaggggaagggatgttatccgtatggcagagttgatgtactccatccattgtactttggttgctcctcgtgctgtgtcaagtcattcttgggaatcatttcaaacaaaaaaaaaaatattgtaaccctattgtatttgtatttgtttgttagtttttcgtttagttttcttttagtttttttcttttttannnnnnnnnnnnnn

SEQ ID NO: 4279 - DNA, 595 bp, Setaria italica
  Peptide Sequence Number=SeqID_70253
gcttcccagatacgctggcctctgaagaagaaatctgtgccattcttgacttcgtgttggacatttccagagaatgatgcaccatcgcagtatcttattttgactttgttccaattgtaaaaatctggattctgagattggtcatcactgaggatgccgacgaattcggcgcgagtatccatgtggtcagaggagccgagattagtttgcttacgctgagcgcaggatttgaagttgcggcaccagctgccgccctccaagtgaaggagccagttgtgtgatccgtccccgaatcctgggaggaagtggtagcccggcggcgtcccatccaagcacactgcgcccctgtcgtagacgagcgtgaggtcgaccagggcgttgaggcgatgcccgtagctcggggatgggggtggggaagaggaaggggccgcggcgtagcgggaaagggtgaagaggagggcggcggcgaggaaggaggccacccagaagcgcttctcctccaccagcttcgacagatccacagccgccattaggagggattcccttccctagttccctttctgctactcctttgcttgctacaaggaagaagaag

SEQ ID NO: 4280 - DNA, 385 bp, Setaria italica
  Peptide Sequence Number=SeqID_70254
cgagggtcttggccgacgaccgcacgaagaggaagccgccgttggggaagttgcgcaggctgtaggggtcgcccatgtacacgtcgctggagatggcgatgtccgccgccatcgagatgtgccggaaagggtcccggaaccacatcacgtccacgtcctgcaaccatccatagtaattggttatttggtttgtttagcttagtttttttccccttcagtaaagcatatatgtaactactactagtaggcctgctagattattctgcttagatagtgcatcggcgacgatagaatcgctgtcgtcacgtcgtcacccagctgatcgacgttcaactctgtcgcggtcccggcgggtcccggcggcgccaccaccaatgcgatcgcc

SEQ ID NO: 4281 - DNA, 1124 bp, Setaria italica
  Peptide Sequence Number=SeqID_70255
ccttccctccgttccaaatcgtacgtcgttttaatttttctaaattcataaatattattatacatctagaatctaaaaaaaagtcaaatcggaaggaacggagggagcagctttcatcacaaatcaaaagaatcaaatctacctctcctgaatcttttttcaactctttacgccaagaagcagcagagaaagaatggacaagaagcaatgtgtgatcgggcagccacctgaatgatgcgctggaagtggcctcgccgtgcacatccagtcacatgtgcaccggccgatctcgatcgaacgaatggatcatcatcggacctacaaagctaccaccagaagttcgccaccgacgtctgatgatcagtggatgcagatgcctgggagcttccactggaactttccggcgcggcgctcctctggtgtcccagcggtgtagttcctccagacgtcgaggacgccccggaggtcgtggagcttggccccgagcccgacgcagcagttggcgtggagcgtgcagatcttgttgaggtccttgctgagctggcagaatccgctgatgtaggtggtgtcgaggaactggatggcgaggtcgagcttggcggactgctcgtgcttgatcaggttgaacacgtcctgctcgtgcttcccgaagaagcgccaccgcccctgctgccacgcccggtagaagtcgagggtcttggccgacgaccgcacgaagaggaagccgccgttggggaagttgcgcaggctgtaggggtcgcccatgtacacgtcgctggagatggcgatgtccgccgccatcgagatgtgccggaaagggtcccggaaccacatcacgtccacgtccgtgaagaggaagttgtatccgagctcgagcacggtctgctggaaccggttccttcgccacatcatctcgaggtagtccttgctcatgaacatcttctctgatcggtagtcgacgccgttggaggtgcggaggaagtagcagtggcggtgcactgcctggcagccctggtatgcggccgggtccatggtgacgatgaccaggtggtccagcaggcgcgccacgccgccctccccggtgcggaagctctcgaagaagaggtcgagcagggagttactta

SEQ ID NO: 4282 - DNA, 429 bp, Setaria italica
  Peptide Sequence Number=SeqID_70256
tctaacacagctcagtactgtagggcatactatggacataaaacagttagatttttgtatccataaaaagtttgtgcagcaatgttctccataaatttgatagtattgcaactaactgcactgcctgtctgtgtaggatcctcgtgctgtgttgattggtcttcttctaattgtttcagcatttcaattcataaatcagatgacaaggtataaccaggtatggacatggaatacaaagacaaatataaggttgcagttattttagatgtgatttgtattggttgtttatgaaccaaatattcaacacattcagaatttcaatgctaacagacaacaggctctgagaactttgtacatactatcactatcaattatgcttcaaatagtagatatagttttagtaaatgtatccattactgttctactaag

SEQ ID NO: 4283 - DNA, 963 bp, Setaria italica
  Peptide Sequence Number=SeqID_70257
aagatttcatacctggcaattataaagataaaatctattttaagattggttctatgattttgtcttttaacatctgtgcactgttactgacagccaattgtgtgtattgtttattggccatttcaggttttttacaacacagctcagtactgtagggcatactatggacataaaacagttagatttttgtatccataaaaagtttgtgcagcaatgttctccataaatttgatagtattgcaactaactgcactgcctgtctgtgtaggatcctcgtgctgtgttgattggtcttcttctaattgtttcagcatttcaattcataaatcagatgacaaggtataaccaggaaggctgaagaagaggtcagtaatgaagttgaattgcaaatccatggtgtcgagaaaccatctgtctggaggctctatggtgtccagtttatacttttgccttattccattggcaaggtgcttacttgggagatttgttggttttggagatactggataaagaaattgccatatgcatgggaggatgcttgctacttgactcagacttcactcaagatacctgccggtacttggaaaaatattgatgatcctaggaaagaggacctcgtgatgagacgcctttgggagaagagcaacatggagaggtacatcgcggagacaaggaaggaatcgaagcgtaggaggtagctagccgtataacatttttcgccccgagattacggggaggtcttggcaacacaacatttagaacaacgtgttggaaggaaaggaagcacacagacaactcaggcttgatttcgccgacagcgggatgcgccaatggtccagaacgaagaagcatagaagttttgttaccctgtgaaacaaactgtaattacatatttacatcgttgaacgtgtatgttaaatctttatacaacatatatacatcggatatttgtttccttttcct

SEQ ID NO: 4284 - DNA, 1826 bp, Setaria italica
  Peptide Sequence Number=SeqID_70258
aggcatccttcgaacttcggatccgccatggctgccgcttctccccctcgttctccctctcccccctcctccctggctacaaatgccatctactgcgacgaagacgacctgctacgacctcctcgggcttggacgcgaacgcgtcagaccgcacttaacaaaacactaagctcgccctcaaacaccatccggacaagaaccctgatccggagtcgcggaagctcttcgtcaagatcgccaatgcttacgagattctaaaagatgaatccactagggagcagtatgactatgccattgcgcatccggaggaggtaaacatgcattcccttgctgtcattaaagggagtgtaactgtgctattatcaactcttcatcatcccataaaattatttctattttcaataattagaaacattttgacttataaagtttagccaccttttcacatcctgtggtcacgccctatgccacttcttcgagctacatctaccagatgtccagatcaactctttatacgagtgaagcacacttaattaaacctttagttttcagaactcagtaagcacatatataaaagagcgaacattattgttccttatagttccatcctcagtacttgccagaagttttttcatcattgcttgctagattgcttgttatgtattcatatgaacctagaggttccattggaaccatgtcaatccttttagtggctaaagtgctaaggatatcttgctttgtctgttgcatgttttgaaggagcaatagttgatacagctctttccatgttgggaacactgttctcaactagacctttacttcctccaatcaaaaatatataagttcattcggacatcgacatgatcttcaatatgccattttgactagtaatagctataaaaatattaacttcaatggaaatttttacatattatgagattactttttatgataaatctcgtaacattgtggaatagcagatgttatgccacatatgtactctttcagcttattacacatgcaacatatttacatgctatatctagtttttttggttaactcaattagttttctatcacaaagattcatcatgggcttaagtttgattttgagaatatatagatatcagtttttctggaaaatagttatttacattgaacagacctaactttttcgtttaaaaaaaaatggatccgcgttacctgagaaccagagcatttgaattcagatacccaatattgcccccaaataattattccaatccaagcaatttccacaagatttcatacctggcaattataaagataaaatctatttaagattggttctatgattttgtctttaacatctgtgcactgttactgacagccaattgtgtgtattgtttattggccatttcaggttttttacaacacagctcagtactgtagggcatactatggacataaaacagttagatttttgtatccataaaaagtttgtgcagcaatgttctccataaatttgatagtattgcaactaactgcactgcctgtctgtgtaggatcctcgtgctgtgttgattggtcttcttctaattgtttcagcatttcaattcataaatcagatgacaaggtataaccaggccatagaaagtgtcaagcaaactcctgcttacagaaataggttaaaagcattggagtttgagcgaacaggaggaattgctaacaaaaagaagggtcacaagcaggcagataagaaggctgaagaagaggtcagtaatgaagttgaattgcaaatccatggtgtcgagaaaccatctgtctggaggctctatggtgtccagt

SEQ ID NO: 4285 - DNA, 443 bp, Setaria italica
  Peptide Sequence Number=SeqID_70259
gccttctcccctccgtcctcccctcctccccctacctccctcccccctcctcctcccggctacaaatgccatctactgcgacgaagacgactgctacgacctcctcgggcttaagcaggacgcgaacgcgtcggagatcaagaaagcctactacaagcactccctcaaacaccatccggacaagaaccctgatccagagtcgcgaaagctcttcgtcaagatcgccaatgcttacgaggtctggcctggacattcctgcccatttcagtcttacttgtagtttacatatcttcctgacatgactgagcgattcgtggcgcccaagatctagtgtctaattccatgcatcaatgtcaattttcgcaagattatcacctgcaccgatatgtttatgaattgcgtccatgaaatcttgctcaaatcagtacagtaaccacggtatc

SEQ ID NO: 4286 - DNA, 738 bp, Setaria italica
  Peptide Sequence Number=SeqID_70260
catccttcgaacttcggatccgccatggctgccgcttctcccctcgtctccctcctccccctcctcctggctacaaatgccatctactgcgacgaagacgactgctacgacctcctcgggcttggacgcgaacgcgtcagagatcaagaaagcccactacaagctcgccctcaaacaccatccggacaagaaccctgatccggagtcgcggaagctcttcgtcaagatcgccaatgcttacgagattctaaaagatgaatccactagggagcagtatgactatgccattgcgcatccggaggaggatcctcgtgctgtgttgattggtcttcttctaattgtttcagcatttcaattcataaatcagatgacaaggtataaccaggaaggctgaagaagaggtcagtaatgaagttgaattgcaaatccatggtgtcgagaaaccatctgtctggaggctctatggtgtccagtttatacttttgccttaattccattggcaaggtgcttacttgggagatttgttggttttggagatactggataaagaaattgccatatgcatgggagtatgcttgctacttgactcagacttcactcaagatacctgccgatgaacctaggaaagatgacctcgtgactgagacgccttagggagaagagctacatggagaggtacattgcggtgacagggaaggaatcaaagtgtaggaggtggctagctgtataacatttttc

SEQ ID NO: 4287 - DNA, 1423 bp, Setaria italica
  misc_feature (1388)..(1423): n is a, c, g, or t
  Peptide Sequence Number=SeqID_70261
cttccccgtttggtagagctccttcagaagctggtgaagaagccctcgacggagccgtgccaaagaggacccaagaagctgcccagtgtttacaactgaacggcagaggcatccttcgaacttcggatccgccatggctgccgcttctcccctcgtctccctcctccccctcctcctggctacaaatgccatctactgcgacgaagacgactgctacgacctcctcgggcttggacgcgaacgcgtcagagatcaagaaagcccactacaagctcgccctcaaacaccatccggacaagaaccctgatccagagtcgcgaaagctcttcgtcaagatcgccaatgcttacgagattctaaaagatgcatccactagggagcagtatgactatgccattgcgcatccggaggaggttttttacaacacagctcagtactatagggcatactatggacataaaacggatcctcgtgctgtgttgattggtcttctcctaattgtttcaacatttcaatacataaatcagctgacaaggtataaccaggccatagaaagtgtcaagcaaactcctgcttacagaaataggttaaaagcattggagtttgagcgaacaagaggaattgctaacaaaaagaagggtcacaagcaggcagataagaaggctgaagaagaggtcagtaatgaagttgaattgcaaatccatggtgtcgagaaaccatctgtctggaggctctatggtgtccagtttatacttttgccttattccattggcaaggtgcttacttgggagatttgttggttttggagatactggataaagaaattgccatatgcatgggagtatgcttgctacttgactcagacttcactcaagatacctgccggtacatggaaaaatattgatgaacctaggaaagatgacctcgtgactgagacgccttagggagaagagctacatggagaggtacattgcggtgacagggaaggaatcaaagtgtaggaggtggctagctgtataacatttttcaaccagagattacggggaggtcttggtaacacagcatgtagatcagcgtgttggaaggaaaggaagcacacagacaactcaggcctgatttcgccaacagcggattgcttgggggatcacagtggttgtgatcttcagaacgcaccaatggtccagaacaaagaagcatagaagttttatttgttacactgtgaaacagattgtaattacatatttacatagttgaacgtctaggataaatccgtatacagcatatatacatcggatatttgtttcctttttccaaaacaatttgtatacatgtgtactggtcggatggacggagcgtttatacatgtatacattcgttggctgctgccnnnnnnnnnnnnnnnnnnnnnnnnnnnnnnnnnnnn

SEQ ID NO: 4288 - DNA, 385 bp, Setaria italica
  Peptide Sequence Number=SeqID_70262
ttatcccgtgcgccctgttcccggagagataatctgtcgatttttgtggatccgattatgctgttgtggtaatattttctcgtttcttccccaaagctgcaccgagcagcggccatggtgaagaagcccaacggcgttgccaaggccactgcggcctctgccggcgcggcggccggaccatccaaggcgaatccgtctacccctgggtcggccaagacctcgaagtttaagaagcggagggtcagggccaaccacgacaaggcagcggccgccgctgcagccgttgacgaggccgcctcggtgggcgcaggcactgctggtggcgatgcatctgcatccgcggtcttaccgcagccatcccatgttgctgaggcatcacctgggg

SEQ ID NO: 4289 - DNA, 731 bp, Setaria italica
  Peptide Sequence Number=SeqID_70263
ctgagcggaaagtccaggacccaaccggagccaccaaggaagaatggaaaccgccggagcagccacgccgcccacgcagccgccggcgacgcacccggcggtggctccgctagcgttcctgctgggcaagtggcgcggggaaggcgagggcagcttccccgccatctcctccttccgctacggcgaggagctcctcttttcgcaccacccctccaagccggtgatctcgtacacgcagaagacgtggaaggcggcgtcaggcgagccgatgcacgccgagagcgggtactggcggccccgcccgacggctccgtcgaggtggtcatcgcgcagagcacaggcctcgccgaggttcagaagggttcatatgatgctgaaacgaaaacagtgacactccaaagcgaacttgtaggcaacgcgtcaaaggtgaagcagatcacaagagcgtttcaagtgacagatggggagctctcgtacgtcgttcagatggcaacaatcacagctagcctacagccacatctcaaggcccttctcaaaaagatttgaagatggctgccaatctcctataacgaggcctcttcgctaacctgagagttgtgttgagcatgcgctgctccgttattaccagtgggaaacttcaataagctcttagaaaccatcacacatgtaaactgctttgcttgacacctcataatcaacggtctctattttgatggttttggtttctaagt

SEQ ID NO: 4290 - DNA, 485 bp, Setaria italica
  Peptide Sequence Number=SeqID_70264
ctccgccgcctcacggaaattcccccggggttcataaatattcgccgccgcagcaggcggacccggttgtcgttgttgtctcccatcatcatccgccaccgttgcggcgtcccgtttccaggaactttccttgcgtcaggtgatgctttcagcagctacaggcatagaacaatgttgttgaactatgatggggatagaagtgaggaccggcaaagtgaggaggttcagtcagcatacaggagagacagtgacattggcgaggaaatggtaataagcgaggagcaaaacgatgaaaatgaatggagctgggtgaatcaagataaagatggcgatcctctagcggaatcagtttcttcacttcatacgacacaacaagtccttgcaagtgagatacaaaaattgtcagagcttggcaaagaacttgaggcagaggaatccacttctggaaacaaagaccaagatgtgatcgttctgccatatgcaca

SEQ ID NO: 4291 - DNA, 431 bp, Setaria italica
  Peptide Sequence Number=SeqID_70265
cacgtccgcgctcggcctgtccgggggcacctcgctggcgtcgctgctgctcggcaccggcgccggcggcgaccacctcggcctcttccacgcggccatgcagtcggtggtctcctcggaggcgaccgcctacgagatgcagcagcagcagcagacgcaggtggaccacctgctgggcctcggctacgggggtgccgccgcgcagatccagctcaagccgtggatgcaggacgccggggccggcggcgcgggcgggatcatggacagcttctacgcgccgctgctgtccagctccctcgtgccggggctggaggagctgcacgtcaaggcggaggccgccggcgccggggatcaccagcagaaggcgcgcccgggaccagcagagcggcagctgggagctgccgacgccgtcgtcgtccaacgtcgacgcc

SEQ ID NO: 4292 - DNA, 325 bp, Setaria italica
  misc_feature (309)..(309): n is a, c, g, or t
  Peptide Sequence Number=SeqID_70266
cttgaacccttcagccttctgatgctacaccccacgcaacgaagttctcatctatgaaggccgcgacgggctcggcgcagaggcagccgccgcagaaggcgggggtatccgggtgatcaggagagtggagatacacgaacaagagcttgaactcccgctgcgctcgctgcagcacgtcggagaacccctcggccacgaagcgcggaccgcgggcggcgccgaactcgcgctcgaactccgcgacgaagtcagccgcctcggcggcggacggcggcagctcgagcaggcggtccccgcggcctgccccgngaggccgaggagggag

SEQ ID NO: 4293 - DNA, 1293 bp, Setaria italica
  Peptide Sequence Number=SeqID_70267
atctactcctccgtcatcggcgctctggcagacgcccgggagaaggctgcggcggaggacctgtaccacgaggcctgggacagcaagatgctcggggatcccgacatgttcctgaagctgaccgtgatgcacgtcgaggccggggtggtggaggaaaccatagaggtcgcaaaggacatgaggcagatcggcctcagggtcacggactgcatcctctcgacgatcatcaatggctttgtgaagaggagaggcctgaagccagccatcagagcgtacgacaagctggtgttcatagggtgtgagcctggccaggtcacctacgcctcggtcatcaacgtgtactgccggctcggtcggagcgacagggcggaggccgtcttctcggagatgatcggccggggcttcgagaagtgcgtggtcgcctacggcaacatgatctccatgtacggtaagatcaggagagcatcggaggccatgaagcttctggccatgatgaagcagaaggggtgcgagcccaacgtgctggtgtacaattccctgctcgatatgcacggcaggctcgggaacgcgaagcaggccgagaagatctggaaggagatggcgcggcgcaaggtccggcccgaccagatcagctacacgggcatcatcctggcgaacaaccgggcgggggagctgcaccggtgcgtggagttgtaccaggagttcagggaggccgggggaaaggtggacaagtccatggccgggctcatggccggggtgttctccaagtgcagccggttcaacgagctcatcgagctgctcaaggacatgaatgccacaaagctggacaggaggctatacatgagcgtcctgcgaagcctccgggacgccgggcttgaggtccatgtgaagtggctcaaaagtaacttcacgttcgtggaagagaaaacttgatgtcaggtggcacgagttcttgctgtgaacattcagcgctctgtaaatggaaacaggaaaaggagaaggtaaatatttgcttgcctcagtgctctctgtttcgaagcttgtatgctattgctgctcaattttgactcaaattggatcaagtgaatagcaatgtaaatgtatttttaagggatgccagctttgtaccagtaatggtctgatcgattccaggattcttggacagattgcctagttcagtaactctgcatgtcagatttattgaaattgctgtaccatagccattatagatacaaagttacatttgcctataatgaaaatttcatattattaaatttaaaaaaaaaaaaaaaa

SEQ ID NO: 4294 - DNA, 243 bp, Setaria italica
  misc_feature (240)..(240): n is a, c, g, or t
  Peptide Sequence Number=SeqID_70268
tccatgctggacaagatgagatattactaagtgtaccccttttcgaggtctggttatatttagaggattggaatacgattgttaatcatttccattcatatgtaaagaaaaaggtagacagtttgccaatggagcatccagcagcttcgcctcaattcccagagacgacatcatcaccatttattgcatcagaatttagttcacaagatgatcccaacttagtggtaacatgcgaaagtnttg

SEQ ID NO: 4295 - DNA, 358 bp, Setaria italica
  Peptide Sequence Number=SeqID_70269
ctcggcaaaattctttgagaaccatttcattgaactctggaaggaggtatccttcatcatcggcaatgcttctgcatttgggggccaatggcactaaggctgtggtggtggtcgttgtggttgtagtggttgtgtgaacagagtttccactgatgatttttgccctggtgtcctcatttttgaggatcctcagctccttgagccctgttctggccttcatgcttggggcatcatccgactctgagggaggaggagggggtggcagcaggagctgccggggcggccgctggcgccgcgagaagagcagcccagcgacggagagcgtgacggcgacgcccaccctgagcaaaagctgcgg

SEQ ID NO: 4296 - DNA, 803 bp, Setaria italica
  Peptide Sequence Number=SeqID_70270
tgctcctcctgtccgcgcacgccaagtccggcaacgtctccaggtgcgaggaggtgatggcccagctgcacaagtccggcctggagccggacaccttcgcgctcaacgccatgctcaacgcgtacggccgggcggggcggctcgacgacatggagcggctcgtcgcggcgatggagaagcgcggcggcggcggcggcgccccggacatcggcacgtacaacgtgctggtgaacgtgtacgggcgcgcggggtacctggacaggatggaggcggcgttcggcacggcggcggcgagggggctcgccgccgacgtggtgacgtggacgtcgcgcatcggcgcgtacgcgaggaagaaggagtacgggcggtgcctggaggtgttcgaggagatggtggacgccgggtgctacccggacgccggcacggcgaaggtgctgctcgcggcgtgctccgacgagcggcaggtggagcaggtcacggccatcgtcaggtccatgcacaaggacgccaagacgctcttcacactatgagatcaacaccagctgatgcatgggtatggcatcacgttgctatacatgaacctcttgtgaacaagtgactaatgtagtgtagtgaaagtctagcatgtatgagtatggattgccgtataattgctgctagatgattacatatcttgaagaacatactccacggtgaccaagctcatgtagtcaagttcgacagaaaaagtacatatctcagtcaaattgaaccaggcaaacggttattctatatttatctgcaagtgggaaaaaagtatcaaa

SEQ ID NO: 4297 - DNA, 257 bp, Setaria italica
  Peptide Sequence Number=SeqID_70271
tttttttttccctccattatattttatcctcatcaatcataaatcttggcgagtttcacatttttctacgtacaaatataagaataactgttgtgacacatcgctaaattaaaggtagaaaggatctgcgcagtctggtcagctagctttgtgactgcaacagagcggatcgtgctcctaatcctagtagccgctgaacggccggtgcaacttgatcgagcctatgacgccggccgtggagcctatggcgccggacg

SEQ ID NO: 4298 - DNA, 470 bp, Setaria italica
  Peptide Sequence Number=SeqID_70272
ggaaagcaaaagagcaatacgaggttggagagaactccagaggattcatacaacacactcccctgggtcctgacgaagctataaatacatcgcctctcacagctcagctcagtccagtacgaatcgcaatcgcactgatcagcaacacaattcttcacttccgattccacacattccacagtcccaatcgcagcaaccaaccgacaatgtcgctcgtcaggcgtagcaacgtgttcgaccccttctccctcgacctctgggaccccttcgacaacatgttccgctccatcgtcccgtcggcaggctccgactccgacaccgccgccttcgccgccgcgcgcatcgactggaaggagacccccgaggcgcacgtgttcaaggccgaccttcctggagtcaagaaggaggaggtcaaggtcgaggtggaggacggcaacgtcctcgtcatcagcggccagcgcagcaaggag

SEQ ID NO: 4299 - DNA, 387 bp, Setaria italica
  Peptide Sequence Number=SeqID_70273
cgacaggtggcaccgcgtcgaacgcagcagcggccagttcatgaggcgcttccgcctgccggagaacgccaagacggagcaggtgaaggccgggctcgagaacggtgtgctcaccgtcaccgtgcccaaggccgaggagaagaagcctgaggtgaaggctatcgagatctctggttaagcatcgtatatggaactacgatggaagaaaatggtggtggtgcgatgtgatgctacgagtcgtgcttgtttgctctgttcatgagcttgtgttgtggacgatgtgtacttcccttgccgtgtatcagtcttgtgtttccttgaggaagaaataaaagctgctttacaaataaaaaaaaaaaaacaaaaaaaaaaacaaaaacgtagaac

SEQ ID NO: 4300 - DNA, 792 bp, Setaria italica
  Peptide Sequence Number=SeqID_70274
aaaaggaaagaatcgaccaaaagcattactccctacaagcactccttcaatccactgagaagtttcagttcgtccaaacacagagagcttcagcaatgtcgctggtgaggcgcagcaacgtgttcgaccccttctccatggacctctgggaccccttcgacaacatgttccgctccatcgtcccgtcggcaggctccgactccgacaccgccgccttcgccaacgcccgcatcgactggaaggagacccccgaggcgcacgtgttcaaggccgacctccccggcgtcaagaaggaggaggtcaaggtcgaggtggaggacggcaacgtgctggtgatcagcggccagcgcagcaaggagaaggaggacaagaacgacaggtggcaccgcgtcgagcgcagcagcggccagttcatgaggcgcttccgcctgccggaggacgccaagacggagcaggtgaaagccgggctggagaacggcgtgctcacggtcaccgtgcccaaggccgaggggaagaagcccgaggtgaagagcatccagatctccggctgagcggtcatggacggactcgtggggtgagcatgcggcggacggaggatctgcggtttgagctacttgtatgtcgttggttactctgctttggtatgtttggtgtgttctgttccagcgttccatggtagtggctactagtagtgtcatgtgtctgtactctgtactttccctcttcggtgagcttggctcagtatgttctgcgagtgaataaataaaagaaagcagttcttgttgtggccac

SEQ ID NO: 4301 - DNA, 760 bp, Setaria italica
  Peptide Sequence Number=SeqID_70275
agcagttatactctgattagcaacacctaatttgtgttctgctgaagccctgacttgctcttcaacagtccggaccgtttctaaacgtaaaacaagaacctccttcttttgaccaatcctgtgtgccctagcctgtgcttgcaggtcaacctgaggattccaatcggtatcaaatatgataacagtatcagctgcttggagattgacaccaacacctccagctcgaatactcagaagaaaaatgaatgcttgagaattaggatcattaaatttatcgataagagctcctctttcatgtccagaagtgtgcccatccaaccgaaggtacttatattttttccaaaccaggtaatcctccattacatcaagcaatcttgtcattgtagaaaaaagtagaaccctatggccagtagctttgagtttgggtagcagtctgtccaacatctcaagttttccacagagccttacaatatttggcagataatgtttaggtagatagccttcaatctcttcaacatgaagctggctcaggtacggatggttgcatatgttcctcaattccatgacagaattgtgcacagagcgaaccttaaccgctccaattgcaccaagattatcttccacccttgtcatgagaagcttctgataagcagatgcttcacatcttacaagtctttcaatcttctctggcagctcattttcaaccttatgcttaagccttcggagttactaaagggtccgtaagtaaccttggttgtaa

SEQ ID NO: 4302 - DNA, 812 bp, Setaria italica
  Peptide Sequence Number=SeqID_70276
aagtgtactaacatatccaagagagtctgggatactcccggtgaatttatttccgtcaaagagcagatggatcagcgtcatctccgggctgaagagagcgtcagggattggaccagacaattggttcttgttgaagtgaaagtgtttggttttaaaaagcttgtctaggcccattccaccgcttgtcgaaatcggcaggggtccgctcagttgattgtcagcgatatcgaaccagtagaggttggagagattgcccagcgaagccggtatttttccagagaactgatttgagttcaatgccatgtaggacagcttcggcagactccctagctcatccgggatggtgccatggaaactgcaaccggccagaatcaaggtggtgagctgcttcaagtttccgatggtcggagtgagcacgccgccgaggtccttgttgaatgacaggtccagggattgcaggccagagagttgccctatgtcagcagctagaactcctttgatgcccatggtggacaattttatggagatcactttgtcgttggcgcacgtcactccctcccatggcgaatcgccgcaggggtcgtcggactgcccccacgtcggcggcgcgttctgccactgatccatcaacgccctgagcacagaggtgtcctggctgtccgtcatgccatggcacgcccgggggacgcacgccgcgagcacgacggccacggcgaggacgacgagccccatcgtcgtcctcctcccaccgcacccgaccgctgctgcctccatgcgcgaacaacaacaaccccacccacgccgaggtcgcg

SEQ ID NO: 4303 - DNA, 852 bp, Setaria italica
  Peptide Sequence Number=SeqID_70277
tctaagcaagcactcaccacacacactctctctatagctggctcgccgcccctcctacgggcgcgccaataccatccaagagacggagcaggtcatcgatccatcgacgacgacatgggggatcacgccgagatgttgcatgccgctccggccgtcgtgtacaccggcggcggcgccggcgccgcccctccatggcggctggtggaccgcggcatcggtgcccacggcgacgtgctcgacggagctggccgggtttggcacgtggtcgtccgccctgcaggctgctactagctacgatatggcggtcgagggggccaaggccaagagcgccaccacggcctcgtcggagtcgccggggaacaacagctcggtgaccttccaagaaccgaccggcgtcgccgatccggtcggcatcagcgccgccgtgcaccagcagcctcttgctggttacgccgattggacacatccctacatgagcagtggcgctactctgcatgggttcctgcaagatggtcaccaggacatgagctcaagaaccgagcagagccccatggacgcatcaaccttgatgaacccttcatcgaataacctagccctgcaagtgcaaggtcaccaacaagagcaccagctgctgtccagcttcggatccgacctgctcttgtcgccgaccacaccctacgggttgcaatcttctctgctaagaagcctcttggagccggcagcgaagccggctttgccggggttccagcagtatgatcagtacggccagcagatttgccagcaggcgtcaccggcagctgcgaggttcgcgccgggagctatcagggagccactccagttcaccaacgcgcg

SEQ ID NO: 4304 - DNA, 1067 bp, Setaria italica
  Peptide Sequence Number=SeqID_70278
ggaatttgacatcttcaaataaagggttaaggcataggcgtagtaagcgtttggccaaacaatcagctgccactacatactacgaatctactgaaaatgaatctgaggaaaatgaggctgtttctccaagtcgaactattatctgattttcaagacattgatggggtcagcaatgatatttcctctagttcattgcctcagcacaataagcctcatagaagatccaatgaggcagacaatccgcatgcaacaacaaagtctgcttcaattcctgacgtgtctgatcctgaaagttttgcacgttattacagtaaaacataccctccagaggttagaagagctcttgaaaggaattctattttaggtcaagcaggtggcaaggaaaagagaaaacgcggcgatcgtggtcctaatctctgccttaaagtctggaccatgcctgagggtgtaaggattcgagtgtccttcaatgatctaggtcaacctatcggagacgaagcacgcaccttgagtagctttctaggacaaatagcacgtgatggaacagtggcacctctgacatacacagattggaggttctttccggagaaaaacaagcaagcaatgatgcatttagttaatcacaagtttgtcctcccaccaattggtcaaatatggtctatgagtgctttgggaaaaaagtggaaggactggaaagttgtcttaaaacatgaacgatacgatgcccatgagacggatgcggaacgtcttgccgatcgggatttccgtgtcccggaagaacaatggaaactccttgtggcatattggggcactgagaaggccaaggctctaagtgctcgatgtaaagcttctcaggaacaacatccttgtcgtaatcatcctagacttggatcaaagagttacgcctacggatacaggaggtagagaggcagaagcgtgcaaacatggcggaaccaagcgtcacagctacatccatacccgaagatcgggaaggcagacccgtgtctatggacgatgtctctgcagaagtcgtcagtccagaccagtgaccttttggttatggacgt

SEQ ID NO: 4305 - DNA, 2439 bp, Setaria italica
  misc_feature (2389)..(2439): n is a, c, g, or t
  Peptide Sequence Number=SeqID_70279
cctgccaagcatttccacctatttgaacctccatttgtgtctactatttttacatgcttccacgcagcaaaacttgaattttttcctaacttttgaaagcatctgcctttctaatataaactatgggcaagaacaccaatctctataaactagcagaataggaacttctaaaagtagaaatttggcattgttgcctcatttaaaagctctttgctgattggttatttgattcatcgccgaacccgccaccagcctcctcccaccaccgaagctgctgcctccccgaaggagctctcccctcgcagccatcgccaccgcggccgccctcgtccctcccttcctccgctgctatcggattggcagtggagtggagatcgactcggtcttggaattcccttcgttggtaaggaaccctaattttgtcggatgggattttcaccttcgacatcgggggcgagatcgatcgacctcagctgacgcgaagggattgggaagccaagggttgggtgtagttgatttttctaggaagattgggggttcagctcaaactcccatgctcgacgctgagcacgaccccggcgggagatgacgaggatcttcgtgcagcgcggggccgccggctcctcgtccagctccagccgctcgggatcgcagccagcgcagccgcagccgccagcagctgcccgggaggaggagctgccgctgcggcctcagccgcaactgccggagctattggccactgatgatataaccgagcatctaaatgagggcagcgagaacagtagcagcagcaataagccttcaaggctggatgaccccatttcagagagctcgagctcggcggaggagagggctgcaagagagaaacctcctaaggatgactctaatctaatcaaccccactttcttggtggaggaactgaaaggactccagatttctgatcagattgaacatgggaattctgtgccgtctagcactggttcgtcacagatggcgggtgcagcatcgcacccaccaccaccaccagctccacctccaaaaccatctccagggaatattgggttgcggagaatggggtctggaagttcaaacagtgtgcggattggatcttcaagaaggccagtagcttggccaccggtggcagcccggacatctgcttcaggttctcggccttcttcgcctaggtcactggttgatggtgaaggttataatagtgcagatgaacagggtccctgttatggctcgagttatgatgattcggaaagggacctcatgtttgagcatgacctaaggcgagtgaaaggattggaaatcagaaagatggcagaagatggtaactgtctgttcagagcagttgctgatcaagtttatggagatgcagaagcttatgatatggctaggcagatgtgtgttgattacatggaaagggaacgggatcatttctctgagttcataactgaaagttttacattatactgtaagaggaaaaggagagataaggtatatggcaacaatgttgagatccaggcatttgcagagatgtacaatcgtcccattcacatatattcatacagtacagagcccattaacatttttcaaggaagttataacacagatgttcctccgattaggttaagttatcatcatggtaatcattacaattcagtggttgatccccgtcgacagacagttggggcaggccttggatttagctcccttagagggaccaataatgttgacagggaccaggtgaaggctgcaataaaagctcagcaagatcagcaaatcgagaatgcacttttggctgaagggagattctactctgatttggagttgacagaaagggaaatagaacggatggtgatggaggcctcaagggcagagtatctggcagaggagaaaaagcttaacatcagggagtcatcaacatcaggggcagagccatcatcttctgccgcaattagcgggtcttctcgttccgctgcggcagtagacagagggagtgaggagtgcttcgtgctcccagacaccgtgctgactcgcagcatgcagctgctcctggcgatggggttcagctacatccaggtcatggaagcctacagcatatttggcgaggacgtggactcgatgatctgctacctggtggagaccggaggccctggagcctcagaaggcggtagcaaccgccggaaaggaaaggctgctgagtgatgtgcggcaccttgccaccttccttgctctgaatgtaatggatccgaatcgttgggcataagtcataccagataatgacagccgtgggagttgagatgtcgatatacctgctaccttatgggtgataaataaatggaactcgcgtgttgcgacttctaaaagaaaaaaaaaaaaaaannnnnnnnnnnnnnnnnnnnnnnnnnnnnnnnnnnnnnnnnnnnnnnnnnn

SEQ ID NO: 4306 - DNA, 1473 bp, Setaria italica
  Peptide Sequence Number=SeqID_70280
ctatggatacagtcaagtgttatgcttgggagcaaagcttccagtcgaaggtgcaggacatccgcgatgatgagctttcttggttccgcagggctcagttgcttgctgcgctgaatagctttatcctgaacagtatcccggttattgtcactgttgtttcatttggtgtatattctctactgggaggtgacttgacaccagcaaaggcgtttacttctctttcattatttgcagtcttaaggtttccacttttcatgttgccgaatctgataactcaggtggttaattgcaaggtatcattgaagcgcctggaagatctcctgttggctgaagagagattgcttctgccaaatccacctattgatcctgagcttccggccatttctatcaagaatgggtatttttcatgggaatcacaggctgagagaccaactttatcaaatgtcaatctggatgtacctgttggaagtttagttgcaatagtaggaagtactggggagggtaaaacttctctcatatctgccatgcttggagaaataccaccagtgtcgggatcagatacctcagtggtcattcgtggatcggtggcttatgttcctcaagtttcgtggatcttcaatgccaccgtccgggacaacatattgtttgggtctccttttcaagccccacgctatgagaaagcaatagatgtaacttcattgcgccatgaccttcacctactcccaggaggcgatctcacagagattggtgaaagaggagttaatattagtgggggacagaagcaaagagtttcaatggcaagagctgtgtattcggattcagatgtatacatatttgatgatccactcagtgcattagatgcccatgttggccgtcaggtatttgacaaatgtatcaaagaagaactacagcataaaacacgggttcttgttaccaatcagctgcattttctgccatatgtcgataaaatagtgctgattcatgatggtgtaattaaagaggagggcacttttgatgaacttagcaacagcggcgaactcttcaagaagcttatggaaaatgctgggaaaatggaggaacaagtagaagagaagcaggatgaaagcaaatcacaggatgttgcaaaacaaactgagaatggggatgttgtaatagttgatggaggttcgcagaagagccaggatgattctaataaaacaaaaccgggtaaatctgttcttattaagcaagaggaaagggaaacaggagttatcagtgcgaaggtcctttcacgttacaaaaatgcactgggaggggtgtgggtggtatccatactcttcttttgctatgcactgactgaagttcttcgtatttcaagtagcacatggttgagcatttggactgatcagggttctctgaaaattcatggccctggttactacaatttgatctatggaatttcttttctttcggacaggttctagtcactctctc

SEQ ID NO: 4307 - DNA, 500 bp, Setaria italica
  Peptide Sequence Number=SeqID_70281
cgccggcgttgtgcggcggcatcaacatcgccttcccgttctggctcgccggcaagcatccgccggagtgcggctacaaggcctacgaggtcacctgcgacaaaggcaatcttactctcaagaactcttactggacgtaccaactcctggacatcttctaccaaaacagctccttcagagccgacctgtctggaggcctctgcgacttcaagaatttcgtcaacgccgcctccgacctcggcctctcgccgttcaagattagccccaagaaccaggagctgttcttcctctacgactgcgaactgcggggaagacacgcacctcgttcttggacgctcgtgaactgttcgtcgccggatgaccccaccgtgggcgtttgccttgcttgggaagaattacacgccaggtggcactgggatgccaccgccgatgaattgcaacgtgtcgacgattccggtgctgggatacgagggagcggacgggggcagactatcaacggc

SEQ ID NO: 4308 - DNA, 400 bp, Setaria italica
  Peptide Sequence Number=SeqID_70282
ctatccaaatatatgcattttgcatcatttttttcatatttgatctgtccaagacaaaaaaggaaacggaataaatgaaatatgcaattgcctgttggttagatatataataccaaggccaagttcagttcaatttgttatattagtcttgtgacagcatgctccgcttcaacagttgtttcttgctatgtttctgcccattaacagataaaagttgatcgtgaattgagggtagaaaaatatccacactttatggagaaaaaaggatttgaatcctaccattcgatatctatattgggcagaatcttcgatgagactgagaaagcaatattgcaacgatctgaggatgataaacaaattcagataacgatgctgccattcttcactgaggtggaggcag

SEQ ID NO: 4309 - DNA, 1702 bp, Setaria italica
  Peptide Sequence Number=SeqID_70283
ggaacttctacataatgcaattgaaggggttgcgaatgcttgttatgatttcagacatgcactaaagcttgcctctagatacgctaatatggaggattcaatgttggagcaaatgattcattctggaattccactagaagagccatacttgctatctagactgaatttcatagccaaacaggaaatgaaaggtttcagagaaggaaagctaccaattgatgaatgctatcatttgatgggttcaacagatcctacaggaacgttgaaaccaaatgaagtttgcgtgatacttgatagtggccaatactctggagatgtgcttgtgtttaaatatcctggtctccatttcggtgatatacacatcttaactgcaaggcaaattagcggacttgagaagaattttgttggatattcaaaaattgcaatacttttccctacttctggtaaacgatcattggctgatgagatggccaacagtgattttgatggtgacgagtactgggtctcaaaaaaccacatgctactaaagggcttcacgaagcgaagtgaaccttgggttccactattcaaaccaaaggagacccagcacaagcctaagagacccaaggattttaatgaatcagttcttgaaagagtgctatttaatgaatgcttgacgacgacgtttatatccaattatgcacttggtatatcgtctgattgttggttagcatatatggaccggctcttaacagaagatgttgatgaagacgaaaaggaatcaattgcgaagaagatgattaaattagttaacctttattattgggctctggatgatatccaaataaaagttgatcgtgaattgagggtagaaaaatatccacactttatggagaaaaaaggatttgaatcctaccattcgatatctatattgggcagaatcttcgatgagactgagaaagcaatattgcaacgatctgaggatgataaacaaattcagataacgatgctgccattcttcactgaggtggaggcagccccagaatgcatatcattatgggagtacaactacgaagagtacttgagtaagagtaggggactttttgatctggataaagaagaaaagaacgaggagtttgaaaaactctaccaaagctataaatatttgctctatgatgccgaagaattcgaagaaacctcgcgggacctctcccaggtgtacatggaggcctgcgcgatttaccggatcgtctacgagcgagcaaggtctaccaagagcatcagcaagtgccgcttcgtgtgggtggtcgccggagccgcgctgtgccatctctacgcaacgaagtatgcggcgcagcgtggggaaaaaccgtgctctgcccgctttcagttacccgccaactttactgatgcagcgagggtctggctgtgaattgaactgctaccctgtttgtacaaataaggatctgttgtagaattaatgttaccgtatggacatctgaacctggtttgttgtaagctacgtgaagggttgcgaaaccgtatggcctgcacccagcggtaactgtattgtattatgcacctgtagtgcttgttgtgtatgtgtgtaacagtaatcaactgttgtatgtgtgtcgatcagcctgcaactttatcaacaccataattaaatctgcacccgcacaccatgagaaagaagtgctaatctccactttggaaattg

SEQ ID NO: 4310 - DNA, 1058 bp, Setaria italica
  misc_feature (1)..(28): n is a, c, g, or t
  misc_feature (39)..(39): n is a, c, g, or t
  Peptide Sequence Number=SeqID_70284
nnnnnnnnnnnnnnnnnnnnnnnnnnnnttttttttttnttttttttttttttttctaaacggtaaatgaggatcctcgattatgatttatgtgaatgtcaccgcttaggaaagcagcaaatgtaacacaacagatgccatctgggctttacagtttacacaacagacatcaatcggacaccttatgataattacatgcctaacgctgtcaagcaaggaatgaatgtacacttgacgagaatcagtattccgcattagcagagctttctatcggggtgtcttgtctagctataggcaacaatcacgtctatatactgtcacggcgcctttggcgctcctgtctctgctgcacttgtggcttcgctgttgcttgcagaaacgttgtcattcttcggtgccatcagtgctttgttgtcacttccaccctgctcaattgcaaccgcaggagattcgacttttgccttggggcaacttctcagcgtacccttgtttgcccacatcaatccacaagcattgcacagagtccttgggccagcagggccacggcgcattgctggggtcatcttttcactagtaccgcaattctgacactttgattcacgagatacgaaatctaggcctgagctttgggaaccaggatcacagccaggagctggagattctccctccagactggcccttccagcaaattgccccttccggcgctgcatcctgagtgcaacttctttgcgaactgcataacgtattttcttatcaaaattcctttccttccgtttttcacggaacctaattagagaagcaaccctttttgcaggaatgtctgtcctccgaagtatgtcatcataccccttgttctcattttgattaggtaaaaccatgccagttgaaccaggtggtagttcaccacgtcctaacagtaacaggacagcttgaaccttgtcgggggtgacggattcgaacacgtagacctcgccctggaagagcagcgtcagctggttcgggtttccaggcaagaccgagacgggcgccgggacgggaggctccacgggcggtacagg

SEQ ID NO: 4311 - DNA, 1043 bp, Setaria italica
  Peptide Sequence Number=SeqID_70285
cgcgaccgagcgatcgcagtgccagcgcccaccggcaagccgtccgcccgcgggctctacctgtccagcggcgggggctaccggaacggcagcggccggcagcagcagcggccgtcgttccagttccagagctccgtcttctccatggatgagatcctccgggccaccagcaacttctcgccggcgctcaaggtcggccagggcggcttcggcgccgtctacaagggcgtcctccccgacggcaccaccgtcgccgtcaagcgcgccaagcaccgcatgcacaacccccacgtcgacatcgagttccgcagcgaggtcaagatcatggcgcgcatcgaccaccagagcctggtccgcttctacggctacatcgagtgcggcgaggagcgcatcgtcgtcgtcgagttcgtccccaacggcaccctccgcgaccacctcgacaggtgcaacggcggttccttgacctcggcacgcggctggacatcgccatcgacgtcgcgcacgccgtcacctacctccacatgtactccgaccaccccatcatccaccgcgacatcaagtcctccaacatcctcctcacccactcgctccgcgccaaggtcgccgacttcggcttcgcccgcctcggcgccggcgaggcggccgcgcacgtgaccacgcaggtgaagggcacggcggggtacctggatccggagtacctcaagacgtgccagctcacggaccgcagcgacgtctactccttcggcgtcctccttgtcgagctcgcctccgcgagccgccccatcgaggccaagcgagagatgaaggagcgcctcaccgcgcgctgggccatggccaggttcatcgccggagcctccgccgacgtgctcgacccgcacccttcctgccggccacgtcccgtacgcgcgctcgagatgctgctggagctcgcgttccggtgcatggtgcccgtcaggaacgacaggcccgccatgagcgaatgctgcaaggcgctctgggccatcaggaagacatacagggacatgctcgccgccgacgtcacg

SEQ ID NO: 4312 - DNA, 620 bp, Setaria italica
  Peptide Sequence Number=SeqID_70286
aaactaaggtaagacaaagtaccaaaccaacctagggacggtttaggaacaaagggcatggacagctgaagagaacaggcatggtgatctccttaataagtacatgtaccttactggacgggttgacatgaaacaaattgagaagaccatacagtatctgattggttctggaatggatccaggaactgagaacaatccctacttgggtttcctttacacgtcattccaagagagagcaacatttatatctcatggcaatacagcaaggcatgccaaggagtatggtgatctcaagctggctcagatatgtggcacaatagcagctgatgaaaagcgccacgagacagcctacactaagatagtcgagaagctctttgagatcgatcctgactacacagtgctggcgtttgcggacatgatgaggaagaagattacaatgcctgctcatctcatgtacgatggcaaggacaaggacttgtttgagcactttggtgcagtggcgcagaggctgggcgtctacaccgctaaagactatgccgacatccttgagctctctcatccaacctcctgattcttggtgccaaggtacagacaaagtcctgcgccctcctcccttctcc

SEQ ID NO: 4313 - DNA, 1748 bp, Setaria italica
  misc_feature (1745)..(1748): n is a, c, g, or t
  Peptide Sequence Number=SeqID_70287
aaaaccggaagcgcgagtgcagaccgagggggacagcccagccacgagcgctcccccaagatcccgtgcctccgcggcggcaccgcgtctccccacgatcccatccccgccccgcgtctcatcctcctccgcgtcgtgagatcttcgctgaggtgggagagtgaggagggagtgatcgccatggcgttgagggcgtctcccgtgccgcacgtggcggcgccgatgccgccgtgcggcgggcgggtaaggaggagggcgagcggggcggtggtgaccatggcgtccaccatcaacagggtcaaaactgtcaaagaagcctatactccaccacgggaggtgcagtgccaagttacccattcactaccagcccaaaagaaggaaatttttgattcacttcaaccttgggccaaggataacttattgaacctcctgaagccggttgagaagtcatggcagccacaagacttcctaccagagccttcttctgatgggttttatgatgaagttaaagaactgagggagcgggcaaaggaaatacctgatgagtatttcgtttgtttagttggtgacatggttaccgaggaagcattacctacatatcaaacaatgctcaacacccttgatggagttcgagatgaaactggtgcaagtccaaccacctgggcggtttggacaagggcatggacagctgaagagaacaggcatggtgatctccttaataagtacatgtaccttactggacgggttgacatgaaacaaattgagaagaccatacagtatctgattggttctggaatggatccaggaactgagaacaatccctacttgggtttcctttacacgtcattccaagagagagcaacatttatatctcatggcaatacagcaaggcatgccaaggagtatggtgatctcaagctggctcagatatgtggcacaatagcagctgatgaaaagcgccacgagacagcctacactaagatagtcgagaagctctttgagatcgatcctgactacacagtgctggcgtttgcggacatgatgaggaagaagattacaatgcctgctcatctcatgtacgatggcaaggacaaggacttgtttgagcactttggtgcagtggcgcagaggctgggcgtctacaccgctaaagactatgccgacatccttgagttcttggttcagaggtggaaagttgcggatctaactgggctatctggagaagggaggagggcgcaggactttgtctgtaccttggcaccaagaatcaggaggttggatgagagagctcaagcaagggcgaagcaggcaccggttattcctttcagttggatttatgaccgcaaggtgcaactttaattgagagcagcaggcaatgggagcacatcctatatttgagtcccggggttctctataagaaagcagcctttaggttatctagctgggtagaattcaactacttatcgatctcactcatgcaaagtatgctatcagttgtcttgtaagttgcaagtttggatctggtgaaagacttatgttgggtgcctcttctggcagccatgaacggcacttgcaactaggtaaactcgtgttgtattgaatatgtgaactgtgagatttacaggacttctaagttccaaagtaataatatggagattgtatatggacaagcttcatatggtgcatgttgagaatctaagtactttgtgttactggatttctcaattagtttcaactagaccaannnn

SEQ ID NO: 4314 - DNA, 307 bp, Setaria italica
  Peptide Sequence Number=SeqID_70288
ggccagaactcggccttcttccccgcgcggcgcacctccttgagcacccggtgccggtccacgtaccccgtcaccgtcaccttctccatctccacctccacctccaccgtgtccacgccacgcagcttcgtcagcgcgtgcttcaccacgcgctcgcaaccggagcagcacatccgaaccttcagctccacggtctgtcgtcgtacatgttcatcagctggtcagttcatgttcatgtctcgatcgagtactgtgataaagtgaattattttactcgaacaattaaccgcacgccggggtaaactaa

SEQ ID NO: 4315 - DNA, 835 bp, Setaria italica
  Peptide Sequence Number=SeqID_70289
gttaaagggaaccgctactcattccatattgcaacttgcgcccatctccatccatttgttacatgcatgagctagctgatgagcacaaatacactgatttccgacttgacctgctactactacgacacgccgggccggcatacatcgcaatgatcacactgaccgagtgaccggtctcccagctcgtcgctgcggtctccacgcacacgctggatcgatcgttgattcttgccgacgaggcacaccgtaccattggccattgccgccacggcatctcccttgagtcttgattacatgatggagcaggcgttgacgtcgtcgtcgttgaacatgttggcgacggggtcggcgccgcgctggggctccgggaggttgccgtgcttgtcgccgttgtagccgtggcggtagtagttgtaggtgcggcggtacgactcctcgtcgtggaagtagtccttggcggacgtgaagtgcagcggcaggtccgggttgggccagaactcggccttcttccccgcgcggcgcacctccttgagcacccggtgccggtccacgtaccccgtcaccgtcaccttctccatctccacctccacctccaccgtgtccacgccacgcagcttcgtcagcgcgtgcttcaccacgcgctcgcaaccggagcagcacatccgaaccttcagctccacggtctgcagggagagcggcctgctccggcccatcctgcggccggcgaaggggcccccctcgttgtagtagagggtgttggtgctcgtcgggtggctgctgtagtagtaggcgccggcgcggtggccgtggcggtggccgccggaggggtagaagc

SEQ ID NO: 4316 - DNA, 637 bp, Setaria italica
  Peptide Sequence Number=SeqID_70290
tattggtggcggacagagaataactcagagcatgtcacgtcgcattcgcatagcagccaagtagccgtacttgcgcataccaggcctcacattgtttcacatgcatgtctgatgatgcctgacgaaagaacagaacagagcaagcagctgaagaaagtaaggagcagagccagaaacggccggtttcagcacgacgcacctgcagggagagcggcctgctccggcccatcctgcggccggcgaaggggcccccctcgttgtagtagagggtgttggtgctcgtcgggtggctgctgtagtagtaggcgccggcgcggtggccgtggcggtggccgccggaggggtagaagcagcacagcaggaaggacgacagcgtggaggagaccgacatggccggccgggctagctcaccggaggcggcgacttatacacgagcaagcctctcacgccaagctgccagctaccctctcggcaggttcaccgcagccttgcccagggagctaggtttgctaagcttgggttgggtggcccgagatgtcgccgtgcacgcctcttgctcggctagcttgcctgccttggctgttgaaagggagaagagaatgaatgcgtggggtttgcttgctcgctcgggttagac

SEQ ID NO: 4317 - DNA, 1288 bp, Setaria italica
  misc_feature (1)..(26): n is a, c, g, or t
  Peptide Sequence Number=SeqID_70291
nnnnnnnnnnnnnnnnnnnnnnnnnngttaactggtgtaaaacatttttggcccaaaatttattctatccaccattgcagtatttgagttgtgaaggacaaatccttcgtgtcagaagaggggagtaactcaagacaccaaaaagaaggagcaagtctaggttcatgctcctcacgcccaagaacgagcgtcaaaagaaaacccaatgatatgcgactacgatcgttttgcaattgcttcagtaagaaaagaacaatggagaacgcaagtctacaggggtgagggaagaaaagctacttcagctgcaaaacatttcatggcaggtttctacatgggtgaggagaagctgaactggattccggtctttccactgtcatgctcagcttgcttcagaatgtaacaataattcacctccacccggaaaagtttagtaggcaaaataatgccagcaccagcagagctcctgaatgtgcgcttaaaatcagatactgagaaattcttgtactcgccctccgacaatttcgtaaggttcccagcagccagaaatgcatgaccgtggattccagcatctctgaataacttcagtggcagatcaaaagaaaggtcagcaaaggcagacacagccagatcacctcccaagtaatcccttcctggagccggagcagagccactgtctgattcattgggtacaagcctccgtgcttctgttgggccaactcctcttgttttaaaacccagcagggatgacagcccgctcaagctgcaaactggagaagaatgacctccaaggaaaaacctatcaggcacaggtgaagacgaattcatgaacccccttccaagtggtaaaatgacacccgctccgacgccaacatttagagcagcattataaaatcccaaaggcacagcgccacgaacatcaaactcctgccgaaaaaatctcaagcccttgttatcccatagaccaccaacttgagaagttgactgaaatgcatatccttttgttggcctgagaagtgaatccctctcatcgatcttgtatgtgtacttcaatgcagaaagaaggttatgccctaactgcctccttatagccttagatgaggcacgtgacggatcagttaaggtacgccacgtaaggttgtaagacaagtcatggttcattgttgaaatcaagccaaatgaaaggccaagtagacgctccttgtatgatgaaaacttcagccaatcttgtgatgacaaagatgcccgggccatcaacggtgttggtattgatttaaaccttggtaggtag

SEQ ID NO: 4318 - DNA, 689 bp, Setaria italica
  Peptide Sequence Number=SeqID_70292
aaaagaactagatctaggttcatacttcgatgtcttcgatatgctccattcttgcttattagtgcatgtttctttaagagaagacctgtgatttcctgcagtcacgttgagagtttcatttcctccactgcagcttgaaactcctcttatagatgaagttgctatctgctcagattgtcctgtgtttggacagccaaagtcctgtggaaaaaaatttaagctgctaacaatcacaacgacagtaagaattataagtttgtaatatgaattgacattttatgatcacgggcttcatgacgaatgtggaatgagtggcaaggtgtcaagcatataataaggtgaagttactgtagaagactctctgggttatgttttgcatactgcactttctcaatttcagttttttttggggggtattagctctagtatcatgattttctatatgcatgatagcacaaagacttggtaaagttgcagacactaaaaaagcttgcgtgaaggaaaagaaagctctatttgcagttgtgtgtactatttgcatgaagttaaataaagctttatgattcatggtgtttgagcactaactcttttatggttgcaaacatgaggctggtataataccttctgtgttgacgttgaagcaaagcctgatgcatgatgcgtgttaaacataatcaataaattacagt

SEQ ID NO: 4319 - DNA, 318 bp, Setaria italica
  Peptide Sequence Number=SeqID_70293
ggcggtagggagtaggcgccccggacgaacaggcggaaggcgcgcaatgtcgtagttgttcggggcgcgcgccgggtcgatgtcgaagtcgcggtggccgcggaggccgacgatgaggtgcgggtagcagcgcacctcgccgtcggcgtcgaggtcaaccacctcgtacttcgagagcgccccgaggacgcgccggtacttgctgaggaaccaggcctgggcaccggtggcgacgaggtcgacctcgccgccgaaggcccgggccgtcgtgaagagcgggaccagcacgtcgctgaaggcgtgccagtagttgaacgt

SEQ ID NO: 4320 - DNA, 471 bp, Setaria italica
  Peptide Sequence Number=SeqID_70294
ctgtgggtgtctattgttttgattggctaacgactactgtaaatactactcccctgatgtatttacagtagtcgttagccaatcaaaacaatagacacccacagattcttgtgacaaacgaatatatagctaccctacggttcgcagcacatagaaccttacacaagctacaaaggtcatcagagaatatatcctcttaatctcactcccatgcatcatggagtagagagcaggggccctctagatccaatgcgaagagcagcaagccagcaactagccagtgaacgcttcagaacataagctaaaatgaattactttacaccatgcctcaattctcaggctcacatatgattattgcaggaaataataagagtggtattaaagatggggtgggggcttcaattgagtgaagcgaagggggcaacctacaaaaacatcaaaagagaagaatcagctgggaataatgcatta

SEQ ID NO: 4321 - DNA, 1961 bp, Setaria italica
  Peptide Sequence Number=SeqID_70295
ttttttttttaagaatacaaatagcaaggacagtaccatttgttaacagttaacttcagagttttacagaaaacgcagcctacctacatcactaaacacaagcaccagccgtgccacggtaatgcacacgaacgaatttcgtatttacatcaggggagtagtatttacagtagtcgttagccaatcaaaacaatagacacccacagattcttgtgacaaacgaatatatagctaccctacggttcgcagcacatagaaccttacacaagctacaaaggtcatcagagaatatatcctcttaatctcactcccatgcatcatggagtagagagcaggggccctctagatccaatgcgaagagcagcaagccagcaactagccagtgaacgcttcagaacataagctaaaatgaattactttacaccatgcctcaattctcaggctcacatatgatctttacaggaaataataagagtggtattaaagatggggtgggggcttcaattgagtgaagcgaagggggcaacattgctcagcatgactttctcctgtcaagtttaaatggaatgttcaaccatttcttccttgggaaccgctcttttggtttcttttcgcttgaattatcatcttcactaccgtatccctccatacagtgatccttcactttcttttccttctgatgatgcttttctgcatcatttttgggcatttttgaaggtgattttgctttattcctgctagaactccgttttagaggtggattgttggtgtaggaagcatggatttcattcctctccttcagaagctggtcgatcgtttgcatttcttgtgtgtatttgctagtcatttcagtgaactttgccaaaacctccctatactctgactcaaatttggacagctcagctcgttttgtgagtatttttgcttctacacttctcagcatctccttttcagcagggaacgattcaccacacactacctctatagtataatttgcactcttgaagaaattgtcaccatagacagcaaaaaagtgggttccaggtttcagctcatgtatgtcacatggttgaaagctatccaatcttttaaagaatgcaccatcagaatcctttgcagcagctgccaagttattttgttcaaaacggtacacagggaagccaaggaaatacatccctgcagcagtaacctttccagttttcacactgtcttcctgcagtgcaagactcagcccgccattttcttcaagttcaaaataaagcaacttgaatttgcttttatcgtttgagtgaacgcggcaaactagccccattttcgcttgtttctcggttatgtccacagaatagaaatgggctgtttgcttttccacctttctctgcactgagcttcctagctggagctgagaaaccataaccgagccattcaatgcctcctccaaaacggttgctgaaacagttgttttaattggcacgccaagcttactaaaaagagctgcaaacacggtgtttacagtgttgagactcgataggtccagctccaactcctgactatcagattcgattgcctcgaatcctgatgtatcgtactgccgcctcttatcgggatctgacaggatgttgtaggagaatgtgacctcttggaacctgtcagatgcgacggggtcatcgccattcttgtccggatggtacttgagcgccatgcgtcggaaggcgctcttgatctcctggtcggtggcgctgcggcccaccccgagcacctcgtacgggtccctcctctgcgccgccccacccgcggcagccgccgcggaggcggccgagtcgcccttctccgacttgaacgacccgaacctggaccccgccatggccttccctcctcccgttccggagtccgtcggcctcaacgactagttgagcgctccgccgccgccgagggtccggcgaggggaggaggctcaactagtc

SEQ ID NO: 4322 - DNA, 1092 bp, Setaria italica
  misc_feature (841)..(841): n is a, c, g, or t
  Peptide Sequence Number=SeqID_70296
tctttgtccaactgcacttgtaaggattgccataatgcagctttattgtgcaatattgtctcttgtaaagaacagttcttttgaacccttggggaataatagctaggtttaacagcatatgtagatgaatagttgacactgaattaagctcttcagttaagaatagtcacacccagagcagaagacaattcatttgcacctcaagaaatttttcagtggcacacgtttctcttctcaatattttcttaactgtatgtcagcaaaacacaaagaaggggatcttgtttatgtcagtggtaagataaaaaaggcactttctaatggccattatgagttgaaggaatacactattgatggtcttgaaggagagggggaacaaagcagtatgcttgataggaaaccacaccctatatacccatcaaaagctggattaaaaccaagtctgctgggcctctctatctctagggccttgaagatgctgaacccagatgtcgatcctatgcctcccgatgttctcactgaatttaacttgcctaatctctttgacgcttacatgggaattcacaaacctaaggatcgagatgaagctgattttgctcgaagaaggcttatatttgatgatttcttttacctccagttgggaagactatttcaaatgcttgaagcagttggtacacgggttgagaaggaggaattgttatataagtgtaaaatcatgagctaaatactgttggtgtagatgattggtctcctcttacaaagaaattgttgaaggctcttccttactcacttactcctagtcagtgcatgctgtgtgcatgtgtgtgtgtttcgaatgtanaggggcctgaagggattttccttttaagtagaccataatttttgatgctattatgctcatcatcaaatttaagctgaaacctgcaaatatgactaagccaaaatttgaaatctactgaaatggaaaaaggaaaatgctgaggtggattgatggttttgtccgtgataaattgcttctcgattaaattttaaaggaagaagtccattttatcccctcagcttctgcacaagtctagtaaatatcaaagcgcc

SEQ ID NO: 4323 - DNA, 288 bp, Setaria italica
  Peptide Sequence Number=SeqID_70297
cgctcggcagcggctgcctcaagcccaacatgatcgcgcacggcgccgaccagttcgacaccgccgcgccgggcggcgccgggaggctctccacctacttcaactcggcctacttcagcttctgcgcgggcgagctcgtggccctcacggcgctggtctgggtccagacgcactccggcatggacgtcggcttcggcatctccgccgccgccatggccgccgggctcgtcagcctcgtttccggcgccgcactgtaccggaataagcccccgcagggcagcatcttca

SEQ ID NO: 4324 - DNA, 1575 bp, Setaria italica
  Peptide Sequence Number=SeqID_70298
ggtctccaatctacctaccgtcaccctctctccagcgggctcaacctccattgctgcaagcagagttttgctgacctgagtgcccggactgaaggccccttcgtagtccgccagcgagtctccagcagcagagatggcagaagctgtgctccttgctctcgcaaagattggtagtgttttagcagatgaaactgccaaggccatgctggacaaactatctgaaaaggttaataatttgagggacctggaagacaagatcaggcaaataaggatgcaactgtcaaccatgaacagtgttatacgaaatattggcacggtatacctaactgatgaagttgtcaggggttggattggggaagtgcgaaagctggcctaccgtgttgaggatgtaatggacaagtactcatatcacacacttcaaatggaggaagaatggttcctgaagaagtatttcattaaaggatcacattatgtcttagtttttagtcaaatagcagaggaggtggtcaagattgagaaggagatcaagaatgttatagaacttaaagagcagtggttgcatcattcacagcttgttcctgaccagtttatggagatggaaagacaacggtcccaagacagcttccccctactcgtcaaagatgaagatcttgtggggattgaagataacaggaaaacactcacagaatggctgtattctgatgagcttgacagcacggtgatagctatatcaggtatgggcggacttggaaaaactacccttgttacaaatgtttatgaacgtgaaaaaatcaactttcctgcttctgcatggatggttgtgtcccagacctacactatggatgctctgcttaggaagttactcatgaagcttggtggtgaacagcaggtgtcacctaatattgacaaattggacgtgtatgatttgaaagaaaacataaagcaaaggctcaaaaataggaaatgtttaattgtattggatgatgtctgggatcaggaggtgtacctccaaatgtctgattcattccaaaatctccaggcaagtcgcatcatcatcacaacaaggaagaatcatgtggctgctcttgctgacccaacacgtcgccttgatctgcagcctctgagcaacactcatgcatttgatctcttctgcaggagaacattctataacaagaaggaccacacatgccccactgatcttgtgaaggttgctacttctatagtagataggtgccagggcttgccactagcaattgtatcgatagctagcctattatcttcgaggccacggacatattacatttggaatcaaatgtacaatcagcttcgaagtgagctatcaaacaatgatcatgtccgagcaattttaaacctgagctaccatgatctatctggagacctcagaaattgcttcttgtactgcagcctcttccctgaagattaccctatctcacgtgagagccttgtgaggctttgggttgcagaaggctttgtggttagcaaagaaaacaacacatcggaggaggtggctgagggaaacctcacggaactaacccaccgcaatatgctggtaat

SEQ ID NO: 4325 - DNA, 409 bp, Setaria italica
  Peptide Sequence Number=SeqID_70299
cagaacttctgaagtaacatgtctattttactatatttcttcatgtttctttaaccagttttactgcttggatggcttccattgttttgtaatgttctagagacctaatatagactaagactaatgtgtcatgtcacctttggtgatttacttctgtcaatgtgctgcaaaactacaatttagtttataggtttcttccgtacctgttggcaatggcctaaacagtggccactgattactggctaaagaaatagctaattatgctttgcttttttaaaaaaaataattcttcatgttttctgtttgtctgaaacctgcgtatcatatgccagttattactaagatctaaaattacactgagcaaaatgaacactgaggcaacagtggttccttcatgttacaactccat

SEQ ID NO: 4326 - DNA, 555 bp, Setaria italica
  Peptide Sequence Number=SeqID_70300
atcctggcggcgcagtgggagatggcgacggcggccttggccctgaccctgaggttggcgtggtggacgtacgccttgagcttcttcagcagggggagcggcggcatcgacgccgccatcgcgcgcatcgccttctcggcctcctcgcacacgaaccgcttgtcctgggacgccttcagcaggagctgcagcagcagcttgtcgaaggcgtcgtcggagacggaggagaggaggttgccgcaggagttgaagatgtcggtgcaggccatgatggacgtcttcagcaccgcgctgcgcgggttcttcatcgtcttcacgatcgccagcatcactttctccaggatcgggttcaggagcgcggagtggtggatcgcgaggcggcgcgcgtcgttgagcgcctcgcacgcgcggatccagtccttggagtccagctccgcgacaagccccgcggccttggccttggggtgggccgccgcctccagctccgccgacgggatgtactccacagcctgctcccccgccgcggccgtggcctgggcgccgagttctcgtcgt

SEQ ID NO: 4327 - DNA, 316 bp, Setaria italica
  Peptide Sequence Number=SeqID_70301
ccagaaccactccgatatccacatccctcgaatcctgctcatcttctgctacctgattcattccatccgcctcttcaacatcgcgatgcagacccgaatcatcggcgatcgtcatctcatcaagcgccacaacgggtaccaatcggtcgtcctccagcgcgatctcttcgccctgaccctgagccatgacttccaaggattcatcctgaacagcagccatcgcctcgtctttttcttgttgatgttgtccttccacctcgctctgccgctcttgcttctcgacctcgtcctgctcctcctcttcctcttcatgatt

SEQ ID NO: 4328 - DNA, 355 bp, Setaria italica
  Peptide Sequence Number=SeqID_70302
ttgggaacacaaaggttgaagcacctgatgataccggtggcatgttgttgttacccaaatgatactcattttgctggatgaaattggctcacttccttgtctcattataggctcctcccttgccgaatcttgatggctcgtgcctccaccaaagccagggatcacaccatcatcaaaccccagagtctcaggctccatttgcagcgccggattcatgctcgcaccgaatccagggaccaaatcgtcgtccaaccccaccgcctgactgtcctgctcctcttgttccttttgtctcacctttttccttttccctctcaagctcttcttccctctccctctccctttccctctcaag

SEQ ID NO: 4329 - DNA, 351 bp, Setaria italica
  Peptide Sequence Number=SeqID_70303
gcagcaggtgaagctcgtcgactggacccgcccctacctcagcggcggcagccgccggctccgctgcatcatggaccagcgcctggccggccactactccgtcaagggcgcccgcgccgtggcgcagctggcggtccagtgcacggcgccgcagcccagggaccggccgcggatggccgccgtcgtcgaggccctcgagcggctgcaggggctcaaggacatggccgtcaccgtcgggctctggcccgccaacgcccccgtcgccgggaggaacgccatctccgccaagatccgcgccgaggtcaaggcgccgccgggtcgcgccggaggagcgcgtcctccaagctcgcc

SEQ ID NO: 4330 - DNA, 581 bp, Setaria italica
  misc_feature (538)..(581): n is a, c, g, or t
  Peptide Sequence Number=SeqID_70304
gaaacaaaacggaaacgaaaccgaaacaaagaaacccaaagggaaaccggaaccgacggaataggaccgaccgtacgtacgaaggaccctacgaagacggctgcaggggctcaaggacatggccgtcaccgtcgggctctggcccgccaacgcccccgtcgccgggaggaacgccatctccgccaagatccgcgccgaggtcaagggcgccgccgggtcgcgccggaggagcgcgtcctccaagctgccatgattcagtcgcgtcgtgtgccggccagagtgtatgatggagttgtattggattgtatgtgtccgcgcgtgcgtgtgtgtatgtacatagtgatcgatcaagatttgcgtgcgtggtgttaaaaatcggcgcaatgcgggattgagtactgctgctagtgtccgtttagtctaggtgagctgctggcagatgatcgatcctgcctgtgtctccatgaactgtaccatgcgatcgatggcttcgttccagcgatcgctatgatgaaatctcgatcaaaaaattttcttnnnnnnnnnnnnnnnnnnnnnnnnnnnnnnnnnnnnnnnnnnnn

SEQ ID NO: 4331 - DNA, 2300 bp, Setaria italica
  misc_feature (2196)..(2196): n is a, c, g, or t
  Peptide Sequence Number=SeqID_70305
aaatggctagagctcaaagtttggtcacctcgtcataatggtgcttacatagttccacagaccgaagatacaacataggcaactgccacgatgtctaatcaagcatgacgcaatggattatgcaccttatttatcctatgtgggcatctgttcaaacacctgcattgtacatgcccttatagaatgtttgtttcatgagattttaagtcctctatattaagaattagccagaacattaggtacaaatcacttaaaaatgatcctgtatactatcatatgctacaaatcaaagtgaaagttgtccgcatatttataagttcagcaatgagatttgtcgagttttagcatcttatcttagagcaagggactgatgcttgtcaagtttcagtattttatcttttttgacaggcaatgaattttgtgagagactggcctactatggaattgcaagaaacctagttacttatctgaaagtaaagcttcatctaggcaatcttgaagctgcaagaaacgttaccacttggcaagggacatgctatctcactccccttattggagccatcttagcagattcttactggggaaagtactggactattgctgttttctcatcaatttattttattggcctagctattttaacgctatcagcatcagttccagcactgcagccacctacatgtctaggaactgtttgcccccaagcaagcttacttcagtatggcgtatttttcattggcctctatatgatagccctagggaccggaggcatcaaaccttgtgtctcctcctttggagctgatcaatttgatgacagtgacccagtagagagagcaaagaagacttccttcttcaattggttctacttctgtataagtatgggatcattcatctcaggcactatcatagtgtggatacaagataactctggttggggaataggatttgccattcctactatatctatggcactagctattggatgcttctttgcagcctcaaatatttatcgataccagaaaccgggtgggagcccactcacaagagtgtgtcaggtggttgtagcagcattccataagcatcatgccgaattgccaaatgatatgtctcttctatacgaagttgatggccaaacttcagccattgagggaagccggaagctggagcacacaaatgaactcaagttccttgatcgagctgccattatctcatctgctgatgtgaagagcgaatcttctacagacccatggaagctttgcaccgttacccaggtggaagaactgaagatccttgtaagaatgtttcccatctgggccaccactatcatattcagtgctgtgtatgcccaaaactcttccctgtttgtagagcagggcatggttcttgacaagcaggttggacctttcaacattccacctgcatccctctcaactttcgatgttatcagtgtcatcatctggattccactttatgaccgcattcttgtgccaatagctagaaagttcacgggaaaggaaaagggtttttctgagctacagcggattggaattggattggtcctatccattctcgcgatggtatctgcagctcttgttgagttgaagcgtttagaggttgctaggtctgaaggtcttattcatgagaaggttgatgttccgatgagcattctttggcaaataccacagtatttcttggttggtgctgctgaggtattcactgctataggccaagttgacttcttctacgatcagggtccagatgccatgaggagtttatgtagtgcattcgcgcttgttacaggttcagtgggaaactatgtaagctcaatcatactgacgctggtttcatacattacaactcaaggaggaggtcctgggtggatacctgataacctgaatgaaggccatctcgaccagttcttttggttgattgcagggataagctttgcgaatttgatggttttcctaggttgtgcttcaagatacagatataagaaagtccagtaattgtatttaatgtatactcattcatgtaatgtgatttcagacaccatattcatcaaaagcaattaattgtacagaaaatcagcaattgtaagtgcaaagatatcaccacctaaatcaaaagtatgaccctagtctggtacacatgaactatttgcggtcatgagctaaaatcaaaatgccgtgaatacgntatttttgtgaatattttatatttgatacctgccttttgctgttcagcgttaatacgaccacgtgggatgttagattgcatcagcagtgtttgtgttatattct

SEQ ID NO: 4332 - DNA, 553 bp, Setaria italica
  Peptide Sequence Number=SeqID_70306
ttaaacaaaactaacaaaggaaaggaagaatacctaggaataggaataacctagaattggggctgattatctgctcaatcatactgacgctggtttcatacattacaactcaaggaggagatcctggatggatacctgataacctgaacgaaggccatctcgaccggttcttttggttgattgcagggataagctttgttaattttgtgctttttgttggttgtgcttcaagatacagatataagaaagcccagtaactatattacaatgtatagtcagttactgtaatttagtttcacattcatcaaatgcaatggattgtgcagataatcagcatcttcatctaggttcccatttatggccgcattctcatcccaatagctagaaaaatcaatggaaaggaaaatgggttttctgagctacagcggatgggaactggattagtcctgtccattcttgcactggtatctgcagctcttgttgaattgaagtgtttagatattgccagatctgaaggtcttatacatgagaaggcttccaatgagcattcttt

SEQ ID NO: 4333 - DNA, 516 bp, Setaria italica
  Peptide Sequence Number=SeqID_70307
gggcagatgactgagtcaatatccagcactccgttcctgctggcggcatttgcttgtcgcgttaagaccaaatgctcatgaagcaggttagtcagattgtcaagctgatgtataacttggcgctgacctcttgatatgttcataatctgcttaggaaacaaagcatcaaacatgaaattcaagtcaagatatgtacaaatgaagtgttataataagatactaaatagaatttcacaacatattgaataaccaaaaacttgcttataccattaaaatttagcaaagtcaagagtaccatattcattcagcctaggctttgcacaatacatatctaagatgaagaagaaaaatcgagttcaagagtcctgtcatgaagaagctttgccacaggaacattttatgccagattttttattttctgaagagaaggtatgggattgttaacctgcaattcagctgaatgttgcagaaggtgcacatgagttcaattagttatatggctgagatccaaggcac

SEQ ID NO: 4334 - DNA, 2516 bp, Setaria italica
  Peptide Sequence Number=SeqID_70308
tccgactcagtcgcactagtctcacaaacgaaggctttgttgattgtgatggtatatgactttatcttaggaccttgtaagctgttagatatggtcttcctgctgtaagcgtttgtgggttgtctatctttagcttgcaggagagaacatcagtatggaatctgaactctggggtatgtattgcagatcagttgtgatggttggcttcctcctgaacttcaccaaccgatggtaagcctcagagcacatgtttgggctgattcattttggtcagccccggctgagacctttaaacatgaagtacccaacactggctactgtcaggcaaataagtgggcagatgactgagtcaatatccagcactccgttcctgctggcggcatttgcttgtcgcgttaagaccaaatgctcatgaagcaggttagtcagattgtcaagctgatgtataacttggcgctgacctcttgatatgttcataatctcttctatcataggggaatcctttgcaagttggtttgacgatgaagaatgaggtatcagagtaccattgcctaactgagaaacaaagagattcgtaggtgtggaaccattacaagcatcgtttggaagagccaaattctgttgactgggtagatgtttcttcactgtaagctttgaattaagttcttcaactcgagaggtaaactcgtccatcctttcattcaatgttgatatctgctcagaaagctgggtgattgcaccctggttgatggcaggaggttcaggggctcgtcctccaccaaacctcctgttgctatctgtcagtttactcaatttcactatatttttgtctccatgcgttgaatatgaatgagatagaccactcttcataagtttgtttcttctatccgcagaaacacgggaaaaggcttcctttggacttgagaccagctcatcatcaatgctgagctttgtcttcaaatcctctggtaatgccataacatcgtttatcaatttctctagctgaatttgctcaatatatgtgcgtggtatataagaaccatccaaacctaactgctctgctacatatttaacataaagccgatctcttccttgcacttgtatatactgccggttaagttgctccagccagtcaattttaatagttgccttgccatcagaaaaaacacgactgcttctcttcagtatagctgcaatagtatatcccaatgccatcaaaccaccaagaagacgtacactgacttcaaaagtgatccttggtgatataataaaaggattgtcggtcacccattcctcaaacattagattatatttcccttccctattccgcattctcaaataagattggcatgcttctgggtcttcaccaggtggaagtagatatatatcataagtttcttcgttgctttctgtatgatcatcaccaagcacagccttgattttctcaggtgttagagaccttgatgactttagaatgtacatgggattttggaaccctgagaatggattgaacttgttgatgattttaatatgtgcagtctccaaatctggttcaatgaaagccttgtacattggataaaccgtttctgagatctgatgaattatttcttcaggctcctggccagctcgctgtatgtcccttaaaaccctcttcaccaggtcaaaatgaacaccaccagtgacagaaacacgcaagtccataaatggccgtaacttctcactcagtgcatatataccttcgataataacaatccgggagctaggggcatcaactgttctatacccagtccggcagctcgccttaaaatcgtatattggaacttgaactgaccttccttccttgagaccatgaatgttttccaacagtgtgtcatagtctgttagacgtggatcatcaaaattgccatcaactatgcgagttgcgtcattgtagttgtccattgatatcacagcaacattaggcatgaaattgacgaccttctcagtaaacactgtcttcccagcaccggagggtccggcaacacccacaaatattatcccttcattgtgctgtaccagaagctggcaggcgcggattacaacaaagaagcctttctcaaaagacaatggatcgtgaaagcggacaatctcatagcggtttgagtccttccttttgaccagttggaccttgtctcgcagaaggttataccgcctccttggcgagtcagccaaggaatcatgctgctccatccaaatgttgtcttcaaaatacaattgtggcccacgagagaaatcaatcacaattcccaggcccggatggatcacgctagtccgaaaccggcggccggggattggacagggaagcgaggacaacgacggccgcgagctgcagagagtgtctctgggtggcggctacccgtgcttgggtcggtgcctggactctggggcgagttcgatcggcggcgctggcacggccgaatatgagcacgacggtgtgggcagaggatgcttcgaggttagtgccgacctaggggccg

SEQ ID NO: 4335 - DNA, 859 bp, Setaria italica
  Peptide Sequence Number=SeqID_70309
agccggagggcggagggaggcggataagtttcggagatgtcggtgctcatcgtcaccagcgtgggcgacatcgaggtggatctccacaccgacaagtgccccctcaccaccaagaacttcctcaagctctgcaaaatgaagtactacaatgggtgtctgttccataaggtggagaaggatttcctggcacaaactggcgatccaactggaactggcaccggcggtgattctgtgtacaaatatctctatggtgatcaagctcgattttttgatgatgagatccgtccagagttgaggcattcaaaaactggaactgttgccatggcaagtgctggtgaaaactgcaatgcctcacagttctacattaccttgagggatgaggtggactaccttgatgataaacacactgtctttgggatggttgctgaaggttttgatacactgacaaaaataaatgaagcttatgttgatgataaaggaagaccattcaaggacataagaattaaacatacatatgtcttagatgatccttttgatgatcctcctcagctcgctgaacttattccagaaaattctcccacaggaaagccacgtgatgagattgcagaggagcgcttagaggatagttgggtccctttggacgaaacagtggctcctgaagaacttgaggagatgatccgctctaaagaggcgcacacaaatgcagtaatccttgagagtttggcagatattccagatgctgagattaaaccacctgataatgttttgtttgtttgcaaactcaatccagtaactcaagatgaagatttatacactatttttctcgttttggaacttgtgacatcagctgaaatattcg

SEQ ID NO: 4336 - DNA, 356 bp, Setaria italica
  Peptide Sequence Number=SeqID_70310
ttgtttttttttttttttttttttttttttagttaagcagcatcgaatgaaaaaattccaccaataaatgaaaccagaatctatccgggcatgcatacacaaatttgttgataactgttctatagactaacataagtacatacacgtaagctgtagtatatgccaaaaacaaaaaacagcttcaagcgaaaatgaagaagattttgtcatcagaaaccggggacgagcacggtggagaaccagatcaccaggtcgtcggcgagtgcttcacggccagtgtgcttcaccgccaccggatgcctgttctcgtcggccacgtaaacccggcagagcgggcaggttcgcttgcaggacag

SEQ ID NO: 4337 - DNA, 280 bp, Setaria italica
  misc_feature (65)..(65): n is a, c, g, or t
  Peptide Sequence Number=SeqID_70311
cactccctccccgtctccaccacccgacagcgacctccctttctccttagccgctaagcatcatntcccccccttccaccacctcctccccccgccgtgcccagctgcgcgcgcggctcgtcgccggcgtcctcgccccggcaccaccggcacaggaggcgccttccgccgaggggccgagccagcggcactcgatcccatctccgcgcgggggcaccaggaaggagatcgggcctccgatcccggcgtcgcgagggcccgatctcgcccgatccccccg

SEQ ID NO: 4338 - DNA, 454 bp, Setaria italica
  misc_feature (6)..(6): n is a, c, g, or t
  Peptide Sequence Number=SeqID_70312
cttcangggtttcgacttatgcctggttatagaagttagtcacaccttggaatattctatacattctctttaacaggcgactttttccagaaagggaaaaaaaggggatgtaatgggcgtgatcatagtatcggaacatttcgctcagtttgtttaccgtgactccaatatctttgcggagtcatttgcatgatggtgttactaggccttcctatgatgccaaaactgaagcttggtctgcaataaagtggtgagctgggtcatttttcacctagcaagcaactgccccccttgctacagaagctaagcagtgtaaaataaaaagtgaataaaattgatggaagttcgttgcccttgtctactcaattaatgagaaacaggtagctgcagtacatctacggcttggctccacaggcatgtgtcagtcggtcatttcttactgggtcataagaag

SEQ ID NO: 4339 - DNA, 458 bp, Setaria italica
  misc_feature (451)..(451): n is a, c, g, or t
  Peptide Sequence Number=SeqID_70313
tggtgctagtgcttctgagcttaattctccatcggggttcttctttggggtgtctgcaatatcattggccatcaacatgctctttatatgtaaaatactgtttaatgtaagtggatttgatgttgatgaatatgtgaggaggtcgtacaaatttgcctattctgactgtgttgaagtggctcctgtttcatgctctcctgatccaccagatcctagtgagttatacatgacaaaatccagcagggtcaagcatttagggcttctctacatttgctcactgcttgtgcttgttctctattctatcttgtatggtcttacctcaaaagaagctcgttggctgggtgctttaacttcagttgcagtggtgattcttgactggaatcttggcttgtgttcatttagatttgagcttcataaaagtcggatgatagtattatttgtggctggaacntcaaggg

SEQ ID NO: 4340 - DNA, 233 bp, Setaria italica
  Peptide Sequence Number=SeqID_70314
aaccaaagttccatcatagtcaagcaatatagccctgctctctgaaatctcataagcattaacaattgaatctatgttaagctttgtgaaatgagggtccaaggccaccaccctgaaaccgaaacccaagcaaagccaaattctacgtggatgatacatttgaagtggtcaccatgctgagtgcattggcagatgccacagaacccgaactggagactgattcggctgatgaa

SEQ ID NO: 4341 - DNA, 303 bp, Setaria italica
  Peptide Sequence Number=SeqID_70315
ctgaggaaccaaagttccatcatagtcaagcaatatagccctgctctctgaaatctcataagcattaacaattgaatctatgttaagctttgtgaaatgagggtccaaggccaccaccctgaaaccgaaacccaaccctatgccccaacaagtcctcctaaagtgatccttacaggccctttccaaatcttggatgaagctcttcgaccagtaagcaacatcatggctgctgacataacggtaatgcttctcatgcctcaaatgcttttcctgttctggcattgaaatggcctcattcatccc

SEQ ID NO: 4342 - DNA, 366 bp, Setaria italica
  Peptide Sequence Number=SeqID_70316
ccaaaccctaaagccctccgcccgaccgccccctcctgcaccccgaatccgcccccaacgctgctagggtttaatgcccgcgtcctcctcacgcattccgcccggtcgctgatctggcccgttcgatcccgctagactctagggcccaggctctagaggcgggtggagtggcggcaccacgagagggggccgccggatgcagacggaggcgagggtggggatggccgccgccacgatggacggcggcagcgccgccgcggccgccgcgcggaggtacacgacgcagcagcagcaggcgcagccgcagctgcagcaccaccagccgcagctcgggactgtgccccacctcctcgccggcggcgtcgg

SEQ ID NO: 4343 - DNA, 492 bp, Setaria italica
  Peptide Sequence Number=SeqID_70317
tacaacaattaataagtaagtaataagagaataagcttgcatgcatgcatgtatgggtgcatgtaatctgtgttaaaaggcaaagttggagtatgacaacaaaatgacaaatgaaacagcttgtttggatgtgtgtaaacttatataatgaattttcattaccaagttggaccgaatcctctggacaggggagtgatttggcctttctcatttttttgccgcctataataaatgacaaccagccagatccccacaatcaaaataacaatacaggctatcacaattcctgctactgctcctccagaaagagtatttcctgttccatgtagtatatatgagttaatcgcctttgtttctgtcaactgaacaaaccatccagttttgcttgctgatgtttgatagcctcgatatagaagcataatagctcacaaaagtgtagaagtgtgccagcactgcacaagcctgattccagagggcggtaactaccatttg

SEQ ID NO: 4344 - DNA, 542 bp, Setaria italica
  Peptide Sequence Number=SeqID_70318
actactaccaataatacgagcatacctgtaaatcagatgactctttggtatagtactaaaatgtagaagtcagatagcaaatagtagtctacgaagctatgctctgatattttcatagtgtgcacattcatgcgaactgaataaaagaacaaagatacgtgatactctgagaacttactctggaggcatgtaaccaaatgtaccaacaactcgtgttggaagtgaccgtgatgcagttccaatttctgtaagctttgtcagtccaaaatctgctacctgcaaggtaccattgatattgcacataagatgactaagacatggacggttttcatgaaaggtttcaacctttgctcgaaggtctttgtcaatcaggatatttgcagacttgatatcccgatgaacatacactggaacagtgtgttcatgaatatactcgagacctcttgctgaatcaagggctattcgctctctactggtccatgaaagaggttcatatccagtcccatggagatgctggcttaggtttccattctcaataaatt

SEQ ID NO: 4345 - DNA, 1402 bp, Setaria italica
  Peptide Sequence Number=SeqID_70319
gttggaagtgaccgtgatgcagttccaatttctgtaagctttgtcagtccaaaatctgctacctttgctcgaaggtctttgtcaatcaggatatttgcagacttgatatcccgatgaacatacactggaacagtgtgttcatgaatatactcgagacctcttgctgaatcaagggctattcgctctctactggtccatgaaagaggttcatatccagtcccatggagatgctggcttaggtttccattctcaataaattcataaacaaggaacaagcaattctcgacacaataaccaattaagtgcaccagattcaagtgatggacatgcgtcaaaaccttcagttcagcgaggaattcttgagttgcctttgcatccattttctttatggcagctttctcgcctctaagctcagcataataaacagagccaaaaccaccttgcccaattttatgctccatactaaagttgtgtgtagcatcgcaaagttcttcatatgagaactgtatggatctgttaaccttaatgccctcagcttgtgaagcactgccaagttggaccgaatcctctggacaggggagtgatttggcctttctcattttttgccgcctataataaatgacaaccagccagatccccacaatcaaaataacaatacaggctatcacaattcctgctactgctcctccagaaagagtatttcctgattccagagggcggtaactaccatttgtatctttcaccgggataaacacaattcccttcccggagaccccacccatcccgggattatacctcctgagcaggtccatttgcgccggcgacgagaacccgtactgctccgccgccgaggcgagcgtctccccgtcccagagcgggtaggtgaggaacagcccgtaccgcggcgacacactcttgtcgccgcacgagcagttaatggtggcatcaatcgtcccagatgccggtaacttatccgccgggtacctgttggtggccttcagccacgcggccgtggtgaggttggcgaattccgcggcgacgtcgccgtacgactcgccgcgggagagattgctggggatcgacccggcgaggtaggtggaggtagggtcggcggggagggcgaggcacgagcaggtgaacgggacgctgatccgggcgccggtgacgatgtagttcgggtccgtgatgttggggttgtaagggagcagcgcggtgtagtcggggaagttgaagagggaggcgatgaaggtgaggttggactccgccgtgaagtagtacgcggcgagggccagcgggcagccgacgcggcaaccgtcaccggacgctgccgccgtagaggctgcgccggcgaccaggaggaggagagggagcatggtggggactgcggggcggtgcggagccg

SEQ ID NO: 4346 - DNA, 259 bp, Setaria italica
  Peptide Sequence Number=SeqID_70320
aagcaaacggaggagtcactgggtattaagcaaagtattaaaaaggctgccttaatttgaccattttgatcatcactgtgtaaacaccaccaggaggatgtacgggtgtagtcggctgcttgggatgagggaagagactatatatatgagcgagacgaatcgagaccaaggcagttttatagcaaaaatgaataaactcctagcagctttcttttgattatccttaagcaaaaaaatagaatcacatgagtaagcacaa

SEQ ID NO: 4347 - DNA, 459 bp, Setaria italica
  Peptide Sequence Number=SeqID_70321
gtagctgaaacttttagttggatacagctacaaccaattctgtaacggcacgaaacaagtttttgaccacttatgggtcaagctattggaagatacctcggcaagtatccaacctagttaaaagctggttatttaatggtaagtaaccatgcagaagacatcaattgctagcagctggaatcatggaacaggtggcaaccatctccataacagtataattgtgaactgggttgcctcaatttgtcagtgcactatttagctcataacagttctgtcaaaaactcgtcaaaactaaccaatccaaggacttggcgttcataaattggtgtgacgtagaaaccagacttgttatagcaagacaatacagaactaaatgattgagttcatcgattataacgatgctgctcattgacaacacaagattgcccttgcaaagacataaactacaaaaatttccta

SEQ ID NO: 4348 - DNA, 485 bp, Setaria italica
  Peptide Sequence Number=SeqID_70322
gatccatattgctcttgacgcataatatctttttcgaaaggaaacagagctgatggggcttcttccaggagcattttctcaacaattttcaattgcattgaggtcattggcgatgcattgttagggaacatcgtatttatggtcatgttattcctgggagtgcggttcattctcaaactatctttcgacattacaaggtatagagaggttctgttcgctgtcatcatttcaagctacttcaagttgcttttcacaatgatggtttgggagtttccatcatctgttatattaattgttgaaatgtttgttctctcatcaaatgttgtagccctaagagtcgtttcgcagtttccaaaagcccactgttttggggcctgcttcatggcgcatgcagcaaaattcttgaccgagagatggatcctcgggacaccaggagcctaaagtcatccagaccatccttgaacttcctaagtctacttgtccct

SEQ ID NO: 4349 - DNA, 1238 bp, Setaria italica
  Peptide Sequence Number=SeqID_70323
ggtttgggagtttccatcatctgttatattaattgttgaaatgtttgttctctcatcaaatgttgtagccctaagaggtaaacactgcacattttccccacaaataatcgccaccttggccaccacatcgttgagttattttgaaatgctttttagtggtgggatgcatacacatcaattacagtcttggtaagtactgcacgtttttcccatataataaattgaaacatttctatatgggcatatatatgtatatggtggatagcatagataattatgttagggttctgtgttgcatcaaccgacacattatcatagtttttctatgaatcctgccattttcctgcacaaagatatatcccatggttggatcaaaagggcctttcgctaatcaagatctctagtgatgggatcagacagatgtccccagttctgcatcgaatggtcaagtctatgtcatcgccattatatcctatataattgattgatcgatctaggcctcaccctcaacgtctacaacttcacgccttctacagttttctgaagtgatacccatcaaggcagagcccctgaaccgtgttgcatcaagtttttggctcactggctgtgcacctgcacaaatatttagtatgatgcatatatatcagagtcttctgggattgttggtttgctcccagctttcagcacttggtctattgctggttttggttttactgaaattaccacagctttgtttccgttttcttttggtagaagttatgttcctttagcaatcctgttaaatgttgtcagaactgactgtgctgtttctttgcagtcgtttcgcagtttccaaaagcccactgttttggggcctgcttcatggcgcatgcagcaaaattcttgaccgagagatggatcctcgggacaccaggagcctaaagtcatccagaccatccttgaactccaagcactgccctattcaattgacggactggtactccaatccgccctgcttcttctagctcgagttgcagctcggtacgtggacatctaggcatactgtgccacgatgatgagcttaggcttttagctaatcattttggacgaacgcattgactatgttgcccaccaccctgttagtagttgtggtcttctggaccatgctacaactgcacggcctcttggcattgtgcagcactgcaccggttgttgatcaatctcttccatgtgtacttgcccccaaagacgtatatggc

SEQ ID NO: 4350 - DNA, 253 bp, Setaria italica
  Peptide Sequence Number=SeqID_70324
gcctcaaactcagagcttggcagcggcggcgcgggtgtgcgcgcaccaggtgttcgacggaagtccgcgaccggcggggtgggcgcgaagggcggcggcaacatgtacgtggtgaagcgtgacgggcggcaggagacggtgcacttcgacaagatcacggcgcgcctcaagaagctcagctacggcctcagccaggagcactgcgaccccgtgctcgtcgcgcagaaggtctgcgcgggggtctacaagggcg

SEQ ID NO: 4351 - DNA, 302 bp, Setaria italica
  Peptide Sequence Number=SeqID_70325
tcgcatcttccgcgccggaaccggaaggcactcaaatccgtcccaaaccctacctttcctcacccatcgcctgcctctcatccagagcttggcggtggcggcggcggcgcggaggcgcccaccagctgttcgacgttagtcctcgccggcgggcaacatgtacgtggtcaagcgggacgggcggcaggagacggtgcacttcgacaagatcacggcgcgcctcaagaagctcagttatggcctcagccaggagcactgcgacccggtgctcgtcgcgcagaaggtctgcgcgggcgtatacg

SEQ ID NO: 4352 - DNA, 298 bp, Setaria italica
  misc_feature (288)..(288): n is a, c, g, or t
  Peptide Sequence Number=SeqID_70326
ctggtagtgttcctgataaattgtttctggagaggtcaagatacattacgtttcttggaaaacgtggaactggacctgcaaatctgttactactaaggtcaaccatttctgccgccaacatttcaagacttgctggtaatgtgccacttaataaattttttgacatgtccaaaaaggaagctgttgaaactacgacccacaaccaatcgggtacattgtcatatatggttgcatttgaaatgtcaagaacattgatactcctttgccatctaatccatgatgggaacncaggtccaag

SEQ ID NO: 4353 - DNA, 409 bp, Setaria italica
  Peptide Sequence Number=SeqID_70327
aagaaaacaatagcgagcagaaaaattagatgctggggctgtgaattcgaaggtggctgctgcgtcagctggggggaggggaattggatggaggcgctatgcagattgacagtggaaatgctagggaaggaccaggtgctgcaatttcagtttctgatgtggtgtccaagaagccattgaatcaggctgaatcgagagttggattagtgaaggcaggtgaggttaggaattcggcattgcaaggagagagaatggaattggatggtggggagtcatcaatggaagcagagatcagtgcagagaacatggctaggttggctgggatgtctgcaggggagattgtggaggcacaagcagatatcataaataagatgaaccctgcattggtggagatgctgaggaggcgagg

SEQ ID NO: 4354 - DNA, 303 bp, Setaria italica
  Peptide Sequence Number=SeqID_70328
tcatcagggtcctgccggagttcatcgagaaggtgatcacctgcgatggcggccccgcgaaggcgccgaaggcaacgtcggcggcggagctgtgcagcacgccggagctgaagcggcattacgcgcagctcgtggggccgaggagccggccgtggtcgccgaggctggagacgatagcggagagcgacaggagcagatggctcaggtcgccggcgaggatgctgtcttcgcgatagccataactagtactgagtagtagtctgccatacagatttcgtttagaatcagggacgagcagcaaca

SEQ ID NO: 4355 - DNA, 137 bp, Setaria italica
  Peptide Sequence Number=SeqID_70329
atcgattgtaagcatgggttctgatgtgccgcatgctaatgatcaatctgaataagtataccgctctaggtggtcagctgcgtctaccacaatgagcatacgtatggagaaaatgtctgtcaaataaatcttattca

SEQ ID NO: 4356 - DNA, 420 bp, Setaria italica
  Peptide Sequence Number=SeqID_70330
gaagctaacggagccgaggaactcgctgagttctaggagagaatccttttcgctggtctctgccaggttctgctgcgtcgggaggcggtgaagggggaattcgtgagatctgttccggatcacgcgtgcgcgctcgggaatcggggggttccacacatagcttcgttgaattgaatttgatgtactaatggagtctaagggtggcaagaagtctagcagtagtcgttccatgatgtatgaagctccccttggctacagcattgaggacgttcgacctgccggaggctagaagaagttccagtctgctgcttactccaactgcgcgaagaagccatcctgatatcccttccgtgccttccccgtcctagtagtttaggatttctttctaacgctttgattctgaccaatctctctggcctg

SEQ ID NO: 4357 - DNA, 314 bp, Setaria italica
  Peptide Sequence Number=SeqID_70331
gatgccatggaggagaaggacggcgtgcttgctgagtaagactggggaaggtgtcgatttgctgctgagttaattttttttttacttaaaatagttagacgattgtcgtttggttattgtgtgaagcagccaagccaggctatttattatgaaaatgatcgattgtaagcatgggttctgatgtgccacatgctaatgatcaatctgaataagtataccgctctaggtggtcagctgcgtctaccacaatgagcatacgtatggagaaatgtctgtcaaagcaatttatgaataagatttatttgaagttaaag

SEQ ID NO: 4358 - DNA, 586 bp, Setaria italica
  Peptide Sequence Number=SeqID_70332
taatcacgacaagtctgaacattgccgagatgattgctgttgctgctccagaggagttggttaatctgaagaagttcctaattgacttcctcgagccatttgcgcagaacttggctgggattctaagagtggtgagggccacctgaatgctttgttaagaggtaccctcttaactgctcttgcagaactcggccatgaggctaccataaatgaagctgttcgtagatttaatgtctatctcgaagacagagagacaccactcctccctccagatgttcgaaaggctgcatatgttgctttgatgcagacagcgaacaaatcgaacaagactggctatgaatcactcttgaagatataacaagaagaaaagtagaatactaaagccaggagaaagttcgcgtgttaggttctttggcatcatgccctgaccctgttgttgttcgtgaagcattggacttcatactatcgcctgaggtaaggaatcaggacgctatatttttgcttagaggggtgtgttcagggggcacacgaggtggcatggcaatggctgaaggaaaattggggactacatattgggagcttactc

SEQ ID NO: 4359 - DNA, 502 bp, Setaria italica
  Peptide Sequence Number=SeqID_70333
catcagaacccatgcttacaatcgatcattttcataataaatagcctggcttggctgcttcacacaataaccaaacgacaatcgcaacatttaagaaaaaaaaataactcagcagcaaatcgacaccttccccagtcttactcagcaagcacgccgtccttctcctccatggctaatcttctctgctgggaggaagaggatgccatggaggagaaggacggcgtgcttgctgagtaagactggggaaggcgacgatttgctgctgagtttatttttttttctaaatgttgcgattgtcgtttggttattgtgtgaagcagccaagccaggctatttattatgaaaatgatcgattgtaagcatgggttctgatgtgccacatgctaatgatcaatctgaataagtataccgctctaggtggtcagctgcgtctaccacaatgagcatacgtatggagaaatgtctgtcaaaagcaatttatgaataagatttatttgagttg

SEQ ID NO: 4360 - DNA, 586 bp, Setaria italica
  Peptide Sequence Number=SeqID_70334
caagaaggcacaagccgagccgcgcctccgttccttcgcctcgacctcgcgcagaggaggaagccgcccccgccccgccgcgtctcgcctcccctccccattacaacctctgttccgcgcgagcgcaccacaagaacaccggtggcgtcctcctccgctccgtaagcctctcggccggtccttccaagaagcctgctgctggtctcgtctctgcgccgccgccggccgcattcctacaaacttttaggaaggggacaattgtggatgctctaatggagtcgaaaggtggcaagaagtctagtagtagtaatttcatgtacgaagctccccttggttacaagattgaggacgttcgcccagccggaggaatcaagaagttccagtctgctgcttactccaactgcgtccgcaagccatcctgatatcccttcacatgcaattcgctgtagagtaggatttcccttcaatttttctcccttgtttcgatagttctccctggctggctgcattctctgcttctgaaatttcaacttgtcttctcccatctctccctccctttcccaccctctcttcctcgcaacacatc

SEQ ID NO: 4361 - DNA, 673 bp, Setaria italica
  Peptide Sequence Number=SeqID_70335
aagttaatagggacttacgaacgccaactgcacttagacctaacggacgaacctacgtagaaagaagggtcctcaggtgctttggcccttcggagttctctgttgctgtgactatctttggtgggcgtggccaagccgcgacatggggcatgaagcttgatgctgaggtttacgactgcaacaacatggtagagcaggagctgcccggtggtgtgcttatctaccagagcttttctgttactgaagatgctattgttggctcgcccaaatctgttcttcattgcttcgagggtgagaacctggagaatgctgctcctgtgaaggacggcaaactggctaatcttctctgctgggaggaagaggatgccatggaggagaaggacggcgtgcttgctgagtaagactggggaaggtgtcgatttgctgctgagtttattttttttttcttaaatgttgcgattgtcgtttggttattgtgtgaagcagccaagccaggctatttattatgaaaatgatcgattgtaagcatgggttctgatgtgccacatgctaatgatcaatctgaataagtataccgctctaggtggtcagctgcgtctaccacaatgagcatacgtatggagaaatgtctgtcaaagcaatttatgaataagatttatttgagttgaatgaa

SEQ ID NO: 4362 - DNA, 2367 bp, Setaria italica
  Peptide Sequence Number=SeqID_70336
gtacgagctcaatggggagaagaagaacatggctgtaacacagtttgagcccgctgatgcaaggcgctgcttcccgtgttgggatgagcctgctttcaaggctgtattcaaaattactctagaagttccttctgagactgttgctttgtcaaatatgccagtaattgaagagaaggtcaatggtcctaccaaagtagtctatttccaagaatctccaataatgtcaacgtacctagtggctgttattgttggcatttttgactacgtggaagctttcactacagatggtactagggtccgtgtttacacacaagtgggtaagagtgcccagggaaaatttgctctagaggttgccctgaagacattggtcctcttcaaggagtattttgctgtgccataccctcttcccaaaatggacatgattgctattcctgattttgcatctggagcaatggagaactatggcttggttacataccgtgaaacagcgttgctatttgatgagaaacactctgcagctgctaataaacaacgggttgcagttgttgtagcacatgaattagctcatcaatggtttggaaatcttgtgacaatggagtggtggaacacacctgtggcttaatgagggttttgcaacatgggtgtcttacttagctgcagatcagttctttcctgaatggaatgtttggactcaatttctggaggaatctacaacaggttttaagttggatgctcttgcaggatcacatccaattgaggtggacataaatcatgttgatgaaatagatgagatatttgacgctataagctataggaaaggagcttctgtcatccggatgctgcaaagctatcttggggctgaggtctttcagaaatctttggctgcatacatcaaaagatttgcgtattcaaatgcaaagacagaagatttgtgggctgctcttgaagaggggtctggtgaaccagttagaacattaatgcattcatggacaaaacagcaaggttatcctgttgtcagtgtgaaattcaaggatggaaagttacagctggaacagacacagtttctttcaagtgggtccacaggagttgggcaatgggtggttcctatcacactatgttgctgttcatactcacgccaagagaaattcctttttcatgggaaacaagaagattttggtctgtgcgggctcatggaatgcaaacagaaagatgacttctggattaaacttaatgtcaaccagaccagcttctacagagtgagctatgatgaggaacttgcatcccgacttcgatatgcaattgaaaccaataaattgagtgcagcagacagatatggtgtacttgatgatgcttatgctctctgtatggctggcaaacaaaagctagtctccttgctgcatttgattgctgcgttcaaggatgagactgagtatactgtgcttgcacacgtaatcacgacaagtctgaacattgccgagatgattgctgttgctgctccagaggagttggttaatctgaagaagttcctaattgacttcctcgagccatttgcgcagaaacttggctgggattctaagagtggtgagggccacctgaatgctttgttaagaggtaccctcttaactgctcttgcagaactcggccatgaggctaccataaatgaagctgttcgtagatttaatgtctatctcgaagacagagagacaccactcctccctccagatgttcgaaaggctgcatatgttgctttgatgcagacagcgaacaaatcgaacaagactggctatgaatcactcttgaagatatacagagaaagtgatctaagccaggagaaagttcgcgtgttaggttctttggcatcatgccctgaccctgttgttgttcgtgaagcattggacttcatactatcgcctgaggtaaggaatcaggacgctatatttttgcttagaggggtgtgttcaggggcacacgaggtggcatggcaatggctgaaggaaaattgggactacatattgggagcttactctggaactctgctcacctacttcgtcaacataactgtctcaccgcttgccactgatgaaaagggtgatgaggtggaggagtttttcaagagcagaaccaaggcgagcatcgccaggactgtgaagcagagcatcgagagagtgaggatcaatgcccagtgggtcaagagcatcaagggcgaggccgacctcagcaatgtcatcaaggcgctcgctcacaagaactgaggcgagatggccactttccttttctgtgcccttgtagtgtcgacggggatgtaagttgtcggattcagaagtggattgatagaatggattaataaagggctactgattcgaactt

SEQ ID NO: 4363 - DNA, 794 bp, Setaria italica
  Peptide Sequence Number=SeqID_70337
aatgcataatcccttatacccatgtcttatctaaatacttagttaacattaacatgcagaactacagtaaactgacctgtcatgcttctctcaagcattaagcaacctttctccccaagagttacaataacaaatttgatgttaggtaaccttgaaagcatggacactaaagcaatcggtattgatgaagctcctgtccaggcctacaaatttagattagatggaaagtatataacccacaagataccagcatagtgaaaatgctgaacatatgcctaaaaacttactgtaccaacatatgctgcagcatgagggaatttattgtcaatcgcttaatttgattgagatatccagctacaataatccactctaaactagattacagtaaagcaaagccagcatacttttggattccaattgaaatgacactggccatgccattagaagatgtaaagccacagaaaatgtaagcacttttcatttctacaaggagaagttagtcaagaacaatgtagttatagtaaaacctgagaacagtaaattggaagggtcttgagtaggatttagcagttatactcttaacattacactcttctgcaatcaaacaacttacctgaggaagctttgcagagcatacaacataagatgcaaaattaaggagctcgtccagcccctccctctttctttcggcatcaatcaaaatagggatttttctttgacttgcctgcactcttctgcaaccagcaaagcagtgtcaggcaaccgtacatcaaagtagacgatgtctgctccat

SEQ ID NO: 4364 - DNA, 824 bp, Setaria italica
  Peptide Sequence Number=SeqID_70338
aatcctggtcgacttgattctgtagtgattcgaataaagcctccacatctatttcccctgcctcagaagcatctgtcatgcttctctcaagcattaagcaacctttctccccaagagttacaataacaaatttgatgttaggtaaccttgaaagcatggacactaaagcaatcggtattgatgaagctcctgtccaggcctgaggaagctttgcagagcatacaacataagatgcaaaattaagaagctcatccagtccctccctctttttctcagcatcaatcaaaatagggatttttctttgacttgcctgcactggagtggattgtcccataaataaagatgagtctcagtagcagcatggagaaaatttagccaaaaaaggcttttgtatgacatcagaagtcaggtcgttgaagtggaagttcctcttgtgcaacaaccaaagcggtgtcatgcaacctcacatcaaaatagacaatgtctgcaccgtccaaagcggcagacaagttctcctttgtgagctcctctggcgacattgggggataaccaggagtgtgtatacaagtacgagttttcctgaggggcagaaggggagtgctccgacccaatgagcagtatgacactaaaaagaaatacagttggcgagaatgtgagctgtttgtatgtcaaaactaacgtttggttatcaacaatgatgtaggtgaagggcgtattcccgtcctcggcaaccagcatgaaggatgtgtcgatgccatcgtcttgcagctccttgagaacgtttcttccttgtgcatcgttggctaccttggatatgatccttg

SEQ ID NO: 4365 - DNA, 544 bp, Setaria italica
  Peptide Sequence Number=SeqID_70339
actaccctaagggttaacaaataaacaaaatttagaatacaaaaggtaaatacttagaaagcaatagacactaaagcaactggtattgatgaggctcctgtccaggcctacaaatttacaatagctggaaagaataaaacccacaagataacagcaaactgaaactgcttaatacatgccagtgattcaaaatatcagcatgatggaattttctttgccaatcacaaaattcgattgtgataatccaactgcatatagccacgcaaagcttaaccattgctgaaactcctatctgagctgatggcaaagccttacgcaccaccacaccatgcatgggattacggtagttacataacatacactcatacagatatattagagagtagagactacagtaaagcaaagatagagattgtttgcgttccaatttaacaatactgagcataatgttaacgaaaaacaaataaagattttgcctaagccatgagaaatgtaagcattctatttatacatggaggaagtgatcaataataacaccttggac

SEQ ID NO: 4366 - DNA, 1605 bp, Setaria italica
  Peptide Sequence Number=SeqID_70340
tttttgtttttttactttttttaccttttttagttttttagttttttacgttttttaggttttacttttaaccttttaggtttaatttacggttaattttactaattaggtaattaaaattcaaaactctgctggtatagtaagcatgagcatataatttttgaagtacaggtgggactcgtacacatgaacatacaacaagattgagtatagaaggataaaaaaactggggaattgggggtgatattatctgatcacaaatcaaatcagggctccgcccgaacaatgtagttgcatacattttcgcacaataacagcacttgagtaaaccaaataaatgaacctcaggtttttttcagcaggggcgttgaacatgatagtattgatatgctagttactggtgcagactgctttctttattatgactgaatcgattggatttggaatattttagaaccaggcaggtgttcatggttctgccgaatgctgatcaatagccggccagacgtgggtctgtgcgatgaggaaggctgctccgagcccccaaacctctgcaaccgcagccagccacttgcgctgcaaaaggcagcatcctctctggtggcatgctggtgcataaaccatacagaactgctccaatgaatgcatctcctgcaccggttgtatctatgagctcatcaggtggtatgacttcggccgcacctagcagtaacctgccacttatggaccctactccatctgcacttattctcaatttgccttggaagtaatgcagtttggcgtgtgagaactctgttcaactttcttctctagtgagtccaagagagcctctacatctatttcctctgcctcaaaagcatctggggaaactttgcagaacatacaacataagatgcaaaattaagaagctcggccagtccctccctctttttctcagcagcaatcaaaatagggatttttctttgacttgcctcttgtgcaacaaccaaagcggtgtcatgcaacctcacatcaaaatagacaatgtctgcaccgtccaaagcggcagacaagttctcctttgtgagctcctctggcgacattgggggataaccaggagtgtgtatacaagtacgagttttcgtttggttatcaacaatgatgtaggtgaagggcgtcttcccgtcctcggcaaccagcatgaaggatgtgtcgatgccatcgtcttgcagctccttgagaacgtttctttggctacctggatcggattcatggattggaagcaagtcgactcgagtcgagtcgccgttgagagaagggaatactgaccttggatatgatccttgggcggaggccgaggcgtgccgctgcagtgagggcgttgcccgtgttgccgcctccctgcaccttgagggagaggctgcggatcttgtcgtcggggttggggaaggaggcgaccgtggccaggtagtccacggaggcggcgccgcagcccagcacgattggattgggggtgtcggtggcggaggcggatgccatggcggcgacgggtgagcggtgatgaggagcgggcagctgcagcggcaacaagaaaggcaacgattttcatcagctgttgcttccgac

SEQ ID NO: 4367 - DNA, 1501 bp, Setaria italica
  Peptide Sequence Number=SeqID_70341
catcacagtcttgatctacagtagttctacaggtgcaggctgttctttttccttattatcgcggcctactatcattcatgtatctcattggaatatttataagcatggaaagcaggcaggccattactgaattctgatcaatagtccgccaggcgtgggtctgtgcgacaaggaaggctgcttcgagcccccaaacctctgcaaccgcagccagccacttgtgctgcaaacggcagcatcctctccggtggcatgccggtgcataaagcgtatagaactgctccaatgaatgcatctcctgcgccagttgtatctataagctctccaggtggtataacttcggctgtacctagaagtaacctaccacttatcgagcctactccatccgcgcttattctcaagtttgacttggaagcaatgcattttggcatagtagaatcctggtcgacttgattctgtagtgattcgaataaagcctccacatctatttcccctgcctcagaagcatctgtcatgcttctctcaagcattaagcaacctttctccccaagagttacaataacaaatttgatgttaggtaaccttgaaagcatggacactaaagcaatcggtattgatgaagctcctgtccaggcctacaaatttagattagatggaaagtatataacccacaagataccagcatagtgaaaatgctgaacatatgcctaaaaacttactgtaccaacatatgctgcagcatgatttatggaaactttgcagagcatacaacataagatgcaaaattaaggagctcgtccagcccctccctctttctctcggcatcaatcaaaatgggattttcttgacttgcctgcactcttctgcaaccagcaaagcagtgtcaggcaaccgtacatcaaagtagacgatgtctgctccatctagagcggaagataagtttgcctttgtgagctcttctggcaccatggggggagaaccaggagtgtgtatacaagtacgagttttcgtctgttcatcaacaatgatgtaggtgaatggtgaattcccgttctctgcgactaggatgtaggatgtgtcgatgccatcagctcgcagctcgctgaggatgtttcttccttgagcatcgttggctaccttggaaatgatcctggggcggaggccgaggcgcgcagctgcagtgagcgcgttgcccgtgttgccgcccccctgcaccttgagttcgaggctgcggatcttgtcgtcggggttggggaaggacgccaccgtggccaggtagtccacggcgatgccgccgcacccgagcacgacggggttggcgctgccggaggccatggcggcagcgatggcacggcgggggcggcgacgcgggcgaggaagcggaaaatcccacctgcccgcttggcgacaaggagtgtggagaggagcggtgggcagctgcagctgctgtgcgcagggcaccatctcctcttttgctaccggccttcggactaacgccaac

SEQ ID NO: 4368 - DNA, 254 bp, Setaria italica
  Peptide Sequence Number=SeqID_70342
tcgcccgctcccgctccagccatggaccatgctgaggacgagggcggtggtggtgccaggaaccaaagcagcatggtggtggtgaaaacagaggccgtctgcacgaatggtggtggccctctggtggcgtctcctgaccttgtgattgaagacgagggagatgaaaccaccgaatgctcgagctcgtttggggacacttgctcaggatccgaaggcgaggcggatgggggtgaaccggaggcgaattctggcta

SEQ ID NO: 4369 - DNA, 206 bp, Setaria italica
  Peptide Sequence Number=SeqID_70343
ctactttaaagaggctaagaagggcgaggggcatcatcctctgtttgtgaggatgcaccttcaaaatcatcatcactgttgttcttgggctttgatggtaccccacttgaagaattctttcgcttgttgacctctagggtaccctggaggtcaacaagcgaaagaattcttcaagtggggtaccatcaaagcccaaaatcatcatc

SEQ ID NO: 4370 - DNA, 1800 bp, Setaria italica
  misc_feature (35)..(35): n is a, c, g, or t
  Peptide Sequence Number=SeqID_70344
gcagcaaacagtaaataatgcgattccgcattcgnacctctaaagttcaggatgaacacaaaaaaggttccacggccctatcagtggccgactggctagtggctactggagcactgtgcgcagcaaaaacgttctgcccttctcgcaccctaacattgtaaagctcacaggccagttattatacacactttcaccgactgaagctgtcaagctgctaacattttgagaagaaacacctagttacaaacgacccactaatccaccactatatttacaaacacgacaacagcacttctactgcacaagaacaaaactggttatactgatgcagtgctcctccaatagtgtgcgttgaaagaaggcctcaggcattagtcttgaagtccacgcgaagcatgataccacagatggggtaaaagtaggggcaccaacaagcgatcagagagaaaaatcacatgttttccaatttcgtcagcatttgtaagtcttcgcagcaggtccccttcttagcctctttaaagtagggcgaggggcatcatcctctgtttgtgaggatgcaccttcaaaatcatcatcactgttgttcttgggctttgatggtaccccacttgaagaattctttcgcttgttgacctctagggtaccctggacattcttcgcatcttcatcttgaacaatcttctcaacctcaaggttctcaggcctcatttccttctttggtgtctctccttgctgggtagtcttattttgttcatcgttgccagatctcttttcaccaatcacaatgacaccacgtcccatttgttgctctggaacctcacatttcccattgaagggtgacatgtagcagaaccattccactggaagagtgtctgtattgaagcctgcattcaacactctccatttacgacagctgcagcactgaacccagtcacaatcaggcttgtggtgctcatccctttttctcaattcgagattgtcaaattttgtatcccagtattcatccactttcctaccaagccactcctccagtttagcataaatttcacaatcttgaaatccctgcttactgttcaaaacccaagaattaccatcttcatcatcaatgagatttgtgatatctgcaactcctatgactccacgtcccacatcagcactatgcttctggcctccaacccgcttgtaagactcaatcagacgaccatgccaatacaagaaaattccacaatttgttctgtcccattctaccttgctccttcccagggtcaatagaatagtccttcccataatttcaccagacataacagatgtcttgttaagggtctttgccaagggacggcttttgaccaaagatccttggacagatatcttcatccgaggattcaggaacataacttccaaataggactgaagagaatagtccaacagcaccttgttacttgtttgtcctggacgtgatctgattcttcttgaacggattaatatgtctccacgaccattgtgcacaggattttcagaagacttgccagaattccactccaaagtgtaatcattaccccatctgtctaaattccatatgtaaatttgtgtccctgtacgctcctcaccaaacaggcctaacttttctccaatgaaatactcattgaaggaagaaaattccttaatagcactcaggttatattctgcagtggcttcagactggacactcaaatcaacttccatgtattgcccttcctttcgatatgtcaccacagggatctcaagattatcctttcttcattaaaagactgggaaagaaag

SEQ ID NO: 4371 - DNA, 1207 bp, Setaria italica
  Peptide Sequence Number=SeqID_70345
ccagaatccgctctgcccaccaccatcgcagcctcctcctcctcttcggccttgccagaattgcgcggcggtgttcttgctgctcccagcatttgggtgggttgggttgctaattggattagggggtggcgaggcggcatggcggcgttgggggcgaaggtggagcggctgtcgtcgatcgacgcgcagctgcggatgctggtgccggggaaggtgtcggaggacgacaagctcatcgagtacgacgcgctcctcctcgaccgcttcctcgacatcctgcaggacctccacggcgacgacctcaaggagatggttcaagaatgctatgaggtagctgctgagtatgaaacgaagcatgacttgcaaaagctcgatgaacttggcaagatgataacaagcttggatcctggggactctattgtgatggccaaagctttttcacacatgcttaacttggccaatttggctgaggaagtccagatagcgtacaggaggagaatcaaactcaagaaaggagacttcgctgatgaaaactcggcaataacagaatctgacattgaggaaacacttaagaggcttgtagttgacctcaagaagtcacctgctgaggtatttgatgccctcaagagccaaactattgacctggtttttactgcacatccaacacagtctgtgaggaggtccctgctccagaaacactcaaggatacgaaactgtttggttcaactctactctaaagatatcaccccagatgataagcaggaacttgatgaggctctgcagagagagatccaagctgcctttagaactgatgagatccgaagaacgcagcctactccccaagatgaaatgcgtgctggtatgagctatttccatgaaacaatttggaagggtgttccaaagttcttgcgccgagtcgatactgcattgaagaacattgggattaatgagcgtgttccttacaatgcacctcttattcagttctcttcttggatgggaggagatcgtgatggaaacccaagagtcacgccagaggttaccagggatgtctgcttgcttgccagaatgatggcagcaaacctatactgctcacagattgaggatcttatgtttgagttgtctatgtggcgatgcaatgatgagctgcgcatacgtgctgatgagctgcatcgctctactaagaaggatgccaagcactacatagagt

SEQ ID NO: 4372 - DNA, 2424 bp, Setaria italica
  misc_feature (2410)..(2424): n is a, c, g, or t
  Peptide Sequence Number=SeqID_70346
aaaacgtaaaactaaaagaaaccaaaaggaaacctaaaacaaaccctaagaaagacggaataccgacgacttgccagaatgatggcagcaaacctatactgctcacagattgaggatcttatgtttgagttgtctatgtggcgatgcaatgatgagctgcgcatacgtgctgatgagctgcatcgctctactaagaaggatgccaagcactacatagagttttggaagaaggttcctccaaatgagccatatcgggtgatactgagtgatgtaagggataaactttacaacacccgtgaacgatcacgtgagcttttatcaagtggacattctgatgttcctgaggaagctacactgacaagtattgagcagcttttggagcccttggagctatgctacagatcactgtgtgcttgtggtgaccgtgtgattgctgatggaagccttcttgatttcttgcgtcaagtttccacctttgggctctcccttgtgaggcttgatattaggcaagaatcagataggcacacagatgtcctggatgccatcaccacatacctggggattggatcttaccgcgagtggcccgaagagcgccgccaggaatggttattgtctgaactcaatgggaaacgtccactgtttggcccagaccttcccaagactgaagaagttgctgatgttctagacacattccatgttattgctgagcttcctgctgataattttggtgcatatatcatttccatggcaacagctccttcagatgtccttgctgttgagctcctccaacgtgagtgccatgtaaagacaccccttagagtagtcccacttttcgagaagttggccgatcttgaggctgctccggctgcattggccagactgttctcaatagattggtacagacaaaggatgaatggcaagcaagaggtcatgattgggtattcagactcaggcaaagatgctggtcgtctctcagcagcttggcagctgtacaaagctcaggaggagctcatcaaggttgctaaggacttcggtgtgaagttgacaatgttccacggacgtggtgggactgttggaaggggtggtggtcctactcaccttgccatcttgtcccagccaccagacacgatccacggatcgctccgggtcactgtccaaggtgaagtcattgagcagtcctttggtgaggaacacttgtgcttcagaacactgcagcgttttacggctgctaccctggagcatggcatgcgtccaccaaatgcaccgaagccagaatggcgtgctcttctcgatgagatggcagttgtggcaacagaggaatatcggtccattgtcttcaaagagcctcgtttcgtcgagtatttccgcctcgctacacctgaaacagagtatggcaggatgaacataggaagcaggccatccaagagaaagccaagtggaggcattgagtcacttcgtgctattccctggatctttgcttggacacaaacacggttccacctcccagtctggctaggatttggagctgcattcaagcatgtcctccagaaggacatcaggaatctccacatgctccaagagatgtacaatgagtggccgtttttcagggtcaccatcgatcttgttgagatggtgttcgccaagggtaatcctggcattgccgctctgtatgacaaactccttgtctcggaggatctacagccactgggcgagaagctgagggccaactatgaagaaacccaaaaacttctccttcaggttgctgggcacagggatcttcttgaaggtgatctctacctgaagcagcggctccgcctccgtgacgcctacatcaccaccatgaacgtctgccaggcctacaccctgaagcggatccgcgacccagactaccatgttgcgctgcgcccccacttgtccaaggagatcatggactccagcaagccggcagcggagctcgtgaagctaaaccctgccagcgagtacgccccaggactggaggacacactcatcctcaccatgaagggcatagctgccggtctgcagaacactggttaagacaaggagatgaactatttcttctgatcatttgctttaggcctttgtatttctgccgattttagctgcatctttgatcgtctccctgcaccgtgagaaaataatggcgttttccgccgaagtggtggtaaataaaagggaggcagtgatcatatccgatctgttcgtagacagttgtgttgtaacttcacaatggaacagcctaaagtgtggtatctgttttgcctgaagtatttcacaggcaggatctgaattgtgtggattgtgcgttccagcaaacgttaccaagacctaaaaatagtaggtaatactagttttaagaacctaagaaaagtaaatttaacaaacaaagaannnnnnnnnnnnnnn

SEQ ID NO: 4373 - DNA, 1285 bp, Setaria italica
  Peptide Sequence Number=SeqID_70347
ggccaattcagtgataatagttactctgtaatagttaacagtagctattttccatctatgttaagttacacatggacatggtacatatttggtatgtctagactactctagaaatcttggccaactaagagtgttggaaaaccaaaatacatctcacaatttccagaagcgtttgatgttgcttgtatttgcacaaaaaaggatttgactactggcctactgctacctcaaaagattaaacaattttaaaaggaagcctcacattgacttacaacttcttgatatgtttcgtcatgtactcttattgatataggggtactcagtacgtgaaaaccatatacccaacaaaatggagacgtgcaaaaatagcaaaagcagtgatgaataggcagtagaagggtaaatgttccagcagagctccacaccgagaaatagaatgatcctcaaaggtgtcggaaaatgtgttttccacaacagaaaaggcaatgaatagaagtaccaggaatagaattggtagtgtaatgatcgggcacacacgatgccaatgaagttgccgacaaacataacagttacaatatgttctttgctgagaatggatggtctgggctggctggaaacaagctgttgaattgatttggtgtttttaaatctggaatgcaagaaaccaaataggcctccttcatgctttaaccacttgtagtgtgcaaataccagaagggtagtgaggtgaagaatcaacagcgcaatagcaagctctttggatacaaacaacttctctgggacgaatttaaagttcacagaccagaaatggatgaagacacggccaagattgaatgctcttgatatgtactcaactggatgcgacagcaagaatggcatacccaacaaaacctgtactacagcagctcctaacaaggcaaagaagactcctttgatgctcatggccttcaccatcagtagaagcagagaaggagcaaaaagaagaacattcatcttaactgagacagctccactgaaaactattagaccaaggtaccacttgtgataaataatcaaagccatagcagcatggagcaatgtcatggcaaagcagtcgttgaaaaggcggagcacaaagatagagtgaaccctcttggacaaacaaagcaaacctaaagcccaccatggaagcacttcagccttgacgtaaagcagaagaacgaggctcaggttgacaatgtacaagacgccgaacaaaatctgagcagggaagacttggccaccggtaaggaacttaatggcagag

SEQ ID NO: 4374 - DNA, 1522 bp, Setaria italica
  Peptide Sequence Number=SeqID_70348
gtgcaaatgtactcacacaatcggcacaaatgcccccaaaccacaaccactgctctgatggggacattagcatacccaaaattgatgcagagccagtcttgccaaactcatggttagccaatacaggctcacccatatgtgccgtcctgttggcaaatgatacagcgcttctctaatctctactggacgttcactgctgctgataattgatttcgttgcttggcttgaggagtaacacataatcatcaggataggctaaacttctctcatttcgttcttgagaggtcaggaaatacgtgtgcatctgctgaagggtcaccgatgctgaccaattttttttgagagctggttcaagcattgccccttgagcccaccagtcttttgttttcgtccatgtaccatctcttcaatctctcttgagcaagcgccacctgtttttcccagtcggtctttaatgttatgaacagaagcacaatagtttggactagtgttcccagcaacatgccaatccaaatgccctttacatgatatcccaccacatagcctaggactgctccaagaggaatgccaatcaagtagtacgatgtaatgttaacataggcaactacactttgccagccagcaccaacagcgacacctgatagcactggttggacactgtttaacaatatggagaaggctagcagaggcgagaggtcagccactgcgtcggccactgctcgactctcagtgaatatgtaggcaaggcttccacggaagaaaaggaagagcacaaatagcacaaatccaatcaaggaagaagtgatgacgacattgtagatcgcgaacttggcccttgttgcactcccagctccaagctcatttgccacccgcacccctgttgcagccaggaagccgagagaaatcatcatctcccaaccgttgatgttgaggcaacatgaaagggcatcaagtgcaatttctgcattcttcatataccctgtgaggagcaccaatatggtgttgtaccacaattccaaacagagcatgacaccagaagacagcgagagcttgatgatggaaccgaggtcagtgagagcagcagacgagaacccggtccacgtgagagggcaaccaccgcagaagacaaaggcaagctgcccaaacacgggtatccacatggcgatgaccatggagcccatgaccccagcaaggccgagcttgaacttgacagtcatgagccacgacagggcgaggtggaggccgaggttgagcatggcgaggtaggtgatgatcatgttcttgctctgcgcctggaggtacatctggagggtgaaggaccagacgtaggagagcatgacggggatgtaccagagcgagatgacgccagccaccgcagagatcttggggtcctggcccagggcgatgagcagcggctcggtgaagaggtagacagggagcagggcgatggcacaggcgaagaggatgatccaggagcgctgcaggtagatgcccagcatgtggtactgcttggcgccgtagg

SEQ ID NO: 4375 - DNA, 381 bp, Setaria italica
  Peptide Sequence Number=SeqID_70349
attaacataagtcgtgaaattcaagcagacattaagattcacaatcagaatatacttccaagttcgatagatctgacaaacatagcagcatccatatatagtaccgaactctgcaaacggttgaagggttttctttcttcaagtcccccatcaagaccactacaacatgttgctgaactgataattgctactgctgattttgagagagatcttgactcctggcaagtgaggcctgttcatgggggtgttgtttcaagagagttatttcatgactatatcatggtgtggattgaagatactcggttgcacttacttgataattgcaaggctgagaagacatcatgccctgcagtgtcaacaatctcaccatttgtcgaacaa

SEQ ID NO: 4376 - DNA, 392 bp, Setaria italica
  Peptide Sequence Number=SeqID_70350
tccgggagtacatccgataattctcagcatactttgcatggcgcacaacaaaccctcttcctgtagctctatacttagctccaccatgaagtattgtcctaccatagtagtgagtctttgttccaagatgaaaagtgaagaacacaggagctaactgaagttgcataattacaaactctgccagtgctctaccaaatcctttctccaggccaacctccatcatcattgggaggacgagtaacatcccaagttggaatacagattgagtggcaagtgcattttcaaacggtttgatgttttgaatatttggatcttggagtattgacctttctaagccactcaaaacaaggtataacctcccatataaaaatacatacactgtgagaacagcc

SEQ ID NO: 4377 - DNA, 850 bp, Setaria italica
  misc_feature (810)..(850): n is a, c, g, or t
  Peptide Sequence Number=SeqID_70351
agcccaacgatcatgctatggatcacctggtatcatttgagttgaccgtggaagacgtggcgcgctgcctagagaagaaaactgctatttctggggattctgcgacagcttcttttcatcttgcacccaccagcagtggtgaccacaagagggagtctaacgatacaagggcggggctatacgttgatgagacataccatgacctgcctgagaaagcaaggcggtccctgtcccttcgcctggccaaggagttcaacttcaacaacgttgatgctgccaatgtggagccaagcgtggggtctgactggtgggcgaacgagaaggttgccgggatcacttcggagccggagaaaggatggtccttccacccggtggctgcgccgggggtcagctagcctttgcacactgaccatgatctctcaggatgatgaaggaacgagcttccgcttcttttgctgctgcttcggtgcgtgatgttcgcagatattgctgtggggtatgctaaacttgcagttagtgataatccaaagttagatagtgattcgaagtgaagctaattaataccatggtgagatagtaaaggattctggagtctctggttattatgtggaaccgcaaaacttgcgtcctgtctgtgtctgtatcccgtgtactgacttggtgtcctgctgatactgtttgtgtctgtacataataagctgctgtagtcgaaaagggtacaactccttggtttggtcaagtgttgcgttggtggcggatgctgtatgtatgtaatcgaccaatttaccctccatgctgcgtactaaaccnnnnnnnnnnnnnnnnnnnnnnnnnnnnnnnnnnnnnnnnn

SEQ ID NO: 4378 - DNA, 428 bp, Setaria italica
  Peptide Sequence Number=SeqID_70352
cacagaactcgaaagcgcggcgcctcccgcctcgccgctcgctcccgccgccgcctgcctcaccggtcccatggccggcgcgccgtcgaggtgcctcttcgtcactggcccgccgggcgtggggaagacgacgttggtcatgcgggtgttcgaagccctcagggcctccctcccgaacctcaccatccgcggcttctatacccgggaggtgagggagagtggggaaagggtagggttcgaggttgtcacgctcgatggccgaagtggaccgctcgcctcatccaaggtttccagcccagagtctgttcgatggcctactgttgggaaatacaaagtagatgtagcatctttggaatcgctagcattacctgagctgcaggtcaaggaagacacagatctcttcatcattgatgaagtgggtaagatgg

SEQ ID NO: 4379 - DNA, 224 bp, Setaria italica
  Peptide Sequence Number=SeqID_70353
cagcggcaggcgcaatggttgccccccacgcctgaccatgcattccaggctgctcaagaggctcgcgaagaggatcatgtgacgacgccttgccgtcgtctgatcatcgcgtgcctgcagtgaaattaatgtggaggatggatggcttcatttcgtcgtgatcagcgcttctcaagttccagtcaagggtggaggatccacatggagctatggcaggttggacg

SEQ ID NO: 4380 - DNA, 1395 bp, Setaria italica
  Peptide Sequence Number=SeqID_70354
tctgatcatcgcgtgcctgcagtgaaattaatgtggaggatggatggcttcatttcgtcgtgtatggtgctcgtcgcgctggcacttcatctcgccgtggatggctgctctgctgtcaactttgaaggatcagcgcttctcaagttccagtcaagggtggaggatccacatggagctatggcaggttggagcccgcgcgatggcgatccctgcaactgggacagcgtccgctgcgttgatggcagggttgtgatgctgaacctgaaggatctctcgttaagaggcaccctgggtccggagctaggaactcttacccatctgagggctcttgtactctccaataacttatttagtggaccaatacctaaggaattgagtgctcttgcaatgttggagatactggatttaagcaacaacaacttgagtggggaagttccacaagagattgcagaaatgcaatcacttaagcatctgttgcttttcaacaacagcttccgatggcctctgatccaaaattcctatgggaactttaatcaggaaaatgattttgatatctatgattatcctgggaggggtaatatgaatcaaagagctgagaatgggttcgaatctgcttcttcatcagaggagaacaaaaaggacactagcaatctttctgctcaacttccttcacaatacgcagcaagaaatccagctgcacagtttagccagcgcagattacttcaggatagcaatcttgctgcaccttcttctgcaaatgctcctgttccagctgctgctcctgttccttccactggaaccggctcattttcagcatttagtcccaacagtgcacctgcaccagcagtaaatcccccaggtagtccaccaatggtccccagtactacaacagaagaagttccaaaaagaaggtccataaaatggctttatgttgtgcttccattggttgcactattgcttattggcatcacatgtatgcttttgctatgccgcaacaagtcagggacaacaataggtccatttaagacaggactcagtggtcagctccaaaaggcttttgtgacaggagtacccaagttgcagcgctccgagctggaaggtgcttgtgaggacttcagtaacattgtggcaagctatccacaatacaccgtctataagggaaccttatcaagtggtgttgagatagctgtagtatcaaccatgattacctctagcaaagattggtcaaaatattctgaagggcgattcagaaaaaagatagactcactctcacgaattaatcataagaactttatcaacctgcttggatactgtgaggaggaagaacctttcatgaggatgatggtgatggaatatgcgcccaatgggacactctacgaacacctcatgttgagg

SEQ ID NO: 4381 - DNA, 390 bp, Setaria italica
  Peptide Sequence Number=SeqID_70355
cgcgagctcgcctcggcgtcgcaactccgtaccacacacgccgccgcgcgggccatggacgccgttctacctcccctcctcgtcggcggcggactctccgtctccgtctctgtatccaccgccacccgagccatttcagccttccacctctcgccctccgccctccgttcaaccgctcgccatcgcggccggcaccgttcccccgtcctcgccactgcttcggagtcgccttccacgccactagccgccgctatggctgagagccactcgcgtttctccaggtgggtagtggtgatggataggccccccgcggccgcgggaggcagcggggtctcccgcgcgaagcctcgtatatgcgcatctgcgcctctttctcactccccacaaccc

SEQ ID NO: 4382 - DNA, 258 bp, Setaria italica
  Peptide Sequence Number=SeqID_70356
aaagaagtcacattcacaacgagtgaaccagaggatagaggtgagaactttgcaattagaccgagtagcagagctttgcaattagaaattttgtagcatttttttcacaattgatatactatgttgttaattagtgtttatatctttaactgtagatcatagagctttgcacctttattagagttgaacagctttgactgctttgtacctttattttttcgattatgtatattgacatattgtgaactttttaatgtt

SEQ ID NO: 4383 - DNA, 811 bp, Setaria italica
  Peptide Sequence Number=SeqID_70357
ttccttcgcccggttcttgagagagccgggggagcgggagcgggaagcccccgctcgatcgagcttcgttgccgcgggcgttttgacgatgtcatgtggcccctctgcatcatctccgagaagctcttcaagatggcgggcgacgacgacggcggcgggcaggggccgggctcgccgtccgccgacggccaggattcctctagcacgccgatcgtactacgtcgatgttccacatgtgcagcaggccttcacctgggactgcggcctcgcttgcgtgctcatggtgctcaggacgctggggatcgattgctgcgacggcattgccgatctcgagaggctctgccgcaccacaaggagcaattggaagaagacatcgaccgggtcgatgagctattcgggaaggcacttgatgctggaattagtattcaatgcagatccatcagcgcatatgaaattgcctttctactgttatcagggcactgcattgccattgcattagtggataagtcaaagctaaagtaagtgttttatttgttgtggttactaagatgatacatacctccattttattcactctttttcttgttttttttctaatttcataagtcatatacaaagttgaatttggttctttaattttttttgttgttaaatttcttatatgccacttggataaaattgaattcgaatcctagatctgccgctgctgaaaccaacatcccttcaaggccgctgagttaaattttcttaatcccttcaatgtcatttcagtggcatataggggattaaactaagcaaagatttatcattt

SEQ ID NO: 4384 - DNA, 441 bp, Setaria italica
  Peptide Sequence Number=SeqID_70358
ggtccgatattgattcgaaacttgaggctctgacagaatataataataactgaaatttggaatgcagttcgtcttggatgaatggtgtacatgatgtgcaacagctcaatgaggattcagattacatgggtgagttattttatgctcctcttggaacatttactctctcttcaaaaatgagcattttccagggttttgtgaggtcattgacatgcatttcagtgtccatagttttgattgtttcttcatctggattacaagcaccatgttccttcttgtcatcatattgcaaattcactagtatagttgtgtgaatttgtttacactttgcagggcattacgtcataatctgcgggtatgatgccgatgattgtgaatttgagataagggatcctgccagttccaggaagcgcgaaagggtgacaatgaagagcttagacg

SEQ ID NO: 4385 - DNA, 334 bp, Setaria italica
  Peptide Sequence Number=SeqID_70359
aacaagtaaccaattcttaaagaaacatttgacgtgctgtggatatccgaaactgaatttataatgtgttaatatttcaacctattaaaagaacggtaaacccttgatgaactaatggtgttgacgctttctcgtttgcagcgtttggacagtcgacttggcgtatctgttaaacaaatttgctgttagcttttctttctttactgtgactattggagcaaatccgcaatattctgctgaaaccttctatagggtacatgttcttaccaacttctagttcacattcttctgaagttaacaatagtaatgtttctaaaatggtcaatgatgatag

SEQ ID NO: 4386 - DNA, 1375 bp, Setaria italica
  Peptide Sequence Number=SeqID_70360
tcaccgtccagcccggtggcagttaagccggccgcgcccaatcgcccgttccgccaccaccgcggctccgctcccatccaggcgcgccctgctgtgctcaacctgctgctcttcctcttattccctccccacagggaggggtctgccaggttcagtcgccggccgtgctcgcctgatcctcttcctcgcccggttctgagagagccgggggagcgggagcgggaagcccccgctcgatcgagcttcgttgccgcgggcgtttgacgatgtcatgtggcccctctgcatcatctccgagaagctcttcaagatggcgggcgacgacgacggcggcgggcaggggccgggctcgccgtccgccgacggccagattcctctagcacgccgatcgtactacgtcgatgttccacatgtgcagcaggccttcacctgggactgcggcctcgcttgcgtgctcatggtgctcaggacgctggggatcgattgctgcgacggcattgccgatctcgagaggctctgccgcaccacaagcgtttggacagtcgacttggcgtatctgttaaacaaatttgctgttagcttttctttctttactgtgactattggagcaaatccgcaatattctgctgaaaccttctatagggagcaattggaagaagacatcgaccgggtcgatgagctattcgggaaggcacttgatgctggaattagtattcaaatccatcagcgcatatgaaattgcctttctactgttatcagggcactgcattgccattgcattagtggataagtcaaagctaaattcgtcttggatgaatggtgtacatgatgtgcaacagctcaatgaggattcagattacatggggcattacgtcataatctgcgggtatgatgccgatgattgtgaatttgagataagggatcctgccagttccaggaagcgcgaaagggtgacaatgaagagcttagacgaggcccgcaagtcctttggaaccgatgaggatattctcttggtctccttaaccggaaagagtgggatgaagctcacccgtaaattcctcgccggctccatgtaaatagctcaccgcgccagcctcgcgcaaccttgtgtatacgctgtacattttcccctgtagttatgattgtcgattgccagccttgtacgtaaccttactgccgataggaagagctagtcaccaagctgtagccacgaagggttcagcggcagcaaaaactgctgctcttgtgtagctgcaaatgatcaatgatgcagcagcagcagcaaacagttctgctgctcctataacaaagaaaagctatacgatcatagctgaacgtgtacagatctgcttgaatgaattgtgatcctctgcaa

SEQ ID NO: 4387 - DNA, 277 bp, Setaria italica
  Peptide Sequence Number=SeqID_70361
ttcctcgcgctgctgaggtcggtggagcgcctgtccgcggggaggcaggtgcacgcccatgtcgtcgtgagcggcttgcactcgcgcgtgtacctgcggaactcgctgatcaagatgtacctcgacgccggcgatgtggagacggccgagctgatgttcggttcaacgccggtgtcggacacggtgtctttcaacatcatgctgtctgggtatgtgaacgaagggtgcacggccaaagctctactgtttttccgtgatacggcgtccaaggggattg

SEQ ID NO: 4388 - DNA, 320 bp, Setaria italica
  Peptide Sequence Number=SeqID_70362
cccgccggagcttcaattgcagccttgtatgtcgcctctgctggccccacattgggtcgaggtcttttacggtaccctttataatgccgggaaaagtggcgctgggacctctggatgagaatgcggcaacccttggcggtagcaccccactgccggtcacgcttactgtcggcaatatcctcaccaatggcttccgccgcccggcgatgttgcttacgtcgcttcgcgccaccgcccgtgtcagccactccatctgccggccgcaccggtcatcgtggccctagctcccttgggccggcctctcagtcatggctcttgcc

SEQ ID NO: 4389 - DNA, 1525 bp, Setaria italica
  misc_feature (1493)..(1525): n is a, c, g, or t
  Peptide Sequence Number=SeqID_70363
cagagtcccagcctcctctctcagttcctttccttcctcctcttgccaagcaaagtacaggacgccacgctagcggctaggctccaccgctccacctataaacagcaagcagccggagagccagcacagtagcgagccatcagaaccggcaagcacgacaccacgctcaactcgggagctagagtcaagctgtagagagctgtgcgctgccgatcgagcatggacgcggcgatgataaggcaccggacggtggaggcgaacggcatcgcgatgcacgtggcggaggccggcgacgaggggagcccgcgggtggtggtgttcctgcacggcttcccggagctctggtactcgtggcgccaccagatggagcacctcgccgcgcggggataccgctgcgtcgcgcccgacctccgtggctacggcgccaccgacgcgccgcccgacgtcgcctcctactccgccttccacatcgtcggcgacgtcgtcgccctcctcgacgcgctcggcctccacaaggtgttcgttgttggtcacgactggggcgccatcatcgcgtggtacctgtgcctgttccgggcggaccgcgtgacggcgctggtgaacaccagcgtggccttcatgcgccacgtcttcatccgcgccggcgccggcgccgtcaagcccatcgactacttcaaccgcacctacgggcccacctactacatctgccgcttccaggagcccggggttgcagagagggagttctctcccgccaacgcccggtacctcatgaggcagatcctgtgcaaccgtttcacctccgaggcgtccggcggcgacaagccggggtcgacgaccgacgacgagccgctgcccccgtggctgacggaggcggacctggactacttcgcgtcggagttcgagcggacggggttcacgggcgccatcaactactaccgcaacatggaccggaactgggagctggcggcgccgtgggcggacgccaaggtgctggtgcccaccaggttcgtcgtcggcgacggcgacctcacgtaccactacccgggcatccaggactacatccacaagggcgggttcaaggccgacgtcccgctgctcgaggacgtcgtcgtcatccccggcgccggccacttcatccagcaggagaaggccggcgaggtcagcgagcacatccacgacttcatctccaggttctgatgcctagacaatgcatcatatatacgtgatctatatttcaaggtacatggtgtggtcgatacgtgaaatgatgtgttgtatgatgcgctgtctcctaaattaacatcgcgtgcaaatttcctacattgtataatgagaaataggacaggcccccgcgtttgtcaagtacaaagaagctctcagtgtagccactccgccctggcccggtttgaacttggcccatgtaaaatttcccgatcggactcgtgaaaaaggcaactgctgtgagcctgtagttaaaaaaaaaaaaaaaaaannnnnnnnnnnnnnnnnnnnnnnnnnnnnnnnn

SEQ ID NO: 4390 - DNA, 1297 bp, Setaria italica
  misc_feature (1231)..(1297): n is a, c, g, or t
  Peptide Sequence Number=SeqID_70364
cagtcaacagcagcaccaccccgacgggcaacggcgcagcgacgccatggcggcggtgaggcaccggcaggtggaggctaacgggatctcgatgcacgtcgcggaggccggcccggagggctcctcggcccccgcggtgctgttcgtgcacggcttcccggagctgtggtactcgtggcgccaccagatggggtacctcgccgcgcgcggctaccgctgcgtcgcgcccgacctccggggctacggaggcaccaccgcgccgccggaaccgtcctcctacaccgccttccacgttgtcggcgacctcatcgcgctcctcgacgccctccgcctccagaaggtgttcgtggtggggcacgactggggagccatcgtgtcgtggaacctgtgcgtcctgcggccggatcgggtgcgcgcgctcgtcaacctcagcgttgccttcatgcccaggcgccccggcgtcaagcccgtcgagtacttccgcgccgcatacggcgacgactactacgtctgccgattccaggaacctggagttgaagcagaattcgctgcttttgacttgaagagtttcttcaaattggcattgactgttaataccacaggctcttcttctatgaatcttcgaaaaatgcaagcatacaataaggaaatagcactcccttcttggctctctgaggaagatgtcagttaccttgctagtgtgtatgcaaaaactggatttgctggtggagtaaattactatcgctgcttagacctgaactgggaactgatggcaccatggacaggagcaaaggtgcaggtgccaactaagttcattgttggggacggtgacctggcataccatcacccgggagtgaggagctacatccacaagggcgggctcaagagggacgtgcctatgcttgaggaggtggtggttatcaagggcgctgggcacttcatccagcaggaaagagcacaggaaatcagcaagcacatctacgactacatcaagaagtttgaaaccggtgcttcgacgctaaaagtttcgaaactgtgagattgataacttgtgtacagaactcattgtctgggaacctttgtacatgtactgcttcgggaatggaccataggcatggcatgaagatgttacattttggagaaagagcgtgggagggaaggtgtttgatcatctttagcattgtgtaatatttcatctatcccttaataaatcggaagactttttaaggtnnnnnnnnnnnnnnnnnnnnnnnnnnnnnnnnnnnnnnnnnnnnnnnnnnnnnnnnnnnnnnnnnnn

SEQ ID NO: 4391 - DNA, 805 bp, Setaria italica
  Peptide Sequence Number=SeqID_70365
acttaatacaagaaagactaccgttaggcaacccagtggatgcagtatcccaagattgaacccgaccgacatgttggagaggctgagaggaaaaaggcttgtttttgttgtttattcactcaacaggaacatgtgggaatcccttgtgtgtattttgaggaattctgtcaaagacaagaggaaggtttttgaggcatctggcaggcgtgaatttaagaccgaaggctcatactccttcctgttcacggattataactgcagcgtggagttcttccgctccccattcctagtccgggaatgggagatgaaagtcagcgatggaaagaaaaaggaaactctcaggcttgacctggttgagcaatcgtcaccgaagtacaaggatgcagactttctcatcttcaatactggccattggtggacacatgagaaaactgctctagggaaggactactatcaggaaggtaatcatgtgtatagcgagcttaatgttgtggatgcctttcataaagctcttctcacctggtccaagtggattgatgccaatgttaaccccaaaaaaaaccactgtgttattcagaggctactcagcatctcattttagtggcggtcaatggaattcaggtgggagctgcgacaaggagagtgaaccaataacaaacgagcagtacctttcaacctacccaccaaagatgagcattttagaggatgtgatccacaagatgaaaactccagttgtctacctgaacataactagaatgactgactacagaaaggatgcacacccttccatttaccgcaagcagaa

SEQ ID NO: 4392 - DNA, 997 bp, Setaria italica
  Peptide Sequence Number=SeqID_70366
ttcgaccataacctgtaaaggattctgtacaatagcatggaacctgaaagctgatgtacaagatggttacctaatattcataacaggagaccctgttaccttgggctgttgggaatccaacatggctgttcagttggctcctgttgaaaacgataatatatggacagctgaaataaaggtgccatatggggtgcacttcaaatataattattttgttcgagaagaaaaaggttcctgttctgatattatatggaggccaggtccagattactccttatcaataccttcagttggccggaaaaagcaggtcattgttgtgaaagatctatggatgaaaaccagtgtggcaggtcttcctgctccttcgtggggatcatggctgatggaagctggttctcttgaaggtgaatttttcgagggttggaaatcaaagcattgtggaagctcactctgctagggatacaacagatcaagatttatctgtaggtgagcatattatattgaaaatggggaatggcacacctttacattcaaagctgttgtcagagagtctatctaccaaaatgcacaatcgtataaccgacaaaccaaatgccaataatataagccaacatggaaggtatcaagttgtagaggagccatggattcttgaatctattgcggcttcaaagaaaccagttgcaagagtcaaagataagaaaggcaaaaagaagttttccaataataagcatgattttagcaaagctagtgaaaacgtgcctcaagaggatcagcctgttgaagagccatggttatttgaatctatggtggaagcaaatgaaactatagttcatgctgatggaaaattgaagccaaggatattatcagaaagctaaggaaaatagaaaagcctccagcacctttggatgagaataagccccctattgtgaaccttcatcaagagttatacttattaactcctctgtctgcactatgcagagaattgcagtattagaag

SEQ ID NO: 4393 - DNA, 516 bp, Setaria italica
  Peptide Sequence Number=SeqID_70367
atggcaatcgttgtgtgttgttggtatccagtaggccagccactatcaacaattgttctgtgctattactacgagcaattcacgtgaagggagactacagacgttggcgtccgaaacagaatcaggaactgaatatcagcgtgcattgctgaagcctgaaggcctgagacctcctgacgttcttggataatggtcgcacactactgaaaaccagcgtgcattactgaaaatcaccgagtgggttgcatatattttagttcaaatgtagtactccctccatcctaaaataaatgtacttctagagtttgggtgaagagatcattgttagtgaaaaaattacatatatacccgtataaagatgtaatcattacattttgggaggagagaaagtagaaaaagacaactagaattaggtggttccatttccatatgtgcatttattttaggacaaattttgaactttagagatgcacttgttatgggatggagggagtatatcctaatatgcatcgattc

SEQ ID NO: 4394 - DNA, 342 bp, Setaria italica
  Peptide Sequence Number=SeqID_70368
cccgaccttcttcgagatgtcggccgcgcagcagcttcccgccagcctccgcgccgcgctcacctactcgctcggggtttttgcactaagaaggccattgcttcacaaagttttagattatgaagacgaattctttgctttgttaatgggcgtccttgagtctcacagtctacggacaacagatggttccttttcagagtcattatatggtctcaggaggagacctgttaaggtttcagtgaagaagagtcctggtacagaatccagtgacaaagtctatgattctgcactaatgaagcgtcagaaaattctctcggtcgtttttttggttgttttgccata

SEQ ID NO: 4395 - DNA, 431 bp, Setaria italica
  Peptide Sequence Number=SeqID_70369
tcaccacatttcacatacatgaataccagtttggatccaagaacttcatctattcctctctccaaagattcaagctcccagagtaatccagctttcaccgagtaaccatgcacgacttttccaacaagctcataacccaattccgcacaagcaggcaaaacaccgaccattgtcactgaactgatctccacaccttcagaccacattttgctgaaaagatcaacagcccttccatgccatccatttgaaaagcaaccactaatcattgaattccaagagatggcatcccgggaatgcatgctgttgaatacctgcattgcatcctccatccggccacaccttgtgtacacggctatcagagcattagtaactgcacattcttccccaagacccctcttctcctccccaccaccccccatccgcaccgccgc

SEQ ID NO: 4396 - DNA, 496 bp, Setaria italica
  Peptide Sequence Number=SeqID_70370
aaactgcacactgtgccccaaaacccaactttatgagatacccatgagccatcaagccatctctgacacgaaacaaactagttatacacttcagaaggcatgaaatggtgtgttcatccggggtaatgccaagatcatgcatttgctcaaaaagtaagaggctttcttgaaattcaccagcctttgcataagaccaacccaattagcagattccatacatgcacgttacttttgatgacattacatcaaataccgttcttgcagaggccatgtcaccacatttcacatacatgaataccagtttggatccaagaacttcatctattcctctctccaaagattcaagctcccagagtaatccagctttcaccgagtaaccatgcacgacttttccaacaagctcataacccaattccgcacaagcaggcaaaacaccgaccattgtcaactagaaactagaatactaccaacaaccttaacaaagaaaccaaacaaa

SEQ ID NO: 4397 - DNA, 653 bp, Setaria italica
  Peptide Sequence Number=SeqID_70371
aaccgtccgggttgacgatgagggcggccacggagtcgacgcagcgggacgtgaggccgaggtcctcgcagagcggggcgtagtggcgcgtggagtggagaacgcccagcgcgtccttccagcggcggaggaggcaggaggcgaggaacgcgtcgagcttggcggcgaggttgccccggtcggcggcctccgacatgccgaggtgcgcggcggcgcaccgcagcggcacgaggttccgcgcgctcaccgtgatggtgatgccgtagcagaacttggcgcaggcctcgaacgcctccgcgccgcccgggaagcccgggagctcgacgacgtcgccgccgacactggcgccggagtcggcgcagagcgcttgcaggagcatgcacttcgagagcagagggaacttgtggagatgatatatgcagccatccaccaggatctgcaggtcggtggccacctccgtggagacagaccttacggcctcggaggtgaagaaggtgtccggccgggtgccaagtttcataaatttcatcctggccgagctcccgtagccccgctttgctaaaacgggcgtctgaaactttcactggggaagagggggtttaatttggtttacgtaactactttttggtccgtcctttaacttttcgtttgtt

SEQ ID NO: 4398 - DNA, 258 bp, Setaria italica
  Peptide Sequence Number=SeqID_70372
gccccaagtgcttgctggatttacaggagtgataagtgaccatagttgcagacaggctatcaataagaaatattgattcatgaagcgcctgaattgttcccacaggtttttcggcaagaagttccataaggtgtactttgtattagaaatccgattatcacagtagtcattctggtaagactcgtcatttatgtagacaaaacgcttcattccccaaaaaaccatgcacgctatggtaatctcttcaggttgattccg

SEQ ID NO: 4399 - DNA, 295 bp, Setaria italica
  Peptide Sequence Number=SeqID_70373
ggtggtggttctggtgctgcgggccggaagcggaggcgtgcggtggcgagtcgtccggcgggaaccgcagcttctcgcggcggctgtgctgcgggacgtggtagagctgctgcgcggccacgtgctgtgcatggtggtgaagcgggaagtcgccgtggccgcggccgtggcagtggggctcggtgccgctccccgccccggcgccgtaccctcccgcggcggacgacatggtgcgcgcgcgagggcgatcaagcacacgcgcgagggcgatcctgcgcgcccgcctcggggctcg

SEQ ID NO: 4400 - DNA, 554 bp, Setaria italica
  Peptide Sequence Number=SeqID_70374
atttagtcagtacactattgcacgtaagaatttgtacaaaactttagcctgacaagactgtacatgtacatgattaagcatttgaaaacaaacacacacacggtctctgcagtcaggactggcaccgcccaaaaggccaaaacatggcctgcctaacctgatcgcccacctaagattcttgagtcagtcactaataaaggtcccaccagaatgctaaacaatacagacagccccatcttctccacgtgatgcactttcctaaagcacccgcaaaagcaacaagtttgaaatggctgcttgttccctgatgggcaattggagaagctacaccagatgcgcaccaagtatacagatcaagcaggaaagacgattacaagatccaaaagattgaaatggcaatgcaagcatttgaatttagaatgattggaacctaaagggaaagccgcatctgtaaagatgcctaacttgtcggtggcgaacacctattgatgaatcctcatttggaagtatcctgtaggcactcccccttaaaccatataacaagtttccaggcc

SEQ ID NO: 4401 - DNA, 1216 bp, Setaria italica
  Peptide Sequence Number=SeqID_70375
ttttttttttttttagtaacataatagaagaaaatttagataataaaaaattttcaaaatcacagaacataatagaagaaaaattagatgatacagtgatttggtaattcaacttataaggatgttcaattgatcatatgaggtgtgctcctaatcaaagtagggcacattctgaaggtacatatctataccagttttattacagtggagcatatattatatcccacattatccacaattctgcaccaattgaagggcagagaagttcattgtcccaagctgcgttttgcagtcacctttcacgtttcctcttcatagggagcaacgtcttcggtttttctgatcgcttgttcaccgattcttcatcttcaacaaggtggaaaccagggtgtgatgacaatttctccacttcaacttttgctacatccttccttactcctatgtcagtaatgtatctaccagcacagtacatcccagctgtgacagtggccattccgagtggaccggcagctagaagcttaaatggagtggacagaagagctgccaatggcacaccaatggcagaagaagcttgcccactagtcccaatgccaggttcctcaacaggtagaaggccagtcttgcagtagagtgcaaagtcctcacagttcttctcaaacatgtcatagtttccaaacccattttgaagcaagtacattgctcgatggacaacaacctctggtgggtctgattccgcaatggtgcaggttcccccacgaagttttgcgaggaaaaccgcagatggcactccatactcaaagcagtagagggagccattgcggaggaaacagtctaggcaagtgaggacaacaccactattcggcagctgaaatccacaatcggggaatgttgggcactctgatggaacctcggagatgaggctggaggcagagtctgatgaatctgaactttcaatttctttttttcgtgtaaagtggaccaccttgcttcctccaacataaattccgtggtgggagtaggcgtagacggcccgccaggtgtagatgtggtcgccgggcctgatctccgaccgctcgacccggttcgacagcagccccatccccgccgcctcccagcgtgtcgcggaggcactccgctctcacccgcgccgcctctacggccccctagtctactacgccgtccatggccgcgagcaagcggggaggggcggatggag

SEQ ID NO: 4402 - DNA, 426 bp, Setaria italica
  Peptide Sequence Number=SeqID_70376
agtaggaacatagcaaagacaacgactgtattgaatagcaccccattcttatagctacacaatgtgaagaaacaatcgcaattttactgaacacacgataccataatgttaatggtggggcctaaacatttgcagctctggttctcactcggcaagacgatggcggaaaaggcggcatggagggcggcacggggaacagacctgaagctagtgaccgtatgccctgcactcgtaacagggccaggattccggaggcggaaccctactccatccattgcctacctcaaaggagcgcacgccatgctggctgaaggcctgctggccaccgcgaacgtggagagggtagcggaggcgcacgtccgcgtgtacgaggagatgaacggcacggccggcgggcggtacatctgctacgaccacgtggtgcgg

SEQ ID NO: 4403 - DNA, 2017 bp, Setaria italica
  Peptide Sequence Number=SeqID_70377
tctcaggaagcagcagcagtgtggtagaggttgatgcctccaaacttgattgcaaatctagagttgcagtcttgctcaggaatgcctgttgaagttcctgattcttcacacttaaaggttcttatagtagatgattgccagcacatggacaaggagggatggtactccatctacaatagcctagaagggattcctgacagcacaatctttgtcatgataacatctgatgttgataaactaccaagcaattccatcgggtggtgccagagctacaggttttgcaagatagatgatgcagcgattgcccgtcgattgatcaagatttgcacaaaagaagacatggaattcgaagcagaggccctggagcttcttgctcgcaaggccaacggttccattcgagatgcaattcaaatgcttgaccaattaactctacttggaaagagaatcagcaaatcagtgacacatgagctgataggtgatgtctcagatgaggaattgcttgaccttctcaatctggctatgtcatcggatgctgctactattgtgaggagggctagggagcttctgagctcaaaggtcgaccccctgcagctattagcccagctggcaaatcttatcatggatgttttagcttcaaagcacctgtcagattcttcagaagtcagaagagttactggcaaacatacatctgctgatgtggatgtacacaaacttaggaatgcactggaaatactctctgaaactgaaaagcaattaaagaccacaaaaaaccagtctacatggcttactgctgcactgttacagtttaatatgagggaaccgtactgtctagatgacactgcagtttcaagcatgtttactgagagtcagacagatgacgggaccgcaatactgaaagatgaaagcctagatacaagttcccatctttgttctcagaacaaagttagttctctagacatgaatttgggagatccagatgtattggagacgatatggataaaagcccttgagaactgctcatcccagccacttcaaaatctattgcggaaggatgggaagttgtcatctctatacacaagccaaggtgtagcagttgctgagctacagttctgccatcctgaggatgtaccaacatcagagaccttctggaagccactttgcgcatctctacagaatttgctaaggtgcaatgttgacatccggatcaacctttcgcccatctccagcaacagaatgggatccaaggactcttctgtgagcctggtcatgcaatccagagaagaccgcgagacacaggacccagtcgctacaaactgcaagactgtcgcttcatcccgaagagactgcccttcgccactcgcggggcaagcaaaggagaagccgtcacacattctggggtgcctccatggcactgcagatggcgacgcagtggataccgagtcgaggatcttgagctaccagaagatctctgtcgtccctgcagtgtccacaccaggaaacgctcccaagaaagctggaggagacaccttaaaggttgatgaaggtagggttcgtcgaggctgcttctcgaaccttctaccctgcggtgcttgcgctccccgtcggaagtcccagacgcgtgagaaacgccgagcctcgctgttcagctgctgtttctgcaagatcagaccggagagcaaaacgaaggctgaagcagggtagtagtatgggccagtcaggactgcagcctctgcagttcaatctggagagaggtggtaaaagcaaggctggtaattccgaattctgattgccaattggctgaacctgacatcaaggttgtctattctctttagcccctgctgctatgttttctggtttggctgtggaggtcgaatcagttcagagttagatgggagcatgtgaatctgttaactgcagaatcgccgatgaatgtgttcatctgtttgactgtagattgcctgtgatgagacattggtcagacacagtacatgtgcttcgctaacatagcaattatttt

SEQ ID NO: 4404 - DNA, 237 bp, Setaria italica
  Peptide Sequence Number=SeqID_70378
atcttcagctacaaagtcatcattcagtttgtcaaggtcagaggatttgttggtgtaggagaagccaaccccgacaggagactccaagaacagcaggttagcctctttgttccatgcgtattcattgaacatgaggcctgctccttgtctgacaactctgagaggccccagctcagatgcagctccatagccaatcgacgagcaaccaggtcctccgttgagccagaggaggagcgg

SEQ ID NO: 4405 - DNA, 1119 bp, Setaria italica
  Peptide Sequence Number=SeqID_70379
agacgtacaaccaactgtagagccaaactctgagccctgctttgatgagcttcgaatatattggtaggaccgaaaataccgagaaattgtaggaattcaggatagagtcactgcagacatgccatttccctggaagcaacccactgatatttgcatggaaagctttctgcacttcctgcttgttgaagtagtcctcagcataggatgagtagcatggatcatagccagagaacatgtgtatccttctcctgaagtgctcctgatcattctcgaagaatgcttgagcagcagaagatggtgaagtctgatttagaaggcacttgggggcatagatgttgtatatgtcgatctctcggtactgactatagacgatgtccatggcggcactgcaatcatcagaccaattggagttcttgaagttgcagtactttttgatgcggtcgtacacttcatccgatacaactgcatggctccaggcatactcagctagccctttcgagtcatagtaatcgttagtgatagggttgccagcaatgaaccccttgaggttgatatatgctttgcccttcttgtccatgttcctctcataaacaagttcagcaagttgtggcacataatgacctgcatagctctctcctgcgatgtagaaccctctgtccttgtactccggaaacctctctagccagttcaataggaagctataagcatcttcagcaaagtcatcattcagtttgtcaaggtcagaggatttgttggtgtaggagaagccaaccccgacaggagactccaagaacagcaggttagcctctggcaatcacaaaaaaagacttagcatcgcgcttcaaacaaatgtaactgactttgagcatgaaaagagagcacctttgttccatgcgtattcattgaacatgaggcctgctccttgtctgacaactctgagaggccccagctcagatgcagctccatagccaatcgacgagcaaccaggtcctccgttgagccagaggaggagcggcttctcctccggcgccgtctgcgcctcgaagaaccagtagaagagcgccctcccgtgccgctcgtttctaccgttgtacgttagtccggtcgtaacttgtcgta

SEQ ID NO: 4406 - DNA, 1764 bp, Setaria italica
  Peptide Sequence Number=SeqID_70380
aaagaaacttaaagaacctaactaaaaagaatagacgtattgtcccttttgtattgttactggcgagttgctctacgtgcaaatgcaggccaccaagcccatggaaagccagtccaagatcgcctccaagctgctgcccatatccaatgaaaattcagtacttgatctggttatcattggctgtggtcctgccggtctttctctagcttcagagtcagccaagaaaggcctcactgttggtcttattggccctgaccttccgttcacgaataactatggtgtgtgggaggatgaattcaaagatcttggtctagagagctgtattgagcatgtctggaaggataccattgtctatctagacaataatgaaccaatactgattggccgtccatatggcagggtgcaccgtgacctgctgcatgaggagttgctgagaagatgctatgaagctggcgttacatacctcaactcgaaagtggacaagatcatcgaatctccagatggtcatagagtagtctgttgtgaaagggccgtgagatactctgtaggcttgcgattgttgcttcgggggcagcatctggtcggcttttagaatacgaggttggaggtcccgtgtctgtgtgcagactgcatattgcagactgcatatggagtagaagttgaggtggaaaacaatccatatgatcccagcttaatggttttcatggactacagagattgtttcaaagagaaattctcgcattctgaacaagaaaatccaactttcctgtatgctatgcctatgtcatccacacgagttttctttgaggaaacatgcttagcctctaaagatgcgatgccctttgatgtacttaagaaaaggttgatgtatcggttggatgcaatgggagttcggatcctgaaagttcatgaggaggaatggtcctacattcctgttggaggttccttaccaaatacagatcagaaaaatcttgcatttggtgctgcagcaagtatggtgcatcctgcaactggctactcagtggtcagatctttgtctgaggctccaagatatgcctctgtaatatcagatatcttaaggaaccgagttcctgcgcaatatttgccaggaagttctcaaaattacagtccatcaatgcttgcttggagaacactatggcctcaagaaaggaaacggcaacgctcatttttccttttcggattggcattgatcatccaactgaataatgaaggcatacaaacattcttcgaagcctttttcagggtgccgaaatggatgtggcgagggttcttgggctcaaccctttcatcggtagatctaatactattttcattctacatgtttgcgatagctccgaatcaattgcgaatgaacctcgtcagacatctactctctgatccgaccggctcaacaatgatcaagacctacctgaccttgtaaaaccaagtcaccagtctgcaagaactctagaaactgtacagttttgtagttgtatataacttagaggggatctgaggggttacttttctttttgccgtttgacggcgggtctcggtgtcactggcatgatgtagaatacgcttgaaactgtttatgtttgctatggtgatgggatagggaagcacatggtgttgtcatgctggaagaacacaagtagaaagatcaactgatggtcatggttcctggattggccattttttggccttctgtctcttgtatttgtttccatccctgtctttgctatttcaaggctttttacatga

SEQ ID NO: 4407 - DNA, 253 bp, Setaria italica
  misc_feature (1)..(90): n is a, c, g, or t
  Peptide Sequence Number=SeqID_70381
nnnnnnnnnnnnnnnnnnnnnnnnnnnnnnnnnnnnnnnnnnnnnnnnnnnnnnnnnnnnnnnnnnnnnnnnnnnnnnnnnnnnnnnnnntttttttgacaccgtaacaagaaggaattttatttgattccagctgtatctgctgacgccagaattacatgaatgaagctacagaactactgcaaggagaaacacaagagaaaggcccctctgctagatttgttcggagctacatgtacgtctagaaaacgaa

SEQ ID NO: 4408 - DNA, 1381 bp, Setaria italica
  Peptide Sequence Number=SeqID_70382
cagcagttctgcttctgccttccccacctcgtagtctccgccgaccgggaccgcgcgcgcgccgacccccggtccgatctcatctccggcgagccgcaagaagggcgcgcgcgaggcgagggatccaatggcggcgccggaggggcagtgggtgctcatggcgacggggcggtccccgaccaacatcgcggtgatcaaatactgggggaagcgcgacgaggcgctcatcctccccgtcaacgacagcatcagcgtcacactcgaccccgaccacctctccgccaccaccaccgtcgccgtcagcccctcattcccctccgaccgcatgtggctcaacggcaaggagatctcgctgtcaggaggaaggtttcagagctgcctgagagagatcagaaagcgtgcttgtgagttcgaggatgagaagaaggggatcaagatcaagaaagaggactgggagaagttgcatgtccacatagcttcctacaataacttccccactgctgctggtttggcctcttcggctgctggctttgcttgtctcgttttcacccttggaaagctaatgaatgtgaaagaagattatggagaactttcttcaatagcaaggcagggatctgggagtgcatgccgtagtttatatggtggatttgtgaaatggtgtatgggaaagaaagatgatggaagtgacagttttgccgtgcagcttgctgatgaaacacattggaacgatcttgtaattattattgcagtggtcagttcaaagcaaaaggaaaccagtagcaccagtgggatgcgagatactgttgaaacaagtcccctcttgcagtacagggcacagactgtagtgccaagtcgggtgttgaaaatggaagaggctattaagaatcaagactttgaatcgtttgccaaagtaacttgtgcagatagcaaccagtttcatgccgtatgcttagacacgagtcctcccatcttctatatgaatgatacgtctcaccggataattagccttgtggagaagtggaaccattcagaaggaaccccacaggttgcctacaccttcgatgctggtcctaacgctgtcctaattgcacggaaccgtaaaactgcagcacttctccttcagaagctcatgtactatttccctccgcaagataaggatttgagcagctatttggttggtgataaatcaattctaggcgacgctggattgcactccatcgaagacgtcgacgctcttcctgcacctccagagatgaagataccagatcagaaattcaagggcgacgttagctacttcatctgcagcaggcttggagctggcccaaaggttgttgccgacgaaaaccaagcactgatcgattcagtcaccggacttccgaaa

SEQ ID NO: 4409 - DNA, 1085 bp, Setaria italica
  Peptide Sequence Number=SeqID_70383
aaaactaaaggtaagaaaggttacctaggacaagaagaaggaaagccaaggacccccttccacagaacatacttgtgggtctcgacttttctcttgttgatccacgagacttcactactgaagatgtttggtacatgaagttgtcagatgatcaacatccctataacagttctgaagacggtatcacaagaaagaccaaaaatggatactggaagtttatggattcttccagaataccaacaagtacagctataattggtgtcaaaataactctggagttttatgaaggtcatgcgctatgtggtacgaaaactgggtgggtgatgcatgaatatcaagtagagcataatgaggaagctaatctaccacaggattacaagtctttgtgtaaagtattcctgaagggtgagaaaaatattagtgatgagattcaacaaaattctgacaatgcagattctcctaaggatagcttcaaagcttaccttcaatatctcgccaaaatagaagagccaaaggaacctgtagatgcagacaagcaggaaatctcttctagcaaaggacagaatgagcaaaatactcagcatattgcagatggtattgatattgataatgttcttgctaatgaggactacatagagttgaatgacctactctatgatgatgatgctgttcgcaatgatgctcttactcttgaggacctggatgaccttctaatcccacaagcctctgcaccaacttcaacaaactcaagcaagcagtcttctgctgttcatgatgctcttgaggatcttgaggatcttctaaccccagaagcctcagcatcaacctcagctaactcaagcaagaggtctatgttttccgaagagtgctttgattgtgatgcattcctgagggagatttttgaaagacagtaactcaaatgaaggagaaataaagacaataagtttagcatagctgcacctacaaattggttaatgtagtcatcagtccttcagaacaagggcttgttaagatccatgatgacaatgccatagtaggctggaacttctcaacacgagccattccaggaggtgacagagatgaac

SEQ ID NO: 4410 - DNA, 342 bp, Setaria italica
  Peptide Sequence Number=SeqID_70384
cagaggagtaggtgtgcaccgcttccacgcgcgaagtatcgtcgacccagaactgtaccagctgaaagtgcgaggacgcggcaggatcgaaaaccaaataggtgaaagtacagctagtttcagtgtcggagtcagagtcctcactctcgtcattgtaatcaggtccccagccggagctgggcacggccacccattgctcggtggcggggttgcagacgatgtagcccagtgaatcataggaatctccagcccttctgtggccaaagaggaggaggccgttgcaggagcgcaggagaccgaattcctcgatccccggcaccttcccgaggaaggagaaagacg

SEQ ID NO: 4411 - DNA, 1400 bp, Setaria italica
  Peptide Sequence Number=SeqID_70385
ttttccacgctgaaatatctatttccatggaaattattctgccaaaaaataacattttaacattcaagctcaaaacatcaaaatgccagcaccagcagcagcacagctcaaggaaaccggaacttttgcttggtattcatagctaacaactgaatgtacactggactcaccaatgcaacgccaaaaaagatcatcctgtgtccactcctcaagaacctagtagccttttgatttctgctttctgctcggaggtcagcctcgaggggaatttgatgctgaacttgatcctaagatttcccttcttggaaggatccttcggaatcggcatgccttctcggggaacaacctcctcatagccagggtagatgacgttgtttatcggtactgttaggttccgaccatctaatgttgttacattaacagtacattccgtcaaggcttcagccaaggaaattttctgagtcatgatcagatcattcccgtctcgtgtgaaaacatcatgtggtttctcatcgattatgaatacaatatctgcaggaattatgtgtggagcctcattacccttttcaggaaatgttatttttgtccctttcttccatccaggttttatgtcgattgttaggatctcctcaacaaccatagttctcccgccagcatctaaaatctcccgtgagatcttcatcttcttggtggtacctttgtacaaatcggcaaggttgcatggcaatcggttctcaattggagaagctttctgaggccgctgtggaacatgcattgatgcctcaccagggaactgagggtaggacccaaatatgtcatcgccgaacatcccaaaccttgaacccctcatgcccctctcagcacctccacccatgcctcccatgccacccatgcttgagaatgggcttgagaacccaaagaattcggcaaaaatatcatccgcgctgcgagggttgaactggaatgtcgatgcattcccaccatagtaggatgacccactgggaccgcctgctccaggaggtggaacctgacccttgagcccttcttctccgtactggtcatagacagcgcgcttttgtgaatcgcttagcacctcgtaggcctctgagatctgcttgaacttggcctcggcttccttcttgttgctggggttcttgtccgggtgccacttcatggcgagcttcctgtacgccttcttgagctcgtcatcggaggcgccgcgctccacctgcagcaccttgtagtagtccacccccatcctgccgccgcagcaaccgccgtcccggtgtggcggtggtgacggccgtcggcgtgtggacgcctcgtgcagcggtggtggcgggttagggcggcgaggtgagatgggttgcgcctgcgcgtgaggggtcggggaattttcg

SEQ ID NO: 4412 - DNA, 256 bp, Setaria italica
  Peptide Sequence Number=SeqID_70386
acgagagtagcggcgccgccggcgacggcgaccatggcggcggcggaggcggggattgggaagctcggggcggtaggtgagaaggttgcgcttcacctgccccctatcacgaaggaggatccccttcaccaagagaagaagagagtaatggaaagcaggaatctttcctgtgtatttcaagttccgatttcatgttctgctgctgacaccctcaaattactggatcagatgattcaagctgctagggtatccatag

SEQ ID NO: 4413 - DNA, 265 bp, Setaria italica
  Peptide Sequence Number=SeqID_70387
gagttcccaacaaacgagttccgtaacgtcccgtcgactttccacacttaaggatcaaaccatgttttgtatctccagaggagcatcagtaacaatgtactcgactacaggcagcccaagcgacgccctcgcggcatctgcaacctgcaagtggcgaagccggaggtcctcctcgattccagaatccaacaccaagcctaccttgttttggtgaacgggttggagagcccaagatccttccgcgaacctatcaagggcgtatccc

SEQ ID NO: 4414 - DNA, 480 bp, Setaria italica
  Peptide Sequence Number=SeqID_70388
cccgtttgatcataagcatcaattccttccgtatccaacaacacaagactgtattcagttccatcaagactagttctcttcaaaggcgcactccacatccaaagtcccttagtgcaaggccgatgtgttgaagcaacttgaaaaccactgcttcgcccaagaagctggttgagcacgaagctcttgccctgccgcgcgcggccgcagacggagaccacgccaacggggcccttgacgagcttcagcgccgccacggcctcagggtccatcacgaacttgcccttctcgtcgcagtacaccagccgcagcggccgcgcgggtcccgccgccgcgcctccgtccccgttccgagcgggggtcgcgtcgccggcactggggctccccccgccggctccgccgcggaggccaagcatctgcagcatcgcaagttcgccgacggcggcaagggtcccgtgactctcttttctgctttcaaaaaat

SEQ ID NO: 4415 - DNA, 393 bp, Setaria italica
  Peptide Sequence Number=SeqID_70389
tggcaactgcataaatcagaaaaaatgtagttacaaataataaagttccatggatggcactaatggcaactgttagaaaattaagaacctaaagtatactgagaacaaagatggactttcaaaagtagcatgcatgagaaaaagaatgtcatttattgttatcagaactatcaagtacaagtctggtgcaatacaagaaattcaaaggaaagtcctagttgtatttgacaataagtgggtctcagaaagctcatctaaccagaaaccaattgagccattgaattatttctgttcctttttgactttagtctatcatttattgatgaaaataaaaagaacaaatgataaaatcagaataaattggttgcatgcattcatcagccgatccgattg

SEQ ID NO: 4416 - DNA, 252 bp, Setaria italica
  Peptide Sequence Number=SeqID_70390
taacgattaacatgttgaaagaacaatattcaccagttgaactgctctattttgtagagctcctactgaaaatattagctcatgaaattgcaactaagaatatttttagtaaatagctacctcagctgagtcaatgaccctccagtatccatctctagattcgaaaaagattcttccagaaccagggtcataggatgatgaagatgcagaaaactgccaatatcgattccgccttcgatcttgtccaagggg

SEQ ID NO: 4417 - DNA, 3482 bp, Setaria italica
  Peptide Sequence Number=SeqID_70391
taggaatacctaggaaagaagactagactaaataacctactaaggaaaccttgccaaccgcgactgtgggatcgacctcccctgctacctcctcgacttccacgtccacgacctctacgaccattgctattagttagcaacactccatattgttgatcaaaaccaatagatccgaactggtctatttcttgtttgttcttaatagtaggatgcctcggtggaagattcgtgaaatctccagcttctctctccttatttgatgcagcctttggatgaagtgtgtatgatatggaagaatccaaatcaaacaatcttaaggcaatagcagcagtagtatcaggtacccatggaagtacagtagcagatccagaacgtgcaacagaattctgattagtatcttgtgtgttcgagtttaagcaactcaattgtcgtttcaaagttagatgacaagtaatctcgctttactgcaccttccagcatactaagcatctgcaagacttcttcagcagatgatgcagaatacaacttcacaccccaagattttcgatacccatccgtccaaaacggttggagagcttctgctggtattgaagcctcaatggtagctaagagcagtttgagcaatctcaatcctatgggtacagaatggtccacaatttgcatcttccaattaggatctgttctatgtttttcttcacattgtgatgagtgctccaagaaattatgaatgggtttgaacgtcttgtggcaagaagaacagtgtctttcttcagctaagtaaatctggtagcaataatcacaagattgaatcaactcaggccagcgcttctttccatatttcatggcatatgtagattggtgactgtagcactccctccacatccatttcacaaacacataagcccttttcgagatagcaatcttctcggcttcattacgcccaagctctatcttgaaagtatctgagtgtgctacattatcagaagcaacaccagaaaggatactgcatggacttccaaactcattcccatgatttgtacttattatttcattacttccatttttcaaaatccgtccagctgggtgttctaaactggaacaccttttcttttcaacagcttccttaaaggttggctcgatactttgcaacattgagtgcagatgtgactcccggatgccacgagtatcaagggaagctaccaaagcttcaaatgcctcagctgagtcaatgaccctccagtatccatctctagattcgaaaaagattcttccagaaccagggtcataggatgatgaagatgcagaaaactgccaatatcgattccgccttcgatcttgtccaaggggtagtgatctgtaaatgtaaagctgttctgccttgtgacctatgtaggatttcaactgagatcgagttttctcagatgaagcatattgctgaacagacaagctttctggattaatagttgattctcggcttacaccattctgatgatgagctatatcacccgtaatatgctgattctgcttatcgacaagcaaatcagtgtttgctgtattggcatttccatcattgtttttaatagggttatgcactggcataagggtactctcagcagcattattttctcgatctgtgtcaaccttcaaaccaacacaagaatcgtattgtatcttactagtaaagtcctcccttatacgccttttatcaagttgtgcttcagcccacattgttttttttagagcacttgctgcttctagacgttcctccagtattgcacggatagaattgccttcagtggcaacaccaataagtgcaaccaacgcattgagccgttcgtccacactaaggtcacagtagtcaccttcagttagcccctgtacccaggattctccttggttactttcatctatctcattgtccttaacatcatctccaaccactggatcagttgaagtacttgctttaatgtctaaagtacgcaatgaaacactttcgctgcatttagtctgagtgctctgtggtactaatgtattaaccacactatttgattcttgctttatgtcaccgactactgtaactggtgcaccatcttgagctctaactagcggagatttgacatccttgtcctcaatattcatgtcatcaccatcaacatcatcgtcagcatcatcacattcggaatctgcatccctctcagcctcatcaacatccttctccacttcttcacactccgaaagtgcattctgaaacaccctgattttttcacgtgctgctgacaacacagtctcagagtcagctgggtcctttctgtaaggagttttaacacaatatgttgaaggtgccgttctttcaaaaagcttagtgtctcttgacaatgcagcagatatagatgcctctggtgtcttgcttgtcgtaaggtctctcagtccagatttctggatcttttctgcgacttccagtattgtgagacctttgctcccttcaagcgacaatacatgataagcagcaaattttacagttccaggtgtcagacggtgtcgtgacctgcgacggttagtataccctctctctttcattaaagcagcagcattcacagccgccgaaccatttcgcagagtggaaatgatatccgcaccatcacgaccctcattatcgtcgcggtaatgtacagttccagcgttccttttctttaactgaggcccaaaaccagcgcataaaccaaattggcgcagtatttcaggccatgtgagaaagtttaagtggcgctgccagttaagtatgttgaagccccaagcatatgccccttcaacaatttgtgggtggccacctccaggattagcagaaccgctctgatttacacccaaagcaactgaaggagtccgggcaacatcctcaatatcctttatgatagatttcagcagagcaacatgcaactcccctaggaaccttgaatcataatcatgaagagcctgcacgaactcatccaatgtgaacgatggaagcccaagaacatcagcaaaggtaataaagaacttccaaaccatcaaaaggttgccaatgttatcctcagaagctgcccatggttttgttgaaaatggcaccttcagtctcacagtttcaggaggaaactgtcccagcattcctctaaatgaatcaagttgctgtaatgtgtcaatatcaagagaaaccattgagggcaaccctttactacgataggccagttctaatagttctaagcgctcatcttccatcagttccatcgcctctcgtgcgattctacgtgctgtagccttctcattagcagccttctgcctcgcagcttctttctcacttcgaagttcctccttttgtcttagtttttcagctcttatggattgtttctgcataaacttctccatgcgcttgtgttcacgcctttgttccttttggaatctctcttcttccctttgcctttcacgcatcaacctctcctcttctttac

SEQ ID NO: 4418 - DNA, 1587 bp, Setaria italica
  misc_feature (1)..(49): n is a, c, g, or t
  Peptide Sequence Number=SeqID_70392
nnnnnnnnnnnnnnnnnnnnnnnnnnnnnnnnnnnnnnnnnnnnnnnnnaaatttgtaagcttttttaggtaaaaaaacatttgatctgtaatatacacagagaatgacctaattcataggctaacatatacaaagccgatcttctgatgtcgacttgcctctacctaacgagctccaacaacaaaaccaggctgcctcttaatagtttctaactcagcatttgtgttgaacttttgatggaaccggaggcgcttcagcttaagtcccataaaaaattcttcaatttactctcatcattcgctatactctgaagaatatgaagtaccaccttcatccacatctgcatttcccactccatctccaccatcgtcgtcatcgtcgtcgtcatcttcatcaccaatttcaccatcccctcccatctcaacatcatcgtcctcatcaccgacagggtcttccgcttcatagtcctctccatcctcaccgtcttcatctccttcagcatcctcatcattatcctcgcttccgtcatccatcatctgtagggggctggactcagaattgtcccttggataaccagggaccagctcgtcatcatattcctcattcaagggctcaccattttcctcattttcttccgattcatcggattgagataccgaattgttgtcatcatcttcaacatattcccttctctccaaggcccaatcttctgcacccgagctctcaggagaatgcatctttccagaacggtttgccttacttaacatgctaaagctgcccaataagtttgcctttggaattgatctgatgccgagctcagatggttgccgaggtctaactgttcgaagtccacggcctcggccgcggccacgcccacgcccacgcccacgcccacgggtattctttgcaatctttcgagggcctttctcatatgacccattgttgtcatccctgaactggatcctggaagagctgctaatacctctaggaaccttgccaccgcgactgtgggatcgacctcccctgctacctcctcgacttccacgtccacgacctctacgaccattgctattagttagcaacactccatattgttgatcaaaaccaatagatccgaactggtctatttcttgtttgttcttaatagtaggatgcctcggtggaagattcgtgaaatctccagcttctctctccttatttgatgcagcctttggatgaagtgtgtatgatatggaagaatccaaatcaaacaatcttaaggcaatagcagcagtagtatcaggtacccatggaagtacagtagcagatccagaacgtgcaacagaattctgattagtatcttgtgtgttcgagttaagcaactcaattgtcgtttcaaagttagatgacaagtaatctcgctttactgcaccttccagcatactaagcatctgcaagacttcttcagcagatgatgcagaatacaacttcacaccccaagattttcgatacccatccgtccaaaacggttggagagcttctgctggtattgaagcctcaatggtagctaagccttgttctttacctttcctttcgttacttttctt

SEQ ID NO: 4419 - DNA, 738 bp, Setaria italica
  Peptide Sequence Number=SeqID_70393
ttaagaaagcaggtgcaaccttgttgatgattttgacaccaccaaagacaataaagcatagaagtatggtgacaatcacaccatacacttgaagatcatgcaagctgggtgtagatatagtagatgtgccagcagtttctgtaccatttactagtgtgttgttaacaactgttacacttttttgaaaaagtccagcagaaggaacagcatccagaaaggtttctacagccccaagcacatacatggatccggcaactgcattcccgaggaagaagcatagtccaatactaactccaacttcaggaccaagtgcacggcctataagataatatggtccaccacccttcattgctccattcgttgcaatggcacttaatgatattccagttaaaaatgtgcaggcgccacaaaatgaaaccaaaacaagcgactgccatacacctgccatacctacaatccaggtaaaacggatataataaatgattcccaatatattctgcaagcatggaacaaagacacccatcatggtgccaaacttaggtccagtttccttggggcgtccaatggtaattgctacatcttcaccatccctaggacttgaaggggcctgaatctgttcccctgtcatactcttgagacccaatatatttacaagagaatcaaaaccaaatagctctagctttgaatccccttgagatccaccggatgtagcatgatcatcaggagaaccttctcgca

SEQ ID NO: 4420 - DNA, 412 bp, Setaria italica
  Peptide Sequence Number=SeqID_70394
gaggaaggcaccaagtacattggcacgtcttctgaaacgggccttggcaccggcactgatagttcgtttgaagcagtcttcgtgttgctgctactcccttcttgcttggcattgaagctgacacttggcttggagtagctttccagaccaacagaatccctgacgccatcagtccgctcaagcttcgcatccgaggcggcaacggcgacgacgttcgccttgaggttcacctccctgccagcccgatggttgccatgggtaataccatttggcctgaactgtgcctccctgacgaggatgcgctccccgaacacggcgaccgcctccttgacagaccggaacgcgcgggaggtgtcaacctctccacggtccgacgccatggcaccgccgcagcttgcaaaggatggcttcc

SEQ ID NO: 4421 - DNA, 264 bp, Setaria italica
  Peptide Sequence Number=SeqID_70395
gaagtagagagactagcctaaggcctatcaggatctgtcttttgtacccatagccagcgaatccttaaagcacatccaagtagctcaaggttatgaatccccagaccccatattcaatcggctgctggaccttttcccatgctaccaaacagttgccaccattggcctgctcacagcccttccaaaggaaccctctcctctttttattaatggccttgaaaaaccatttaggtagattcatggctattaaatgataaactgggg

SEQ ID NO: 4422 - DNA, 1393 bp, Setaria italica
  misc_feature (1378)..(1393): n is a, c, g, or t
  Peptide Sequence Number=SeqID_70396
agctgctgcagcgggcggcgcgccggagccaccaccgcatgtcgaggctcgtcgcgaggaccaccggcgtgccgatcccgtcgagcagcaaggctgttgcatcggggggcgacctgcaggtgccggtgcacgcgggcaacggcgagttcctgatggacctggccatcggcacgccggcgctgtcgtacgcggcgatcgtggacaccggcagcgacctggtgtggacgcagtgcaagccgtgcgtggagtgcttcaagcagagcacgcccgtgttcgacccgtcgtcgtcgtccacctacgcccccgtgccgtgctccagcgccctgtgcggcgacctcccctcgtccagctgcacgtcggcgtcgaggtgcggctacacctacacctacggcgacgcctcgtcgacgcagggggtgctggccaccgagaccttcacgctggccaagtcgaagctcccggaggtcgcgttcggctgcggggacaccaacgagggcgacgggttctcgcagggcgcggggctcgtggggctcggccgcggcccgctctccctcgtcacccagctcggcctggacaagttctcctactgcctcacctccctcgacgccacgagcaagagtccgctgctcctgggctccgtcgccggcatctccgagagcgcggcgacggcgcccgtgcagagcaccccgctggtgaagaacccgagccagccgtccttctactacgtgaccctgacggggctcaccgtcgggtccacgcacatcaccctcccgacctcggcgttcgcgatccaggacgacggcacgggcggcgtcatcgtcgactccggcacctccatcacgtacctcgagctgcagggctaccgcgccctgaagaaggcgttcgtggcgcagatgtccctgccggtcgtcgacgggtcggagatcgggctggacctgtgcttccgggcccccgccaagggcgtggacggagtgcaggtgccgaagctggtgttccacttcgacggcggcgccgacctcgacctccccgcggagaactacatggtgctggactcggcgtcgggggcgctgtgcctcaccgtggcggcgtcgagggggctctccatcatcggcaacttccagcagcagaacttccagttcgtgtacgacgtcgcggccgacacgctctcgttcgcgcccgtgcagtgcgacaagctgtgagctcgccgccggtgctggcttcgtagccctgcgtgtatgcgtgtacgtatgcggttgtattttcactggatgttgatgggtggttattggtcacgtggacctgtagatatcaagtacgcgacgcgctgatttcatttgtctgctggaacaattgggtcgggtcttttgtctttttaaaaaannnnnnnnnnnnnnnn

SEQ ID NO: 4423 - DNA, 757 bp, Setaria italica
  Peptide Sequence Number=SeqID_70397
cagcaggcaagcgcatacggacttcaacgaccaacttatactacaacaataacagtaaccgagtctgactgaccaacaagatagtaacagcacaccaacccccaaatcaatcggctttcacacgcgtttcaattacacacaaatgcaccacacctcgcttgcctatatctcctcttcttcgaacgggtctctctctgggtagtcgccgacctttactttctctggcctcacaattgccccatgaccttgggggcactcgaagaagcgaatgcctttcaccatgccatcgtgctttcccagtggctcatcatattgcactccaacccagaatccacgcccaagagcttcagctctgccgacaaattttactgtgcccctcttggcacctggctccacttcacatctatctcccaccttgattttggagcacaattcctccatgtgcttttctgattgttgtttatcctctgatgtagaggttttcggggccatcttttctttgaattttcgaaagttagtgtggagcttgtcgtatgcctcatcggacattttgtacttgtcaacaagggaagtgtcttccaaccagcccccagaggtgatcgaggagggatcgagatcgaggacatggatccggtagccgttgtaggggccgtaggctgcgagtggggcgtcgtcgtcgtcgaggtcggcgaccttggcgccggtgtcgtcgcggagctggaggcgcatggaggcgacggcggtgccggtcttgcgg

SEQ ID NO: 4424 - DNA, 638 bp, Setaria italica
  Peptide Sequence Number=SeqID_70398
ttcggggacgccggcctgggcctgggcctcggcctcggcgccggcgccgagcggtgcgacgtgttcgacggtgcatgggtgcccgacaacacgggacgccacccgctctacaacagctccgagtgcccgttcgcggagcgcgggttcgactgcctcgccaacggccggaacgacacgggctacctgaggtggcggtggaagccgcgccggtgcgaggtgccgcggttcgcggcccgcgcggcgctggagcggctgcgcgggaagcggatggtgttcgtgggggactccatgagccgcacgcagtgggagtccttcatctgcatgctcatgaccgcggtggacgaccccaggaccgtcttcgaggtgaacgggaacgagatcaccaagacgatacggcacctggcggtcaggttcgcgtcgcatggcctcacagtggagttcttccgctcggtgttcctcgtgcagcagcaccctgcgccgcggcatgcccccaagagggtcaaatccacattgagggtggacaggatggataatctcagccggaaatggctgaattcagacatactggttttcaacaccgggcattggtggacaccgaccaaattgtttgatacgggttgctatttcctaggtccggt

SEQ ID NO: 4425 - DNA, 631 bp, Setaria italica
  Peptide Sequence Number=SeqID_70399
ttttttttgagtgaatacactctgctaatttgatatgctcaaggaaaactgtttacaatttatatcattcagaccttgtttgcttcaactgtttcagatccagcttcgtcttcagatagtgttgatgtagatgtgataattgatggcaagtttgaacatggttacatagtaactgttattatgggatcaaaatccactaaagcaatcctctataattgcactgaagaacctgctctgccaaccccagttccacctgctgcaagcaacagcactgatctgaagggtggacgtcgccgaaggcgacgtaggaagaaactaagtacaacagacccaaggcaccccaaaccaaacaggagtggctataatttcttcttccaggatcagcacagaatccttaagccacaatatcctggacaagacagactgatcagtaaaatgattggcgaacgttggaacaatctgagtcctgaagataaagctgtatatcaagaaagaggcgtacaggataaggagcgataccggactcagttggctgcttataaagaagaacagaggacaggccagcctgtcagcaatgctgtgcctatccagcagagactccctcagacagaagtgacgattgatgaagtga

SEQ ID NO: 4426 - DNA, 283 bp, Setaria italica
  Peptide Sequence Number=SeqID_70400
cttggtgatgtttgtgggtggtaatcttgtttaactgaagccgaactgaaagcactgcctttcatacattacagttatcaagcacacagtgcttctgaatgcaagctcacaatctcgccttggtgtcggacaacgtcgcattgatcagccgctccctgaactcgtcatcgttgcttgtaagcatatccttgagcgacattttgatgcctctatccctcaacgcctcgtgcctcggcctgatccctcccctccaaactgaatgcaaagtagtgcgggaactcgg

SEQ ID NO: 4427 - DNA, 257 bp, Setaria italica
  misc_feature (164)..(164): n is a, c, g, or t
  Peptide Sequence Number=SeqID_70401
aacagtatagccaaatgttaagtcctcaacacaagtagttgctgcagggacttcatgttgggcatgtgagtcctccgttgggttcactacttctgaagaggtcatcaacggaaacatagaagcttccgcttctgcattatcccattctgcttcattaaatggtnccccatattgctccccaatccttggaccaaggccacttttcttgaaattttgcagagaacaaagcatccttagagaaaccagcagaaaccaac

SEQ ID NO: 4428 - DNA, 137 bp, Setaria italica
  Peptide Sequence Number=SeqID_70402
catgacgctactcttggagagagctctgcccttcctccgatagaaatccatcacaatcagtagaaagttctctgtcaggtggtaggattgtgtaatctgtggtgcccacattgctggtgctgaagttgttaggcact

SEQ ID NO: 4429 - DNA, 259 bp, Setaria italica
  Peptide Sequence Number=SeqID_70403
aaataaccaaaagtaagaacaaacaaaaataacaagacaaaagacggaaataagagccgctttcgaatgtgagtgcagaatgcagcaagggaacttcaggactgtttgagcagagagcaggacaatccaacctctagacaagctttcagaaggagagtcacaagattgacaagaccagagagatgttggtcaagtcacggaaagggaccagagaacacaattgctgagagaaactacagttggcaagactcaagggaag

SEQ ID NO: 4430 - DNA, 114 bp, Setaria italica
  Peptide Sequence Number=SeqID_70404
agtgcacaaatcagcaaagcggaatagagccgctttcgaatgtgagtgcagaatgcagcaagggaacttcaggactgttttgtgctaatacttcctaccatgtgaatcagttgt

SEQ ID NO: 4431 - DNA, 194 bp, Setaria italica
  Peptide Sequence Number=SeqID_70405
gtacagatcaacctctgatatagcgtctacaataagtttctttcccataatcttcctctttaagtagtaggaagtgagctcaacatctgttgggtggaaacgaaaaccaggaggcaggctagtttgcgccatcaccctaatgcctgctttgcctttaaagccatttctgtcaaaacaatggttcgcatattgtc

SEQ ID NO: 4432 - DNA, 374 bp, Setaria italica
  Peptide Sequence Number=SeqID_70406
gatcactagttcaccagaaagagaaaagcttgagtgcacggacaagtgaatccaagtgcacaaatcagcaaagcggaatagagccgctttcgaatgtgagtgcagaatgcagcaagggaacttcaggactgtttgagcagagagcaggacaatccaacctctagacaagctttcagaaggagagtcacaagattgacaagaccagagagatgttggtcaagtcacggaaagggaccagagaacacaattgctgagagaaactacagttggcaagactcaagtcctctcatctaagtccagaaacatcgttcggccgagtccttggtctacctagacttacccttagaagtacttagaccaaactagtaagttta

SEQ ID NO: 4433 - DNA, 233 bp, Setaria italica
  Peptide Sequence Number=SeqID_70407
agccgccattattgggagggaaaaacaatcgaaaatagctaggcattgttggttctacaggacctgacagggtagctacatcatgatgtccattgtacatggactgagcttgaggatgctgcataaattgattgttctgcgcaggatattcactggggaagcttggatcagaagcaaggagatcattcagttctatataatcatcagtagaaagttctctgtcaggtggtagg

SEQ ID NO: 4434 - DNA, 153 bp, Setaria italica
  Peptide Sequence Number=SeqID_70408
cagggacttccatgttgggcatgtgagtcctccgttgggttcactacttctgaagaggtcatcaacggaaacatagaagcttccgttgatgacctcttctgtagaggtggttcacgaacagcacctgcagggacttcatgttgggcatgtgag

SEQ ID NO: 4435 - DNA, 348 bp, Setaria italica
  Peptide Sequence Number=SeqID_70409
ctggttctgctatccaagatatacctgctcagcagtctggccaaatgttaagtcctcaacacaagtagttgctgtggcatgagcaaatgatgattcctctccagcacaagcagcagatgcattctgtagaggtggttcacgaacagcacctgcagggacttcatgttgggcatgtgagtcctccgttgggttcactacttctgaagaggtcatcaacggaaacatagaagcttccgcttctgcattatcccattctgcttcattaaatggtgccccatattgctccccaatccttggaccaaggccacttttctgaaaatttgcagagaacaaagcatccttagagaa

SEQ ID NO: 4436 - DNA, 527 bp, Setaria italica
  Peptide Sequence Number=SeqID_70410
aggactgaggagctaatcataccgaacacccagctcctacatctaatgaatatatatcagaatgattggctcctcagtcctcactgatacatccagttcactgtggaacaaacttgcagaccaaagtgaatgcaagaacagagttgtagttgatggcaacttaatcacaagccaaggtccaggcacctctatggaattctcgcttgccatagtggagaaactctttggccgggagagggcccttgagctcgccaaaaccttggttttcatatgagttcagtgacttcagttggtatgtttaggttcctggagtatggactttttctgtgaatatgaggcatcctatgttctgtggaatgtacttgaaggccctttttagctacaataacatgccaccttgtaatcatagtatgcaataaaagtgggggcaaacattgcaggataggatgtagccttctttccctttaggaggccatgcggttcaagagcaactgcaggagaggcacatatagcaccatacaattttg

SEQ ID NO: 4437 - DNA, 1793 bp, Setaria italica
  Peptide Sequence Number=SeqID_70411
ctcgcctccgccctcgccctctccaaaaccccacgcgccccctcctccggctcccacctctccccacctcccctcgcccgccgtctccaaaccctaacccgcgcgctcgcgtcctcgtctccccaagccatggcgtcggcccccgcccccaagaaggtgctggttcctgtcgcgaacgggacggagccgatggaggcggtcatcaccatcgacgtgctccggcgcgcgggagccgacgtcaccgtcgcctccgtcgagccggggtccgccaccgtcgcggcggcgtggggcgtcaagctcgccgccgacgcgctcctcaccgacatcgccgacgccgaattcgacctcatctccctccccggagggatgcctgggtcttccacttttagagactgcaaacttttggagaatatggtcaaaaaacaagtagagaagggcaagctttatgctgcaatatgtgctgcaccagccatggctctaggaacttggggtttgctcaatggcttaaaggcaacatgttatccttcattcatggataaacttccttcagaggtgcatgctgtggaatcaagggtgcagattgatgggaagtgtgtgaccagccgtgggccaggaacggccatggaatattctgttgttttggttgagcaactatatgggaaggaaaaggccaaagaagttgctgggccgatggttatgcgccctcagcatggtgtggagttctctatgaaagagctgaattcaattagctggaatgttggtgaaacacctaatattcttgtaccaattgctaatgggacagaggagatggaggcaactatgatcattgacattctgcggagggcgaaagcaaatgttgtggttgcctcgttggaagacaagttggaggttgctgcatctcggaaagtgaaaatgattgctgatgtgctattggatgatgctcttaagcagcaatattatctcattcttctacctggtggtttgggtggtgctgaagcttatgcaaaatctgataaactgatgggtctgatcaagaagcaagccgaggcaaacaaattgtatggtgctatatgtgcctctcctgcagttgctcttgaaccgcatggcctcctaaagggaaagaaggctacatcctatcctgctatgtggaacaaacttgcagaccaaagtgaatgcaagaacagagttgtagttgatggcaacttaatcacaagccaaggtccaggcacctctatggaattctcgcttgccatagtggagaaactctttggccgggagagggcccttgagctcgccaaaaccttggttttcatatgagttcagtgacttcagttggtatgtttaggttcctggagtatggactttttctgtgaatatgaggcatcctatgttctgtggaatgtacttgaaggccctttttagctacaataacatgccaccttgtaatcatagtatgcaataaaagtgggggcaaacattgcatagaggattcctgatcaataaaatatatcaccttgtatgagaatagttttgctatttggtctgtttacttccaagtctgtccacagtgaactggatgtatcagtgaggactgaggagccaatcattctgatatatattcattagatgtaggagctgggtgttcggtatgattaacaatttaacattgtatacttggttagctttatgtggttctgatctgctggaaacggtattggcccgctgtcatggccgcagtgaggcttataggaacctaaattgtggtgattatattgtaccgcctttcggctttc

SEQ ID NO: 4438 - DNA, 1772 bp, Setaria italica
  Peptide Sequence Number=SeqID_70412
accgtgctaaacgggaattctcggggaaaagaaggcgagtgcggcgcagcggcgcacacgcgcaagcgcgcaatggaaggctcgccggcgacgcgcctcccggaggccgactccctccccgacggcttcgtcgagagctccggcgcggacacggcttctccaccatcccccgcgcccgtcgcggatgatccaccgctagccgcgctcgactccgatcggcccgctgccaccaacccaggcggcggggaaaccctaggcgacccctccctccccgccccggccgtcgaggatgcctcctcggccgccgccgaagccttggagacactctctttggacgccactgcggagccggaacgcgctccaggggagcacggacccaccggcgctgcaagagacgctgaagaatccttgaagcagagctgtgcagctgagcaagcaggatctccaactgctcaaaaacaaaaggagactgctgagcccaaacgcaaggtcgtgaagcgtaaggacagagagctgtttgaacttgcccagcaataccacaaagtggtggcagaaagggatgcagccaatgcagtcaaagaaaaactagaatctctttgtagggagtttcagcgtcaaaataaaatgctaaaggaagagtgccgaagggtgtcgacagacgggcagaacatgcgtatggaattgtctgataaattcaataatgctataaaggatgtgagtgtcaagcttgaggagcagaaaaatgaatgcattgctcagttagaagagaacaatctgttgagaagtaaactcaaagatcttgctgatcaatataatattactcagcagaaatatgctcaccaactgaaagagaagatgctggaacttgagcttgcggatttgaaacttcaacaacagcaagagaaggctgctcaggaacatagccaaatgcagttatatgctgagcaagtttctcagcttatgactactgagaagaacctgcgattgcaactagcttctgatggagagagatttcagcagtttcaggatgccctgtcaaaaagcaacgaagtctttgaaacttacaagcaggagatggaaaagatgatctcggtgataaagagtctgaagaaggagaatgaatttctgaagggaaagtgtgagaactcagatattgctctcgtgaagctcattgaagagcgtgagctaacaaagaagcaaatagagaaattgaaaaatcaaaaggagaagcttgaatccctgtgtcgttcactacaggcagaaaggaaacaaggcccctctgccagtattcctgagaccccttctagcgaagaaggtgtagcagtgacaagccaagattcatagtgacaaccagtattcctgatgtgcatgccaatgttccatcggtgtcacctacccgcttgctgagatttctgaagcctgatgaatggatatgatacttttatcatgtttagggcgatatgtaggagagtatggagagcttgattgatacttgtctgtctctggcgttttgagattgttgccagagaggggcggtagcacctgaacctttcccatgctagtgactcatattactaccaggcaaatgtggtcctccgactgtttctttctttgtggtgtgactttctttctgtggatgtttagttatttccttagaccttttattcccttgtctagtaaatgggcccttttccttcatgaattttcttaatccttgttttcaaatctgaaacatttaatatattgggatgtgcagtatctccgttttcttg

SEQ ID NO: 4439 - DNA, 337 bp, Setaria italica
  misc_feature (289)..(289): n is a, c, g, or t
  Peptide Sequence Number=SeqID_70413
acaaaaacaagaaaaacctaattaaccaagaaggaaacaaatcttcatcaatggatgctttaaagactacaaatccagctgcaaaagagactatttccaaaatagaaaaccttcaatatgtgaacgtgaagcaaaaatcttcattgatggatgacctcaagactacaaatcatatagatggaacatctaactttgagcatcagtctgcagatattgagcaagtaattaacgatgacactagcccttttacaaatggcaacattgagaagaatgatgaagctcacaaacnggatgacagcaatgaaaatgatggtggtaatgaaactgatgagcatct

SEQ ID NO: 4440 - DNA, 369 bp, Setaria italica
  Peptide Sequence Number=SeqID_70414
gtttctgattattttgtccgaaggacagggatgaagtaccagatgatgatggcttcttctgctgcttgtttctctggtgattagactgacttctaaaaggttggtttgttctgtggtcatcatgctctttctgtagtcctgaattcctcccagaacttacaccctccctcttctgcacattattctttgcttggactgccaaagaaatagactttcccttgttgttcttcgaacaactaggattgttaatttcataagaatcgatcgatggtctgaatatgacaatatcttcctcactgttccagctccggttcatctgctgacctctggagaacctcacatctggcagctcaggagtggtccttgttg

SEQ ID NO: 4441 - DNA, 374 bp, Setaria italica
  Peptide Sequence Number=SeqID_70415
tttgaggctgcaacaagtggagatgcacagatagcgacgattacaccagcaacagtaaggatatggcccgtcaaagtgagctgtcccacaagaataaaaactgctataaagctgtttatcagtgcaaatgttctccttctggcagctggacttgatattgtagtagctattattgttactttcttcgaacattacaaaaatctcaggactggtctttcgagattgcaaaggtgatcttggtgaagtgaccagtgaagacatttcatcatcagcctctgtattttgaattttttcctgttggagacagttcagttgaaccctgaatatcatcaatgcaaattcctttagatgatacagcagcgagttccatcaaa

SEQ ID NO: 4442 - DNA, 368 bp, Setaria italica
  Peptide Sequence Number=SeqID_70416
ttggctttgtacttttcatccagtgagacaactgtaaacaataactcccttccaggccttgtaaaaacataaatgactacctttcgaattgtttcggttatagccacagcagtccaagttggccatacagcaagggcaaccatatttgaggctgcaacaagtggagatgcacagatagcgacgattacaccagcaacagtaaggatatggccctgatatggttgtttacatcataaaaggaataattaaaaatccaagaattttgttatcataaacatgaggaaagtttaaaataacagacctcatacaatcattgcaggtattttactatttgaccaatatattattattatattattttcttcaag

SEQ ID NO: 4443 - DNA, 687 bp, Setaria italica
  Peptide Sequence Number=SeqID_70417
gttgcagactcattcgcaatgtaatgagagtacttggtaatagattactgaggatattttttttcctcaaacaatgtactgaggataatttggatggtgtacccaaggctgaaagaatggcaatccatgtgaagtaaggaaacagactacgaacactataaatttctttcttatgatggttggcatacaagatctacgttgtcgtaaataaatatgggagtacatagaaatagatggctgaggatgaggatagtttggagatggacaaaataccgtcaaagtgagctgtcccacaagaataaaaactgctataaagctgtttatcagtgcaaatgttctccttctggcagctggacttgatattgtagtagctattattgttactttctgaaagtaaaagaaggatgagacaactgcacttagccatagaaatagagatatgtatatcaggtagggcgagcgcaagattagccagaaaccttcgaacattacaaaaatctcaggactggtctttcgagattgcaaaggtgatcttggtgaagtgaccagtgaagacatttcatcatcagcctctgtattttgaatttttcctgttggagacagttcagttgaaccctgaatatcatcaatgcaaattcctttagatgatacagcagcgagttccatcaagagggacgaaaaaggagc

SEQ ID NO: 4444 - DNA, 1535 bp, Setaria italica
  Peptide Sequence Number=SeqID_70418
gtataataaatagcacggagtaatatataccttgcatcaaaatgcatctgcatgcattacatgcagccattagcatccctatttctttgtattgtacactacatattgaactctctctctctagctaacggcaaattcatccttctctagaagaaaaacactacatgttttcatcctttgaaacaagcaaggaggttcagaatcgtcaattgcatgtcttaccgagactattctttctgcattcattaacattagcgtacataccttgcagtttgcatcacttgccacgtgggtacataagacggtacaaagaccacaaattattctactactgtgtgtagtcctaactcctaacgttcctctttctgtatcttgtacttctcttccacacttgtatatgttaaacattctctgtaatagtccaattcatcccaaaaggaaaactccagactcacaagctcctccatgaacctgccattctttgaaacgagcagttcaatatccacaggggcatgtcctttggcaaccatactttctagtttctacatgctgaaagcactgaccatctcgtgtcagtacctccagcagctatctgtagactcaaaacctagagaagaaaacagcaggagcaactggaggagccgccttaggtgataatgcggaaatatataggggtatcaatttttaaccctgcaggaattaggatgccacaggagccgccttaggtctggcaagatttgtctggagccgccccaaatgaaatgcaatgagaagccacaggaagcagagcggcaatgcatacagggtaaccatggttgctttcttctcaagtctgctgaacagcaaactataaattccagcagctgtagcatcacctagcctttggacaataacatctatacaaaccttggctttgtacttttcatccagtgagacaactgtaaacaataactcccttccaggccttgtaaaaacataaatgactacctttcgaattgtttcggttatagccacagcagtccaagttggccatacagcaagggcaaccatatttgaggctgcaacaagtggagatgcacagatagcgacgattacaccagcaacagtaaggatatggcccgtcaaagtgagctgtcccacaagaataaaaactgctataaagctgtttatcagtgcaaatgttctccttctggcagctggacttgatattgtagtagctattattgttactttctgaaagtaaaagaaggatgagacaactgcacttagccatagaaatagagatatgtatatcaggtagggcgagcgcaagattagccagaaaccttcgaacattacaaaaatctcaggactggtctttcgagattgcaaaggtgatcttggtgaagtgaccagtgaagacatttcatcatcagcctctgtattttgaattttttcctgttggagacagttcagttgaaccctgaatatcatcaatgcaaattcctttagatgatacagcagcgagttccatcaagagggacgaaaaaaggagc

SEQ ID NO: 4445 - DNA, 236 bp, Setaria italica
  Peptide Sequence Number=SeqID_70419
aattcggactggccaagcatgcacagcacgaatcgttgaagacagaaaaggcacatggattgccagactaaaatttgaacatagttgaaaaataaagacagcaagcattggcgcctttcctaattgataatttactacgctaagtgagactgcaaggaacatgacctggtctgttccttgcagtctcacttagcgtagtaaattatcaattaggaaagacagcaagcattggcgcc

SEQ ID NO: 4446 - DNA, 3048 bp, Setaria italica
  Peptide Sequence Number=SeqID_70420
ttttttttttagacccccaaaagaaaccttttttttttcctaaataacaaaaagagaaaacctgtatacgtcaattcggactggccaagcatgcacagcacgaatcgttgaagacagaaaaggcacatggattgccagactaaaatttgaacatagttgaaaaataaagacagcaagcattggcgcctttcctaattgataatttactacgctaagtgagactgcaaggaacagaccaggtcatgtttcaacagtcatccagaagatcgccatattcttccttcaagtgagattaccataacagaaacatcatcatggtatttccgacgatcaccctggggaatatccagtaactcatgaaaatccatcccattctttttggctgcacgacatagaagttcagctacaaggtattgcgcagggtctccctctggtacattttccatgaaccacgaaacatgcgaaactacctcatcattgctgaaatattgatacaatccatctgatgacagtacaagaaaccgatcatttgtgcagagacgatggtgaagtacagcagggttgcagctgatatacggtgatgtgccaacatagtcgacgcggaacatttgaagcagtgcctcgttatattttggcttctttagaaagccggcaccaaatgctctagtaaccttcaattgccccttcactctatcattaaagatagcttgaggatcatcaggatgttctgccttaatccgcaagacttcctcctcaatacttgtgctatggtcagttgacaattgcactgctctcattttcaatctgcatattgagagttccttagcttttgtattgctacttaggtggctgttaggattatgcataggggactcttctgatatcctatcaagctcgacacgaaccagcgactcccttgacctgtttcgatgtcgtaaatctccttttaagaaacttgagcagttatactgatcattgtcctgtgccaagataactcggctatccccaagattcatgacatacacatcctggtccttcatcaacattacaaggacacatgagcccatcaatgcaagctccggatgtcgatcaagctccctttccactatttccatgtatgcttcctcggttgtttcaagtgcccgtgacattgccctcaatacagcatcatgctccactggtcctgacttgcatctccttatgacttccgaaggttgaataatgctttcctcaacatgaggttgatctctgtgccaatcatagttccatgggaaaaacttcttctgcaacaacttttgctttttgtacatcttcctcaactttgatccaaataaaaatcttcttgtagtttgcttgtgccctgatgaagatgtcgaaattgaacacccactacactctttgggatcaatgccaagtacactatcagcatgccttgaacttccaagatcctcagaatcctcatagcattctcctgttgctgccaatgaacacctggagatctctgctgcatttctggagcttccttctgtagtgcctgccagcgtattatgcaagttctgggttttccttccctctggtgatgccttagacacacttctgttatgatcttccaacaattccatctcaagtagctacaaaaagacgcttgctctttctgttttctttcaagaatctgccatgttgatcacagtaggcactattctctgccatacagctacagctaatgtttaaatctgtacttgagagacctctgtttgagttgtgagactctctactttggagatcatttcccagatcagcttcagccgtttcctcaactatctcatcagcgcccaactcctgactgcttgaaacttgtgtagccaaatctttctgttcactactggtacaatttggctgaacttgcaaggcactgtcatcacaatccttttctgctgacacattacgtttttcaacattaccaagttgttcttgtttcccactgtcaatctggaactgactgccatcaccatgaggagcgtccatagaagtagcgactggttcaccctcttcatgagtagatacatgatcgctcctttcagagctttcttcataaacccagagcagtccttccagttctttatcaatggccttgtataggttgctcatcagaaagtcaggtgcatcagggccactgaaaccatcataaattccaatgaaaagccatccttgctcttcggacagaacaacatgaaccctatcttcccctgcctttccatgagcccactgcaggttccttgtcacattatactcaggttccggtagcccagcttccaacccattctgtgagccttctgatctggactttgcatcccttgcccagggcagctgagccatggaatgcaacagaaacttgtgaacccagcctggattttgcgagttcctgctaaatgttctcgacaatgcggttttcatgggtctgctaatcctatgtacaagatgtcctaggccagctttcctccgaccatacgaaagaggtgctgagaagttgcttctgttgccaccatcgatagggcctgacatgaagacccccttgtccaatggccccgacatgaacccggcagtgcctttgtccagcggcccagacgcaaatcctctctccagcggccccgacaagaaggtattgagcggccctgaccctcgcggcactggctgcaagggcacggcggcgaaggaggctgtgctctcaaacgcggcagcgggctcctgcacctcgcctgcaagggagacgctgaggttgcccgtcctggcagaggacgcattagcgctgaccgaggccccccgatatggtccggaaggtggtctcgccgaagctcctgctgggccgctgcagcccggcagccgccgccgcggcggcggcagcagccaggtcctcggcggcctcctggcggaaggagccgctgcgggtctccgagtccatgacgctggagtcgagcgtgtatcgctcggagttggagggcgtgatggcgggggagtctgcggccgcgcccgggcggacgtagcagaagg

SEQ ID NO: 4447 - DNA, 429 bp, Setaria italica
  Peptide Sequence Number=SeqID_70421
atcatatccgagagggaattgggtgggatagcatctggtggcttgggacactgggaggaggttgctggaaatgaggcggcagctgaatatttccatggtgctgaactgcgtgttgctccgatagctggaagaatgaaggactgtacgtgatgtgctgcattcccatattatatggttcatttgacttcgacatctcacccgttgctatcttaagcctctccacttcctgcttcagtgcgtcatttagagcatcacgcagatgagcctgttgctccatggcctgcaaccttatcttgagctctgcattttctgcagaaagtccagttgtgtctctctggaatagtgtcagctgcgctgaaagagtagtagcctctgtctgaagagtttgaaccttccgttctaattctgtttattattattcgagccttt

SEQ ID NO: 4448 - DNA, 896 bp, Setaria italica
  Peptide Sequence Number=SeqID_70422
atagcaacacaaaatgtacatattccaaaggagaacccatgattgttaagtctacaacaagctaaacggatggagaacaggaattctgcaaaaccaatcactcagtgcccactcaacccctaactcgaaacaaccataacacacagaagaatgaacccaaaacaaacatatcaatgtccctacagaatcagccaccccgatgacatcgattcacaactgaacaatgttaactagatataacaaattgataaaaaataagcctaccgcgaaggaggaagcagttcaaggatgtcagactatgaacaaaagaactctaaagaaacgaattcttgttggaaggcagatgtatggtataactagaaggtgctattgctttcacctgcagatatagagctgccctctgacttcaccatgacctctgcctccgacttcacagccactgaccctttgccaatgtctagcccctggagccgcccaagggagtcttgctgcatcatatccgagagggaattggggtgggatagcatctggtggcttgggacactgggaggaggttgctggaaatgaggcggcagctgaatatttccatggtgctgaactgcgtgttgctccgatagctggaagaatgaaggactgtacgtgatgtgctgcattcccatattatatggttcatttgacttcgacatctcacccgttgctatcttaagcctctccacttcctgcttcagtgcgtcatttagagcatcacgcagatgagcctgttgctccatggcctgcaaccttatcttgagctctgcattttctgcagaaagtccagttgtgtctctctgccattgagtcacaatagcgtgaaggacatcaagcaatttaatagaaagacatggacataataattg

SEQ ID NO: 4449 - DNA, 993 bp, Setaria italica
  misc_feature (10)..(10): n is a, c, g, or t
  Peptide Sequence Number=SeqID_70423
tttttttttnttttttttttttttttttcctttaaaacggcacacaggaactgaatcaaaacaaacagacgtgaagagtccaggatcatgtctacaacacagattgatctgcccgtgcgattacgaacactttcaactaaacgaatgaattgaataaaaaaataagcttacagaacagaaagcaccgcaaggatgtcaggctatgaacaaagggatctaaatgaaactgcggattctgatgggtgggcctcgttagaaggtgctgctgctttcacttgcagagatcgagctgctctctgacttcacaaccagaggcccctttccaatgtccaaaccctgcagccgtccaagagagtcttgctgcattatgtctgggagagtgtgtgggtgggacagcatctggtggtttggcacattgggatgaggtgggtggaacggtggtgccaactgggcgctacctgggtgtgaggctgtattttgctgggaaagcaggaagaaggaagagttgtatggaacatgttgaaatctcatgttatatgtctcactggtattggtcgtctcaccagtagcaagcttaagcctctccagctcctgcttcagtgcatcattcagagcatcacgcagttgagcctgttgctccatggcctgcaaccttatcttgagctctgcattttctgcagaaagtccagttgtgtctctctgaaatagtgtgagctgtgctgaaagggtggtggcttcagtctgaagagtttgaacctttcgctcaagttctgttatataacgagcctttctttcttttgatctagctgctgattgtctgttagctagaattctcttggcgcgcttggggtcgatggcggcgagctcggccagctgctcggaggacatggccttcttggcctccatgacctcgccgaacacccctccggcgccgtcctgctggccccccgtccgccggcggcgggccccatcccgaagccgtcgaaggaggcg

SEQ ID NO: 4450 - DNA, 631 bp, Setaria italica
  Peptide Sequence Number=SeqID_70424
gagtgttttttcttgcttatcactgaaccttgtactgttgtgccaagaggccgcaggtcctacactcgaccaattggtttcttctctttctcagaaaacagaacagtggagctacaagaatagaccaattgcagatggtcttgtcatcccattgataggggaggaggctatggaccattctcatgcagagctgaatctaccaagtcaactagagctacaagaagaagaaaaagaagaagaaagcatagaaccacaagttcccttatacaacttcaagaggcggagtgaagcaaggaaggtggatgcaaatttaataaaggaaatcagcgggaaagcaaagagaagaaagcttgtacgcccttccttagaagaaaccaatgcttctacaaacgttggagaacttgaaggcacacaagacagaaaacaacaccatctggaagttagtgaaaaccaatttgacattgacctaaacatacctgctccatcagaagctactgatccagtggaggaggattacagaattgcagtgtgtcctagtgttatcaatgcacctttcaaaatagatgcaaacaagccaaactcagatgtgatagacaaccaaagaacaagatccgcctagtgcatctgcaca

SEQ ID NO: 4451 - DNA, 658 bp, Setaria italica
  Peptide Sequence Number=SeqID_70425
tcaagcgaacagtctagcatgataagcattctttacattttattttccatagtcctcactatgccttgtatggactggacgtgccactgccaactgtaccgcctactttcaggctaccatctgaatttctctcaaacaggtcatcgaagaacttgttggaagaaacataagatggtctgcgagccccagcagagagtggttgcttcaggttcccatttattggtgagtctaaactcgcagtgcgaagtggcactgcaaaagactgcgattgctgtaggggcctcaagttcggtggcacgttgataggcgagttggagcttgattgatgctgggacgatgataccacaaaagggttcgattccatgctgtcctgggaggcccatggtggcggcgggtaagctaatgagttgtagggcaactgtgactgggatggtgtctgttgctgaatgcctgcagcttgagactggggctgtgcccatggagctacataatttgcagttgcatgtccttgatttacattataaggctgtggatgactagctgttgagccaccttgattcaaggctggttcaggtgttattggggtatagggtggtgatgggtttgacgatatggtgagtgcaagaaggtcactcataacctggtcttctggagaagt

SEQ ID NO: 4452 - DNA, 1172 bp, Setaria italica
  Peptide Sequence Number=SeqID_70426
gctggttgctggtggtgctagagcctcgtgcaattggcttcccgatttctttgattggactagtgggtgccaacggcaacttgtcttgttggcttttgcttcttgcttcagttggtgctctgccgggagcgcgaactgtatagcgtgttcttgcgctgggttttcgtggattcttgctgtgaatttgttcaagttggggcggctcttcccctattggaggttgccatgaggccggaggagaggaatggtgcgatggggagggtgagggaccagttcccggccggcatgcgggtcctcgccgtggacgacgacccagtgtgccttaaggtgcttgagaccctcctgcgccgctgccagtatcatgtgacaacgacgaatcaggctgccatcgccctgaggatgctgagggaaaacagggacttgtttgatctagttatcagtgatgtgcacatgccagacatggacggctttaagcttctggagcttgtggggcttgaaatggacctccctgtcataatgttgtctgggaatggagagacaaaaactgtaatgaaggggataactcatggtgcctgtgactatcttctaaaacctgttcggctggaagagcttaggaatatctggcagcatgttgttaggaggaaattcagtaaccgtgagcgtgctaatgttgatggctatgaggagtgcaacaggccatcaaatgcagattttgataatgtacacagccaaattacatgtgggtcacctgaccaaagtgggaggcccagcaagaagaggaaggaataccatagtgaagaggaagatgaaggagaggagagtaatggccaagaaaacgatgattcttcaactccaaagaagccaagggttgtttggtcagttgaactacaccgaaaatttgttgctgctgttaaccagctaggaattgacaaagctgtgcctaaaaggatacttgagctcatgaatgttgacaaactcaccagggaaaatgttgcaagtcacctacaggcaaggcaccctcccgctttgttcaatttagcaagtactgaagtacagactctacctcaaacggctaagtgctgtggcatcgcaacaagctagcattgttgctgctttgggaggtagtgacccctttatgcacatgggtgcatttgaaggactccagggttatc

SEQ ID NO: 4453 - DNA, 239 bp, Setaria italica
  Peptide Sequence Number=SeqID_70427
acgtcgaggcattgctcagcttcggcattcggaaggaggcactgccattggtgatcgcacagtatccatctatactcgggctgcctctgaaagtgaagctagcggcacaacagtacttcttcaacttgaagctccaaattgaccctgatggatttgcccgtgcggttgagaatttgccgcagcttgtaagcttaaatcagaatgtgatcttgaagcctgtggagttccttcgtggacgg

SEQ ID NO: 4454 - DNA, 1198 bp, Setaria italica
  Peptide Sequence Number=SeqID_70428
tttcacaaagaataaagccttgagaacttcattccagtaacgtctcctataacttcccaatcaagcactggtacaaatatacatccaggcagatgggtcagccgcagatgactcctaatctattcgtgtatcagtgtcggaaggacgacgaccttcttgatgacatggaacctgaccttgatgtgctcagtgcatcggcaaatttatggatctccgcatccacaggtatggccttgccgctgttggaacagaaactggaaatgagagaatttaccctttcctctctagaagatatactcttcacatcagaatgatcacttctctcatttccagtttctgttccaacaggacaagatttcacactgtgcaaagaagaatgcgtactgaagccatgatcgccatgtcgttgactatcaggtacatttggttctgccatgaatgaagaatagctatcatgtgaatcccttccagttaagtcatcgaatgaacagcttgaaatagatactctcctttccagagtagaaacttcatggttctcctttccttttccaagcaccagttttcgaagcttagagaagaacttttttcttcttcgggtttttatgctttgtcatcgcagcgacatcaattgatacatcatccggttcacctgacgatgcccgtgaagaagagcattctgaaccaaattcaacatggctcaagtgactgtcctccgcaccagcgttggcatattccattatcagctgcttggccttcagttcagacttagggctcagggtcttgttaagatcccgtgcaacagtcttccctgatggagcatccttgtttctcagctcataccgtaggcaggcatttatccatttcagatataccaattcttcaacatctgcaaacctgtcactctgcagttgttcaatctctttagccaacttctcgtttcttgcttcaaccgatcagcctcctccaatgcttttacctccatgctatttttaggcttgggtacagggggtaggcgtgtaagctccagtctcctaataagatgtgcattctcctgctgcagccttgaattcgtagctctaagctctgttgcctccttttccagctcctctagcctcttcaatttattctcaacctcaatatgattgttcacctcatcagtctctttgtgctgcaatgaatcgactgttttctgaaggga

SEQ ID NO: 4455 - DNA, 310 bp, Setaria italica
  Peptide Sequence Number=SeqID_70429
tccccttctccccatcgcgtctgccccgccgccggggcttcgagttcgaggctagcgagtgcagccctctcccctgcgtcctcaccaccatggcggaagaggcccaggtaacgccgcccaccaccgtggcggagggggaccaggcgccggcccccaccaccacggcggaggccaaggcgctgccacaactcgagctgttcaactccatgacgaagaagaaggagcctttccacccgcgggtggaggggaaggtcggcatgtacgtctgcggcgtcacgccctacgacttcagtcacatcggccacgcgcg

SEQ ID NO: 4456 - DNA, 1175 bp, Setaria italica
  Peptide Sequence Number=SeqID_70430
cctgcacgccctcgagcactttcgcatccagcacgcagccgccgccgccacaaatttcccttctccccatcgcgtctgccccgccgccggggcttcgagttcgaggctagcgagtgcagccctctcccctgcgtccccaccaccacggcggaggccaaggctctgccacaactcgagctgttcaactccatgacgaagaagaaggagcctttccacccgcgggtggaggggaaggtcggcatgtacgtctgcggcgtcacgccctacgacttcagtcacatcggccacgcgcgcgcctatgtcgccttcgacgtcctctacaggtaccttaaattcctggggtatgaagttgaatatgtccgtaatttcacggacattgatgacaagattattaggcgtgcaaatgaacgtggtgaaacagttacaagcttgagtagccggtttatcaatgaatttcttctcgatatgactgagctccagtgcttgcctcctactcacgagccacgcgtaacagagcacattgagcatatcatagagttgataacaaagataatggagggtgggaaagcctatgtcatggaaggagatgtttacttttcagtagatagttttcctgagtatctcagtttatctggaagaaagttggatcaaaatcaggctggtgcaagggttgcttttgatacgaggaagcgtaatcctgcagattttgcactatggaaggcggctaaagagggtgagcctttttgggatagcccttggggccgtgggagaccaggatggcatattgaatgcagtgcaatgagtgctcactatttgggacatgtatttgatattcatggtggagggaaggatttgatttttcctcatcatgagaatgagcttgctcaaagccgagcggcttatcctgagagcgaagtcaagtgctggatgcataatggcttcgttaacaaggatgataagaagatggcaaaatctgataataactttttcacgatcagagatatcattgctctataccatcccattgctttaagatttttcttgatgcgcacacattatagatctgatgtgaatcactctgataaagcacttgagattgcatctgatcgtgtctactatattttccagactctatatgactgcgaggaagtgttagctcaatatcgggaagaggt

SEQ ID NO: 4457 - DNA, 600 bp, Setaria italica
  Peptide Sequence Number=SeqID_70431
cgccatcgcgcacttcactccctgcagtctaccaaatctgctcgacctgttaaagacagtggccagggtgtcaaagttggcgggattctccaagaaacccttgagctcggcggcgcggcgggcagacgggaaccggacggccggggctcgcgtcatcccgtccttgagcacgacgctgaaggccccgccggactccgcgatggccttgaaccctcggttcgtgctggcaacgaggcatccctcggtggtcgccattggcacgtagagccggcgaccgtcgagcaggagcggcccggcgacgcccacgggcagctgcacgtaccccaccggcagctcgcagcactgcccgaggatggacgcatagtcgaacccgtcaagcgggagtccctccatctccctccccgtgatccgccgcagcgcctctcgccggatcccggcagcacggcggcagtcccccagcctggtctccagcacgtacgacgggatcttcccggccacgaccgcggccacgatctcctcatcctcctccggcattttctccggcgcggcggcggggttccccagcagcgcgcacggggtcggcgcgggctgctgcggcgg

SEQ ID NO: 4458 - DNA, 596 bp, Setaria italica
  Peptide Sequence Number=SeqID_70432
atacaattagagatgaacacgatactagagagagagagagacaccatgcaggatattataaaactgttcctggaccacatcttttttctttacaaccacatcaccgacttcactgacgactctaacggttcaaaagtaaataagtttttaattttacagagctgaaaatacaaagcatccggcgcctgccgacgcgaattttttctcgccaaagcagaggaagcatccagtgggcgtgaagctgtgatggttccacgaccaaccccatggtcagattctccggattcacaggggacgggcaaaacaagatgctgaagggttgtcttcctttaaccctcctgtgcatgccacaaggatacctacgaaaccctttctcttccgtattcccaaggggtataaaacaactgggcagcattcagcattttttgggtttgtctgcttcctctgcagccttggacatatctctgctggatctgttgtatttcatgtggctctggaccagatggccagcggcctgggcggagatgagggacagctccccagcgaggaccgcaccagcaaccaccgaggccaggagcctcgcgttcgaccccggg

SEQ ID NO: 4459 - DNA, 1642 bp, Setaria italica
  Peptide Sequence Number=SeqID_70433
agctttatttaaaataaaaatactgatccgtggacaggtaggcaactggggcatacaattgagatgaacacgatctagagagagagagagacaccatgcaggatattataaaactgttctggaccacatcttttttctttacaaccacatcaccgacttcactgacgactctacggttcaaaagtaaataagtttttaatttacagagctgaaaatacaaagcatccggcgcctgccgacgcgaattttttctcgccaaagcagaggaagcatccagtgggcgtgaagctgtgatggttccacgaccaaccccatggtcagattctccggattcacaggggacgggcaaaacaagatgctggggaaaagagggggtggggtgaggggtaatcaacagtaaacgacagtagacgaactacgacaacatcaacgagcaatcaatcaaataggtcatactccaggatccataaggtgttttgacacctaaagctttcacggcctggtaaacatgacaagtcgactgaatcttctcttttacctgaagggttgtcttcctttaaccctcctgtgcatgccacaaggatacctacgaaaccctttctcttccgtattcccaaggggtataaaacaactgggcagcattcagcattttttgggtttgtctgcttcctctgcagccttggacatatctctgctggatctgttgtatttcatgtggctctggaccagatggccagcggcctgggcggagatgagggacagctccccagcgaggaccgcaccagcaaccaccgaggccaggagcctcgcgttcgaccccggggattccctgttcgcgcctttgacgccgagtaggtccaagcaggcagactgtgaggccagctgcgtgccccccccaaccgtgccaacctcgatagatggcatagtaacggagatgtggagatctttgccatcattaatagcttccaacattgtcatgcattgggaactctccacattctgtgcagggtcctgaccagttgcaatgaagatggctgtcacgatgttgcttgcatgggcattgaaacccccaagagctccagcaacagctgagccagcaaggttcttgattacgttcaattctacgagtgcctgaacgttagtcttgagaacctttttcacaacttcttccttgattattgcctcacaaaccacagactttccacgcccttcaatccagtttacagcagctgatttcttgtcagaacagaagttacctgatatgctgatgacatccatatcagggaagtcatcctggaggtagtccagtacgttctggacgcctttggagaccatgttcatccccatggcatcccctgtgctgcaggtgaacctcatgtaaaggttcctccccgccatcgcgcacttcactccctgcagtctaccaaatctgctcgacctgttaaagacagtggccagggtgtcaaagttggcgggattctccaagaaacccttgagctcggcggcgcggcgggcagacgggaaccggacggccggggctcgcgtcatcccgtccttgaagacaacgaacgactagaaaggaccccgaccggaactaccgacgaataggaccttagaaaccctacggttacgtagactagga

SEQ ID NO: 4460 - DNA, 986 bp, Setaria italica
  misc_feature (1)..(45): n is a, c, g, or t
  Peptide Sequence Number=SeqID_70434
nnnnnnnnnnnnnnnnnnnnnnnnnnnnnnnnnnnnnnnnnnnnngtgctagttccaagattcgatttttcttttgttcgatttctcatttctctccccagttcatgttctatcggcacgagaaatttacatcagacgacggctataagaatctgtacatttttttgatcgctctctctccactctccctacggaaaacacgcacgcgaagaagggaagcaaaaactagtgatgtcacacgagaaaccggcacgaaagaaaccagcagcagcctcaggaaccgggctgcggcggcttcaccggccgcgacgcgctgctctcgccagcggcgaggcccatctcgatgtccccgtccgcgtcttcgtgttggtggtggtggtgaagatgcggctgctgagggggcggcgacgcgccgccacacccaatcagcctccgcagcccgcacggccgcgccgcctcatcgacggcagcggcggcgacgtgttcttgcggtgggggaggcgtcgccatggccgttgactgctgctgcgagcgaccggtgctgacctcgtcctgggagccgaagaagagcacgttggtggggaagttgggggactccgggtcggcctccggcgtgggcacggcgggcagcacggggtgcaggggcggctcgtcgacggcggggcaccggcagagcgggcaggtggagtgggagcggagccacatgtcgacgcagtcgacgtggaacccgtggccgcagcgcggcagcacccgcgccgtgtccccggccttgagctccgtgatgcagacggcgcagtcgtcgagcgcctcgcctttgaccacctcccggcgcggcagcttggccatggacttgtcgtccagcccgccctcgtagcaccacgcatcggcgccgccgtcggccactcccgctcctccgccgccgccgaacatgaagcgcagccacgccgcgacgccgcgccccgcgggaggcggccggcccccccgcc

SEQ ID NO: 4461 - DNA, 400 bp, Setaria italica
  Peptide Sequence Number=SeqID_70435
caacattcacatttgagaaatatataaaggcttggaattatcccttttgattaattgaacacaatgacagatgaagaaaaccttatttaaaaggtgcatatattactggataagtggttcacatgtacaatgtatcaaaccattcttcttttcttttgtctgtttcttcgcaaaatgttgacactcattgtatgcgacacaggcaagagatcttcctaaggttgttgtagctgcctatcatttgattccctacttcatatttaatgctcaagaaggtgaagttattgaacttctgctgccgccttctgtcatttaacaacatgtacatcttctgatatacataaatattacgttttgtatgcaatttcaggttctaggagtacactatttgcagcatctg

SEQ ID NO: 4462 - DNA, 406 bp, Setaria italica
  Peptide Sequence Number=SeqID_70436
tatataaaggcttggaattatcccttttgattaattgaacacaatgacagatgaagaaaaaccttatttaaaaggtgcatatattactggataagtggttcacatgtacaatgtatcaaaccattcttcttttcttttgtctgtttcttcgcaaaatgttgacactcattgtatgcgacacaggcaagagatcttcctaaggttgttgtagctgcctatcatttgattccctacttcatatttaatgctcaagaaggttctaggagtacactatttgcagcatctgacccccaagttccagaatactgtgagatgcttaagtctgaaaactggcctgtctgtgcttgcatctcatacgattgcaatccaatgaatgcatctgaagaggcacacaaccttgaaacgt

SEQ ID NO: 4463 - DNA, 1475 bp, Setaria italica
  misc_feature (1415)..(1475): n is a, c, g, or t
  Peptide Sequence Number=SeqID_70437
ggaaaggaatgggaagagggaggcgctcgggtggctcgagtggggccgcggctggatggcctcccccctggatcctccccctcctcccctcgccgccagccacctcgccaacccgctcgagctgcccccgctcgacggcgtctccatcgtcgtcacaggcgccaccagcggcatcggcctcgagatcgcgagacaacttgcacaggctggggcacatgttgttatggcagttaggagacccaaagtggcgcaagagttgattcagaaatggcagaatgaaaattcagaaacaggaacaccactaaatgctgaggtgatggagcttgacctgctttcccttgattcggttgtaaaatttgctgatgcttggaatgctcgtatggcacccctacatgtgttgatcaacaatgctggaatcttcgctataggagaacctcagcgtttttcaaaggatggtcatgaagaacacatgcaagtaaaccatcttgcacctgcattactggcgatgttgcttataccctcccttctccgtggttctcccagcagaattgttaatgttaattcaattatgcacactgtaggttttgttgacgctgaagatatgaacttgagaaagcggaaatatagaagttggttgggatattcaaatagcaagttagcgcaggtaaaatttagtagcatgcttcataagagaatccctgcagaagctggcatcaatgttgtttgtgcttcccctgggatcgtcgacacgaatgttgcaagagatcttcctaaggttgttgtagctgcctatcatttgattccctacttcatatttaatgctcaagaaggttctaggagtacactatttgcagcatctgacccccaagttccagaatactgtgagatgcttaagtctgaaaactggcctgtctgtgcttgcatctcatacgattgcaatccaatgaatgcatctgaagaggcacacaaccttgaaacgtcggagctggtttgggagaagacacttgagatgattggccttccgccagatgccctggagaagctcatcgctggggaatcggttcagtgttgttatggtcaacaggaggcagaatagaatatcacacagagtcaaatcataccgcttttagtttgcagttagtggtggtttgttcctgttcttgattagagcacctttgttgtatctttctgatcctgaatttgaagggggaaaacacactgaggaagagagagaagaaaactgagtttgttaaaagttatgcatgtttgttctagtttgaggtaatggggaggatttttttaaatttgcgtcaaaaaaggatattgtaaagagttgtagaaatacatttcccctgttatttgtgatcactgatcaatgatagtgctatacttgaaacaagaattgaagaaaaagnnnnnnnnnnnnnnnnnnnnnnnnnnnnnnnnnnnnnnnnnnnnnnnnnnnnnnnnnnnnn

SEQ ID NO: 4464 - DNA, 596 bp, Setaria italica
  Peptide Sequence Number=SeqID_70438
aactacactaacataattgtcacatataccagcataagcaaatcattcagagaatcctccaaaatagtataaagggaacaagatagagcaagatgattaggaaaatttactaaatcaaactggttttgcaaactggaacatgaataaatataaaccattttcagctgagactcataacaaccaaaaaaactaacgagcagactttcctagagtcctctaatcaaggaaagattcaagttctgactagcttcagaccaagagaaacaaaaggaaatagaagctaaaagattttgcgactaaatcaaaacaaaacgatggatcaatctggaaagaattgttcacactattaggttatcgccaacagaacaggaaaatagctaaaaaattcatatacaattaacagacctaaatgcttacaaagattaaacccaaaatagattgaaatacattaaaataatgcacataacagtttagttgttcattattaaatggtggacactaattaaaataaacccctgcagccaagaaataactaatatggccacaatatgcgtagatagacagcacaagcaaactgtgaagaagattcaataaaa

SEQ ID NO: 4465 - DNA, 1352 bp, Setaria italica
  Peptide Sequence Number=SeqID_70439
gcagcaacccgcggcggcgacgagtaaccaaccggaccacgccattgccaatcgcccgcccgcctacgagcccctgcctgcctcgcgcccttgcccggccggccactgcgccttcctctcctcgcgctgcgcggttctctcgggcagcccggattggcggggtggtttctttgaccgcttcttctgagttctctctcggcgccgcgctatggaggagatggggaagagggtggtgaggaccgtccgcgtgcggaacatctcagatctggcgacggagcgggaggtgcgcgagttcttctccttttccggcgacatcgagcacgtcgacatcagatttgacggagtggcgacggggaggacggcctacgtcacattcaaagatcccaaagccctcgagattgcccttctcctatcgggagcaacaattgtggatcaagttgtgaacataaccccagctgaagattacatctacatccctgttactgaacagcaacttttggtcagtgaggtgacaagtacaagttcagctcctaatgcggaattggagtattccccagaggccaatgccagtcccaatagccgtgtctatgtgagcaaggcccatgatgtcatgacaaatgtgattgcaaggggttctgcaattagacaagatgctgtgaacaaggctaaagcatttgatgagaaacatcagttgagagctaatgcatcagcaaggatcaattcctttgataaacgtgttggcctttcagagaagataaacaatgggatatcagttgtcaatgaaaaggtgaaatcagtagaccaaaggttacatgtttcggacaaaacaatggctgctttgctggctgcagagcgtaagcttaatgatacaggctctgctgtgaaaaccaacaggtatgtgtctgctggaacaagctggctgaatggcgcttttagcaaggtcgccaaggctggtcatgttgctggctcaagaaccagagaaaagttccaattagctgtgtcaaatctaacagccaaaggccctgctgttgttgcttgagcttgctgtgctggttatgtaagctcttcttcccgaggaaaatctactgggagtccttgagcaagcatctcccttcattgtgtggacagtgtggaaagtaactgtgtgtttcaccgttgtcgtccttttttccttgggtgcaggctttttagtaaatcttctgaggtttggtatatagaggtgctcagattttggtattttagaaaccccattcttttagtgatgttaaattgattataggtgatagtgacattctattgactcagtgtggattcttgatctcattgattactattcttctaccggtaaaaaa

SEQ ID NO: 4466 - DNA, 305 bp, Setaria italica
  Peptide Sequence Number=SeqID_70440
ccgcgccctgccttcaggaggaaaccacgcagcaagaaaagagaaacccgcaagccgccccgcccccgccgcaggcgcaggtcgtcgccgctgtcaaattcgtcggcggttgcggcggcgcaggccggaggggttggccgggccgtgggggcgcgcccggtctggtgggatcccttcaggcttccgcagattcccgcgcgggggtgtgttttgatttggatgagaggagcccggcggcgggatgggctcctcctcgcagggctcggcggccgtggcggcggcccgggtgacctctgcgcgctcga

SEQ ID NO: 4467 - DNA, 1828 bp, Setaria italica
  misc_feature (1)..(59): n is a, c, g, or t
  Peptide Sequence Number=SeqID_70441
nnnnnnnnnnnnnnnnnnnnnnnnnnnnnnnnnnnnnnnnnnnnnnnnnnnnnnnnnnngtcaaaattctgtcagcgctcttgctccaacggtgttatttacaaaatgttacagggcaaaattggcttgcacttcaacaagcggtatgatcagtctgttttgtccatatggtcccattttgctcacatccaaatggataaaaatgggaaataaaatgctctaggaaacaatttacagacatcagaggaaatccagaactaggaaaatcagctgctacgatcttgtcactgaatcggagggagttctccctctgtaggcaccggccgttgccaatcatacagcatccagctttggaagacagaaactcataattcaagcacttccacggaaactgcagtattcatgagatcagcacgaccctgtcagcgggctaaatgttctttatgatctacagaacagatgaaatgtctgctgccaccttggcttcttctcatttctttttcttggtacgatgagtggatgatgatataagagctgaagaaagcaaagaatcgacatcctcacgttgtcgttttctttctgcaattaaatcatttttactagttaatttagtggattggcttttcttgagttctggcacatggctacttgcttcattgaaatgagatggacgtgagggatccacttgtgttggattcccaggtcttggttcctcggagaacctcctcctcttggccttatcagccatcttcgtatcaggatttgttggtggacaagcaccattcttatttgctggatccaaaattccatcatgtttcactgagcgacccactttatttggattatcacatctaggcttctcagaaaacttccttgcacctttagccgtttgtatcaacttctgcagatcaggaactgctggtggagaaacatcatctttcttacttgctgatttcaagtcgagaccatgtttcaatgagcccttcggattctgaaacaagtcttggtttgacgaggccttgttagtttccttgcaaacattctgctccacaggtatattcaattccatctgccttctaacactggagccttcaagagagcatccttttgccaagcctttagaaagctccagatgattatcattatgcacagtcgactttttaacctccatttggtttctcatcacagaatcctgatcagtgttttcttgccatgagctcttggtggatctcatattactattctgcttttctgacctgtctacaaaagatctcacactcgactcttgagctctaggaaccttttggtcccagcatgatgcccattttgatttttctttaggtcttttaccatctttttctacattcctggcagcatgtgttgattgctccttctggagtcgagcatcaactctctttgagctcatcatagcagcctttccgttatccttcttcttgagatgactagtgtggtagttaccagtagtaccatgtatatctctggaatgaggttggacctcttcaaatatcaaacgatatggccgcttaattgagatgaacagattccgctcttcagcattccgtactaaggaatcccagtgtgaattgatccgcaaagttcttgcatttccaacaatccatagagagagcctggcacgtgtcagtgcaacattcatgcgtctaacatctgcaacaaacccaatactgcgtgcttcaccagtgcgatgcctctcatctgatgaattagaggctctaacagttgacaacaccaagatatcaacttcacgaccttgaaatccatccacagtatttatctccatctcagcaac

SEQ ID NO: 4468 - DNA, 220 bp, Setaria italica
  Peptide Sequence Number=SeqID_70442
ttactaatgctctcatcaacgcatcatgcaaagcaggctgtttgaaggatgcaaagatgatcttaactcgtcttgcagctgaaggcatcgagccaaatagtgcaacctattgcatcttgcttcattccctttgtgacaagaaattgtggtctgaagtaggtgatttgctttcacacatgaagcaggcaaatcatgagcctgatgttactgcctacaataa

SEQ ID NO: 4469 - DNA, 406 bp, Setaria italica
  Peptide Sequence Number=SeqID_70443
gtgttgaagtggttgttacggaagaagacacaaagctctctttcgttaagtccctcttgtaaacagaagagactgtgacattgaaatttgacaatgtgataaataagaatacaactgaaaaagataacacatagaatagagatatacccatagacagttagctggttagcagtggtctgcagaaaattatcgatcagctcccctgaaaataatcaattcaaagtgtgaagccaaatatagtaaataaatcattcacagccacagagattcataaaagtagtaaataaatgttaaataaatgaaattctcacattgatgttctgtggccttgtcttccaagcaatcactggcttccccagacttgtcagcctgctcagcaagaaccacctcccctcatacactggct

SEQ ID NO: 4470 - DNA, 987 bp, Setaria italica
  Peptide Sequence Number=SeqID_70444
tacctccatgttggaggatgaatgactatgcgaagtgtcaaaagaaacagtttcagctttggatagattaaggaccctcatcagttcctcttcttcctcgcggtcgcctcgccttatttgtgcttctgagtctgatagtgtatgttcatcgaacgatctcccttgagaaacactgggtgacggaatctttaatgttgcagttgttgcagcagcaaaatccacagtttcttcctccatatgtttattctcttctgttggtttccctgacttgaattcagcaagcccagaagcaagagcattgtaggactttgatccaatagcactagcagtttcagtatcctgagggtctactatccatccatggtatagagggatgtccagaagatcaaatatggcacgttctcgagtgaactcaaagtcatcaatcttcctgaacatcacattcacatcaatgcctgttgcgaggagcgggagaaggtcgatcgcgtccgcgatgttctgctcccggttgcggacgtactcctcgtccttgtcctgtacggcgctgttggaatcgatgaggcgctcggcaacaagcgagagcaacttctgctgcgacacctcgctggcatctgggttcaggctgatcacattcttcagcagcagcacgttacagatggcgagtagcgggcaggggccgttgtcgttctggtagacgatgggcgtgcggcgtcccaggaagtcgacggccctcgtccggtgcatcacctccggcggctcggcgggcggcgcggccggctgggactggggatccacctccgccgcgcccggcggggccaccggcgcggggaggtggggcgaggggtcggacgacatgggcagatctcccacgcgatcgccggggcgcggaagtcgccggaaccctaaccctagggcgtcgccgcaggagtcgccgtcgcggggaggaggcgcgcgtgcgcgatgtcgcgaggtggattggagttggag

SEQ ID NO: 4471 - DNA, 547 bp, Setaria italica
  Peptide Sequence Number=SeqID_70445
ttgggcctctgccttggaccaacaacaagtcctggtcggccggattgagtcgcttggtgctgcgttggaggttgctgctgctgctgctgctgctgttgctgtggcggtggaggttgaaatctttgaggttgccgctcaaactcctgctgttgaagtgctatagctagctctagatcagagtttccagaagtggagttgtcaaattgagaaatataatcagcagtactcgtcatagcttgctgttcattccatgaatcgtttcttggagtttcagccttaaatggtgtgaagttgctagtaagaaacaccccatctccattcacctcatccaacttttgccataccaaatcagtttggcttataaaaccttgatcggttgctaggagatataaacttccgttatacttgaacatagtgttgaagtggttgttacggaagaagacacaaagctctctttcgttaagtccctcttgtaaacagaagagaccatagacagttagctggttagcagtggtctgcagaaaattatcgatcagctcccattgat

SEQ ID NO: 4472 - DNA, 2224 bp, Setaria italica
  Peptide Sequence Number=SeqID_70446
tagatcagagctgccagacatagaaaaacaaaataagacacgttagaacttaggtaatacatgtgcaaaacataaagtgaaacaacaacatatcatacacaaagaacagctggtgcaatgatcgtatttaagtctgaattcaacttgtgccactgtgcattgtgcaattatcttcccatgtcattcacatcttgtcaaacaaactaatgtagtgcaaacttgaaaatgggcttccaggaagaacaagtagctcagccatcaattaaacatcagaatatctctcataccgaactgactatggatcagctaaaaccactaatgatgaaggtatttaattaaaccaaaggtcagatagagctaatgaacatgctcagttcacatatatggtgcaacacattgaacaaaatcaagatctataaaccatgccaaatactggtcatttaaatacatgttcagccaaaagtccaacacatgatccccagccaaaacatcaaatagtcaagttcaaagagagccatggtgcttggttaacagcaaaatagtgtgccccaaaaaacaagttaaacaagccaaaggactacaaaacagagagcaatgagcaatagatagggaaaaaatacggcttcaattggcataacattatagcccaactgatggacacttgttgcacagcacaaattcaaacatgtattcacatggctgagactgccgaactaaaaaaattgtacaatacctggacaattagacataataagaaaagataggtaggaagaacatactttccagaagtggagttgtcaaattgagaaatataatcagcagtactcgtcatagcttgctgttcattccatgaatcgtttcttggagtttcagccttaaatggtgtgaagttgctagtaagaaacaccccatctccattcacctcatccaacttttgccataccaaatcagtttggcttataaaaccttgatcggttgctaggagatataaacttccgttatacttgaacatagtgttgaagtggttgttacggaagaagacacaaagctctctttcgttaagtccctcttgtaaacagaagagaccatagacagttagctggttagcagtggtctgcagaaaattatcgatcagctcccattgatgttctgtggccttgtcttccaagcaatcactggcttccccagacttgtcagcctgctcagcaagaaccacctccccctcatacactggctcttgattttcaaatgccacatttgtgctgccaagtatatgctcctcgccttgatatattggttcacattcctggatgcttgaaggtagaggctccgaactatctaaagaaccactgttctcatccagttttgttgtaacatcacctggagcagcttcacaagctacaactgaggagtcacaagtgacctcaatatcagtagactgtccatggatttgtacatcaaattgttctttgaagttttctttatcagcttcaacgagagtaggtgcagcaggctggtggtcactgggaacaaaagattcatgagatggacaagctggagttgattctgaagattgaacagatatgtcgaggtcccctggtaacatattctcgattccactgtcctctggttctttagatatcaaagcttcttgggattcttcaggcacttcactgccattaacagcaccatttgtgactggtagcacggaaccatcatcactcacagcatgattaccatgttcttctttttttgttgcctccaccacctcaggtgcctctgaccgaaaactctcactttgtgttgtttcctccatgttggaggatgaatgactatgcgaagtgtcaaaagaaacagtttcagctttggatagattaaggaccctcatcagttcctcttcttcctcgcggtcgcctcgccttatttgtgcttctgagtctgatagtgtatgttcatcgaacgatctcccttgagaaacactgggtgacggaatctttaatgttgcagttgttgcagcagcaaaatccacagtttcttcctccatatgtttattctcttctgttggtttccctgacttgaattcagcaagcccagaagcaagagcattgtaggactttgatccaatagcactagcagtttcagtatagttattccttgttagggtttctttacttttaattttaccttttaatttttaccttttttaattttttttagtttttta

SEQ ID NO: 4473 - DNA, 311 bp, Setaria italica
  Peptide Sequence Number=SeqID_70447
aggggaatcttgatattaagaaatagtgcaatgaagttctttacaatatggcacgcaactttatcgaggaagagcggtgcgatgtagtaatccccctgcaggtactcaaatgttctagttgccttctgccggtaatcaaacacgatatccgagtctttgccgaggaaattcccaacgaagaggtcgtcgacgatgccggcccgtgcgccgacggcgatgtccatgttgtcggcctccttcccgaggcggtataggtagtcgtccccgtccgcgtccttcgccttccacgtcgattaacgaaacgaaattaa

SEQ ID NO: 4474 - DNA, 530 bp, Setaria italica
  Peptide Sequence Number=SeqID_70448
tagtaagggtacgtacttcttttctattaagtagtagtctaaacttgggtaattgttcttacaagaatgcaaagaggaagattgaaaggggcattgctttcccaacctgtgtatccgttaataacacagtatgccacttctcaccgcttgccactgatgaggcagttctggaagaaaatgatatggttaaaaatagatatgggctgtcatattgatggttttattgctgtggtggctcatactcatgtaattacaaatgggcctgtcacgggaagagcagcggatgttcttgctgctgccaacaccgcagcagaagttgcaatgaggcttgtgagacctgggaagaagaacaaggatgttactgaagcaattcagaaagttgctgctgcttatgattgcaaaattgttgaaggtgttctcagccatcagctgaaacaatttgtcattgatggtaacaaagtcgtgctcagcgtctccaatgactagaacaactaaaggtaggaatagaataagaactaagaaaatttaaa

SEQ ID NO: 4475 - DNA, 371 bp, Setaria italica
  Peptide Sequence Number=SeqID_70449
cgaagcagtgagtattttccgtcccactccacgttccccgtgctcgattcggcccgtttcgcttggtttctgtcactttctagacatttctgatcgctttgggtgttgttcgttctggtgtgcgctgcagatgtcgtcggacgatgaggtccgggaggagaaggagctcgacctctcatccaacgacgtcgtcaccaagtataaggccgctgccgaaatcctcaacagtaagtaacctcgccttctcgccaaccttatcattttgtgattgacctgctctctgttgctgccgcttgcctggggtagaagggcggtgtttggattttttaaggactggttgccgctggtatttttgaattgctatgggtagc

SEQ ID NO: 4476 - DNA, 754 bp, Setaria italica
  Peptide Sequence Number=SeqID_70450
tgttgtagtattctagtcctagtaagtttcccttattctattgtccttttctaccgtcttagggtctacttggaagagaaacgtgcgcgcctaggcttggtggaatgcatgaaccatgagctattgcagccatacccagtacttcatgagaagccaggtgatcttgttgcacacataaaattcactgtgctgctgatgccaaatggatcggataaggttacatcacaccagctacaggagttacagccgacaaaatccattgaagacaatgctgagataaaggcatggcttgctttagggacgaaatcaaagaagaagggtggtggaaagaagaagaaaggcaagaaaggagatgcagcagagcctatggaggaggcaacaaatggtgctccaagccaagaataattctgatttttggaattgctacctctagttttgttcatgtttctttgctgcgtctgatggtgttatattacattcagttgtggaaaaattgagtactgtttcaagtgtctaagaaatgacgcatcctgctgcacattatcgcatctaatgacataattatctatgaggcaaaaacataaaaaaaaaacaagcacctggtgttgttgtgccatgatgctctgtaatgtcaaatgcgccaagtattgctgctgcaatagggcggactgttgttgtaagaacacggccggtgatgataagatgcttgccgcgagagcctgtttgttaagtaccttaagtactaaaggtaaaa

SEQ ID NO: 4477 - DNA, 1391 bp, Setaria italica
  Peptide Sequence Number=SeqID_70451
cctcaccccacccggctgccttgcctccctttctaatccccctctcccgaagcccaaaccctaaacctaaacctctcaccccgccgccgccgccgccaccaccaccactttcgccgccgccgcgactcccttccagacgccggcgccccccgccttcggatcgaagcaatgtcgtcggacgatgaggtccgggaggagaaggagctcgacctctcatccaacgacgtcgtcaccaagtataaggccgctgccgaaatcctcaacaacgctctgaagctggttgtatctgaatgcaagccaaaagccaagattgttgacctttgtgagaagggcgactctttcataagagagcaaactgggaatgtctacaagaatgcaaagaggaagattgaaaggggcattgctttcccaacctgtgtatccgttaataacacagtatgccacttctcaccgcttgccactgatgaggcagttctggaagaaaatgatatggttaaaatagatatgggctgtcatattgatggttttattgctgtggtggctcatactcatgtaattacaaatgggcctgtcacgggaagagcagcggatgttcttgctgctgccaacaccgcagcagaagttgcaatgaggcttgtgagacctgggaagaagaacaaggatgttactgaagcaattcagaaagttgctgctgcttatgattgcaaaattgttgaaggtgttctcagccatcagctgaaacaatttgtcattgatggtaacaaagtcgtgctcagcgtctccaatgctgacactaaggtggatgatgctgaatttgaagaaaatgaagtatatgcaattgatattgttaccagcactggggagggaaagcccaagttattggatgagaagcagaccaccatctacaaaagggctgtagacaagaattatcacttgaagatgaaagcatcaaggtttattttcagtgagatcagccagaagttccctatcatgcctttcaccgctagggcactggaagagaaacgtgcgcgcctaggcttggtggaatgcatgaaccatgagctattgcagccatacccagtacttcatgagaagccaggtgatcttgttgcacacataaaattcactgtgctgctgatgccaaatggatcggataaggttacatcacaccagctacaggagttacagccgacaaaatccattgaagacaatgctgagataaaggcatggcttgctttagggacgaaatcaaagaagaagggtggtggaaagaagaagaaaggcaagaaaggagatgcagcagagcctatggaggaggcaacaaatggttctccaagccaattcaagtagaagaatacaagaccaagaaagttaccctaatacaatagaca

SEQ ID NO: 4478 - DNA, 259 bp, Setaria italica
  Peptide Sequence Number=SeqID_70452
tcgacttcgacaaccccatgggatgagatccccctcctcgccatggccgcgtccctcctgccccccgccgccaccctcgccaagaagtaccccaccctcctccacccgtccggcgccaggccacacgcccagaggctgatcttcaggtgcggcgcgaccagcgacgccgcggacgatggctgggctcctgtggacgagctcaagagctcgctgcaggacccgtccgacacggtggccagcgacgccgccggcgcgggcg

SEQ ID NO: 4479 - DNA, 1491 bp, Setaria italica
  Peptide Sequence Number=SeqID_70453
agactgtgaagaaaatgtttagctcttttgctggttatctggagagctactccaagaatcatcgagcaatcaatgctccaccttctaactggggtgtgataggatttcctgtacatgctctagcctctgcgttgcagcgttggtctgggtgaaatggccttgcctgtcagtgcaggaggagctcaccgagtgcaaccgcgaccgggaggtctcgggcgtcttcatcacgctgcacgacggcgccaacatctcccacctcaccggcaccatcgccggccccgccgatagcccctacgagggcggcaccttcaccatcgacatccgcctccccggtgccgattgatgacattctcgttacacaatgctcctacatatatgtgttgttatgttttctctgatcatgaacaactagcactgacagattccttacatccatttcttcagccttttgatttagtgattattatcttgccattttgtacatgtctcccttgtgttcctaagttctgctgccctctctagcagttcagctctgacttctcctccgtcctatcttgaaggcaccctaacatcagtagccaaaatggagcaatttgcttggacattctgaaagatcagtggagtacagcccttactttgaagacagcactgctttcccttcaagctctgctttcttctcctgcacctgatgatcctcaggatgctgttgttgcacaacaggtctgaactggttgtttcctgttgtggatctattttttagtgcactatatatttaatttttgcaatttaagctaaagttggttgagagttaaattgccatagcctgtcattggtggattcccatgaaatgagtcagaatgactgtttatccagaaaatatgtttatgctgcataattgcctcgtcatgctgttggttgaatagcgtcatacattttcgcagcaaagtaagcatgagattctatgtgaactttgttgcatccatcacatgagcttgtgcctgcagcgcacttggcaatttttacagttgtaatgttacacaggtgaatatgtttgtggtagtcctgtatgttttatttttccgctatagaatttttccactagtgcaattagtcctgcatgttctccatgtgctaatgcagatgctagactgcaagatagggcgtaaggtagttttatttggttttcagcaagctcgtatgcatttagtatggcccacaaggatatataacgctgtatggaaagctgggtgtaagaagtttctaatgaaccgtttttactatgacgtatgaccatgtcctcagccgaaatgaaggatagcaaattccaaggaaatacctctttgatatatttgtccagcaacacagctaggtgctttgttggagtgtgctagtgatgttgtggttgttactttgataacagactaggccactagccagtcccagaggaggcattatatagcctacaggatgggcttagtaacttcattctgg

SEQ ID NO: 4480 - DNA, 506 bp, Setaria italica
  Peptide Sequence Number=SeqID_70454
ttcattctggaatttgtactgcaagaattagtccagtgatgcagagtgtaagcataagctctgaaaattcactgcaagaacgaatggaacagtgtggacccataaagctgtacaagaactttacctgcgtgattatccaacattcgctgctacggctcgctactggacagaggccttcgcaaagagtgcgtccactggcatggaagagaaggtgcagaagctggttgagatgggcttcccagaggatcttgtgagaagtacccttaagagtgtcgatggggatgagaacctggctctcgaaaagctctgctctggctaaaccaccctatggctgatatatgaactgtaaattgcatcccccttggttattatataagagaacaatgcctgctaattctcctgctctgccatttcagtgtggccgtttattaagacaatatatatagggggattggaccatgggactgaagcgaaaaactgaaaaactgcttatgataaaaaaaaaa

SEQ ID NO: 4481 - DNA, 950 bp, Setaria italica
  Peptide Sequence Number=SeqID_70455
acctagaatacttcttacttccttccgcccccttcctgcccttcttcccatctcgcgccgctctccaggaggcgacggcgggtcggtgccgcgggcggggcgcgaggggagggagcggggggcggggcggcgacgatggtggacgtctcgcgcgtgcagaaggagctcaccgagtgcaaccgcgaccgggaggtctcgggcgtctccatcacgctgcacgacggcgccaacatctcccacctcaccggcaccatcgccggccccgccgatagcccctacgagggcggcaccttcaccatcgacatccgcctccccggtggatatccctttgagcctccaaagatgcagttcgtcaccaaagtatggcaccctaacatcagtagccaaaatggagcaatttgcttggacattctgaaagatcagtggagcccagcccttactttgaagacagcactgctttcccttcaagctctgctttcttctcctgcacctgatgatcctcaggatgctgttgttgcacaacagtacctgcgtgattatccaacattcgctgctacggctcgctactggacagaggccttcgcaaagagtgcgtccactggcatggaagagaaggtgcagaagctggttgagatgggcttcccagaggatcttgtgagaagtacccttaagagtgtcgatggggatgagaacctggctctcgaaaagctctgctctggctaaaccaccctatggctgatatatgaactgtaaattgcatcccccttggttattatataagagaacaatgcctgctaattctcctgctctgccatttcagtgtggccgtttattaagacaatatatataggggattggaccatgggactgaagcgaaaactgaaaactgcttatgataactccagagttcattcaaaaaaaagtctcacattaagatttcatacgaaaaa

SEQ ID NO: 4482 - DNA, 1340 bp, Setaria italica
  Peptide Sequence Number=SeqID_70456
ccccatccgcgtctcgactcctctcctctcccttcgctcgacgcaatcccgcgggagctcgaaaccctagctcccaaatccgagccccggagccgctgactcctccggtgcccggcggcgattcggcttccgtagccgttggcctggggctccaccgctccccggcggcatcagcatcggcagcaggcgacgggcgtggctgcgctcgaggaggcgcctcgtctcggcgggttcccggtctcggaggccttccctcgggcggttccgtggtgtcccgagcccggatccgcggcgatctgggaggggaaggcgatggacacggcgatccagccgtgttagcccccaattcggagggtttccggctggcagaggcggaaaggttcgggccttcggcgggggcgtttgatcggctttgtccctgcggcgggcggcttggcttcttccgctacggtgtaggagtggagctcacgagccgacgaggcggtggagataaaaaaaactttgcttgtacacttgtttatgtgttcatttgttcctgcgatttgtcctggttcaaagcatcaattttccgctcaaattaagggcgaagacagtttttttgttgtttcttgctggtttctatcgaataatccctttattacagaaagaagagtggaaaggcaacaaaaggaaaataaaaaacaaaaaagataaaatcagaagaaaagaaaggggaaaaattgagtgggcaggcaaatggctgtttattacaaattcaagagtgctagagactatgactcgattccgatcgaggggcaattcatttctgttgccaacttgaaggagcgaatttttgagtccaagcatcttggcaggggcacagattttgatctcatgatctcaaatgcccagaccgatgaagagtatgctgatgaggctactatgataccaaagaacacatcagtattgattcggcggattccaggacgaccaaggaagcctattgtcacagaacctgaagagtccaaagtcacagaagatgtgttagaagttgcgcccgctgctagtgcttttcttggtgattcatctatgaaatatcctgaagaatctgagtgggatgatgagtttggcaatgaattatatgtttctgattcagtcctttctcagcctgctagccaggcggttgatgcttctgaaaataaaattgatgaagatagtaaaataaaagcacttattgatacatccgggcttgactatagccaaatccctgatggttatggttctggaagaggctatggtagggggatgggtggcagaatgatggccttgtgtggctttggacgtgggctggaacgcgaaga

SEQ ID NO: 4483 - DNA, 254 bp, Setaria italica
  misc_feature (200)..(254): n is a, c, g, or t
  Peptide Sequence Number=SeqID_70457
gttaggtaaccttggctgttccatgtgtgatggatgaatggtaccatgaagacagatctgccaggacagcagcacttgtcagcttccattctctgcagatttcttagatctatatgttttgccttcaccactggatgcatctagatctggctatttcctgagggttgaagtggaccaaatgaaatgatggtttggaagtnnnnnnnnnnnnnnnnnnnnnnnnnnnnnnnnnnnnnnnnnnnnnnnnnnnnnnn

SEQ ID NO: 4484 - DNA, 283 bp, Setaria italica
  misc_feature (27)..(27): n is a, c, g, or t
  misc_feature (245)..(283): n is a, c, g, or t
  Peptide Sequence Number=SeqID_70458
cttgtaccatttggctgcagattgtgngtttttctgctagcactatgatatagagttggctttacaggctgtgcggtttgatgaaggcaaggtgccaggggatgttgaggcacactggtagtggtaggttttactagttaggtaaccttggctgttccatgtgtgatggatgaatggtaccatgaagacagatctgccaggacagcagcacttgtcagcttaaccaaaaaaaaaaaaaaaaaacnnnnnnnnnnnnnnnnnnnnnnnnnnnnnnnnnnnnnnn

SEQ ID NO: 4485 - DNA, 466 bp, Setaria italica
  misc_feature (1)..(79): n is a, c, g, or t
  Peptide Sequence Number=SeqID_70459
nnnnnnnnnnnnnnnnnnnnnnnnnnnnnnnnnnnnnnnnnnnnnnnnnnnnnnnnnnnnnnnnnnnnnnnnnnnnnnntttttttttttttttggttccctaccaaacttcatgaggattccgattgattgatggatgcatgtatgtattttgcgaggttttttttatgtggacacctaaactagcatatatacatcacacatttgctcagagttcaaacaggtatttacatgttgacacgccaaccactcaaacacatcgactagcagtagcagagaactaatggaagaagaaagtgattcgaaattactgagcagcaggccaggaggaggattaattactgattagaaggataggagatgaaggtgattaatccattgggtttggattgaagacaagcaatggccatggattgcttgttgcctgcctaaaagcagagcgggcacatgacgaggccgttctcgt

SEQ ID NO: 4486 - DNA, 517 bp, Setaria italica
  Peptide Sequence Number=SeqID_70460
cgccgcccccgtttactagctgcgaccgacaggttactgcaccctcctgaatcctctcgcactcgctcgctctcagctgtccgttcctccgttcctttctcggcctctcgcgcgagcaccgaggcgtaccgggaggccaataatgtggaacaagaacaagccgccggagctctactacgagatccttcacgtcgccagggacgcctccccgcagggcgtccgggcggcgtacaggaccctggcccgccaatggcaccccgacaagcacccgccggagtccaggcccgaggccgaggcgcgcttcaaggccatcaccgaggcctacaaggcgctgctggaccagcaggagaacagggcggtgttcgccgcgcgcgaaggcggcgggaggagtaggcccgccgagaaggacctctgcggctgcggcggcgagaacgtcgccactgcggtggtgagagcggcgcggggcgagaagcccggggccgcgcccccctgcacgctggcgcgggaggagccggcg

SEQ ID NO: 4487 - DNA, 265 bp, Setaria italica
  Peptide Sequence Number=SeqID_70461
gggggagcggtagagggttaggccgaggaggcgcggctggttggcgccgaacgcctgggagcagagcgggtccatgccgagcgagagcccggacagcaccgagtaaccggtgatgttggcgaaggcgatggcgagggacccggccgccagcgggaggtcgccgatggagcccaggaagaacatcgacagggccgtccgcgagtagagcagcagcgccgtcagcgcgatcgggaacgcgagccggcacagcgccaccgcctcccgg

SEQ ID NO: 4488 - DNA, 300 bp, Setaria italica
  Peptide Sequence Number=SeqID_70462
cgctgtcgtaggctccgacgtcgtacaggatccgcttgttggggtccgacagaacggcgtaggctccctggatcttctggaacctcaccttggccgcgtccgcgccgccggcggagctccccgcgcaggcgcacttgtcggggtgccatttctgaccaagaaccgcgccgcagggtgagcaagggggccgatcgagggtcccaagaaacagagcagggcgagaagcagaggagccagaacaacgaacggaccatggcgagcttgcggtaggcgctgcgcagctcggcgtcggagcagtcg

SEQ ID NO: 4489 - DNA, 325 bp, Setaria italica
  Peptide Sequence Number=SeqID_70463
taaacgacaccgccgcccgacaggggccgtctgttggaaagcgacgcgaggtcgacggacggacacggaccggagccaactggtcacgtcacctggaccaggagggccaggagcatctgcgccagaaaagtccatgtccacggcggccacgggagtgtccgggggagaagaggtggaaggaaatggtgaggggatgctggagaccaacagcgacacgcaccggcgggaaggaggacgacggcgacggccgcaggaacagctcctcaaactgccgctgcatgtcctccaggctctcccccttgccgttctccgctccgttctggct

SEQ ID NO: 4490 - DNA, 278 bp, Setaria italica
  Peptide Sequence Number=SeqID_70464
ctggctgggcagccgtccagccgatactggcaaatgcagtggagatgtgcgtacgtcatcgtcgccgtcgctgtcgtaggctccgacgtcgtacaggatccgcttgttggggtccgacagaactgctcattttttcagttagttaaaaaccatatcacttttcctttctttattattttactatcagtttttaaaagaaaatatccgacgttcaagcatcagcaaaggcctcagctcaacgacgaaggaagggagggagaatggagcgggcttggttt

SEQ ID NO: 4491 - DNA, 802 bp, Setaria italica
  Peptide Sequence Number=SeqID_70465
tgcatcagaaatccacaatgcgcagggcaggagggccgccggtgttatcctgggtcacaggacttgccagcctcctcatcccatcacacaggtcgctgttcgtgtctcgatcagtacgtcatagtagtagtagattatccttttgcggcgcgcggctccttccaacaccactcacggaacgtgtgcaataattaaaccatctcgagtggacgtacgtactctgcatcatgctcctcaccctacttccgtgcagcccttctcttggacgccgacttcccagcgtcgtccggcgggaaggaggacgacggcgacggccgcaggaacagctcctcaaactgccgctgcatgtcctccaggctctcccccttgccgttctccgctccgttctggctcatggcgtccagaatatctccgaggatctccccggcgccgtcatcgtcgccgtcgctgtcgtaggctccgacgtcgtacaggatccgcttgttggggtccgacagaacggcgtaggctccctggatcttctggaacctcaccttggccgcgtccgcgccgccggcggagctccccgcgcaggcgcacttgtcggggtgccatttcatggcgagcttgcggtaggcgctgcgcagctcggcgtcggagcagtcgctggccacgcccagcaccgcgtacaggctcaagccgttcttgcccccgccgccgccggccatcgcaacggacgaggtcgaggaggaaatctagccaccagccggctcgtatcgtctgtgttcgcgactcgccgcgacccgctctctctctctctacc

SEQ ID NO: 4492 - DNA, 700 bp, Setaria italica
  misc_feature (695)..(700): n is a, c, g, or t
  Peptide Sequence Number=SeqID_70466
caacggcgcggacccggccttccggttctacggcggcggcgtcctgtccggggcctgcggcacggagctgaaccacgccgtcacggccgtcgggtacggcaccgccggcgacggcacccggtactgggtgatgaagaactcgtggggcgcgtcgtggggcgagggcggctacgtccggatccgccgcggcgaccgcgggccgggcgtctgcggcctcgccaagctgccgtcctaccccgtctagctatgctatatccaccgtacgtgccaatcgcatcgagatcagcgatcgcagcctatagtattgtactgtacgtgtgggtgatgttccatcgaatccaagcgatgcacgacgacacgtcagagtgcatggcaggttcgactagtttgtgatttacattaatgtcctgaattactccaattgttaaggtgtggctgtatgagctacactaatagcatgaatgctgtgtgcagatggtctctgtcacgaccagatgcaagccattcactcctgtaacagtaagaatgctcggggggttgtacctgcaccttatgtggtgatggtggccacacgtgtacagattgccagattggctttcaaaccagttaaatgtatacatggatacatataaaatcgtgtgtagttttggtgtaatactttgtaactacgttagtgtttgcagttgaaaaaaaannnnnn

SEQ ID NO: 4493 - DNA, 201 bp, Setaria italica
  Peptide Sequence Number=SeqID_70467
cctatcccctgtgtgccttgcctatccccttttgcgtgtctcagtgcaaaagggacatcatgcaatcagcggcttgagagaattagtggaacacagcatacatacatattacgagttccttttagaaatgaaaatggtatactgaagaaatggatatcaagatttgatgtctggccatacttggagagatttgctgaggac

SEQ ID NO: 4494 - DNA, 2904 bp, Setaria italica
  Peptide Sequence Number=SeqID_70468
gtcgccaccgcaccacaccaccactcgcggcagagggccaccgggcaggagcgcgcttgaacgaagccgagccggcagccatgtcggccccgaagctggaccgcaccccgagcatccgggaccgcgtcgaggacaccctccacgcgcaccgcaacgagctcgtcgccctcctctccaagtacgtgaacaaggggacgtgcatcctgcagccgcaccacatcctcgacgcgctcgacgaggtccagggctccgagggccgcgcgctcgccgagggctccttcctcgacgtcctccgctccgcgcaggaggcgatcgtggttccgccgttcgtggccatcgcggtgcgcccgcggccgggggtgtgggagtacgtccgcgtcaacgtgcacgagctcagcgtcgagcagctcaccatcccggagtacctgtgcttcaaggaggcgctcgtcgacggccagcacaatgatccctacttgcttgagcttgacttcgagccattcaatgtctcagtcccgcgccctaatcggtcatcgtctattggaaatggcgtgcagtttctcaatcgacacttgtcctcgatcatgttccgcaacagggattgcctggagcccctgctggatttcctccgtggccaccggcacaaggggcatgttatgatgctaaacgataggatccagagcttggggaggcttcagtctgtgctgaccaaagctgaggagcacttgtcaaagctcccagctgacacaccatactcacaatttgcttatcaatttcaagaatggggcctggagaaaggttggggggatacagctgaacatatcttggaaatgattcatctacttctggatatccttcaagcccctgatccatctacactggagacattcttgggaaggatccccatgatttttaatgttgttgtagtatcccctcatggatactttggtcaagctaatgtattaggtttgccagacacaggaggacagattgtctatatactggaccaagttcgtgcattagagaatgagatggttcttcggttaaagaaacaagggcttgatgttaccccaaagattctcattgttactcggctgataccagatgcaaaagggcatcatgcaatcagcggcttgagagaattagtggaacacagcatacatacatattacgagttccttttagaaatgaaaatggtatactgaagaaatggatatcaagatttgatgtctggccatacttggagagatttgctgaggacgctgctggtgaaattgctgcagaattacagggcactccggacttcataattggaaactacagtgatggaaatcttgtggcatccttgctgtcttataagatgggaattacccagtgcaatattgctcatgctctggaaaagacaaaatatccagattcagacatatactggaagaagttcgatgagaagtatcatttctcttgtcaattcactgctgatataatttctatgaacaatgctgattttatcatcaccagcacataccaagaaattgctggaagcaaaaacactgttggacagtatgagagccacacagcttttactcttcctggtctgtaccgtgttgtccatgggattgatgtctttgatccaaagttcaatatagtctctcctggagcggacatgtcaatatattttccacacactgagaaggccaagcggctcacttcttttcatggttcaatagaaagtttgatttatgatccagagcaaaatgatgaacacattgggtatctggatgaccgatcaaaacccatcctcttctccatggcaagacttgacagggtgaagaacataacaggactggttgaagcttttgctaaatgctctaagctgagagagctggtaaaccttgttgtcgtcgctgggtataatgatgtaaagaagtccaaggacagagaagagattgcagagatagagaagatgcacgaacttattaaaacctacaacttgttcgggcagttccgttggatctctgctcagacaaacagggcccgcaacggcgagctctatcgctacatagctgatactcatggtgcctttgtacagccagcattttatgaagcatttggtctcactgtcgtggaggccatgacctgtggacttcctactttcgcgacactccatggagggccagctgagattattgagcatggcatctcaggcttccacattgacccttaccatcctgatcaggctgctaacctgatggctgatttcttcgaacgaagcaagcaagaacccaaccactgggtgaaaatatctgaagcaggacttcagcgcatatacgaaaagtacacatggaagatttactctgagaggttgatgacattggctggggtctacggtttctggaagtatgtttcgaagctcgagaggcgggagacaaggcgataccttgagatgttctacatattgaagttccgcgagctggtgaagacggtgccgcttgcgattgaccagccacagtaactcccattctggagctcgcagcttgctccactgttatgtagtagtacttgggacaaaactgaagcttatcagagggaaggagatgcagtgatcaaggtgcggcggacgataataactaataaaatgtgcttgcgcgcccggtctgtcttgtgctgaacctggtgcctccgtgactacattggctgaacatgttgggttatgtgtacatatgtgattcgcctgtagcgtcaggctgcagttgtctggtattgtagctcttattactgtaaaacttttaagctgttggctgcaatttctctgcaaggcaggcaggcaggcactggtgaagtgctgataacacagcttactctgttgacagtgaaggaacgtgtggggaaaattagtttaaaaaaaaa

SEQ ID NO: 4495 - DNA, 402 bp, Setaria italica
  Peptide Sequence Number=SeqID_70469
gaattaccgaagtgcccctcgccatttaaccatctcatcccctcacctccccgacggcgactcccctcgagctcgccctcctccccccgcctcgctaccgtcgcccgctcttccccggccagcgatcccgattcaactgtgatatattgagataggactgaatcgcttcttggagttgaatatgatcaagacaatgaagacactatagatgcaaagtttgctgctagcttggtaaccttgaagatgatcgaagagtcatcatctccagcattggatgctgacaggatagaagttccttcaccgaaggaagaaaataattcaacaaattctgaagctgctacagatactgaagactttgaaatcagtgacgacgatgatgatgaccgcaaccacaagcaccga

SEQ ID NO: 4496 - DNA, 1592 bp, Setaria italica
  Peptide Sequence Number=SeqID_70470
cacccccttccacgtgtgatttctatgttatgtatggccgtgcctaagggcatatcggttgaagtagattcttcttttttctcaaaaaaccccttcccaaactgtacaagcttcttccaaagcatacggctttctagatgtatatgacgatctctagacagatggatcttatatgaatcgtatgatgaagtaccacatgagtggatatatagaaaaggaatccaaatctgccgaatcgctcatgttatgatcttctacatcctaggtctccgcgttccgtcatctggcttatgttcttcatgtagcattcagatcgaatgactctatgaaattacgtcgatacttccacatattatgggtaacgtaggagacatccctattttcacccgggggtcttaattaccactgcttagctttcaattcgcctctgaccatcaaattaaatgtgaataacccgtcctcctctctttgaaacaaggggcgcttccggttctgtgcgtgcttcaaacaattttgtcttctccatattaccatatctctagagtcaataattttctatgaggaactactgaactcaatcgcttgctgccgttactcaacagttttctgttgaggtctatcccgtagaggtagtcaaattggatcagtgatcgatttctaggtttcgtcgtaaacctaattggttacttccaattacgtaaatcaatagttcaaaccgcactcaaaggtagggcatttcccattgatataggaacttttgtaccagaaacaatagtatctccaattatagcccctctgggatgtaaaatatatctcttctcaccatccccatagtgtatgagacaaatgtatgcatttcgattagggtcgtattctatggttacgattctaccagatatgtctttttgattccgtcgaaaatcgattttacggtataggcgcttatgacctccccctctatgccttacggtaatgattcctctggcattacgacctttaccacaacggtgccgtccatggatcaatttatttcgtggattggatttcacttgcctgtctacggttcccttgcgtgtgctcgggataggtgttttgtataaatgtttcgccatattattaagtattctcctttagttcgtttctctatctagaagtggaatagaataacccggttgaagggtaatgatcatacgtctgtaatgcattgtatgtcccagaataggtcccattcttctaccctttccgggtagtcgatggctattcacagctactaccttaacaccaaagaagagttcgacccaatgctttatttctgtcttagtgaatcccgattcgacattaaaagtatattgattctttcccaataaacgaagactcttttctgtaaatactgcgtatttgattccatccataaatcgactttccctcctatgctctgagttccagtatcgataagaattcgagttcttattgttcttatgttatggtatgaatataccataccaattcgttatgtatggatgatggatgagattccatagatagagagccagttccaatagacttatgaaacgttcccgtttccccgtttt

SEQ ID NO: 4497 - DNA, 666 bp, Setaria italica
  Peptide Sequence Number=SeqID_70471
agactacctacctacctctgataccttcgtcagcatgagctctacgccctcagaaacgctgaactcgtgcgggctgtggtcgccgccgcgcgctccgtcggaggcctcctcgtccgagatggagttcggcacggcgcgtgagtacgacaccaccgatcccttcttcggtgacaactggctccgcgacaaccacctgcccccacagcaagccggagagcgacggcagcgaaggggaggacaagttcattgttggtcctgacgtcagcttgcggcggagtgagatgcgggagcttgacgatggcttcggccgcaggcacgtacacagagaccacattgcggattctgatgggtgcgcagaggtgaatgtgtgctcgtcaccgccctgtggctgctgttacagggaaaagaagaatggtgaggagttggtgagagattcttgctatgctgtctatgggaggtatcagatcatggacgaccatacggaggtgcttgatgagtgcgtcgcagaagcgttccggttcaggctgaatgcctttgttggcgctggtgatccattagtggatttcaagaaaggagagggcgatgggttggatcttagtgctctggagaaggagcttcaaatgcttagtccgtacttggctgatgcagatgctcttgagaatgttg

SEQ ID NO: 4498 - DNA, 545 bp, Setaria italica
  Peptide Sequence Number=SeqID_70472
ggcaaggatccaaactcttgactacaaaaggctattatgtagcaatagtcgtcccctgacatagcaattatgcctggaatcataattttttggtagatctgatgtggcacggacatacacaacgactttgactacagaacgacagattttgtcatagattggctggttatcaacaggaatagcaccaacttcctccatgaaaagaagctcaaggtatatgcttgatttttcttttgtaatctcagtttaaccaggaaagagattggggcggtgtaggagatggagacgggagggcggcgccagtggcgtagccaaatttcaacagatcagcggtgatccttgcacgacaagcgtgcagctgcgcaggggcgtcgcggctcactggctcccctaatccctctgcggcgctgcgccggtcgccggcaaggcctagccgcctaccaaagtatctagggttagggttaggggttaccagcgatgcgaaagagcgtggggcgcgagggacgagacttaccttacctactgcctctgctggctgttgcagt

SEQ ID NO: 4499 - DNA, 381 bp, Setaria italica
  Peptide Sequence Number=SeqID_70473
cagatggcaaggatccaaactcttgactacaaaaggctattatgtagcaatagtcgtcccctgacatagcaattatgcctggaatcataattttttgggagatctgatgtggcacggacatacacaacgactttgactacagaacgacagattttgtcatagattggctggttatcaacaggaatagcaccaacttcctccatgaaaagaagctcaaggtatatgcttgatttttcttttgtaatctcagtttaaccttacctactgcctctgctggctgttgcagtgcggctcctgcgctggctgccgccgccgtcggtggtcgtactcggctgctcgctaatcgcgagtcgccaagtcgcgagtcggcggggaaagacg

SEQ ID NO: 4500 - DNA, 747 bp, Setaria italica
  Peptide Sequence Number=SeqID_70474
ttttcaagaactatgagcagaattacacagaagcatgtgtctatattacaataccacactacattgtaaaaattcatggtttcttgagcaactttattggcaaagaatttgcatggctatcttccagcgactgcaaactgtcaatcttccaatactcctaactgctgcctcttgctcacggaaagcactctttaacaccaacattagcaaccaactatttatgacaggctctcaatggcatgtggccccagccgcaagatggcatcctcacattacgtactgaatgttactccacactttctgatgggctaattttcttatacaataattggtcggaaaagaaatctcaggaaaaactagtatgacattgtccatatatcattcaacttgtccacaaacaggacctttattttgcttcagtgtgacttttattttctttttttacgggacttagcctgatcatccctctttctttttttccgggacttggcttgatcatctatgtgctgtaaaatttcactaagaggcttgcccatcatgtctgtgtgaaacaatgcaagaattcttgttatatcctgcacattcaacgcaatggtaacaccacgatcctgagtagatatcccaacaaattcagcttccttgttgaacacaagacctccatatggggtcaattgactgggaggtgaatcatggctgaatttgtaccttcttgcatacgtcacgcgcccacaagacatattgcaagtt

SEQ ID NO: 4501 - DNA, 1533 bp, Setaria italica
  misc_feature (1)..(5): n is a, c, g, or t
  Peptide Sequence Number=SeqID_70475
nnnnnttttttttttttttttagttcgtaaggtacataaaatcctatcataacaaatgtcagacaaacgaacatactcataaatagcacatgattgcactcctacacattgagttgaaatgccgtgaatccaatcatcctaccgatcgcgtttagtgggatagcttaccagccgtaatttgatggtcacaaaacaccggacaaaacagagtgggcaagaactatgagcagaattacacagaagcatgtgtctatattacaataccacactacattgtaaaaattcatggtttcttgagcaactttattggcaaagaatttgcatggctatcttccagcgactgcaaactgtcaatcttccaatactcctaactgctgcctcttgctcacggaaagcactctttaacaccaacattagcaaccactttattttgcttcagtgtgacttttattttctttttttacgggacttagcctgatcatccctctttcttttttccgggacttggcttgatcatctatgtgctgtaaaatttcactaagaggcttgcccatcatgtctgtgtgaaacaatgcaagaattcttgttatatcctgcacattcaacgcaatggtaacaccacgatcctgagtagatatcccaacaaattcagcttccttgttgaacacaagacctccatatggggtcaattgactgggaggtgaatcatggctgaatttgtaccttcttgcatacgtcacgcgcccacaagacatattgcaagttgatattagatggtggtcgaagtcaattgaaaaaacttcctcattcattgaaacatcttctctgaagtctactgatttcatcctagcagatgtgttaacatagaatgccaccaaatttgaccttgtttccagatcttgcttttggagcttcatctttgttccatcagggagaattacttcagatggcaaggatccaaactcttgactacaaaaggctattatgtagcaatagtcgtcccctgacatagcaattatgcctggaatcataattttttggagatctgatgtggcacggacatacacaacgactttgactacagaacgacagattttgtcatagattggctggttatcaacaggaatagtcccaacaaccaggaaagagattggggcggtgtaggagatggagacgggagggcggcgccagtggcgtagccaaatttcaacagatcagcggtgatccttgcacgacaagcgtgcagctgcgcaggggcgtcgcggctcactggctcccctaatccctctgcggcgctgcgccggtcgccggcaaggcctagccgccttacctactgcctctgctggctgttgcagtgcggctcctgcgctggctgccgccgccgtcggtggtcgtactcggctgctcgctaatcgcgagtcgccaagtcgcgagtcggcggggaaagacgcaaccccggcgagatgcggaacggccggaggaaagggcgtcggccgactttttcgaggggttgttttgggtactacctagtct

SEQ ID NO: 4502 - DNA, 1434 bp, Setaria italica
  misc_feature (1)..(77): n is a, c, g, or t
  Peptide Sequence Number=SeqID_70476
nnnnnnnnnnnnnnnnnnnnnnnnnnnnnnnnnnnnnnnnnnnnnnnnnnnnnnnnnnnnnnnnnnnnnnnnnnnnnaattcaagggagatgtaatgtacatttccaactatatacacaagatcgcaggaaggttgatacttgtacaaataagcaattctacaaaccttacaatgcaataaattccaattggaccgctaaatttcccacaattcttttcaaaaaaattcccacaattagagctgacccatcttcagttctcttgtttcactgtaattactcttcttatctcaaatctgcaaatctatgtgtgtgcatgtatggatcatacatggttcatcatacagctgcttggaacacacgttcatttggagttccgaacaccgtccgtagaaacctttcaacaaccgacaggaattcttcaggtctttcctcctggggcaagtgaccacaacccttgatcacctcaaaccttgctccaggtatagcatgtgccacacgctcagcattccaagcagggacaatgcggtcagtatcaccggtcaccactagcactgggcaagagatctcagaaagcctctttgaaaccggtactcttgtcgctgatgcagaatctatgatcatggatatggtgtgctccagaagagcagtctcccaacccctggatcttagtggcttcgtgtacccttgtatgacgtgatcagttactttacttgggtcataccacgcattacggacgcctagtattccaaatttgtccatgacccatcttaccagcatagcgcccaatgatgaccgaagaaaagcaacaagagctttaacatacagagatcgaagtacgtctcttatcaccatcatcatcttggaaacaagccctgcaatgtgcttgcatagcttgagaaacgcaccccagatcctagcaaacagagtaggaggtgaattttcatcgttgggaacattctgcttttgcgcttcttgttcccctgtggcactatctttcactcccttcctcggcgcaaatattgccggtgcaactagcacaagagcagcgacccgttccggcgcctcaaagtatgcatccactgccacaaggcaaccagccgagtgcccgacaaggacagccttctcggcgccgagatagtcgatgaatgccaacgtggccatgaccgagaacgccatggagtacgggttgagaggtttgctgtcatcaccggaccagctggccctggacgtcagcccaaacgccggccggtcgaacgcaaggaccttggcagcggcaatgcgggccagcggccgcatgacgcggctccaggagaacaccgacgcaccgaagccgtgcagcagaagtatgggaaggccgattccactccggccagcttctgagacggtggcgtccgaggattggtcgctggacgagtcctcatcgtcatggctg

SEQ ID NO: 4503 - DNA, 969 bp, Setaria italica
  misc_feature (189)..(189): n is a, c, g, or t
  Peptide Sequence Number=SeqID_70477
accccaaacaattacttgggagggcgtccagcgtcggcgcattcgtcaagagaggggaggttgccgggcacgtcaagatatccctccgcggggatacgcctaatgacaagatctgcatttactaggaagattgatacgaagaacaagtccgagtggctcctcaatgggtgcaactgtccccaaaaaggngatcattgatgtaattaagagattcaatattcaagtttaacaacttaactcagttcttgccacaagatcgggtgtctgaattgcaaagctaagtcccattcaacttctagaagagactgaaaaggctgttggcgatcctgatttacctgttcagcatcgtcaacttgtagagagaagtaaggaactgaaagcacttgaagtggctctaaagcaaaaggaacagactttgaataatctgaaagcccttaatgctgaacaagaaaaagatgttgaacgtgttcgattacgagataatctcctgagaaaggctgagttaatgaggaagaagctgccatggctgaagtatgacatgatgaagaaagaattcataacagtaatacaggagcaggagaaaatttcaaagaagaaaatggaagaagcagccagaatctgggatgatgcaaaaggtcctattgaagaactcaagaaacacaaggcaactcatacttcaaacataaagaagataagtaaccaagtaaatgaaaacatgaccaagcgccagaaggttatcgacaaggaactgcagctgaatacagaattgaaagccacatttgacgacattgatgatttgaaaaagcaagaaaaatctcgccagcaaaggattcttaaagctaaggaagatcttgctgctgctgaaaaggaacttgaaggcctacagccgtatgaacagcctaaagctgaaatggcacaactccgagaccaaattgcacaagtaaatgtggagataaaaaatctaaaagg

SEQ ID NO: 4504 - DNA, 329 bp, Setaria italica
  Peptide Sequence Number=SeqID_70478
tcaacatgtatgaacaaattggtcaattatccaccaacaccagcacaccaccaaccaatgaacaccgacgtctgcctactttggtttacaccagaatttcgggccaaaattcctctctctgcttttttttttactaatcgagaagggaagggaaaagggaagaaagaaagaatgaacacatgtccgcgcagctgctccggtgatcggcgaggtggggccaaatgcgacccggagctcggagatccggatcagttcgcggatgggggagtcttgggcgtcttgggcgggcgggcggcctcggctccggcgacgccctgctcgatgtcgcc

SEQ ID NO: 4505 - DNA, 729 bp, Setaria italica
  misc_feature (709)..(709): n is a, c, g, or t
  Peptide Sequence Number=SeqID_70479
ttttttttctaaaaataatataatttgcagtgaaatgtttatttggttttctcctcagtgttacattacacattggtttacccccgcacttgcaagtccttaactactggcattagggtgtcacagttcagacatcaggtattcgttgtatcgccccgccaacgtgacaagtttggatggagccagtgaaagatcaaaggatgtgaatgagtgaggaggccactgtgacttgcatatgcgctgctgcgtcaaagagctggctcttaactggcactaccttgtttgggttactgaaagaattttcatccatcacattgctagatgtgataacagtggcggtcgatcgcagcacgtcaatgctagcctgaagtccagtcgtggagattgtgacttgaacagcaacagattcaaagtttacaatctttactcttagaaatgaactattgtctggttcattccaagtaattgcagatgctgctagagaaacattgctggagctgctggaactgattgttgttggatgaacaatagaaccactagactcacggaaaagcaactgcatccagtaactaggagtcccgtaatgttgccaggtattgaagacaataacgtctgggttccactttttctcaatatcgtcatttacgaatagtggagcatggcaagccatctcaacacatcactattcttctccagcccagtaaggaancagtcttctgccgagggcag

SEQ ID NO: 4506 - DNA, 353 bp, Setaria italica
  misc_feature (349)..(349): n is a, c, g, or t
  Peptide Sequence Number=SeqID_70480
gcagtcgatgtcagcggccgcggtggggttctcggcgcccgcgccacccacgccggcgagctcgtcggggctgtacttggaggggtcggcgtcgcggccggtgagctcctgcacgagggcgcggaagccggcagcgctggtcttgacgcgcatggggttggagatgtacaacaccttgatcggcttcttgcccccgcccttgccgccggcccccttgtgcttccccgacgaggcgctgccgccgccgctcccaggagcattgcccctgggactgcgctgctgccgctggcgccgctgctcgtgatccatcgatcggctcagctctagtggagacgcggcatctgggganaagg

SEQ ID NO: 4507 - DNA, 629 bp, Setaria italica
  Peptide Sequence Number=SeqID_70481
agaacttgcagcagctcgggtcgtcttgcatcaccaatcgcacgagatcctctttaactccaagtacagtccagtactgttgtacggccaggacaggagaaagatgggcaagcaaaagattgtgctcaagttgcccctggatgacgagaggaagaaaaggaaggccttcaaggctgccgttggcatgaatggtaatatcaagatcaaccaatcacagcaattagattagcagctctgttttaattaggctcaaggtatattaaacatgatcaactctgttattattaattctgattcctgacaagcaagttatcactgaatcccgcaggtgtgacatccgccacgatggagggcgacaagatcatcgtggtcggcgacggcgtggacccgatcacgctaacgacgatgctccggcgcagcctcggctacgcggagctgctcagcgtcagctccggcgatgacaagaagaagggggacggatacggctacggctacgggggtgtcatgatgtacggtggcggcaaggagggaaaggaaggaaaggagggcaagggagagcggcggcaagggcggcggcggtggctacgggcagtaccaggcgatggcgcccgtctcgtaccctgcctacc

SEQ ID NO: 4508 - DNA, 991 bp, Setaria italica
  Peptide Sequence Number=SeqID_70482
gtcttgcatcaccaatcgcacgagatcctctttaactccaagtacagtccagtactgttgtacggccaggacaggagaaagatgggcaagcaaaagattgtgctcaagttgcccctggatgacgagaggaagaaaaggaaggccttcaaggctgccgttggcatgaatggtgtgacatccgccacgatggagggcgacaagatcatcgtggtcggcgacggcgtggacccgatcacgctaacgacgatgctccggcgcagcctcggctacgcggagctgctcagcgtcagctccggcgatgacaagaagaagggggacggatacggctacggctacgggggtgtcatgatgtacggtggcggcaaggagggaaaggaaggaaaggagggcaaggagagcggcggcaagggcggcggcggtggctacgggcagtaccaggcgatggcgcccgtctcgtaccctgcctaccagcagtacaacgcgatgccgtcctaccccgtctactcctaccctgcttacccgcagcaagaacaggatcctggatgcaccataatgtaaatctaggagcctgaaagacactattgttcgtgcaagttaatctggagatcgggttgaaggtggcaagaacgtggaggttaatttgttggattcaggccaagatgaggcttgatgaaggcttcaactctgcgaagcaggatgtggatgctagcagcgagcagctgagcatcatcagtgtgagtatgtacagggtttgtcaggtgggtgcagagggcagagttggggtggagttcatggaagggaacgcagggctgttacacaagtgcttatagtaggcgatggtgatttcatttctagtgcaggctgagtagcagcagcgttttcttttcggttctttgttttctgggggaggaagatgtagtgtttgtcgaaggaaaggatcggaggcaataaaagaaaatttgtacaaaaaaaatatcccgtgcctacaaaa

SEQ ID NO: 4509 - DNA, 451 bp, Setaria italica
  Peptide Sequence Number=SeqID_70483
cttcgctttttcgcacaaatccgagttatcttgaagaatagaaggatagcaaaattacaatgaccgttggacacgattcgatctggcgttaaataatcaagaatttccctatctttttaccaaaagtatccaacagtctatggcttacttgatcattagccattgctaggtcaaagatatatcttccatgaacagaaaaagaataagtattcatttgatcttgatccttgtggagcgaaaaagatgctatactggatctgcacatacttactgacaatatccataaatggcttgtttttggtaatcgacgaagattaccatattgatattcgggcgcatggtaaacatcagtactccagtgcatttccccgtctgattcggaataaatatgcttttgtatcttttctttaaaatgcaaagtggacgttccggcacgaatctccgcaattac

SEQ ID NO: 4510 - DNA, 902 bp, Setaria italica
  Peptide Sequence Number=SeqID_70484
cctgccgcagagacccgccagaccgcgactgcttattcactgtatcaccaaccactcccacagtcccacccttacatatcctgtagctaggtgcctcatcttcatctcggccacctcctgccgcagcacccagccatccatcacccacacttccaccaccatggccatggccaccaccgttctcctcctgtgcgccgccgtcgcgctggcacccaccccgtcctccgcggcggacgacgccgccgggttcacgacgttcaagctctacttccacgacatcgtgggcgggacgagcccgacggcgatccgcatcgcgcaggctccgtcctccaactcctcctccaccttcttcggcgcggttgtggccatcgacgacccgctcacctccggcccgacacgcgccgccggcaccgaggtgggccgcgcccagggcacctacacgttcgcggaccagaagacgttcggcctcctcatggtgatgaacttcgtgttcacggccggggagtacaacgggagcagcctgtcgatcctgggccggaacgaggtgctcgacgacgtccgcgagatgagcatcgtcggaggcagcggcaagttcaggatggcgagagggtacgtccaggcacacaccatcgactccggcgccacctccggcgagaccgtcgtccagtacaccgtcaacgtcaaggcctagtatagctggtagagctctccggccggccgccggccgtggctccgtggctgatggccgtgtgtttatatggtttgcagtctttgtattgtgtatcgagctggtttctacaccgtgtcgttcttcagtgttactagcttgagatgagagaattcagatgaattcttgccggaacaattttaacgggattcggatttgcagaaaaacaaaataa

SEQ ID NO: 4511 - DNA, 539 bp, Setaria italica
  Peptide Sequence Number=SeqID_70485
gcataagctggatatgaatccatcataacatggatacttgacaatatggaagaagcccattctttgtcatgtattggatcactccaaatgggcccacccataacaaacttatgggcacattcagaacattcttcaggcacggtaggggcaaaatttggtagagcaatgtgtctcttatcctctaagttaattcttccaatattttgtagatgaaatgaagagcatccaacacattggtagacatgtgctaatttgagtggtgagctttttactgtactagccgagctgagtataagaggcaaattcgtaagatttgttgtgagacaccaagaaattattttcatagagaaaataatacatcttcaccgtaagaaaaagaatgtgtcagaaaaagatggatgcaggagacaacgtgaagattcgcacaaaaaccctaatgtagaaatccatgtgtattgatattataggaactatatggcgcttgtgacggatcgcatgtgactcaatgcaggcaagaagaatccttagagccatctcat

SEQ ID NO: 4512 - DNA, 1460 bp, Setaria italica
  Peptide Sequence Number=SeqID_70486
gttctatgatgctggctcaaatataccctcaaaaagagttcttgtccgggttgtggtgtggattactggtcagttatgacttgtccacgtgaaataccttgggatgcctacaagcctttggcctaggaccccaaaacttctcaggatttgggacaaatcttgggcttttccgagggactgaagccccaggtgctcgtgaaaaatttgcctgcaatttaggctcttgggaaagtatcacattgcctggatgatttccaggtcgatgtttaactgggtgaagatggacccagcatcgcatgatgtcccaaatcactgacattggggcatttgttttaagagctagtggatccacatgacttcctgatgtttgatacccagcatttctgatggcagaatgtaacataaccatggttggactagtgcacttcagtattgcacataagttgtgaagactcacaaacaaaggtgcttctggcaattcctctgagactgaggttaatatagctgaaatttttgcataagctggatatgaatccatcataacatggatacttgacaatatggaagaagcccattctttgtcatgtattggatcactccaaatgggcccacccataacaaacttatgggcacattcagaacattcttcaggcacggtaggggcaaaatttggtagagcaatgtgtctcttatcctctaagttaattcttccaatattttgtagatgaaatgaagagcatccaacacattggcagtcttgcatctatttgagtggtgagctttttactgtactagccgagcgtaagaaaaagaatgtgtcagaaaaagatggatgcaggagacaacgtgaagattcgcacaaaaaccctaatgtagaaatccatgtgtattgatattataggaactatatggcgcttgtgacggatcgcatgtgactcaatgcaggcaagaagaatccttagagccatctcatggcagtgtttacctcttaatggataagaaccatacttagaaaacaaacttctgcatttcccccagcaagcactgccatgtctgtagcagagcacattaaaagaccaccatctgctacacattgaactgctgaatcaaggaatgcagctggtgatccataaggatcaaggtcaaccacatcaaattcttttgggtgtgttagcatgtaaaagcgagcatcagcaagacacggtaccacctttgaagatgcaagactgccattgtgttgtatatttttcttgcaggcttcaacagcgacttcattattgtcaacagcagtaacttctccaattccatctacctcaagggcatacctaatggctcttagtcctgatgcagccaaagcctcaagaacttttggctcttcatacttagctagttcactcaatttagtgtcttctggttctcctcttgttgatcggacaataaattcttcacgtcttttcgaa

SEQ ID NO: 4513 - DNA, 947 bp, Setaria italica
  Peptide Sequence Number=SeqID_70487
ttttttttttttttttttaatttaattgaaacttttatcatgcattactagatgttaaagtgacaacaaaacatttctgcaacccgcatctgacgccaaagttctcggttgatggtgaaaacgtaacacacgaacaggctattttcgtttccacgctgcatacatgcattccagggtcatttctagtacaagtcatggtgatgctaccccaggaagggtaagatgcattctttggaggtgcactccaacaagcaaaaaaagaaacaaggatccacacttgaaacaccagaacttgtatctccacctgaaagttctatgatgctggctccaaatatccctacaaaaagagttcttgtccgggttgtggtgtggattactggtcagttatgacttgtccacgtgaaataccttgggatgcctacaagcctttggcctaggaccccaaaacttctcaggatttgggacaaatcttgggcttttccgagggactgaagccccaggtgctcgtgaaaaatttgccagcactgacatgggcctagggccatgggcccagatggggtgacagctcaaggtgagcagcctgcctgagggccaaagaggcaaagagaccagagagaccagagctcaattccctaacctccctttctcctagctgccagcaccaggttgtcaccatggcacctaggcatccataacaatcgacctcactcattatgacccacagcggcaccctctaaagcctatatgctatcagagcacacataagggcaagcacatgagtattgtcttgcaatctcatgcattgccacataggagatgatctatcagacaaaccctacaatgtatcgtctgttagtttgtttcctataatttacacaatcccttaatttatgcatgtaacaaaaggaggtcgagttgcatggcaataacttgtacgatgatcatgc

SEQ ID NO: 4514 - DNA, 410 bp, Setaria italica
  Peptide Sequence Number=SeqID_70488
gagcagattgaacgctgatcctaacaaattatatattcagataaagggatggggaagaccaaaagggcagagttgaataaacaaaggaatgtatgagataggctaaaggcatccgtcctaatctccgatatatgcttgcggtgacaaattgtattttttttttggtggttgtggagcttctttgaaaggctatgttgttgtggagcttcttccaaaggagaatcattgaaaaacaacaatatgtgggggtattgatgtggactgcaacaatgatggagtagctacaacacttggcatattctatggaaccaaacacactgaaaagatgatcgcttaacatatctagttatcaacaaaaataagaataacccagtgataattgcacccactgcatcaggatcaggaaacaa

SEQ ID NO: 4515 - DNA, 827 bp, Setaria italica
  Peptide Sequence Number=SeqID_70489
taaaaaactaaaaaacaaaaaaactaaaaggtaaaactaactaacaagaatagttaggtggatcatgcggaccgtgtactgatgttagcaaggttggcttttgagggtttaaacatagctgttaaggtctctggagtgcactggtggtacaaaactgccagtcatgctgctgaattgactgctgggttttacaacccatgtaaccgtgatggctatgctccaattgctgcagtattgaagaaatatgatgctgctttgaactttacatgtgttgaattgcgcactatggaccagcatgaggtataccctgaggcatttgcagatccagagggcctggtatggcaggtgctaaatgctgcgtgggatgctggtttacaagtggctagtgagaacgctctaccttgctacgatagagaaggattcaacaagattctggagaatgccaaaccactgaatgacccagatggacggcatttgtttggattcacctacctgaggcttagcaaagttctgtttgagaggcccaactttttcgaattcgagcgcttcgtcaagagaatgcatggtgaggcggttcttgatctgcaagcatagatgtgtagcttattacatacacatatacaagtgattctgattggcttaggccttacggcctacatttttgctcctttttttcggttgcgtaggtggtagtatcagctgatttttgacctgttacatagaatagaactcgctgctctatttgtaaaggctatttatatatgaagacccgtgggtttacttgaattttggtgggtaaacagtgaattcgcatccatggatgccgt

SEQ ID NO: 4516 - DNA, 1227 bp, Setaria italica
  Peptide Sequence Number=SeqID_70490
cgccgcaggagccgccgccacctccgaccgtcccccggacggacgacgtccctgacggcggcagctcctcgcacctcctcgctgtccccgtcaacgtccccatggaccccgcggtcgccgaagacgccgccgtcgccaagcaggtgcccgaggtggcgccgcgcccgccggagcgggacttcgccggcacgccctacgttcccgtctacgtcatgctcccccttggggtggtcaatgtcagcggcgaggtggtggacgcggacgagttggtgggccagctgcgggtgctcaaggcagccgggtggggacggggtcatggtcgactgctggtgggggaacgtagaggcgcacaggccgcaggagtacaactggactggctacaagcgcctatttcagatgatcagggagctcaagctcaagttgcaggtggtcatgtcattccatgaatgtggtggcaatgttggcgacgatgtgtcaattcctctcccacattgggtaacagagattggaaggagcaacccagatatctactttactgacagggcaggaaggcgtaatactgagtgcttgtcatgggggattgataaagaaagggttctccaaggccgaacagcagtggaggtatattttgactttatgagaagcttccgagtggagtttgatgagtattttgaggatgcgatcatctcagaaattgagattggactaggggcttgtggagagctgcgatatccatcttatccagcaaaacatggttggaaataccctggcattggggaatttcagtgctatgacaggtacttacagaaaaatttgagaagagctgcagaagaacgggggcatactatatgggcaagaggaccagacaatgctggccattataattcggaaccaaatctcactgggtttttttgtgatggaggagattatgatagttattatggccgttttttcctcaactggtactctcagatgttggtggatcatgcggaccgtgtactgatgttagcaaggttggcttttgagggtttaaacatagctgttaaggtctctggagtgcactggtggtacaaaactgccagtcatgctgctgaattgactgctgggttttacaacccatgtaaccgtgatggctatgctccaattgctgcagtattgaagaaatatgatgctgctttgaactccaaactcaacttccattgctgagcatccatttacatgcggaca

SEQ ID NO: 4517 - DNA, 438 bp, Setaria italica
  Peptide Sequence Number=SeqID_70491
tctccatcttcttcttggttttaatggtttgtaaatcagaactggccatatttatttcagcataacgatcctcacgagtggcatctcgaatggcacaggcctcactctgctgacaaccatccttccaactagcaggctctctcttcttagcctcggtcagaggaggcactgattgctgatcgccgtcaatcttcttgccacgacagcttaggcttcggacgtaatgcttctccttctttggttcaatacctatcggaacagaatcagccatctccctgggcttctctctagccattgcaaacagagcatcagcgccaccgtttcgtcagcccaggaggggaactcacagtagcggaagccaaaatctcttcggaacgtagccggtgcagcgccacatggcggcagaaaaaggccgggcgcccggaacaggcagcatcg

SEQ ID NO: 4518 - DNA, 699 bp, Setaria italica
  Peptide Sequence Number=SeqID_70492
tgtagcagtcctatcaactgggtagtctacagcaagaatggataggatagagttcatagtgtatatcataggctcatttattggatcaacagtgttgatgaaaacatcaagtctagggagattagagttgccatcagggagatcatcgaactgttgtttcaagagggcaaggtctgggacacgcttgatagggttgagctttgcgacttgatttagcaaccaagtaacaccaaaccacaaatctccaaccatcgatatccaccagagccacatgccatccgcgtgtgggtgcctgatacgccatatgaaaaataggacgatagcaatcaacctgagcagggtcagtaacctgtagggatgcaggaggatgcccttgaccctgtacgtccggaacagcagcggccgccgcccatcctcgccgccgtcctccagagccgccgctgcctccttcccgtcgatcggcgtccagtacctgtccttcgggctgaccgctggcttcttcttcttactcctccgcctcctctccgccccctgcttgccgttgccgttcgccgccaccgacggcgccgccccgccgccgccgttgtcgctgaccccgttatggtcgccgccggcaccattgctctccacctccagcaccgacgccgccgtgccgccggcaacgacgacgcttccgttgccggcgccgccgttcgccgg

SEQ ID NO: 4519 - DNA, 238 bp, Setaria italica
  Peptide Sequence Number=SeqID_70493
acgagaagcggcagaggctgagatgatatatgaagtgatttgaagtgttagttattctggtttacctgcaactggaggagcaagaaatgataaggcaactgaggagggcagatcttattcctaaagcacacccatgccatactttgacagttcatttgatccgaaaagttgcaggagatgattaggaggtcctgaaagctatggatgcactctgacttcaacttcacaaaatccaaga

SEQ ID NO: 4520 - DNA, 263 bp, Setaria italica
  Peptide Sequence Number=SeqID_70494
taaacccaaaacctactgccggtttgaggatcccacctgtaggaggaaaggctaagttaacacccattgaaccaatcatctgatgaaggcgtgccagcagatttccacaaacatccggtccatcacaaaaggcaccatgtgccatctgggttaaattggcacccaattccttccggcctccaactgaaacctgcataccttgctggcagtgctctcctcgtactgcacgatgcactcgatctcggagtcgatgaatcgctagg

SEQ ID NO: 4521 - DNA, 1540 bp, Setaria italica
  misc_feature (1531)..(1531): n is a, c, g, or t
  Peptide Sequence Number=SeqID_70495
ctcacatctcacatctcacgcagaactttgtcccatccagtccaggaaacctcgagaacctccccattccccttcctcggcggcgcggcaaccggcgaggcgaccaatcgaccgagacgcccctccgcgttgccgacggatcctccctccactccgtacctccacgccgagcacgcggctctgccttgtcgactcggaacaaggcgtagagagagatggctagtctaaccggcctcgccgcgaaccctaatccgaacaagtcattcgagatcctgcccaacccgggtgactcagtctcgagcctcagcttcagccccaagagcaacctgctggtggcaacctcctgggataaccaggtgaggtgctgggagattgttggcgggaacagtcagccgaaggcgtccatatcgcatgatcagccggtcctctgctccgcttggaaggatgatggaactactgtcttctctggaggttgtgacaagcaggtcaaaatgtggcctctgctgtcaggtggtcagcctcagacagttgcgatgcatgatgcgcccgtcaaggagatcgcatggattcctcagatgaatcttcttgtctctggaagctgggataagactctaaggtactgggacacgagacaagcaaatcctgtgcatatccagcaacttccagagcgttgctatgctcttacagtgaattacccccttatgattgtgggaactgctgatcgtaaccttgtagtcttcaacttgcagaatcctcagacggagttcaagcgtattcagtcaccactaaaataccagacacggtgccttgctgcattccctgatcaacaaggatttctggttggttcgatagaaggaagagttggtgttcatcatatcgatgattcacaacaaagcaagaatttcactttcaaatgtcacagggaaggaaatgatatattctctgtcaattcactgaacttccatcctgtccatcacacatttgcaactgctggatctgatggtgctttcaacttctgggataaggacagcaagcagaggctgaaggcttttagtagatgcccacttcccattccttgcagcaccttcaacagcgatggttccatatttgcttatgcggtctgctatgattggagccgtggggccgaaaaccacaaccctgcagctgcaaagacatccatctacctccacagtccacaggaatctgaggtcaaaggaaagccgcggatcgcgacaggccggaagtgatttcgttccaacttgcgggatctgtgtctttaggccagtcaccagttttgttatgctgcctcctatagtcctggaagtctggttgatgtaaatttcatcgtacctgtaggcactgatgatagggtttctgttgcaagtctcgacatggtagtaatacctggtgtttgcagtgtctagccttcgaggaattgtgtatcgaggtggttttcagtgatgtaaattatcgtgcatatgtttctataatctatatcgatggaattgtcaagtaaaaaaaaaaaaaaaanaaaaaaaaa

SEQ ID NO: 4522 - DNA, 252 bp, Setaria italica
  Peptide Sequence Number=SeqID_70496
gtgtccgcttcgtatttggttccgttaataattgcttctttatcaccacaattgatatgcagtgaatattgatattgtccattcgaagcaacacatgggaaattcctctttaagcatggctgaacactatttctgcatagaaggcaaaggaaagactgtccatttcaggtgaatagctctccaccagattgacacttccttgaaggcattgattaggtcctgaactccccattgtgaagttattaaaagata

SEQ ID NO: 4523 - DNA, 1184 bp, Setaria italica
  Peptide Sequence Number=SeqID_70497
ccgcttcgtatttggttccgttaataattgcttctttatcaccacaattgatatgcagtgaatattgatattgtccattcgaagcaacacatgggaaattcctctttaagcatggctgaacactatttagactgtccatttcaggtgaatagctctccaccagattgacacttccttgaaggcattgattaggtcctgaactccccattgtgaagttattaaaagatatgtccgtgatcttgtttcttctcaataaccatccaggtatattcccagagagtgaatttcccgttagatatatgtaatctacacctcgcaagttagcaaaagaaggtggtatttctccactaagtttattaaagctcagatccagatgcttaagagttgtccacgagccaatgtaagatgggatgcttccactgatggaacatttcctaagtaccaatgttctcatggatttcattacacttaaatcggggaaagctgatccactacctctcagatcactaatcctcagatcagaaaggtttgtcaattcagatagacttgagggaataggcccttccaacaaagatcctccaatttgcaatttttcaagtcttttcaatttgccccaaaaatcaggcagccttccagaaaaattagtgctagaaatcctcaagtctgttaaattactgaacaatgaaagagcagttggaaggggcccagtgaactcattgactgataatattagcttctccattcgaatgagacctccaatttcaggagggattggcccatggaattcattgccttcaatgctcaggttagtcaggcttgtgatctttgtgagaaccatgggaaattgccctgacaatctgtttgccatcagtgacagtccttgtaacttcttcatccgggcccactggtcaggcactccaccatggaacaagttcctgcttagatctagctggagaaggttggggaggtcggcgaagtcaggcgggagcttagcagagaagttctgctccttcaagaatatctcggtgacatggcagacggtaccgttggagaaggagcagtcacagtgcaccctggagccgccgccgtggtcgcagggaccggcggcgaagtcccagtgcgacacgccgagcgtggccgcgatccggccgaggacacgcacttcagctggcgcgaagcctcgg

SEQ ID NO: 4524 - DNA, 771 bp, Setaria italica
  Peptide Sequence Number=SeqID_70498
aagcaagaacggcactatgaatatcgaaccagattcaggtcctggtcagagatcgaagagtagattacagcaggcagagggctttagttgccatctcgttctctcaccgctatttacaaaagaaaagagcatagcaaaaggcgaagaaaaaggcaaaagcgaaacgagatagatgctaattggacagcacaagtgaaacaaagaaatctactctagctacagagtatagtcgtccatccgatggatcatccctccaaccttagcagggctgtaacaaggccactcccttgtaaaaaaaccgcaagaagcctctccataactccatcggatatccgatcgatccaggcagcaagcaaagcgagcgagcgacaggagcaagaacgcagagatctggactaaggaaccggaaacacgtcccgatcgatccctcagcttacgaaacgagagcctccgggcactcgaggatgctctcgaggcgcgggcgccagccgccgccctgcagctgcttgtcggctgcggcagcgcccttggcggcgtgcatgtggtggagcacgtcctcgaggcgctggtcgccggtcttgagctgcgccatgagccactcgagctcggcgcgcgtgagcacgatcttcaccttgagcccctctgccgccgccgccgctggcggcggagactcgtcagtctcctccgggtactccgcctcagcgtcgtcctcctcctcctcgtcccgcagcagctggctgatcctccgcatctcggaaaggctctcctcct

SEQ ID NO: 4525 - DNA, 349 bp, Setaria italica
  Peptide Sequence Number=SeqID_70499
gggagggagaagatgaaaaaagaaggaaaaattacccctaattcctaccagacagcaggaactaaaaccgtcgagctgcaggagaaaatgcggcgaaatccccgttgtgccccccgttctccctatgtacaaggcctccaacgcaggggcaaatcagtaagaagacaaggcagcgccggttaccggcggggccaaatctcaattacgccctccgcgaacatccccccacggacggcaaggggcggcggggggtgccgccgatgcggcggcgtctagtagtagtagaccgccgcctcgtcgtcggcgtagtcggcggcggtggaggaggagagctggatgaggaggtcgc

SEQ ID NO: 4526 - DNA, 278 bp, Setaria italica
  Peptide Sequence Number=SeqID_70500
cgtcggtgcagctcacatcacagcaccaccacctccccggaaaagagagacgcgccaccgggccgctcgacggcgaacatggccgtgtacatccgcctcaacgacgccgtccgcgcgcgcctccgcggggatgacgccgccggcgcggggtgcaccagcagcggcagcgaccacgacgcgtccgcctgcctctccgggctcgtgcaggcgttcctcgagacggaggccggcgccgccgaggagggagctgggccggcgccgaaggagtatgattccga

SEQ ID NO: 4527 - DNA, 468 bp, Setaria italica
  Peptide Sequence Number=SeqID_70501
ctatatagctgctatgcataattgtttattgcttcttgacctgcttctcatcagttatgttggtagtttaagctgtttttatatatgtctacttcttccttgcaggctcttcgtctgttatcctttctcggaaattcattgaatattgtatcgttggcatggataatctgccaagaactctgctgatgtactacactaacatgcccttgccacacaggaagtatttccagacagttctttgcaactcccctgaattcaacaggactgtagttaaccatgacctgcactattcaacgtgggatgcaccttccaagaatgagccacgcctactgactatggctgatgtagaaaatatgaccgaaagtggtgcagcctttgggactagatttcccaaggatgatcctgttctcgatcacatttgtattgtcggtaaatttttactaccgtcctgtccttggtagtagtctt

SEQ ID NO: 4528 - DNA, 841 bp, Setaria italica
  Peptide Sequence Number=SeqID_70502
gctgaggatcggccagggatgggactggttcgtgcacctcgacgccgcggactacccgctcgtcacacccgatgatcttctgcatgttttatcatacctaccaaaggatctcaacttcattcaacataccagctacattggttggaaggagtcaagacaaataaggccaattattgttgatcctggtctatatctctcatccaggaatgacattttttatgccacccaaaagcgtgatctaccaaatgcttataaactatttacaggctcttcgtctgttatcctttctcggaaattcattgaatattgtatcgttggcatggataatctgccaagaactctgctgatgtactacactaacatgcccttgccacacaggaagtatttccagacagttctttgcaactcccctgaattcaacaggactgtagttaaccatgacctgcactattcaacgtgggatgcaccttccaagaatgagccacgcctactgactatggctgatgtagaaaatatgaccgaaagtggtgcagcctttgggactagatttcccaaggatgatcctgttctcgatcacattgatgcggaaattttacaccgcctgcctggagagctcgttacaggaggatggtgtataggtgttgggcatgacagtccatgcgatgtttcaggtaacctggatgttcttagaccagggcctgcagccacaaaagttgctaagttccttgctgaaaggctgtcataccggagcttttattcccaacaatgtatatgggattgatgattgtaatttacaacaatcttcaaaaaggtgaaaaccttgcaacataaagagaactac

SEQ ID NO: 4529 - DNA, 362 bp, Setaria italica
  Peptide Sequence Number=SeqID_70503
cttacagacttaattccttaatttcaaataattgttgcatcaccagatcaaacataacctaagactgccattttttatgcgagctgcacaataattcaatgccagggcagctggaagtcctaaggtgcgagtagcggttgttggagcaggaactgcaaaggtttttgatgaagtatcacagtctgatgatcaatctcttgaggttgcattttcaccttccaaagctatgggtaaagttttggcctcagagcttcccaggggcagtgagagtacatgtaaagtgttgtatcctgcatcagcaaagaagatgggctatcagatcgaggatttcatgtgacaagactgaatacatatacaaccgt

SEQ ID NO: 4530 - DNA, 433 bp, Setaria italica
  Peptide Sequence Number=SeqID_70504
acaaacaagtctttccacatcctgttgaacttattcctgtggtctgtggacccttttttaaaacatgaatcttttttggttgctgttgagaatttgctatatcaatttcatttgtgcttaggtatggatcttcatacgaactgaacttttacgacaatgtacctgttgaagatgtcgaaccactaactttaaagcttgctatttcagctccagttgttgcagtagcttctccttccgcattgaaggcttggttaaagctgatctcaaaagtcgataactggaataattccatcgcttgcattggtgagaccactggctctgcagcgaagaaattgggtctgaagagcatatattatccaacaacccctggaacttagaaagggtaagggttaagaaaaagaaaacaaaaattaaaaacttaaaaaagaaaaaa

SEQ ID NO: 4531 - DNA, 825 bp, Setaria italica
  Peptide Sequence Number=SeqID_70505
cataacctaagactgccatttttttacgcgagctgcacaataattcaatgccaggggacccgtagtaccaatcaggcgtcttcctctccggtctcctccacccacaagctccatgcggccatggccttctcttcttcgctggcgttccccttcccttccccaccttctggccaagcccgacccgcaggaaggctccgagccggcgccaccggtaggttcctggggtgctcctcgcccccgcccgacgtcgtggtgacccgcgagcgggggaagaacgccaagctcatcgccgcgctggaaaagcacaatatacaggctctggaacttcctcttattaagcatgttgatggccctgatacatataggcttccagatgtcttacgtaacgacaagtttgactggattactataagctctcctgaggcagctgcagtgttccttcagggatggaatggcagctggaagtcctaaggtgcgagtagcggttgttggagcaggaactgcaaaggtttttgatgaagtatcacagtctgatgatcaatctcttgaggttgcattttcaccttccaaagctatgggtaaagttttggcctcagagcttcccaggggcagtgagagtacatgtaaagtgttgtatcctgcatcagcaaaggctagccgtgaaattcaagatgggctatcagatcgaggatttcatgtgacaagactgaatacatatacaaccgtacctgttgaagatgtcgaaccactaactttaaagcttgctatttcagctccagttgttgcagtagcttctccttccgcattgaagtaattatagcaagc

SEQ ID NO: 4532 - DNA, 566 bp, Setaria italica
  Peptide Sequence Number=SeqID_70506
ctaataatcatctccttctcaccacatgcacaaacaagtctttcctacatcctgttgaacttattcctgtggtctgtggtacctgtttttaaactatgaatcttttttgttgctgttgagaatttgctatatcaatttcatttgtgcttaggtatggatcttcatacgaactgaacttttacgacaatgtaagctgaactattgttgtttgtctatttatttcttgttggttaaaattttggttagctgttgaactcaatctcttgctcaactattcactctgcagatgcttaatctaatgatgaactctggacctgagatatacatgtctagcattctttaatttaatagtgtcatttacttctgtacttttgcatgcatcactagactaccagagtagagatttctaccgtaagaaccagaaaataattggcatcggtgttatatcacattcctgtgcatggattttggacatctgttaataatattaaggtgttgtgtatgcatgcacatgcaggtacctgttgaagatgtcgaaccactactactcacactgagtcggagac

SEQ ID NO: 4533 - DNA, 997 bp, Setaria italica
  misc_feature (912)..(997): n is a, c, g, or t
  Peptide Sequence Number=SeqID_70507
ttcgttacttaatttgtttacctttgttttgttaagtattgttcgtaacctacttaactttgtattgatcaatctcttgaggttgcattttcaccttccaaagctatgggtaaagttttggcctcagagcttcccaggggcagtgagagtacatgtaaagtgttgtatcctgcatcagcaaaggcaagccatgaaattcaagatgggctatcagatcgaggatttcatgtgacaagactgaatacatatacaaccgtacctgttgaagatgtcgaaccactaactttaaagcttgctatttcagctccagttgttgcagtagcttctccttccgcattgaaggcttggttaaagctgatctcaaaagtcgataactggaataattccatcgcttgcattggtgagaccactggctctgcagcgaagaaattgggtctgaagagcatatattatccaacaacccctggacttgaagggtgggttgaaagcattcttgaagcgctcagaggccacaggcaattaaaagaggccccaaaatgttgaacacgggcagccccttgtaccggatgacgcatgacggagcttcttgacgttggtggccggctgtagactcaggaattctttgcttctttggccttatcacgcctgatgtacagcctaatgttgtttcgtcagtgaaacttgatcatctgttgtgattaaactagctgtaaattgtgtgagctgtacagggtagcatgtgaacaagttctgaatcgcggttcagcgttgtggtgtggcgccaagttggactgtttctactaattttcataagaagatgagagaatccttgttacctgtacatgtcaattgtcgaggaagtcgatgcatgaataaagctgcaaatggttttgccttcaaaaaaaaaaaaannnnnnnnnnnnnnnnnnnnnnnnnnnnnnnnnnnnnnnnnnnnnnnnnnnnnnnnnnnnnnnnnnnnnnnnnnnnnnnnnnnnnn

SEQ ID NO: 4534 - DNA, 996 bp, Setaria italica
  Peptide Sequence Number=SeqID_70508
ccctcctccccgcgataacctccggccgccagcccttcgcgcccatccacgcgcaccaccccgacccggtctccctcctcaactccgagctcttcttcggctccagcaacgaggacgtccacgaccccgacgcggaccatcctcaccggccggagttcccggagctggaggcggtcatcgacgccgccattgcggagctaggcggcgccgcgctccccaagctcaactggagcgcgcccaaggacgccaccttcatgtccgcggacggcacgacccggtgcacgtgcttcgccgaggttgccatgctgctccgcgcctccgactgtgtggcccacgaccttgcctccgcgcgccaatcgtgcgaggattttgtgcgccctgagggtgctcgacggaatgcccggaaggttagtgctggtgccgaggaaggtgctcgatcaaatgccaatgaggctgatggtagcagaggcatcaatgatgctccgagtgattcaagggagataggcgaggagggaggcaagacaaatggtgcggttggtgatttggtagattcacatgaggaagaaagtgatggggatacttgggtggatgatggcttccaatactaccttgccctccgcaagtggtacccaggcctccgcccagagtcagagttcagatgctttgtacgggagcggaagctggttgctgtgtcccagagagatgcatcagcttactacccatcactgcctggatggagttctgaggttcaaccgaagattaaggctttctttgaggaagtaattgagctgcagtttggttcaaacaattatacatttgatgtgtatgtgagagctgatgggcgggtcaagttgatagatttcaatccatggggtggttataccttgccactgctgtttacttgggaggagcttgaagaggaaggaagaggacatgagcttgaatttcgagtggtcatgcagcagggtgcagtgaggccaggattgatgacagcag

SEQ ID NO: 4535 - DNA, 297 bp, Setaria italica
  misc_feature (29)..(29): n is a, c, g, or t
  Peptide Sequence Number=SeqID_70509
taatcagcgcctcctatctgtacaaaaanaccttctagcaactcgagctagtgccaaacctactaaacctgttccagcaccaacttctatagcagtaacaccatcaaagtacgaagatgtgaagcttttgtgcaaaacaaaatcagctaatagtaaggcagctttccaaacctgaaggccaacgctcttgagtgagctggtaacaccatgctgaatggtgagcagatggtagtcacttctaacatggtttgtttcttctcctcctccgatcaaagaacaagatctccatctcatcca

SEQ ID NO: 4536 - DNA, 498 bp, Setaria italica
  Peptide Sequence Number=SeqID_70510
gttacgaactttcttctttaatgactaatagaactttttgccagcaagaaagtttccaactttaagttgctactcttgcaaacagtggactgctgcaaaactttgatttttgaatgaccagttaccgtaactttggtccactttttctcgctggtgaaaactttctgaactgtacaattccatcaaaagacaagccatgccataacactgctggaaacttctccatattctcattttctatttcaacaacatattcaccacctctctcatggaaggcctagactggcaagccacctgcgtgcatgaaaccgcaagatctagtaagtccagagccttttcttggtcatcttcaggccaatacatgatctcctcatccatgagatctatgatgctgcagcgatctgcttgcttcagttttgttctaatccatgttgcaatgtccacaccatcttcgaacgaaggatccacaggcatcttcctgcataggagctcaagtag

SEQ ID NO: 4537 - DNA, 552 bp, Setaria italica
  Peptide Sequence Number=SeqID_70511
gtcgcgctgcggggacggttcgagatactgtccctgtccggggccttcctcccggcgcctgcgccgccgggagccacggggctcgccgtgtacctggcgggagggcaggggcaggtggtgggcgggagcgtcatgggggagctcatcgcgtcggggcccgtcatggtgatcgcagccacgttcgggaacgccacctacgagaggctgccgctggaccaggacgccgaggagggcgccgtgctgtccgggtcgtcggagggcgccaccgcgcagcagatggagcagcagcagagcagcgggggcaacgtcgtgccgccgtccatgtacgccgtcccgcagacgccgccgcacgacatgttcgggcagtgggggcacgcggccgtgacgcggccaccgccgacgtcgttctagaaagcaccggctggccggcgattgatctctctttgtttctctttgcgtctttgctagttagatttctacttcttgcgtagttagctagttgtttgagtagctcgactgccatgttaattaatgtgctactatgtcacacat

SEQ ID NO: 4538 - DNA, 461 bp, Setaria italica
  Peptide Sequence Number=SeqID_70512
gtcctaatttgtgaaggatcagttaaggtacgacaaatcagattataagataagtcatggtgcatggtggaaagcaaaccaaaggataggccaagcagacgctccttgtatgatgagaatttcagccaatcatgagacaacaatgatgcccgagctgtcaagggagttggtattgatctaaatcttggcaaggacactccaatgcctatctctgatgactggtcccacccatatgctcccgaagcatcccagatgtcaccataaccaaatatgttcttcagtctgagagagccttcaactgaccacgactttgcctccggcttggataagcagccgacgcttccatcgatggggttagccgcctcgaccacttcgatgaggatgttagtggtgccgggcaggctcgggagggccagcatccagggtgatgtggacggaatcgaacacttcgaggcgcctga

SEQ ID NO: 4539 - DNA, 405 bp, Setaria italica
  Peptide Sequence Number=SeqID_70513
aggcacactaggattgctccagctcttctgtccatgattattcaccgggttattcccacaccccctgactttacttgccagggtagcgtgggtaggaggcctgctgctcaaagaagcaaccgttccatcatcatcctcctcttcagcagtgcaacagcatatcacagttttcgcgtggagctaggaagttgctccaaccctcgcgagccagacggaggaggtggaagctgccgctgcgctgatggcgaggtccaccctccaccgtgcgagctgagatgtggagaggacgggccgcagcccgcagtgcgtcgtgggcgaggaagggagcggcgccgagtccccggctccccgctcgtccgcttctactgccgtctgccaggcggatttagggcggggggacggggc

SEQ ID NO: 4540 - DNA, 463 bp, Setaria italica
  Peptide Sequence Number=SeqID_70514
tttttttttactaacttgcaacatatagcctcttccattctttgtattacagtcatagtccattacactggtattacatgtgttaaacaagttgcaacagcatcgtacaccacaagtctctatgtgacagcttcgggagctgagttgcagtaaggagtgtgcaagcaaatgaatctagttgacatcaagcacacggaggcgaagccgatacctatcagcaaccccgcgatgctcttccgcatgtccaaccgcaaagaccgcctgaaaacgcggccaaagctggggatcagagccccgcatgctatcaccatccagtagtcgagtccatcgtagtcgatcctcgcaaggatcgcactgatggcggcgctaggtcctgcaagcccggtcagagcagcagctgcaagggccccgcgccagctattcttgttggctacctattattactactagtcttcgtcgtact

SEQ ID NO: 4541 - DNA, 2147 bp, Setaria italica
  misc_feature (2132)..(2132): n is a, c, g, or t
  Peptide Sequence Number=SeqID_70515
tttttcccgtttttcgtttttattttttgtttttcttttttcttttttccgtttctttattttgtttccttaaccgttctaaagtaccgtccttgaaacgtacattacactggtattacatgtgttttacaacatcaccgtatacaacacagttacacaagtcatgtgaccgcttctggagccgagttgcagtaaggggtgtgcaagcaaatgaatctagtcgacatcaagcacacggaggcgaaggcgatacctatcagcagccccacaatgctcttccgcatgtccaatcgcaaagaccgcctgaaaacgcggccaaagctggggatcagagccccacacgctatcaccatccagtagtcgagtccatcgtagtcgatcctcgcaaggatcgcactgatggcggcgctaggccctgcaagcccggtcagagcagcagctgccagggctccgcgccagctatctgtggcaccatatacacagctcgcgacagcagcacctcgtggcagaccatggagggaagctgggagaaccatgtaacggccaaggccataagccttgcgtgccgcgacaccaagcacaagtccttcggcgtatgcatgaaggaatacagaaccacaggcaaggagagattgcagtgtgaggacactaagagagaaaccagaggatgatgtaatgacgttaacagaagaccttttgcgattaaccaccctaaggatgcttgatgtggcagcatggtagacaaggcaaccaacaatgaggagaaagagggtggtaaagagacccatttttgaggacattagaagctgtacaggtctccatgccgcaagacggaaagcaatgccagatgccacaccagtaagaagagggtgtggcatgctgaaggcaagagagaatgtgacaagtataattcctccaataagtggaccgagtccaaatacaagtgataccaagaaacctgatgcatcttctgagttgttgccatcagtaaatcccagaagcacagtacttaatgtttccatgaaagcaacagcaagtgttccagcagaagcaacttgtgatggagtcgcttccttaaaagcatcaggaagaacctctgctataacaatccatatcatgcatcctgcagcaaaaccagtacagaagggtagcaccttctggaatgcgtcggcacaaaggaaagcaggaacagcaacaattggctgtggtaaagatgttattatactccatatcattgccttttggggggagacacccctagatgacagtaccatgcttacagccaagccttctggtatgttgtgcactgctatagctatagtaactagaagaccctgagaaaatccttttgagccagcaaaggaaacaccgacaccagagccttccccaaaagaatgaagagtcattattcccacaacaaggataactttacttgcatcggcaccttttatatccagcatgcttacttctccatattgctcaagaaacttcttgcaaagccaaataaatattcctccgctcaaaattccgaaaacaacccagctcccactgccatagacctgcccttcctgcacgaggtcaaagcttgcagccagcatcaccccagctgctagcccattgcaaaggcctgcccactgagcttccagctccatgaagaagaagggcactgctcccaatccagttgccgcagccatgatgagcgtagaccaagcaactgttgagactgacaccctccccaccttagcaccatcctgcctccctgtgccctccagctccctatggggcgcctcctgcactaaacgcacattgccggcctcggtctcggcgacggccgacacgtcccggactactaggacgaagagcaggtacactaggattgctccagctcttctgtccatggttattcagcgcacctggttatttccacaccccctgactttgcttgtcagggtagcgtgggcaggaggcctgctgctcaaagaagcaaggggctgttacaacatcctcattgtcttgttcagcagcacaacataatgatcacagctttcgcgtggaactgggaagatgctccaacccagcaaacaggaggaggggggatcgacccctccgcgcagcagaagcgatgacaggcnccaggcgcggaacgg

SEQ ID NO: 4542 - DNA, 2095 bp, Setaria italica
  Peptide Sequence Number=SeqID_70516
ctgtacagcgcttgtactggggacagacacaaaagaagttaagaagaactgccaaggaaaggtttccacaggcctctgatgctgatcttgatgccattcttcctcccaagggtgagataacactagctaagtacccaaatcatgctcttgtatatggcatagagggggagttcccaatgatcttcaacattgatgcaagaggccacgatctgtttccaacagtttatgcactctggaaggtccctcatctgttgccagcttttacacttaagggtggtgaggtttcacgttacgtgattggtggtgctgatctgatgtttcctggtatcagtataaccccagaagggtttccttcttttgaagctggtcaaccatgggcagtaaaagttcctggtaaccctgccccaattgctgttgggatcacagctatgagtagtactgaagccttaaaggcagggctacgtggcaaggctttaaggattgtgcattactacagggatatgttatgggattcagctgatggtcgttatgtccccaatgaaggattttttgaagacattgttgttgaagatccaaattttgtttcaacatcccaatctcctgattctactgaagaaactgcagaagcgacacatgaccgtgaagatgcagtggttgatacttcagactctgctgatcctgccatcctcagtgaagccacagaagagataactgatggtgttaacgagcttaaactgcctgaagataaatccaccgagcgaacacctgacgaaaaggaacatcataatttgacaactgaagaaattgattctcttttggacaaatgccttctgcaagcactgtacacaagcataaaagaaaaagaccttcccatgccaggaagtacagtatgggcaaatcacatactcccctgcagacctccaggtgttactctggatattaagaagtcatcacacaaaaagttatccaagtggttgcaatcaaaatcttcatctggccttatttcaggaaaagaggacaagtataaggaggagtttatattggtaggtatcaaccgtaagcatccagactacatggcctttaaaccggaaaagagggtacaagagcctgttgaacgtgaaaaggctgttgctgaaagtagtgtcacgaagcaattggaagttgctgagatttataagccaacctctcatgttaaacccatatttgtggctgtcgaagctgacatggagaagtattacagtgcatcagaggcttctgatatagtcttcaggtacgtcgaaaaggaaaatttggttaagcctacagacaaggccaaagtgattcttgatgttacattatgtgatgcattgtacaaaggagctatcaaaaagggctcagcatacccaactgagatccacaagaaggacttggggtcaacatttttaaaccgcatgcaagttcaccatatagtaacaagaggaactcaagaggtcatacgcaagggtgccataagaactattcagatcatgacagaaagaaggcaggggaacaagaagatgactcggctctctggactggaatgctttctaatggatcctgattccttggcttctgaactgcagaagaaatttgcttgcagcaccacgacagctgagcttccaggtaagaaggggcagtacgaggtcttggttcaaggtggagtgatcgatgatcttgcaaagcaccttgtcgaccattacggtgtcccaaagagatacattgaggtttatgacaaaacaaagaggtaggaaggggagctgatcagctgaagcttatcctgatcctccaaggcctctagggtgttctggcagtaccgatagttgatgcttttgctttgtgcaaaatgcataacgatcccgcattataccttttggatcatcagatgtctaggaattaatatgacatagtgttgaactgagttatatgtttctcttcacccactcctgccctttgttggtgaaaccgtgaaagtcgtttgtgcttactgaagaaacaaccgttagagactggacatgaggtttgcttacgcaacccaaaggttttggtgctccagttttgcttttgtcaaaaaaaaaaa

SEQ ID NO: 4543 - DNA, 419 bp, Setaria italica
  Peptide Sequence Number=SeqID_70517
gttcgtttacgttcgttcccgtctacttcgtcctaggtagtcgggtcttgttccagcagcgcgttgtagctgcccacggccagcgtctcctccccgctccgcgcgcggccgccgttcacggacagggtgaaccgccccgggctcaccgacttgaagtccgagaggcgcgccttgtgcgacagctccatctcccacgtcttgatcgcgttctgcaccacctcctccagcgaccccgccggccactcctgcatgcgtttgcaaggggagatggatcgctgctacgactggacatgcatgtgcacacgtgaagaagaagaagaagaactagagcgattaaagcagcgaacgaacctgtgtgcgctcggcctcgaagagggcgttcacggcgtcgtacgtgggcggcgcgccgtgccgccacg

SEQ ID NO: 4544 - DNA, 419 bp, Setaria italica
  Peptide Sequence Number=SeqID_70518
ttacttatttctaactttgtattgttattctttattccttgttctagtctaattgggatttgtttcaaaatttgggatgatatgggccatatttgggataatgccttctacagtgagctgaaggttgatccatccgagtgtaaaatcctactgacagatccaccactcaatcctgtgaaaaaccgtgaaaagatgattgagacaatgttcgagaaatataactttgctggggtcttcatccagattcaagcagttctttcactgtatgctcaaggtcatctctctccctcaaccaccacatgctagtgtctgtgctttcacacaagcacatacaagattgcatcaacactccactttttacatgtgtgtatacctttcaggcttgctaacaggacttgtgatagactctggtgatggtg

SEQ ID NO: 4545 - DNA, 1657 bp, Setaria italica
  misc_feature (1586)..(1657): n is a, c, g, or t
  Peptide Sequence Number=SeqID_70519
cgctcagagaaacaagaaaggtggagagggtgaggacgaaggggggagaacaggggaggcgccaatggagagcaggaacgtggtggtctgcgacaatggcaccgggtatgtaaagtgtggctttgccggtgagaacttcccgacgtccgtgtttccttgtgttgttggaagaccactgcttcgttatgaggagtcgctccaggaacaagaactgacggatattgtagttggagcagcttgtgctgacttgagacatcaacttgatgtatcttatcctgtcagcaatgggattgttcaaaattgggatgatatgggccatatttgggataatgccttctacagtgagctgaaggttgatccatccgagtgtaaaatcctactgacagatccaccactcaatcctgtgaaaaaccgtgaaaagatgattgagacaatgttcgagaaatataactttgctggggtcttcatccagattcaagcagttctttcactgtatgctcaaggcttgctaacaggacttgtgatagactctggtgatggtgttactcatgtggtgcctgtagttgatggatactcttatccacatctaacaaaaagaatgaatgtagctggaaggcatataacatcttatcttgtcgacctgctctcaagaagagggtatgctatgaacaaatctgctgactttgagacagtcagagaaataaaagagaagctatgctatttaagctacgactacaaacgagaataccagctcggacttgagaccacaatccttgtgaaaagttacactcttccagatggaagagttattaaagtgggcactgaacgatttcaagctcctgaagcacttttcactcccgaattaatagatgttgaaggtgatgggatggcagatatggcattccgttgcattcaggaaatggatatcgacaaccggatgacgctttatcaacatattgtcctgagtggaggaagtaccatgtaccctggtctgccaagtcggttggagaaggaaattcttgatcgctatcttgatgtagttttgaagggaaacaaagacggcctgaagaaattacgactgcggatagaggatcctccaaggagaaagcacatggtctacctgggaggtgcagtacttgctggaatcatgaaggatgcacctgagttctggatcaccaggcaggagtaccaggaagaaggtgttgcctgcctaagaaagtgtggacaggcataagccgcacccctcaagagctaatcatccattcctgaacagaaggaacgggtgggatctctccacactgactgaaagaagggccagagcttaccatgccggccacagatcgattgcatagttaaggttacatgcagaaagaagagctcagcactacatcttcgttgttggtgtcatgttgtaatctagccgtcgtgaacaactgaacatgataggcgatccttgggacggcgttattgctcgatttggcctctattgttgagccacctcgtgaatttcaggtactgttgagctattgtggatttgagatacgagtaggtaaaagtttgtgttaatccagaggaaatactaggtnnnnnnnnnnnnnnnnnnnnnnnnnnnnnnnnnnnnnnnnnnnnnnnnnnnnnnnnnnnnnnnnnnnnnnnn

SEQ ID NO: 4546 - DNA, 308 bp, Setaria italica
  Peptide Sequence Number=SeqID_70520
tttcttctttatttatcctcagaagaggcaaacagccatccatgaagcctttttggccgtgtttacattcatcatccacaaaatcacataatgcactgggtaagaaatcggctatagagaaatcacctctagtattccacctattactatgggcgtgctgtgatcccttattcccttattgtttcattggcatgacagagcagtatttttttcccgaaaaaggacacatctgtattaacttagctacttaacagttcattcatcagtcatcctcacggttcttgcaagttgggttgcagggatacggg

SEQ ID NO: 4547 - DNA, 268 bp, Setaria italica
  Peptide Sequence Number=SeqID_70521
ctctcactttattactgtccatcgttactgctggatgtaatcaagcaagaggctcaagtgaccaatataggacaaagagaactgagtatcattgaattaagaagagcaaaatatttacaagacgctacacccgtacaccaaaccagaacagattacattcacaccagggaaaagactaacaaccacgaccaaaaaagtaccaaaaagacctcaggtggtagcagcctgaagctgcgccaaccccctgactcctgccaggtgcccaggg

SEQ ID NO: 4548 - DNA, 398 bp, Setaria italica
  Peptide Sequence Number=SeqID_70522
ctggcctggactgaactccgccgcgcgctgcgacagcgcgttgccgccctccggtgcccctcgaagccacctccgtcgccgccgccacgtcgaacagcgcgcaggtgtgcctctgcagcgtcttcctgtttgcctccagcttgtccttgatgtgcgcgaggcgcttggattggatttggcgtaccagctgcgtcagcttcccgtggatcgcgactacggaggcggcggcggcgtccctgcccgtcccctgatccgaccgcttggagcgctgggaggaggaatcggaggccttcgacgacgacgccatggcgggcggtggcgcgggaggcctgcgacgccccgccctcgccttcgtctccacttccactcctcgcgctacaggaccctctctggtttca

SEQ ID NO: 4549 - DNA, 1125 bp, Setaria italica
  Peptide Sequence Number=SeqID_70523
caagagactcaaatgcttattcagtctcccatagttgatcaggtgcgtgaggctcaacaacatgatcgtttgcttcaagaggttcgaaagagaattttagggggtagaccacgggagttcaccatagatgaacatggtgctattcgctttagagggcgtctttgtgtgccacaaaattctgatgtgaagatggatatacttagggaggcacatcgaacaccttacacaattcaccctggtgagaccaagatgtatcgggatttaaagaaaaatttttggtggaaaaggatgaaagttgatgttgccaaatatgtagcatcttgtggaatttgtcagcaagtttaggcagaacataaaaagcctgcgggtttattacggcctttggagatccctgagtggaaatgggaacatatcaccatggacttcgtggtcgggttacctcgctcacctcgagggagagatgccatatgggttattgtggatagactcactaagtctgcacatttcattccgatgaagtcaactagttcagcaccagatttggttcccttatacatgagagaagtgctaaggcttcatggtgtgccaaagtccattgtttctgatcgagatcccaagtttgtgtctaacttttggcgaagcttgcatagtgcattgggcacaaatttgactcttagcactgctttccaccctcagactgatggtcagtcggagaggactattcagaccttagaggacatgcttcgtgcttgtgttctttcatggaaaggtagttgggaggatcatctatctttggcagagttcgcttataataacagctatcaagctagtatcaagatggctccatttgaggctttgtatggtaggaagtgtatttctcccatatgctgggaaactttgggtgagagatctttgattggtccagattgggtccgagttacatctaaaaaggtgcgggagatacgacagaatctgttggctgctcagagccggcagaagagttatgctgatgtgaggaggcgagatctagagtttgcagtgggtgaccatgttcttcttagggtatcgccaaccaaaggtgttgtgaggtttggcaccacaggaaagcttagcccaaggtacatt

SEQ ID NO: 4550 - DNA, 430 bp, Setaria italica
  Peptide Sequence Number=SeqID_70524
actacaacgtttcttacctccttccctgctctcccatggcttcccctccctaaatcccctctctacagcagcaaacccttggggggaactagcaaaacggatcgaggacaacaagaggagcaagaaaggtgcatcttccatgtagatcggtcctttccccatatcttcccgctgccctagggtttggggaacgaccaaggtggtaacgctccggatcacgcttagagcggctatctccttctttgggaggtacttgatggatggatgctttgcttgggggttgggaagtagcagcacgtcacacacttctctttaatcaaaatcctctagtgtgatactgtaatatttaagtccttctctatgagagtctatttgttgcttaatgatggttaagctttgttaaaccttgccttaatcgtttgaatatcat

SEQ ID NO: 4551 - DNA, 501 bp, Setaria italica
  Peptide Sequence Number=SeqID_70525
taatctgctatttttgctacctccaccttaaatttcagaatgataacttatccaatatcatccattcaattacaagtttatgcacatcttactgttgttattacatatgccttgttctttactttataacttggtaatggctcttgttggtataattatgatgaggtttatgttgtcaaatgaggagagacttatctggtatatgcggtgtatactctctttgtgcgatctgtcttggcattgcatttcattgcatcacaatgcatggcatatggagttaagtcgccgcttgatagccgcgatcgtaccggtacagcatcgtttattgggcataacaatgcagcttcatactttgttgagtatgaaggcaggagacatggcatttgtattgcatttgcatttagggtgctatcggttttctatggtatttatttggcagtggtggtgagaagtgaattttctccaaggtttggtgatgaattggtttatttatgtatgagg

SEQ ID NO: 4552 - DNA, 470 bp, Setaria italica
  misc_feature (458)..(458): n is a, c, g, or t
  Peptide Sequence Number=SeqID_70526
gtttcttcctccttccctgctctcccatggcttcccctccctaaatcccctctctacagcagcaaacccttgggggaaactagcaaaacggatcgaggacaacaagaggagcaagaaaggtgcatcttccatgtagatcggtcctttccccatatcttcccgctgccctagggtttggggaacaaccaaggtggtaacgctccggatcacgcttagagcggctatctccttctttgggaggtacttgttggatggatgctttgcttggggataagaatgtggcagcacgtcacacacttctctttaatcaaaatcctctagtgtgatactgagcaatacatgccttaggcatgggaagcatagggagtaatcaacatgtgtggttgcaacacgtatcaggctcaatcacacgatcaagacatcaagttgaaccctcaacacagccatcatggtacaangaacctacgtaa

SEQ ID NO: 4553 - DNA, 499 bp, Setaria italica
  Peptide Sequence Number=SeqID_70527
ggaagatgctgtcaaatctgtccctttttgtccggtgtggcttagtagcatcctaaggtggcgtttgtacttattggtatgttacaggagcaatacatgccttaggcatgggaagcatagggagtaatcaacatgtgtggttgcaacacgtatcaggctcaatcacacgatcaagacatcaagttgaaccctcaacacagccatccatggtaccaagcgaaccctcggtagcaaaggtgattcgatcgggcgctgaagatttgaagtggaagtgcaaccgggtgatgatgacctgagcgtcgccggtttcctgaggaacaaatggggaagcagcgccatcctattacacccagtgtcccgaccaccttgctggcatcttcttcctgtgggtcgctggttgggttctagccacagcaaccatgaagtggcatgcttgttatcataggttctcagcagcaactataaattccgtaccccagctggtgcacatggaaatcag

SEQ ID NO: 4554 - DNA, 953 bp, Setaria italica
  Peptide Sequence Number=SeqID_70528
tcgtagtagtacgttcttgtaaaaggttgtcgggtagtattacgtactagtaattcttgtttgggccaatttgtaaactttgggtgagagatctttgattggtccagattgggtccgagagacgtctgaaaaggtgcgggagatacgacagaatctgttggctgctcagagccggcagaagagttatgttgatgtgaggaggcgagatctagagtttgcagtgggtgaccatgttcttcttagggtatcgccaaccaaaggtgttgtgaggtttggcaccacaggaaagcttagcccaaggtacattggtccgtttgtgatcacagcccgtgttggcagtttggcatatcgattgcagcttccagaatcattgaagcaagtgcacaatgttttccatgtatctatgttaagaaaatatttgagggatcctgagcacaagattgatttggagccacttattgtggagccaaatctaattgtggaatgtcacccagaacgtatcttagactcatccgagcgagtcatgagaaagaggaccatcaaatatgtcaaggttctatgagtaatcagtctgagcgtgaagcgacttgggagctcgaggaccaaatgcgcaagaagtacccacaactctttgagagcggtggtaacgctccggatcacgcttagagcggctatctccttcattgggaggtacttgatggatggatgctttgcttgggggttgggaagtagcagcacgtcacacacttctctttaatcaaaatcctctagtgtgatactgtaatatttaagtccttctctatgagagtctatttgttgcttaatgatggttaagctttgttaaaccttgccttaatcgtttgaatttcatgttaggatcttttatttatgctagtgtgctttatctattttcatatcttattgtttcttgcttccgcggttgtttccttgta

SEQ ID NO: 4555 - DNA, 544 bp, Setaria italica
  Peptide Sequence Number=SeqID_70529
catttgcattgcatttgccatgtctcctgccttcatactcaacaaagtatgaaggcaggagacatggcatttgcattgcatttgcatttatggtgctatcggttttctatggtatttgtttggcagtggtggtgagaagtgaattttctccaaggtttggtgacgaattggtttatttatgtatgagggtgttggagttattattattattattcagtgaggggatccactcactgataatagttaaaccatggtctaatgaacttgtagtttaaatagcttgttaaagctagttacttgctgagattttatatctcacccctattttggttatcctctcaggtacttgttggatggatgctttgcttgggggttgggaagtagcagcacgtcacacacttctctttaatcaaaaatcctctagtgtgatactgtaatatttaagtccttctctatgagagtctatttgttgcttaatgatggttaagctttgttaaaccttgccttaatcatttgaatatcatgttaggattcttttatttat

SEQ ID NO: 4556 - DNA, 297 bp, Setaria italica
  misc_feature (228)..(297): n is a, c, g, or t
  Peptide Sequence Number=SeqID_70530
ttaggtagtaagctgtaatggttgtgcacacacgtacatagatactgctcgatttcgattcagagttgaggtgtagagatcgttgttttgctggttgacatgttgtactgtactatattggagaagaagttggttggtggtgactgatgagggccatttcgtgatcataccattcatattcatacttgaaataaacgtataggtcgtataggtgatatcttaaaaaannnnnnnnnnnnnnnnnnnnnnnnnnnnnnnnnnnnnnnnnnnnnnnnnnnnnnnnnnnnnnnnnnnnnn

SEQ ID NO: 4557 - DNA, 501 bp, Setaria italica
  Peptide Sequence Number=SeqID_70531
tacttttgagtaattgtggaaatgcaaaaaaggataggatctaattcctgcatcttgtagcctcttggtgaccacctgtgttgtttgttgccatttaattacttaagacttgagatgataagcttcttgtttgagaattttgaagacctccctccccactacgacagtagtaagagttcttaactctccccttttgatggttcaatggaatttatcactttatagtgttgttgcctcagtatattttgcatgctgacgccccatgatcatttcttaggacctagtttgataggtgcagaaactgttcgctgacttatttcttttatggttacatgctggactttgacaattgagcaattttcgaaatatgtgtggctaatgtgtggatagctcgtgatagtagaattaaatgctgtcatgagcattggcattagatgtgtgggtaattgattgtgaggtcctacgtggaggatcatagctgtgggtagtcgcgctttctca

SEQ ID NO: 4558 - DNA, 459 bp, Setaria italica
  Peptide Sequence Number=SeqID_70532
taagaaaccaaaagcttaaaatttctcgtccagctaaggctgtcccaattgaattgttgatgttggtaaatcaagattccttttttgctttggcaaggcccattcaagacctatagtagcagagaatgaaagatttggctgctctggtgatataatggttgatgcaaatattggagctcgggttggagagctgcctaactgcttcatgatcatcaatagcatggataatgctgcttctgatgatgttcaacatctggacgtagctatcctagaaaatcaactgcagttggtgccatctaaatttcagatgggctgtttggaacgaaatgatacaactcaggaaacctggcagaactttgcaagttttcaggtgattatattagaagacagtagagttgttgtgagatttcagcaaaactagctgtctaactgtgaacaattgggcaaaaactccgcaag

SEQ ID NO: 4559 - DNA, 308 bp, Setaria italica
  Peptide Sequence Number=SeqID_70533
tcggtacccatatcgtgccacgcattggaacaccttataatcttctctgtctacttgtctaaagaggaatcgctcggtggtatgccttgaaccaactcggtgtagaagaggcctatccctggggctctctgaacgtcacggcggccaaggagttctttcacactgtcgttctacacggagtgctcgagctcaaagttctttttcttcacatgcacataatgccacacaatcatcactaccattaggaccgctgacattgctacgggcacatatgcaccatgcacaaatcgatataaggaattagacaa

SEQ ID NO: 4560 - DNA, 1856 bp, Setaria italica
  Peptide Sequence Number=SeqID_70534
tctccatctgcctttcctgaattttctgcctacagtctgatagagctttctcataggctgcattttcttcttggagagttatttctctctgctgggcctgctccttggtggaggagaaaagagagttggaactattgaataacaaggtgcaaacaatagagaaagagtggtctgtggttgaagaagaatctttaaagaatccactcctggtatttttatttttcctacatgtcaccctttcaatgacttcatgttggattttctcatacttattcttctttaaaagatgtcattatgataatgaacctgttgacttgtgctacttgtaacttgcaaaccatccctggattggaaatacttgatcactaaaagggcctagcgtgtctatacaaaataatctcatttacatttgtgttatatttgaacgaattaagagcacgaaaccatagatagcataaataattccagtgtttgcatcatactttctatttacagctttggttttcaatgagttggtagcagataattttttaatggatagatctgtagttgctagagccttttccaaaagccaactgctaaagactaagagatatattctgaatctgggaagaacacaaaatgggttatgttcgtttaccccttgcttctatgtgtaccagtagaccattgcttacgcacagcactcagcatccaatttctactgattgacttggtagggaagtttccttatcaatttacagtcttaatgcatacgggaactagatttttttcttgaaattacactgtcagaaatcatattgtttcaaggaaaccatatgatcacattaatctggcatccagggagttaagttctacatcatagaattaaggcatattgccttctgtgacattgttttataactgtttatccgaggtgcatgatccatggtccaaagtctcgagtgggttccttgttaagtaaggggcaatgagtagatgatgtgatggtagcaaacagttgtcattttggaagctcaacaaagttagttctatacttctatatattttatgtggcttctaaagtataactagggaagtgaccattgatacaccctagcttaatatttatagcaatcttactggtcctttctgataaatatgcagagcaaagggagaaggtcctggagagacaactacacagcctaattgagcagttgacgtccaagcaagctcaagcagaaatcctaatcacggatgtacgtgccaaagaaaggagtgggattctttaaagattcttcttcaaccacagaccactctttctctattgtttgcaccttgttattcaatagttccaactctctttcttctcctccaagtctttagacttaagattgagcgatgattcagcttccagtagagcattttcagttgtttcagaagctgtagttgatactttatgctgagtagcctcttgctccttcagagcatcttcaagctgtgcctttaaattatgctccgctacttccatttccttcaaattactttgaagctgactgatctccatctgcctttcctgaattttctgcctacagtctgatagagctttctcataggctgcattttcttcttggagagttattcttctctgctgggcctgctccttggtggaggagtgcgcgttgagctggagggcgagggccgcggaggaggcgagtgagtgcgcgtggaggtgcggcagccgctgcgcgacgtgcggcgggggcacccggaggcgcagatcctggatcgcgcgccgcatcgatgccgccctcgcgtcaaggtcggctgcccatgccaggatgcccgccatggaggcctcttgtcaggatctgaac

SEQ ID NO: 4561 - DNA, 959 bp, Setaria italica
  misc_feature (918)..(959): n is a, c, g, or t
  Peptide Sequence Number=SeqID_70535
ggcccagcagagagaaataactctccaagaagaaaatgcagcctatgagaaagctctatcagactgtaggcagaaaattcaggaaaggcagatggagatcagtcagcttcaaagtaatttgaaggaaatggaagtagcggagcataatttaaaggcacagcttgaagatgctctgaaggagcaagaggctactcagcataaagtatcaactacagcttctgaaacaactgaaaatgctctactggaagctgaatcatcgctcaatcttaagtctaaagacttggaggagaagaaaagagagttggaactattgaataacaaggtgcaaacaatagagaaagagtggtctgtggttgaagaagaatctttaaagaatcccactcctgagcaaagggagaaggtcctggagagacaactacacagcctaattgagcagttgacgtccaagcaagctcaagcagaaatcctaatcacggatgtacgtgccaaagaaaaggagctggaacggctgaaccatttgcatagaaatcttcacagcagtgccaatgaaacaagcgcaccacggaaccgattcagcagaggtcttttgagtgcccctgaagattattatggtgccaaagcgggtcggagactgtatcaacctgaccttagaacagaaggccagaaacggatgatggttcttaggtccgcaattgtactgtatgttttgctgcttcatatcgtcgttttcataaagatatcagtttgaaagctgttacatttggtagggaagaaaatactttttaactgtaccaaacatgcaaatatttgccatgtaaataatatgtgtaatttgtagaagaataatgtttctgtagaaatttatttatgggaaagtcggctatgtagcatcgaaaggacaaaaaaaaaaaaaaaaannnnnnnnnnnnnnnnnnnnnnnnnnnnnnnnnnnnnnnnnn

SEQ ID NO: 4562 - DNA, 1929 bp, Setaria italica
  Peptide Sequence Number=SeqID_70536
gtcgaatttcaataactggataaacgctcaagcatgcatagcagagattccctttcttcacacgagtgtatcaaagtcagcgttacaaattatcgcaggttacagaacttaataaattggtcagcaaacatctttcataagggccacgggacgaagtctctcagcaaaccatcaccattcaaccagtcgatcaagcgaacggaaaccagttcggcttctgttgctgaaacctctcccacacgccttctattgctgaagaagggtcaagagcaacaacagatccacctttccaactgcacgatgcatgagtgcgagtgcaaagaaaacttttcgtattccactcaaaacattaacttgcatatgtcagtgacgttcaatgttgagcatagaaataaaaacgtatgacaagaccccaaacagaagaaatcaacaattgatctctatgttcatgaaaggctcatgacaaaagagatctaaaacggatctgtaaaaacatcaccgcagacgaacattaaaatccaaatattgaagagggacacccagcaagtagaaacttgggcaaatcatttcaagattataaaagaaatgaaactctgaactcagctaaatctttggaatcttacttgtcagcataaaaggtgcagacagcaagggatgcaggcagctgcagtgccactatcatctcatcatcaccatcaactcatcatcatcaacaaggcaaacggcacagataatatcaacttcaacagtaagctacgtgcatgttgaccgcatatcagccatcacatcttcactccatcatgtaactagaaaggtgcagtcaccatgaatagtaagtacccattactggaaagacagtgataatatgaagtactaataggaaaggaaaatggaatggaactggtgtacacaaagttcttgacaagcagttctggtgccaaatgaaagtagcattcgaagattgaagcagcaactgacagccagcgttacagaactgtaactgaagagggcccaccatcaagcaaatgcatagcctctagttcatccatccttctgagctgttcaagatgtgctgcaagtgatacactgctcatgtcgaagggctccgagaacgaggagaccggtcatcattgcgcctgacaggagatttctcaggagaaggtgatgccttgcgaggaggggagcggctagggctcctacttgcaggtgacgcactgtctctgccacgcctcttgtaatcatcaggactatagctgcgacttcggctacgactagggcttctacgtgcaggagacaaactgtctctcccatgctttttgtaatcatcagggctgtagctgcggctcctgctacgacgacgatagtccctctctctgtatctgtcacgtgtgtacctatctctactccgactccgacttcgccttctataatctctatcccgatagtcatctcgataatcatcacggtacctccgtcttggactgcggcttctggaacggccccttgaccttggaactggctcgactattcttcctttgttaatccgttcagcatttgggccatacttggcaaactgcaccatgatctccctcccatctaccagtttcccatcgagcctatcaactgccttctgcgcctcgtcctcgtacttgtacctcacgaacgcgaatcctcgggagtcaccagtcctgcggtccctggggatgtagatgtcgacgacctcgccgtacttgtcgaagagggggaagaggtcatcggccgtcgttcggaaggtgatgttgaggacgaggagggagtaggtgtcgcggattggcggcgggccggatcgcccgaagcgcgacatctcgccggagatgcggcggcgcggagagggggtcgaggcgcggcggggtggatggaggtgggaaagcgagggaaggaagatgacag

SEQ ID NO: 4563 - DNA, 266 bp, Setaria italica
  misc_feature (249)..(249): n is a, c, g, or t
  Peptide Sequence Number=SeqID_70537
cttcttcctttcccctttcctggcgtcgacgactgggcgagcggcgccgcctctcgctgtctcgcaaggtcttcgccgggcccttctccggcgacgagcatccgccagcctgagtttgtttacactatggaggaatcacgaaaaagagatgtttctactgcaaatgctaaaaatataagctcacatcttgatgaagactttggaaatgattttctttcatcttggaagctaccaaaatcaggaaaaacncaattgacttcagtgtt

SEQ ID NO: 4564 - DNA, 1020 bp, Setaria italica
  Peptide Sequence Number=SeqID_70538
tccataattcacagctgcaaactctctcagccttcttggacttggtccctgaacccttccatttgaccactccacagctgctaaattttctgacagggaatttcatgaatatgccgttaacttttattggacgtggcctctctcttgaagaagctggtcagacgttatcagatatcacctccagtttgtttgcttcccttttgtttttggttgatatattgacaaaggaatctatcgtttggaagttaaaaatgttgaagacagcatcatcatttgtaaattcccgtttacatgcagtcaaggcccagactttggtactagccagtggaaatgatgaactgctgccaagcagccaagaggctgagaggctacgtggtgctctagagaaatgcagaacacgccttttcagagacaaaggccacaaaatcttactggaagatgaatttgatctcgcgaccaccattaaaggagctgggtactatcgccgctctaggaagacagactttgtttcagactatttaccgccaactcctgatgagctccaacaggctattcaaccgcgacagggtcctaaactttatcactgacccagtgctactatcaacactgcctgatgggaagatagtgaggggcctggctgggctgccaagggagggtcctgccgtgttggtcgggtaccacatgctcctggggcttgagcttggacccatggtcacaggggtgctgagcagcaccggagtccacatccggggcctggctcaccctgtcattttcgacaaaaactccgagcagctcatgcctcactcggcgtactttgatctccaccggatcttgggggcagtaccagtcacgggggccaatttttacaagctccttgcagacaaagagttcgtgctgctgtaccctggaggcgcgcgggaagcgcttcataggaagggagaggagtacaagttgttttggccggagcagcctgaatttgtgagaatggcatccgtagggtttggacgcaacgatcatacc

SEQ ID NO: 4565 - DNA, 1534 bp, Setaria italica
  Peptide Sequence Number=SeqID_70539
tactacacactcttagattctttcatctcaatgtcatcctttacacagtgcaattctttttctgtaacaatctccatgttatgtacaccttcactaccctgtcgtagcatatcatcggtgtcagcattaatgacacccaaggaactgcaatgtgattttgtaggcaattctgtgatttctgagtgtaatgtttcaccacacgcatgattcccccattcacaacaggcttttgctcctttggactctctacttgattgacatcgacaagaccggcaacgtcagccttcaggcgctttactggacgcttaccataagattcatctgaaacaggtgaggatggctttgatactgtgctatttgatgtctgctcagatctctcaattctctctccctcagggtcacaaggatcacagtctgccataaggcagcactggtactgggcactgggggagcttaaacttgagtatgtctccctgcacaaatcttcacagtccgacatgcgacaatatttcccttccacttccatgcatctgtcaagatgacattctcctttgagatacaattcatgcctttcagttgtcctatttgattgaattgacagctctactggctggctccatgcaccatctaactctctctcatattctctatgttgttgaaatgattgtccttcaccggtggaatatacacagaacctgcagaaagttttgtccacttgctttagagatagagtccaccgatgatcttatcattgcattggaacttgtggttggatcacacacggctgataaaggactggaactcccagacatagatgatattggactatcaacaggatgagcaccacctggaaaattgtcctttacatggccatttgggaatccagcactggcaatctcaccaagtcctgaactacattttggaagtgctgacacacatggagcaactaaggtgctcctaaagctttcaggcctttcagttagatgaaaattagcagctgcaacattgtgattatatggtaaatatctctgagaagtgaacatagtatgtgtaggcatgtctcttgcacgtgcaggcaaattagtaaaagcaggatcaactctctcatgatagacactagagtctatcatctgtatcccaggcagctgctgtaaattttttgtcgttggagctgctgaggatatccatgaatctctgtggtttctatgcgatacagaattgagcaaagcattcaccctgacttctagagtgctgagatccatgtaatggacctttggtgctcttttgtagaggcattcgtcaatttttcttgaaaatttcagaaggtaatccgggctggttttagcaaattgttccctctttttcaggcaacttgcaattttttgaatgacaatgctgcgaatcggagaggtagactgatccatgttatccggctgaagcatatcaaaatcgctcggtgacatctgttgccgaatagaaaagctgctcggtgcataggaggccataactttcccttgcagggtttgagccatca

SEQ ID NO: 4566 - DNA, 481 bp, Setaria italica
  Peptide Sequence Number=SeqID_70540
cccatttgaacatcaacattcttgttggaggaatagaggatcaccagtggagataaaactgcatactcaaatgatacagtttcactttcattgaccatttggctttcttgaaactgatgaggtgctgaactgataccctgaaatttttcagaacccactaccgaacaaattgattgatccaatgaatccagtgccatacttcgtaattgtggattggagcaattggcaagctcaagatgatgagcagcaatttgatcccatatcggttcaactcgatgcagattgttcacaagtatcgatgtcatgcgctccactgaaaatgaaatgctcccgatctgctggcctgacaattgagaacttccagatatgtgctgacttgacaattggtgcaatgcagacagaagtgatttcactgccgctatgttcatcaaggctgaactttcaaacagctgagaatttaaagaagagaggatacggaagt

SEQ ID NO: 4567 - DNA, 1004 bp, Setaria italica
  Peptide Sequence Number=SeqID_70541
gattatatttgattcatgcatgtatttatctacaagtaagaaagcacccacgatgcagattgttcacaagtatcgatgtcatgcgctccactgaaaatgaaatgctcccgatctgctggcctgacaattgagaacttccagatatgtgctgacttgacaattggtgcaatgcagacagaagtgatttcactgccgctatgttcatcaaggctgaactttcaaacagctgagaatttaaagaagagaggatatggaagtcactgtactgtccagatgtgtctcttgaaagtcttgaaacagaagctgatacttcctgagtggaagcatgtggagaatgaatagctctatcaagtgctgaaagagtctccaacaccagaacccaggaaggaccaaggatattgtgtaatcgatgtgcaacattaaaaagtgtccttagtgcctgcacattttttggtgtgagaataataccatcacgctggtccattgtagtttctgacttctttgatccaggagactgcaagatgcttttcttctctccttcattcgggttattgattgtaaacttgcaaagtgatgctagaaaagagttcaagggctctatagcacggagaactccacaagcctgagtgaatgcctggtatcctttcaatatctctaatattatagcttccccctgtgacctcatcaaaataagtgaaagagagtcaaggatggttaaccacgtcgaattgaccatagccatacaaagaagggccagctgtccactacattccatactatttgattcacattttggtgattcaagctcaccgacatcgagagcttcatcagtcaaagttgcaatagtgaaaactacacctaagaggccttcaagggccagagtgatggtatgtgcttcgctagcaaccaaaacagcagcatttgatgcatcgttatccatactccactcaatccctttagctttactactgaacattccagcaacagcagctagagtctcttcg

SEQ ID NO: 4568 - DNA, 308 bp, Setaria italica
  Peptide Sequence Number=SeqID_70542
cgtggcgcacctccccgcgcagaccatggcggacgacgatgaggaggcggaggcgacggagttggagagggcgtcgtcgcgggcgaagctgccgatggggagcctgtacgagggagccatgttcgtgctgttcgagatggtggtgctggagctcgcgcgcgtattgggccagagcccgccccagatgagggcccgccacacaaacctggagtagactgatggccccctttgtcgagctctacagcctctactgtgcagcgatgaactgactgattgttcatccaccggttggttgggttggttagaaa

SEQ ID NO: 4569 - DNA, 1076 bp, Setaria italica
  Peptide Sequence Number=SeqID_70543
ttagttaccacaggtctaccaattgttaaagttccagtcttgtcaaacacaacagcatcaacatcagagaacttctccaaaacatccccaccacgtaaaagaagtcctctcgtcgcacctaatgaagtaccaaccagcacagcagtgggtgtggcaagcccaagagcacaagggcaagcaattaccagaacactgcaagaaagttgcaatgccaaagacattgcgcttccatgttggatagcagcaggtacaagttgcgaaccaaaaatactccagaacatataagtagcagcagaaagtgccatgactccatatgtaaagtttcctgcaaccttgtcagccaatcgttgaacaggggccgcccttgtctgggcttcttcaaccaagtgaattatgtcagacatgacagtctcaccaccaggtcttctaacttcaacagtgagtttaccattcaagttgatacttcctgctgatacttctgtccctgctatctttgtcacgggcataggttcacctgtcaaacttgattcatcaactgtactccttccagctttgacaacaccatctgctgggatacgatccccaggcagcactacaacatagtccccaacagcaagagtatcacatgggacttcaaccaatgatgatttctcagcatcattatccaccattaggcgtgctttagagggaaggatattaagcagtccagtcatatcactggtagctttaagctttgccctctgctcaagattcttccctagaagaacaaaagctatcaacataactggttcctcaaaaaatgtcttccaccccagctttggaatgaaggctgcaattgagctgacggcaaaggatgacaacgcacctaaaccaaccagtgtattcatgtttggagaccccttgaataaactctttataccgtcaagtattagtcttcgaccaggaccgacaaatgtaaatattgacagagacaaatgaaatccagtggaatgaatgaagtgcatcaatggcacattaactccaaagaggtggggatgttttggagaagttctctgatgttgatgctgttgtatttg

SEQ ID NO: 4570 - DNA, 305 bp, Setaria italica
  Peptide Sequence Number=SeqID_70544
aaccccgcggtgtgcgcggcgcgcgacggcgtggtgatcccgaggctcgtcaggctgggccccttcctggagcacaccaacttcgagtgcgacctgatcgagccggcgccgcagtcgccgtgatcgaaagcctacactgtatagatcagtgtccgactccttacagcatttttactgctcactgatacatagtgtaatcgttggctcaaagattagtgtatagcaaatgtataaggtctaagcaactgaattatgttttttttacggaagaaagttaaacgacaaataagtggtttagggagaaa

SEQ ID NO: 4571 - DNA, 640 bp, Setaria italica
  Peptide Sequence Number=SeqID_70545
ttttttttttacggttactatttttttttattcatggaacaatatcttgttgaaatgtttgattataagagtctacagctatctttgcatttacagctacacgtacgcctagtaaaagaaaagagagttttgagctacgtatgtacgaccatttgttgtggttacttctgcacttgttcttgcattagaacacgtctggggagggccgggtgagcctctcgtcttccagtagctcgtatggatcgatgtacggcggtggcgacactggattcttgcttgcgtcgtgtacgaaacttggtccaaagtacacatataagccagcaaagagagaaacagtgacaagaatcaggggcccaaatgccagaaagaaggtaccaccaagtgacaatagtaacttcgcccgtggtacaagaccctggaggccctcgctgttgagcgccatggaccgctccccgctggccgtccgtggcggcgccacgctcgaactccgccgcggccacccgcgctttctccctgcctccgctcccccttcctccgcctccttcgcctccgcgggcgcggccccggcgccatcccgcgccgccggagctccctggcgaagagcgactcgggcgcctcctcctcctcctcttctctttcc

SEQ ID NO: 4572 - DNA, 1236 bp, Setaria italica
  Peptide Sequence Number=SeqID_70546
gactcagtgacgtatgtggtggggtagaatcttgtaagctactaattgactgactcatgtgggtagcttgattattatttgggtttcagcagctgtggctgaaagagccatttccagttgcaactcgaattccacatcccctttcgttttggcacttcagcattaccagaagtggatggaagttggctgctggctgatatacaactactttcattatctgcttttatgcttgacaaagttttagataaacttctcttgcaggaagaggtctgctttgattttccaggacctcctctttgttgattcatgttgacactatcttgagtattatctttcagtagagcaggagaactaaccacattaccatcagcagctggagaactatacggtagtgaccttgtacaaagcctagatgcatcttgattgagtgttcccatcactttagtatcaggctttagtccagcaacatccagattcgtaacaaaccttgctgttaagttaagtgccctgaacaatgccactgaaagtgcacaaacctcttctgcagtgcctacacgatcttgaatagtgaaagccaaatttgatacaaaagatcccctgtcagtggattgtgcggttacacaaaaagtacgatggaaccagctcacaagatttcgtagattaacagctctcaggtttgtaacatcagtaaaactccataatacatggttcggtacaagagagagaatcgaggcctgaataagaggatcattgcaagccttgtcaaccaccctcccttgctattaggcagagcaaatggaccttgtgcacaagttcagccaactccttctcttcagcagtagccctccgaacagtcttcttgctagtggaagaaggtacatcatcagcaaactcaacagtgacagtctctccaaggtcatgggaatactcattttgttctacatgcccctcttcccagtccatgtcaacagcatcattgtcacgaacagcctccatctgttcctccaaattgttctttccgcggctccctccactgcacctctccatgctggcattatcctttggttctgccttggctctgccctttttccgtgtattcccaagtggtgatcctgtttccaccttggcgggagatttccctttcgctgccggcgaagccctccggcgacccgccccggcggttgcggcctccgtgcccggccctgcagagcaacagagcactcgctcatctggaat

SEQ ID NO: 4573 - DNA, 335 bp, Setaria italica
  Peptide Sequence Number=SeqID_70547
actacgtacctacaagtctcatccagcttcaggccctccttagtggcagagacgagtttcttgccctcaaattccttcagctggccaatggcatactcatcaattgcatcaaccatgtacaggacttcatagcccttcttcttcagctcctcaaggactatgtgacgaggatgtagtagatgtcgctctggccctccttcatcctcgtcacatagtccttgaggctagtcagctcatcaccgctcttggtggagtggtacctcaggagctcagcgatcttggtcctgttctgggagtcctcgtggatgccaagcttgaggttctgcagaaggcct

SEQ ID NO: 4574 - DNA, 205 bp, Setaria italica
  Peptide Sequence Number=SeqID_70548
tgccaaccgaagatgtcgtggttcgggcaccaccaccacaaccagccggctcccccggcgtcgggccccaaccaggtgttcaagatcttctgccgcgccaacgagaactacagcctgacggcgcgcaacggcacggtgtgcctggcgccctccaaccccagggacgagtaccagcactggatcaaggacatgaggcacagcaccc

SEQ ID NO: 4575 - DNA, 353 bp, Setaria italica
  Peptide Sequence Number=SeqID_70549
cgatgagggctactgcctcaccgtccgcgacggcaacgtggtgctggccccggccaacccgcgcgacgagcaccagcactggtacaaggacatgcgcttcagctcccaggtcaaggacgaggagggcaacccggccttcgccctcgtcaaccaagccaccggactcgccatcaagcactccctcggccagtcccacccggtgaagctaggtagaccgttacaaacccggaagtaaccaaggaacgaagtaccgtagctgtggactgagagcggcgacgtcggcaagggcttccgctgcatccgcatggtgaacaacatccgcctcaacttcgacgccctccacggcgacaagg

SEQ ID NO: 4576 - DNA, 509 bp, Setaria italica
  Peptide Sequence Number=SeqID_70550
aaggccgatgagggctacctgcctcaccgtccgcgacggcaacgtcggtgctggcccggccaacccgcgcgacgagcaccagcactggtacaaggacatgcgcttcagctcccaggtcaaggacgagagggcaacccggccttcgccctcgtcaaccaagccaccggactcgccatcaagccactccctcggccagtcccacccggtgaagctggtgccgttcaacccggagtacccaggacgagtccgtgctgtggactgagagcggcgacgtcggcaagggcttccgctgcatccgcatggtgaacaacatccgcctcaacttcgacgccctccacggcgacaaggaccacggcggcgtgcacgacggcaccaccgtcgtgctctgggagtgggccaagggagacaaccagagctggaagatcctgccgtggggcgacgaggccggcagcgccggcaacgcgccccgtggcggacggtgacgctgaacccctcgtcggccttgcaga

SEQ ID NO: 4577 - DNA, 212 bp, Setaria italica
  Peptide Sequence Number=SeqID_70551
accttaccaagaatagttagaataatttactgaaatcggcgtctctagcttcagtggacctgaaggtccctttgatgtggaggtctttgactccagtgtagattacattaagttaatgaagtcaatttttgattttgaggcaataaaaaagctgctgacatctccaaaatttcattctgttatgatgcctgcatggtgttgctggagcttat

SEQ ID NO: 4578 - DNA, 260 bp, Setaria italica
  Peptide Sequence Number=SeqID_70552
tactgattcatcatctgcctcatccctatgcacgctactacgcctgcaggagcaggagcatggagatcttgaaatgatatatggaataattgtctagcctcgtcactagacaaaagcaggatcaagcgcttacttatggtcatgtatgcgttgcatgtgtacctactgtatgtaataaccagttgcgataccataaagtaatacttacaagtgtattcggccgtgaaatacgtatatgtatggtgattaaataaaaaaaa

SEQ ID NO: 4579 - DNA, 329 bp, Setaria italica
  Peptide Sequence Number=SeqID_70553
ctctgcctaccttgttgctgagagagttgttgtgaccaccaagcacaacaactctctcagcaacaaggtaggcagagtagaaaccaactccaaactgaccgatcatagacacatcagcaccagcagccagagcctccatgaactcctttgtgcctgaccgtgcaatggtaccaaggttgttcacgagatctgacttggtcataccaataccactgtcaatgattgtcagagtgttggaggccttgtcaggaacaatgtggatgaacagctctggctgggcatcgagcttgctcttgtccgtcaagctctcaaacctgatcttgtccaag

SEQ ID NO: 4580 - DNA, 401 bp, Setaria italica
  Peptide Sequence Number=SeqID_70554
agtgggccaagggcgacaaccagcgctggaagatcctcccttggtgtaagtgtacatccatgccattgatgccctgccttacatcctttgaaaatctcatgttttccaatcaatggttgcttgcgttcgcagagatcgatggagacggcggaacctgatggactggaaccaagtagctgctacctaataataaccgattactgcagcgattgaataaaccgagtgttatgttgtaatcgcggatttcggagttgtatttgcgtcagactgtcggtcacagtgtgactagtgtcctgtcccttctgtgagcctggccttagtgcctcaccatgtgaggagtgacctgtattgtggcgccggaaatcgaaagaaagccagaaggatcgcaccacaatgcagga

SEQ ID NO: 4581 - DNA, 755 bp, Setaria italica
  Peptide Sequence Number=SeqID_70555
aggggttcagcgtcaccgtccgccacggcgccgtctgcctcgcgcccaccaacccgcgcgacgagtaccagcactggatcaaggacatgcgccacagcaacagcatcaaggacgaggagggctacccggccttcgcgctcgtcaacaaggtcaccggcgaggccatcaagcactcccagggcgagggtcaccaggtaaaccattgtcctatctgcccttcctgatctcgtcgtatttttatcggagggatcaagaaatgtcgtatttttatcggagggatcaagaaatgtcggtatttttatcggagggatcaagaaatgattttttggccgcgcttgagtattgcaggtgaagctggtgccgtacaaccccagctaccaggacgagtccgtgctgtggacggagagccgcgacgtcgggcacggcttccgctgcatccgcatggtgaacaacatctacctcaacttcgacgccttccacggcgacaaggaccacggcggggtgcgcgacggcaccaacatcgtgctctggaagtggtgccgtcgcgcaccccgccgtggtccttgtcgccgtggaaggcgtcgaagttgaggtagatgttgttcaccatgcggatgcagcggaagccgtgcccgacgtcgcggctctccgtccaacaagacaacggaactacgtacctaggtaagactaggggttagtaacggacaaccaaagaacttaactaaaccttaaggttaagtaaacccttaacgtaa

SEQ ID NO: 4582 - DNA, 593 bp, Setaria italica
  Peptide Sequence Number=SeqID_70556
ccggcaaacgcgccccgcggcggctacggccacggcggagcccaccgtgcgcaatctactgcaaggccggacgaggggttcgagcgtcaccggtccgccacggcgccgtctgcctcgcgcccaccaacccgcgcgacgagtaccagcactggatcaaggacatgcgccacagcaacagcatcaaggacgaggagggctacccggccttcgcgctcgtcaacaaggtcaccggcgaggccatcaagcactcccagggcgagggtcaccaggtgaagctggtgccgtacaaccccagctaccaggacgagtccgtgctgtggacggagagccgcgacgtcgggcacggcttccgctgcatccgcatggtgaacaacatctacctcaacttcgacgccttccacggcgacaaggaccacggcggggtgcgcgacggcaccaacatcgtgctctggaagtggtgcgagggcgacaaccagcgctggaagatcgttccctggtgtaaggagtctcaccagtcttactagctgccactgcttttttcctgaatcttgatttcagagagtagaaaatctctgaacatcttaccaacccgc

SEQ ID NO: 4583 - DNA, 708 bp, Setaria italica
  Peptide Sequence Number=SeqID_70557
cagccgcgccggtccccattccccaacctccctccgtggcttgagcttctggaagcgaagcgaagcaccatgttcggccaccaccaccacggccacgagcacggcggcaaccagcccccgccgcaggaccagacgctgttcaagatcttctgccgcgtcgacgatggctactgcctcaccgtgcgccacgacgccgtcgtgctcgcgcccatcaacccgcgcgacgagttccagcactggtacaaggacatgaggcacagcaccaaggtgaaggacgaggagggccacccggccttcgcgctcgtcaacaaggccactggactcgccatcaagcactcgctcggccagtcccacccggtgaagctggcgccgtacaaccctgaatacgaggacgcgtcggtgctgtggacggagagcaaggacgtcggcaagggcttccgctgcatccgcatggtcaacaacatccacctcaacttcgacgccttccacggggacaaggaccacggcggcgtccacgacggcaccaccgtcgtgctctgggagtggtgcaagggccacaaccagagctggaagatcctgccatggggcgacgaggcctacgcaccgccgccgccgccaccggcctacggcgccggcagtggctacgcgtacccgggaggcaggccggggcccgtacccgcctgggcaccaggagcctggctacgggta

SEQ ID NO: 4584 - DNA, 1143 bp, Setaria italica
  Peptide Sequence Number=SeqID_70558
ccttgaactcaagctgaccctcaacagagaagagcttgaccaacgactgggaggagcatcttgccgtgaagcgacttctctgttgagggtcagcttgagttcaaggctgtcctctttgtacccaagagggcccccttgaactcaagctgaccctcaacagagaagtgcttcacggcaagatgctcctcccagtcgttggtcaagctcttgtagaatgctgcgtactcttccttggtgatctcctcaggcttcctcatccagataggcttctgcttgttgaccaattgccacttgctgcagctgatggagatgctgaccgaaacatgatcctggattctttgtgacaccatcagactctgtcgccattatcgcggccaatgctgttcagtcaattccttactttgcttccggcctgaagggagttgccaggagcatgccaacatctgctgctcttgatgttgttgcgaagaatttaaatctcaagttctttgaggtgcctactgggtggaaattttttgggaacttgatggatgctggaatgtgctcaatctgtggtgaagagagctttggcactgggtctgaccacattcgtgagaaggatggtatttgggctgtgcttgcgtggctgtctattcttgctttcaagaacaaggacaaccttggaggaggagataagcttgtctctgttgaagatattgttcgtcagcactgggccacctatgggcgccattattacacacgctatgactatgagaacgttgatgcaggggctgctaaggagcttatggcaaatctagtcagcatgcaatcatcactatctgatgttaacaagttgatcaaggagatccgatctgatgtttccgaagtagttgcagctgacgagtttgagtatcaggatcctgttgatggctctgtgtccaagcaccagggtatccgatacctctttggagatggttcacgactggtgttccgtctctctggaaccggttctgttggtgccaccatccgtgtctacatcgagcagtacgagaaggattcgtccaagaccggcagggaatcatcggatgcccttgctccactggttgatgttgcactcaagctctccaagatgcaagagtacactggccactactcacactgagt

SEQ ID NO: 4585 - DNA, 763 bp, Setaria italica
  Peptide Sequence Number=SeqID_70559
aaaaactatcaaatacgaagccggaatgaaggtttgtaagtgcctcaactcattctaaaacacaggttcttcaaaaatttatgtgataacggtgggggcagagcggccagtgtactcttgcatcttggagagcttgagtgcaacatcaaccagtggagcaagggcatccgatgattccctgccggtcttggacgaatccgtgtctacatcgagcagtacgagaaggatggtggcaccaacagaaccggttccagagagacggaacaccagtcgtgaaccaagcaccagggtatccgatacctctttggagatggttcacgactggtgttccgtctctctggaaccggttctgttggtgccaccatccgtgtctacatcgagcagtacgagaaggattcgtccaagaccggcagggaatcatcggatgcccttgctccactggttgatgttgcactcaagctctccaagatgcaagagtacactggccgctctgcccccaccgttatcacataaatttttgaagaacctgtgttttagaatgagttgaggcacttacaaaccttcattccggcctcgtatttgatagtttttccccctctgttgcatctcaccagtgaataaaatgtatttttattgcccatactgcagacttgccgctggcacagcatgcggtaataaatcttgttacagtgctgtaattgggagcgtgtttctcctcgtaatatatcagatgttgttttgtttgtttgagacaaaaaaaaaa

SEQ ID NO: 4586 - DNA, 1105 bp, Setaria italica
  Peptide Sequence Number=SeqID_70560
ggagcctgggctacggggtaccctccccccgcccgagcggccccgagggctacggggccccgccctgcccaccaggagcccggctacggctaccgcccccccgcccggtggcccagagggctactacgcgccgccgcaccaccaccaggagcctggctacggcggctaccgccccccgccgccggggaacaccgccccgggatacggcggggagtacgggtacagcaacctgccccgtgcgctggcgtcggagtccaccgtgcgcgtctactgcaaggccggcgacgggtacagcctgaccgtaaggaacggcaacgtgtgccttgcaccaaccaaccccagggatgacttccagcactgggtgaaggacatgaggcacagcaccagcatcaaggacgaggaggggtacccggcgttcgcgctggtgaacaaggtgaccggcgaagccatcaagcactccctgggacagagccacccggtccgcctggtgccctacaaccctgagtacgtggacgagtcggtgctgtggacggagagccgcgacgtcggccagggcttccgctgcgtgcgcatggtgaacaacatctacctcaacttcgacgccttccacggtgacaaggaccatggcggcgtccacgatggcaccaccgtcgtgctctgggagtggtccaagggcgacaaccagcgctggaagatcctcccctggtagatgaagccaagcgtgacgttgagaggaccggccagaggaaccttgctgctgctgtcttgccatccggccgcttcttcatgttgatcgagtcgtcgtcgtcgttctagtatcttcttcgcattatcggttttcaataaaagctccccagcagcgacgatgtcatcagatcgtgtcgctcttccctgctggctttagtttgtgtttggtcttctccttctgaaagacatgaatttgaggatgttgatgatgagtttcagactttgccgattcgtgacgcctatgcatgtacctgtctatctcctccttaaagcatgcatttgaggatgttgatgatgatcttgcgttctcttgttttcatctgaccgtgacacgcgcctgataatactgtgactaggt

SEQ ID NO: 4587 - DNA, 902 bp, Setaria italica
  misc_feature (890)..(890): n is a, c, g, or t
  Peptide Sequence Number=SeqID_70561
cttaagaaaagaaccaggcacaccaaagagagaagagagatggacttttacggtggtcgtgagcgttacggcggcggttacggtcggcatcgcgacgccggggtacggctccgccggtgccgtacgggatgtcgcaggtgaacatcgagggcaagggttgcgggcgccctctgccgccgcagccgacggtgaaggtgtactgccgcgccgaccccaactacgcgatgacggtccgcaacggcaaggtggtgctggcgccggcgaaccccaaggacgagtaccagcactggatcaaggacatgcggtggagcacgagcgtcaaggacgaggaggggtacccggcgttcgcgctggtgaacaaggccaccggggaggccatcaagcactccctggggcagtcccacccggtgcgcctggtgccctacaacccggacttcctggacgagtcggtgctgtggacggagagccgcgacgtcggcaacggcttccgctgcgtgcgcatggtgaacaacatctacctcaacttcgacgcgctccacggcgacaagtggcacggcggcgtccgcgacggcaccgagatcgtgctctggaagtggtgcgagggagacaaccagcgctggaagatccagccatactactgaacaactgattcatcatctgcctcatccctatgcacgctactacgcctgcaggagcaggagcatggagatcttgaaatgatatatggaataattgtctagcctcgtcactagacaaaagcaggatcaagcgcttacttatggtcatgtatgcgttgcatgtgtacctactgtatgtaataaccagttgcgataccataaagtatcttcagtgtattcggccgtgaaatacgtatatgtatggtgattaanaccgatgggcta

SEQ ID NO: 4588 - DNA, 1641 bp, Setaria italica
  Peptide Sequence Number=SeqID_70562
cgcacggacacgggtcgcgccgcgtcgccgctgctgctttaactctatacactctatacacttacgtcgtcgtcggcgtccttccccgcgcacgtaacgtaacgtaattccctggccgggtaggcaggtagccaagctagagcgctaggtggcggctgacgcgaggacgatggcgaccggcggcggcagggcggcgctgtcgttggggctggtgttgctgctgtgcgcgctccggcatgaggtggcggcggcgcagcggtacaacgccatctggagcttcggcgactctatctccgacaccggcaatctctgcgtcggcgggtgcccgtcgtggctcaccacggggcagtcgccctacggcgagaccttcttcggccgccccaccggccggtgctccgatggccgcgtcatcatcgacttcctggccgagcactttgggctgccgctgctgccggcgtccaaggccggcggcgacttcaagaagggcgccaacatggccatcatcggcgccaccaccatgaacttcgacttcttcaactccatcggcctcagcgacaagatttggaacaacggcccgctcgacacccaaatccagtggttccggcagctcctcccgtccgtctgcggcaaagactgcaagaactacctgtccaagtcgctcttcgtcgtcggcgagttcggcggcaacgactacaacgccgccctcttctccggccggaccatggcggaggtgaggggctacgtgccgagggtcgtcagcaagctcatccgcggcctggagacgatcatcaggtcgggagcggtggacgtggtggtgcccggggtgctgcccatcggctgcttccccatctacatcaccctctacggcacctccaacgccgccgactacgacggcgacggctgcctcaggagctacaacggcctctcctcctaccacaactccctgctcaagcggagcctcggcagcctgcagaggacataccctcgcaccaggatcatgtacgccgacttctactcccaggtcacccacatgatcagggcccctcaaaacttcgggctcaagtacgggctgaaggtgtgctgcggcgccggcggtcagggcaagtacaactacaacaacaaggcgcggtgcggcatggccggagcaagcgcctgcgccgaccccggcaactacctcatctgggacggcatccacctcacggaggcggcctaccgctccatcgccgacggctggctcaagggcccgtactgcaaccctcccattcagcactgatgaactgatgcaccagagtttggtggggatctcattgatagcgtccgtgcgtgagttgatgcgtgtgtgctgtttgtttaattaattagggacgatccatttatcctaagatccatagctgtgctggtggatgtaacgagagtgatgcgggttcgttatttaatttggtggttgtttattcattggggttaggtcgtttgggtgtgcttggggggaatgaatgaatgaatgaataaaggtgttgtggattatttgcaagaattagctacagagtgaacaatgagttcgcttcaagagaaaaattagaaaaaggaatgtctttttactactctactaacttagtaagttaacggtaaagttaaacttaa

SEQ ID NO: 4589 - DNA, 1806 bp, Setaria italica
  Peptide Sequence Number=SeqID_70563
cagcacgggagtccaccacacggtcagagaccaccaccttctcaaccttgtcacccagaacctccttaatcaccttgcagaggccctcaaacttctccttgagctcctcctgtctcttcttctcgtcctcatcacaattcaccacagctcacactccacacctgccaaccgaagatgtcgtggttcgggcaccaccaccacaaccagccggctcccccggccgtcgggccccaaccaggtgttcaagatcttctgccgcgccaacgagaattactgcctcgccgtccgcgacggcgccgtcgtgctcgcccccgccaaccccaaggatgaccaccagcactggtacaaggacatgcgcttcagcaccagggtcaaggacgaggaaggcatgccggccttcgccctcgtcaacaaggccaccggcctcgccatcaagcactcgctcggccaatcccacccggtgaagctggtgcccttcaaccctgccgaggaggacgcgtcggtgctgtggacggagagcaaggacatcggcaagggcttccgctgcatccgcatggtcaacaacacccgcctcaacttcgacgccttccacggcgacaaggaccacggcggcgtccacgacggcaccaccgtcgtgctctgggattggtgcaagggcgagaaccagagctggaagatcctgccatgggggccccggaggcgcactcccccgccgccgggcccgggaacgcctccatcggcggcgtccccgtgcacaccgtccgcgtcttctgcaaggccggcgaggactacagcctgacggcgcgcaacggcacggtgtgcctggccgcccctccaaccccagggacgagtaccagcactggatcaaggacatgaggcacagcacccggatcagggacgaggagggcctacccggccttcgccctcgtcaacaaggtcaccggcgaggccatcaagcactccacggggcagggccgactccgtcaagctggtcccctacaacccggactaccaggacgagtcggtgctctggaccgagagccgcgacgtcggcgacggcttccgctgcgtccgcatggtgaacaacatctacctcaacttcgacgccttccacggcgacaaggcccacggcggcgtccacgacggcaccgagatcgtgctctgggagtgggccaagggcgacaaccagcgctggaagatcctcccctggtagatcgatggagacggcggaacctgatggactggaaccaagtagctgctacctaataataaccgattactgcagcgattgaataaaccgagtgttatgttgtaatcgcggatttcggagttgtatttgcgtcagactgtcggtcacagtgtgactagtgtcctgtcccttctgtgagcctggccttagtgcctcaccatgtgaggagtgacctgtattgtggaggagtagcctcgatctgatcctgcattgtggtgcgatccttctggctttctttcgatttccggcgccacaatgcaggatcagatcgaggctactcctccacaatacaggtcactcctcacatggtgaggcactaaggccaggctcacagaagggacaggacactagtcacactgtgaccgacagtctgacgcaaatacaactccgaaatccgcgattacaacataacactcggtttattcaatcgctgcagtaatcggttattattaggtagcagctacttggttccagtccatcaggttccgccgtctccatcgatctaccaggggaggatcttccagcgctggttgtcgcccttggcccactcccagagc

SEQ ID NO: 4590 - DNA, 1511 bp, Setaria italica
  Peptide Sequence Number=SeqID_70564
ccaaatcatccattctcctgtccccgatcaagcgatcaacccaaccttcccaaaacccccgacgcccgtagagagcaagatgttcggcttcggccaccacggccaccacggccagaaccccccggcctcccggcggccaccacggcggcggcgcccaccagcccaccttcaagatcttctgcaaggccgatgagggctactgcctcaccgtccgcgacggcaacgtggtgctggccccggccaacccgcgcgacgagcaccagcactggtacaaggacatgcgcttcagctcccaggtcaaggacgaggagggcaacccggccttcgccctcgtcaaccaagccaccggactcgccatcaagcactccctcggccagtcccacccggtgaagctggtgccgttcaacccggagtaccaggacgagtccgtgctgtggactgagagcggcgacgtcggcaagggcttccgctgcatccgcatggtgaacaacatccgcctcaacttcgacgccctccacggcgacaaggaccacggcggcgtgcacgacggcaccaccgtcgtgctctgggagtgggccaagggagacaaccagagctggaagatcctgccgtggggcgacgaggccggcagcgccggcaacgcgccccgcggcggctacggccacggcgagcccaccgtgcgcatctactgcaaggccgacgaggggttcagcgtcaccgtccgccacggcgccgtctgcctcgcgcccaccaacccgcgcgacgagtaccagcactggatcaaggacatgcgccacagcaacagcatcaaggacgaggagggctacccggccttcgcgctcgtcaacaaggtcaccggcgaggccatcaagcactcccagggcgagggtcaccaggtgaagctggtgccgtacaaccccagctaccaggacgagtccgtgctgtggacggagagccgcgacgtcgggcacggcttccgctgcatccgcatggtgaacaacatctacctcaacttcgacgccttccacggcgacaaggaccacggcggggtgcgcgacggcaccaacatcgtgctctggaagtggtgcgagggcgacaaccagcgctggaagatcgttccctggtaaatatgcggtcccggcgctgcattggtcatcaccatgatccggagtccgagagatcagccacccacctgtggtggtctcctgctgctatgttgctagaataaagtcgtgcgtgatcgatctgcggtgatggtgtgtctctatcgtgtccgtgtttagtttccagtcgtttccgttgtcgtgcgtcggtccgtcctgcttccgtgagtgaggggagtgagaggggttcttcctcggtgagcttgtctgattgagcacctgccatctgtgcttgctgtgcagagagtttgagacctggagtgtaatgtctgtactgtgctcggatcattttcttctatccaagtgggttttatcatcatcctatctagttgtgaattgtgatcttgc

SEQ ID NO: 4591 - DNA, 1861 bp, Setaria italica
  Peptide Sequence Number=SeqID_70565
aggataacaataataataatactactataccaccgacaagtacgcagttcgataatccaccatagcatctagccccacgtattgcaggctaggaaaagtaatgccacacaaaataaactgacaacgaggttcaggaataacaccaaaagctaagctaactcgattcaaaagtaaacaaccgcgccgcttagtcgacctcctccatcttgctctcgccggcatcatcctccagaggggggcatgtcggtctcagcctcagtggtctcatcctcgtcaatgctcaggccaagcttgagcatgcggtggatgcggctgccaaaggtgttgggctcgtcaaggctgaagccggaggtgaggagcgcagtctcgaacagcagcatgacaaggtccttcacagacttgtcattcttgtcagcctcagcacgcttgcggagctcctccatgatggcattctcagggttgatctccatggtcttcttggaggacatgtatccggacatgctggagtccctcagcgcctgggccttcatgatcctctccatgttggcagtccagccatactcgccagtgaccaggcagcagggggagtccaccacacggtcagagaccaccaccttctcaaccttgtcacccagcacctccttaatcaccttgcagaggccctcaaacttctccttgagctcctcctgcctcttcttctcatcctcagtctcatcaagcttcaggccctccttagtggcagagacgagtttcttgccctcaaattccttcagctggccaatggcatactcatcaattgcatccaccatgtacaggacttcatagcccttcttcttcagcttctcaaggaagggggagttctccacagccttcttgctctcaccagtgatgtagtagatgtcgctctggccctccttcatcctcgtcacatagtccttgaggctagtcagctcatcaccgctcttggtggagtggtacctcaggagctcagcgatcttggtcctgttctgggagtcctcgtggatgccaagcttgaggttcttgcagaaggcctcgtagaacttgttgtagtcctccttgttctcggcaatctcgaagaagagctcaatgcacttcttcaccaggttcttgcggatgaccttgaggatcttgttctgctggagggtctcacgggagatgttgaggggaaggtcctcagagtcaacgatgcccttgacaaagctcagccactctgggatcagctcctcacagttgtccatgatgaagacacgccgcacatagagcttgatgttgttctgcttcttcctggtgtcgaagaggtcgaagggggccctcttgggtacaaagaggacagccttgaactcaagctgaccctcaacagagaagtgcttcacggcaagatgctcctcccagtcgttggtcaagctcttgtagaaagcagcgtactcttccttggtgatctcctcaggcttcctcatccagataggtttctgcttgttgaccaattgccactcgtgagaaacctccttgatcttcttctttttcttctcaaggaagggggagttctccacagccttcttgctctcaccagtgatgtagtagatgtcgctctggccctccttcatcctcgtcacatagtccttgaggctagtcagctcatcaccgctcttggtggagtggtacctcaggagctcagcgatcttggtcctgttctgggagtcctcgtggatgccaagcttgaggttcttgcagaaggcctcgtagaacttgttgtagtcctccttgttctcggcaatctcgaagaagagctcaatgcacttcttcgagattgccgagaacaaggaggactacaacaagttct

SEQ ID NO: 4592 - DNA, 2228 bp, Setaria italica
  Peptide Sequence Number=SeqID_70566
aaagaagccaggagaacgacggaatgatccctcctgtgtgctcctgctccctgccctcccccgcctataataccgccacgccctcgtcgccatcgtcatcgcaccaccactccctccccgccctctcactcccgatctctcctccaccaccagcgcctcctccgccccacccctctcctcgcctcgcgcggcgaccggcggcggatcgtcggcggcccagccatgttcagtgtgacgaagaaggccaccacgcccttcgagggccagaagcccggcacctccggcctgcgcaagaaggttactgtattccagcagcctcattatctgcagaactttgtccaatcaacattcaatgcccttcctgctaaagaagttaaaggtgcgactattgttgtctctggtgatggccgctatttctcaaaagatgctgttcagatcataacaaaaatggctgctgccaatggattgagacgtgtttgggttggacaaaacagtctcatgtctactccagctgtatctgctgtcatccgtgaaagaattggtgaagatggatcgaaggctactggtgccttcatcttaacagcaagccacaacccaggtggtcccactgaggacttcgggatcaaatacaacatgggaaatggtgggcctgcccctgaatctgttaccgacaagattttctctaatacaacgacaatctctgaataccttatctccgaggaccttccagatgttgatatttctgaaatcggcgtctctagcttcagtggacctgaaggtccctttgatgtggaggtctttgactccagtgtagattacattaagttaatgaagtcaatttttgattttgaggcaataaaaaagctgctgacatctccaaaatttacattctgttatgatgccctgcatggtgttgctggagcttatgccaaacacatctttgtggaagagcttggtgctgatgaaagctcactgttgaattgtgtcccgaaggaggactttggaggtggtcatccggaccctaacctcacctatgcaaaagagttggttgaacggatgggtcttggaaagtcatcctccaatgtcgagcctcctgaatttggtgctgcagctgatggagatgctgaccgaaacatgatcctgggtaaaaagattctttgtgacaccatcagactctgtcgccattatcgcggccaatgctgttcagtcaattccttactttgcttccggcctgaagggagttgccaggagcatgccaacatctgctgctcttgatgttgttgcgaagaatttaaatctcaagttctttgaggtgcctactgggtggaaattttttgggaacttgatggatgctggaatgtgctcaatctgtggtgaagagagctttggcactgggtctgaccacattcgtgagaaggatggtatttgggctgtgcttgcgtggctgtctattcttgctttcaagaacaaggacaaccttggaggaggagataagcttgtctctgttgaagatattgttcgtcagcactgggccacctatgggcgccattattacacacgctatgactatgagaacgttgatgcaggggctgctaaggagcttatggcaaatctagtcagcatgcaatcatcactatctgatgttaacaagttgatcaaggagatccgatctgatgtttccgaagtagttgcagctgacgagtttgagtatcaggatcctgttgatggctctgtgtccaagcaccagggtatccgatacctctttggagatggttcacgactggtgttccgtctctctggaaccggttctgttggtgccaccatccgtgtctacatcgagcagtacgagaaggattcgtccaagaccggcagggaatcatcggatgcccttgctccactggttgatgttgcactcaagctctccaagatgcaagagtacactggccgctctgcccccaccgttatcacataaatttttgaagaacctgtgttttagaatgagttgaggcacttacaaaccttcattccggcctcgtatttgatagtttttccccctctgttgcatctcaccagtgaataaaatgtatttttattgcccatactgcagacttgccgctggcacagcatgcggtaataaatcttgttacagtgctgtaattgggagcgtgtttctcctcgtaatatatcagatgtgttttgtttgtttgagacaaaaaaaaaaaaaaaaa

SEQ ID NO: 4593 - DNA, 3310 bp, Setaria italica
  Peptide Sequence Number=SeqID_70567
ctcggttcgcctcaaaccctcgttgcctccccccaaacgcgccgccgccgccgcctctctctcccctcgcgttcgtgaaagcttcgccatggcctccgagacggagacgttcgccttccaggcggagatcaaccagctcctatccctcatcatcaacaccttctactccaacaaggagatcttcctccgggagctcatctccaactcctccgatgccttggacaagatcaggtttgagagcttgacggacaagagcaagcttgatgcccagccagagctgttcatccacattgttcctgacaaggcctccaacactctgacaatcattgacagtggtattggtatgaccaagtcagacctcgtgaacaaccttggtaccattgcgcggtcaggcacaaaggagttcatggaggctctggctgctggtgctgatgtgtctatgattgggcagtttggtgttggtttctactctgcctaccttgttgctgagagagttgttgtgaccaccaagcacaacgatgatgagcagtacgtgtgggagtctcaggctggtggctccttcaccgtcacacgtgatacctctggggaggacccttggcaggggtaccaagatgaccctctacctcaaggatgatcagttggagtaccttgaggagcggcgcctcaaggatctgatcaagaagcactctgagttcatcagctaccccatctctctctggacagagaagaccactgagaaggagatttctgatgatgaggatgaggaagataagaaggatgaggagggcaaggttgaggatgttgatgaggagaaggaagagaaagagaagaaaaagaagaagatcaaggaggtttctcacgagtggcaattggtcaacaagcagaagcctatctggatgaggaagcctgaggagatcaccaaggaagagtacgcagcattctacaagagcttgaccaacgactgggaggagcatcttgccgtgaagcacttctctgttgagggtcagcttgagttcaaggctgtcctctttgtacccaagagggcccccttcgacctcttcgacaccaggaagaagcagaacaacatcaagctctatgtgcggcgtgtcttcatcatggacaactgtgaggagctgatcccagagtggctgagctttgtcaagggcatcgttgactctgaggaccttcccctcaacatctcccgtgagaccctccagcagaacaagatcctcaaggtcatccgcaagaacctggtgaagaagtgcattgagctcttcttcgagattgccgagaacaaggaggactacaacaagttctacgaggccttctgcaagaacctcaagcttggcatccacgaggactcccagaacaggaccaagatcgctgagctcctgaggtaccactccaccaagagcggtgatgagctgactagcctcaaggactatgtgacgaggatgaaggagggccagagcgacatctactacatcactggtgagagcaagaaggctgtggagaccaccaccttccttgagaagctgaagaagaagggctatgaagtcctgtacatggttgatgcaattgatgagtatgccattggccagctgaaggaatttgagggcaagaaactcgtctctgccactaaggagggcctgaagctggatgagactgaggacgagaagaagagacaggaggagctcaaattccttcagctggccaatggcatactcatcaattgcatcaaccatgtacaggacttcatagcctttcttcttcagcttctcaaggaagggggagttctccacagccttcttgctctcaccagtgatgtagtagatgtcgctctggccctccttcatcctcgtcacatagtccttgaggctagtcagctcatcaccactcttggtggagtggtacctcaggagctcagcgatcttggtcctgttctgggagtcctcgtggatgccaagcttgaggttcttgcagaaggcctcatagaacttgttgtagtcctccttgttctcagcaatctcgaagaagagctcaatgcacttcttcaccaggttcttgcggatgaccttgaggatcttgttctgctggagggtctcacgggagatgttgaggggaaggtcctcagagtcaacgatgcccttgacaaagctcagccactctgggatcagctcctcacagttgtccatgatgaagacacgccgcacatagagcttgatgttgttctgcttcttcctggtgtcgaagaggtcgaagggggccctcttgggtacaaagaggacagccttgaactcaagctgaccctcaacagagaagtgcttcacggcaagatgctcctcccagtcgttggtcaagctcttgtagaaagctgcgtactcttccttggtgatctcctcaggcttcctcatccagataggcttctgcttgttgaccaattgccactcgtgagaaacctccttgatcttcttctttttcttctctttctcttccttctcctcatcaacatcctcaaccttgccctcctcatccttcttatcttcctcatcctcatcatcagaaatctccttctcagtggtcttctctgtccagagagagatggggtagctgatgaactcagagtgcttcttgatcagatccttgaggcgtcgctcctcaaggtactccaactgatcatccttgaggtagagggtcatcttggtacccctgccaaggggctccccagaggtatcacgtgtgaccgtgaaggagccaccagcctgagactcccacacgtactgctcatcatcgttgtgcttggtggtcacaacaactctctcagcaacaaggtaggcagagtagaaaccaactccaaactgaccgatcatagacacatcagcaccagcagccagagcctccatgaactcctttgtgcctgaccgtgcaatggtaccaaggttgttcacgagatctgacttggtcataccaataccactgtcaatgattgtcagagtgttggaggccttgtcaggaacaatgtggatgaacagctctggctgggcatcgagcttgctcttgtccgtcaagctctcaaacctgatcttgtccaaggcatcggaggagttggagatgagctcccggaggaagatctccttgttggagtagaaggtgttgattatgagggagagcaactggttgatctccgcctggaaggcgaaggtctctgtctcggaggccatggcgagacgttacttccgaacgcgaggagagggcagcggcgcttgggaggaggcgacgagggtttgaggggaaccgcggaagcgtggga

SEQ ID NO: 4594 - DNA, 380 bp, Setaria italica
  Peptide Sequence Number=SeqID_70568
aaagaaagactgatgaaatacatatagttcctctgctaaatttgcaggggaactcatgttgtagaaccttcatactggatgaaccaccttgattttgtaactgcatctgccattttggacctgatctgttggaagttttgcctatgaacaatacatgcatgcatttgttgtcttaatttatatacttaaagagcagtgatgtgtgtttattaattgtttttgtaagtttatctctctggttctctttgctgaaaatttaagttgtatttgcattctcacagtaaactgaaaacgggtacatctagttttctattttgataaagttatttttagaagttctgcacatgtttagtcaaggtatgtatgtgaggactgtacca

SEQ ID NO: 4595 - DNA, 882 bp, Setaria italica
  Peptide Sequence Number=SeqID_70569
taaaacgaaaagaacgagcatgtactggtcagcttacgacctctctccaaagttcacccttaaattgacaggttttggacagtccttgagttggttctgtactcgcatgatcgacgagtagtgtacccttgtcagagaaacttccttgaggcttgtcagaagtcgtaaaccagatagaacaccgttgctgaggcagctgaagacctgcagcacctcaaggcgaggcattgttctctcttcgaaatacaccacctggacctgtggcaagtcagaaagctccagcacaacgaggcttgggaatgacgagtgcaagaaatggagctctttgcctagaaaagataaggacctcagcctcaggattgagagattcggcagcctcccaatgacttgaattgcatccagcttcagccgggtgtagcatagctgcaacttggacagattctgcagctggtggatccactgaggtattttgactagcctgccttccaccttgagactctcgagatctttcggtggaaatagcacctcgcctgcaagcgactgcccgtgtttagactgcgaagtgccgcccgaggacggcaagacgccattgacagtatcaggggcctcagccgcagctggcccgtcgttggtggctccatccatgtaggggttctcgcctaaacaaccatctatgattggcatccctattgattcaaacaacctctgcacggacaaagatcgcagacgattatggggggcaattgctgaccagaagtccttgctattttggtcgtacacccctgtcactgtcaacttacgcagatgtgaaagccttttaagaaccttcattgcgtgtctcccccaagcaacgtttcacctactacttctagttgttgtcgt

SEQ ID NO: 4596 - DNA, 390 bp, Setaria italica
  misc_feature (32)..(32): n is a, c, g, or t
  misc_feature (55)..(55): n is a, c, g, or t
  Peptide Sequence Number=SeqID_70570
cacgcaaatggacggcagcagggagctcatcnccggccgtggtcccctgcaacancggcgcggtcgtcgccgccgccttcttcctcctctccttctcctcctgctactcgccgtcgccgatcgctcgccgcacgctgccgccagcatcttcggcggcgacgcggcatcggagtgcagccgaacctgcgaatccgaccactgcacagcggcgccgctgatgcgttacggcaagtactgcggcgtggggtacacggggtgccccggcgaggccccctgcgacgccctcgacgcctgctgcatgatccacgacgcctgcgtccaggccaccgacagtacgcgcgcatttcatgctcagactgattttacgacagatcaacatttcaaagatca

SEQ ID NO: 4597 - DNA, 280 bp, Setaria italica
  misc_feature (248)..(248): n is a, c, g, or t
  Peptide Sequence Number=SeqID_70571
acggcgaccttgggcttcctcagcttcagcagcagcacgcggaacttggtcgccggacggagcagcgacgccggcggcggagccggcgtggcctcggccgtgtccgcctccgcgccctccttcccgttgtcgccggtctcagcggcacccggcgcggccaccgcgtccacggccaccacctcgcccccgccggacgcgacgtcgtcgccggccacggcgaagttgaactccacccgctcctcctccgngtccgacgcggcgctctcgtcgccgggcaccg

SEQ ID NO: 4598 - DNA, 466 bp, Setaria italica
  Peptide Sequence Number=SeqID_70572
gaaatggcgacctcagtgcgatcggcagcagcgccgcgccgcctcgctccgtcggcacctccggcgagcgccgggcatgtccgaggattggcgcgcttcggtaatcgaaccgggcccctcggtgcccgaggattgtcaatggtggttgccgactccacccgccgtcgggccaagtttggcagcggggacagcgtcctcggggctcccgtccttggagggcccggggcggaattgggggatcagttgagcgtggtgatgaagttcgggggatcctcggtgtcgtcggccgcgaggatggaggaggttgccgacctcatcctggcgttccccgaggagcgccccgtcgtcgtcctctctgcaatggggaaaaccaccaacctcctgctcctcgctggagagaaggcagtgggttgtggagtgatccatgtttctgaaatcgaagagtggaacacaatcaaagacctgc

SEQ ID NO: 4599 - DNA, 599 bp, Setaria italica
  Peptide Sequence Number=SeqID_70573
acttcactaatcagtcttcttcccttcggagcagaatcacacacagagcttgagctccaaaaggccatggagagatggagaaaacgcgggagcttgctcgccgtcgcagccgtggccctggtggcagcattgctgccgtccggcgaggcgaagctgtccccggactactaccggtcgacgtgcccggacgtcgaggcgatcgtgcgggcgccggcggccaagaaggtcaacgagaccttcgtcactgtcccagccacgctcaggctcttcttccacgactgcttcgtcgagggctgtgacgcctccgtcatcatcgcgtcccgcgacaacgacgccgagaaggacgcgccgggcaacgtgtccctcgccggcgacggcttcgacaccgtggtgcgcgccaaggccgaggtcgagaaggcgtgccctggcgtggtctcctgcgccgacatcctcgccatcgccgccagggacgtcgtcaccatgtcttccggcccgcactggcccgtcgagctcggccggctggacggtctcgtctccaaggccggcagcgtcgcgggcaggctgccggggccggacatgcgcgtcgacgacctcgccgc

SEQ ID NO: 4600 - DNA, 470 bp, Setaria italica
  Peptide Sequence Number=SeqID_70574
tacctaaattagtacgtctaaactaaaggacttagctgtcagatggaacaagccaaggtaaacaatgattctcttattgcttatgagaaggtttactgcattcaagggctcattatatttgttggctcgtgcaccttgggttatattggctgagaatgattatgatgccgatgtttgcatggaactgccttaacttctctgctattggtattccattggtatacaaacacacgcaagtataaagaacaaacaacttcaaaatcttgtggcacaaggcctgtcttattggttgagatgctacaagtatacggtgaatagaagttgaagtaatttcggcagatcatagttcattgcatggttacataagaaggttaaagctttgctaaaagttatggcagttgcttttattctggttgagctggtcaaatttgtgaacctgctggagcaccctcgatatgtatctgctgctt

SEQ ID NO: 4601 - DNA, 250 bp, Setaria italica
  Peptide Sequence Number=SeqID_70575
tagtgacaatttgcagtagtaaaggtgcagaactttcagactggttgaattgagcaatgttacaccagttaagagccatgatccattgttaaaaaagggaaatgtcagaagtacaacagcaggtgtgaggtttgctgtgatagaacatattgccaaacaagtggtggccttagactcagactcatatcccacagaccaaagaaagcagaaatggcattaatctcgtttggtcaatccgaactatctatga

SEQ ID NO: 4602 - DNA, 272 bp, Setaria italica
  Peptide Sequence Number=SeqID_70576
ttcctaattccgtaaacccttactctgtcggcggcgatggcgaagtcggaggcggcggcggaggccgcaccggagactgtggggcaggcggtgatcccgctagtcaacagcctccaggacatcatcgcgaggctggacggcgacgccgccgccggcctggagctgccgcaggtagcggcgatcggcggtcagagcagcggcaagtccagcgtgctggaggcgctcgtcggccgcgacttcctcccgcgagggcccgacatctgcacgcgccg

SEQ ID NO: 4603 - DNA, 1302 bp, Setaria italica
  Peptide Sequence Number=SeqID_70577
tgtacggactctttcgtccagctctctcttctctcctccgacgattcttgcttgtccaagtctggtggctggtggtagactgccggaggcgagggaaaatcactcagagtctaagctatttagatatttctagggatgttggctcatggtctagcaacagatccctcaaggactttgcgatgtccagttgcttcaagggtgtcgactgcacccttgggagttgtatcttcgttgagtttcaacaggggacgcaaggaaaagaacaaaaatcttcatcaatgtggatagatacacaaagtacagtactcctctctgttatgcacagagaaatgccagaattacaccacgggcaactgcatcatttggggacatggctgattcttcgactcccatctttcctagaatccacgtgaaggatccatatcagcgtcttggaatcagcagggaagcatctgaagaagagattcgagctgccaggaactatctgataagcaagtatgcaggccataagccaagtgttgatgcaattgagtctgcccatgacaggattatcatgcagagtttctttgataggaaaaaaccaaaaatggacctcaagaaaaaatttagggaacttagtcagtcacgtgcagtcaaggctattcaaggcagatttcaaacaccacgtagcaaagtcatttggcagacagcaattacttttatcttgcttggagcacttacccttgcttttcctactgaagaagggccaactctccaggtggccatttcttgtgcagcaaatatctatttcatttaccagagggtcaaaagtggatggcgagcattcttttatgggtttggatctttctttgcttcctggttccttggcaccttcttgatggtatctgtaattccacctatactgccaggtccaagaaacttggaagtgagcacggcatgtgtcacatatgccctccttttcatatcatcaaccttcctgaagtagatgttcatatttccatgttagcctatagtcctgcggcagtcatcaacatggtatcgagcttgtgatgactattgactctacagtcatctgcttctttatttgtttcccggagttgcaaatggtagttctttggtgagtcgatagtagatgtcaggttgtaatgtgactttttttgcccaggcccttgagataatgagatcttaagcagtgagtctaacacctcctgtaggcattttggttgatgtgttaaacacagtttggtttggatagatcatgagataatatccatctgaattgacgtcgttaaaaaaaaaaaa

SEQ ID NO: 4604 - DNA, 554 bp, Setaria italica
  Peptide Sequence Number=SeqID_70578
aatcgttgaatcacaacaattcacatgtcaggacaacgccgagctttgatgtctagtcaatagcaaccaggtatagagcggtaaaaactaatttacatacagcctaacaccagcccaaaggaaatcttaaagcttggaataccacgcaacaccaaaagaggtgaaatatcaaaagttttagcgggggaaaaaacatcataagagttacacttcatggtgttatgcggatgatctgagtgtcaaaccttataggtagaatctaattacaaatctttttaaatatatgcataagccaacatgctaaaaagttatgtagaccttgagaaatatagtttcctcttctaaagtggggctgatccagtactcagtagtaaatacctataataagtgcataattttgctgaagcatgaagtccagataataacccataaacttaccagatataaactgagcttccaacagtgctaaaaatggtcaagtcatcaattgcatcaccgaccagacataggattagatactccttgtggcctttcttgatagaataatttaaaca

SEQ ID NO: 4605 - DNA, 545 bp, Setaria italica
  Peptide Sequence Number=SeqID_70579
ttttttttttttttttcctttggaaacgtccactcgaattcagcatttcatcaaagatgcaaacattcagattcagccaaattacaatcctggctctcaattgctaacacattttataggaaggggaatgacaggatgtcagaatctgcagtctccgtatacatgctctactagtacttagcctactgcacaagttagatcttctcgatgaacttacagtactcgtgcttccacctgcaagttcggctgcaaaaccacctctcatcctcgccgtcgccgtcgccgtcccaggcctccaccatctccgtctccaccttgccgcaccacgaattcgggcagggcgttggaggctcggccatcctccaccggcgcatcgtcagccttcgcatgaccgacacggcctctctgcgcacggaagccatcctgcgccttgtcctgctggggccagcggatgcggacgcggagaaccagtccaagccttccagcgcctgctcggcggcgcccgccgacgagcgcagagagtcgtgcagcgtgatcatcccgag

SEQ ID NO: 4606 - DNA, 1119 bp, Setaria italica
  Peptide Sequence Number=SeqID_70580
ataggaaggggaatgacaggatgtcagaatctgcagtctccgtatacatgctctactagtacttagcctactgcacaagttagatcttctcgatgaacttacagtactcgtgcttccacctgcaagttcggctgcaaaaccacctctcatcctcgccgtcgccgtcgccgtcccaggcctccaccatctccgaccgacaaccaacgcaattacaattcaagcagggcgttggaggctcggccatcctccaccggcgcatcgtcagccttcgcatgaccgacacggcctctctgcgcacggaagccatcctgcgccttgtcctgctggggccagcggatgcggacgcggagaaccagtccaagccttccagcgcctgctcggcggcgcccgccgacgagcgcagagagtcgtgcagcgtgatcatcccgagcatgtaggccgcggcggcgtggccgtgctccatggcgcggcggaggtgccggagcccgctcgcctttctcctccggttgcagaactcctccaatccaaggatgtaggatgcctcagggttgccgctggctgcgcaccgccggagcacggacagaaacctcgccttgtcccaccagtgcagcctccactccctgtgcacggccatgcaccgccccaccttcctcgccgccgtcgcgtcgcggaacaccttgcacgatcgcctgaggttgacaacgtcaatgaggggcgtcgcggacctcgtcgcgatgcttgcagtcacctccacgagaatgtcagaagggagcccggcgatgtccatgtccaaatctgccgagcccgttctcccctgtcgtcccttgccttcttgaggccgctccgagttgctgatctggcacaacatcaatggggtatgcagctgtgtacaacattaaccctttccttcaattcaacagtgattctcagatataaactgagcttccaacagtgctaaaaatggtcaagtcatcaattgcatcaccgaccagacataggattagatactccttgtggcctttcttgatagaataatttaaacatcagatttaaccagtgttctctagtacataaaaatcatcattttgtttgctgtttgtgctcgtatacgttgcctct

SEQ ID NO: 4607 - DNA, 287 bp, Setaria italica
  Peptide Sequence Number=SeqID_70581
aggcgcggcgacactgggggggaagagagaggagcagccgcctcaggcctcagcctcactcgctccgccgccggcgactggtggagagagatttaaggtcgtgccatcccttgcgccgcataaattcgggctttgctggtcgcggttctattgaggtccgccgatccgcgcctcgctctggatctccagttggtttgttgttagggaagggtcggatatggctcgaagcttgactgagaacaggaccagaaacacactaattgtggttgtggtctttggcctctgtt

SEQ ID NO: 4608 - DNA, 397 bp, Setaria italica
  Peptide Sequence Number=SeqID_70582
ctggaaagcacctcagcaacaagtttcgtgaccattgcagtagtacagaatacaatcactttatactctgcatcttccgcaacatgcttcttcaatacatcatacaatatagagaagtgcaggccaagaggtgcgatcatgtacgtctgatttacctgtgaatgtgtctcctcatcaccctcttgaacagtgttaatgaactcgtaatcctttctcattgcaacatgagaaatttgacggacctcttctggaacagtagcagaaaatagtagcgtctgcctttctttaggaatgaaagcaattattttctcaatgtctcttctgaatcccatatccaacaggcggtcagcttcatcaaaagtaactaagtaaccattgtactaccttttaatttcgt

SEQ ID NO: 4609 - DNA, 791 bp, Setaria italica
  Peptide Sequence Number=SeqID_70583
taccaaggtagtagttctcaaagatggtccttaagccttccaggggtagcaacaagaatctgacatgggttagcttgcatgctccgttgctcttgaggtaaacgtgtgccacctattacaacctgaacacccaatgagcgatgatacttgagaagcttcctggcctctgcagctacttggtttgcaagctccctggtagggcacatcaccagcaaatttatagatgttgaacgaggtaatgcagagagaacttcgatggctggaagcaaaaaagccaactgtttttcctgttcctgtctttgcttttgcaagaacatcttttccttgaagattattggcagagtagcctcctgcacccgagtcatcctttcatatccagcatccttgatagctttcagtgacagtggagaaaatagcacattgatcaaaccgtgtctcggtgaggtacgagccgtcgacgccacctgcgtcgtgagcgctcctaccagcgttcgacgccgaaccctccactccgcgggcaccctccacgccggaacctcttcccctccccgcggtggcgaccaccctagggaacgggggtgcctgcctcgcgtccctccgcgccccttcggcgcccacctcgcggccaaccatcaacccgacggtggccggcatgggtgacccggggccctgcttcggcgggcccctgcgccgccgcttcggcttcgggttcgggttggcgctggtcgacatgatccggctggcggcgtcggcggcggcgtttgacctaaacggcgggcgggagagaacgg

SEQ ID NO: 4610 - DNA, 830 bp, Setaria italica
  Peptide Sequence Number=SeqID_70584
tactaattgtctttctttctaattactattctattactaattattagtagtaagttgtctaggccaagaggtgcgatcatgtacgtctgatttacctgtgaatgtgtctcctcatcaccctcttgaacagtgttaatgaactcgtaatcctttctcattgcaacatgagaaatttgacggacctcttctggaacagtagcagaaaatagtagcgtctgcctttctttaggaatgaaagcaattattttctcaatgtctcttctgaatcccatatccaacaggcggtcagcttcatcaagaacaagaaccttgacacctttaattcgggttgaaaatccaggtgtgttctcaagatgatccttaagccttccaggtgtagcaacaaggatctgacatgggttagcctgcatgcttcgttgctcttgagttaatcttgtgccaccaattacaacctgcacgcccagtgagcgatgatacttgagaagcttcctggcctcagcagccacttggtttgcaagctccctagttggacacatcaccagcaaatttataggtggccgtaattgattccgctgatgaggcaatgtggagagaacctcaatagctggaagcaaaaaggcaacggttttcccagttcctgtctttgcttttgcaagaacatccttgccttgaaggattatgggcagagttgcctcctgcacctctgtcatcctttcatatccagcatcttcgacggctttcaaagatagaggagaaatggcgcactgatcaaaccttgtgtcgctgaggtaggagccatccacacctcccgcatcggcccccacttacga

SEQ ID NO: 4611 - DNA, 2208 bp, Setaria italica
  Peptide Sequence Number=SeqID_70585
tttttttttttttttttttgttttttttaatcatgacaagaacctgaatttcccatttgagaatagtgataaatggaacaacaacatgattattatgatgctataactatctgctgccctgtggtacagtcaacaaatacacatctcttgacgccgtgggcaagaccccatcacaaaaaggttcagaggtaatacatttcatacagattgctaaactatgataaaccgatacatatgaataatcactcggactgtttcaactatgtctgtggatagtggactgaacaaaatttgagaaacaagtggaccggtcatgtttgagccgaaaacttctgaacttcaggcatatgggcaggatgaaggcgtttgtgaaaacttccgaccttcagcaacaatttgctaatgtggaaaacctgcgacactcaagtactacacctgtatcctattgacgaagttgagggcattatggctggtaaaatgcccatggtttgttttaccataagttctgcagtcctgcttggtattgaagcatcagcattatgacgaccggagcccaggaacattgttaagacccatcttacgaagaatgttcctaggtattgctggaggaactgtaaggcccatgctttggctgaactcttctgcaaggccaacaagcctggacttgtctcggccaatggtcttgtttgagttgtagtaccccagccatgcctgataggcacattctttgctcttcatctctacttttctgacagcattcttgacttctgtctcaacacttgaatcgactgaaggtaccgcagcctctgatatcgacaaatccttaactgttccaagaaaatacttttcccaaggagccaacagtaaaagtccttggccttccttgccttttcgtccagtcctgccaagtctatgtatatactgttctctatctgcaggaattccaacctgtattacaagggtgacatcaggatagtcaacaccgcgagcagacacgtcagaactgaccagtatcaaaccctttgacttcctgaattcatccgagaccttagttcttgcagactgtgactttctggaatggatctctcttatattcagttttagctgagaaagaacttcagccacaagtttggtgaccattgcagtagtacagaatataataactttgtagtctgcatcttcagcaacatgtttcttcaatgcatcatataggatagaaaaatgctggtctaatggtgcaaccatgtacatctggctcacctgtgaatgtgtctcctcatctccctctttaacagtgttgatgaacctataatccttcttcattgcaacgtgcgaaatttggcggacctcttctggaacagtagcagaaaacaacaatgtctgccgttctctaggaattgaagcaattattttctcaatatctcttctaaatcccatatccaataggcggtcagcttcatcaagaacaagaaccttcacccctttaagtcgggtagaaaaaccaggtgtgttctcaagatgatccttaagccttccaggtgtagcaacaaggatctgacatgggttagcctgcatgcttcgttgctcttgagttaatcttgtgccaccaattacaacctgcacgcccagtgagcgatgatacttgagaagcttcctggcctcagcagccacttggtttgcaagctccctagttggacacatcaccagcaaatttatagatgttgaacgaggtaatgcagagagaacttcgatggctggaagctaaaagtaaactcagtcagatgggttaatcccgtagttgtatcactgcaatagtttagaaaacttctatgtcaatcaaattgactggttggccgaagggcaataaataccaaaaaagccaaactggttttcccagttcctgtctttgcttttgcaagaacatccttgccttgaaggattatgggcagagttgcctcctgcacctctgtcatcctttcatatccagcatcttcgacggctttcaaagatagaggagaaatggcgcactgatcaaaccttgtgtcgctgaggtaggagccatccacacctcccgcatccgcccccactcgtcaccgcgcccagctgcagagcctccccttccacgtcctcctcatcctcgtcgagcgcgtccctcctcgtgaccacccttgagaacgagaggcgctcctccgcgtccctccgccgccg

SEQ ID NO: 4612 - DNA, 518 bp, Setaria italica
  Peptide Sequence Number=SeqID_70586
ctcctcggaggaaggggaggacacgggggaaggcgtggacgccagcggcgcggggcccttggtcttgatcttgacgatggcgttggggctggggtccggcacgccgccgccggcgaggtcgtggaggagcgggaagaagggccacttgggccctttggacctgcccgcggagcgcgaccgctccgcccggtagcgcttccggagcttctcgatcttgtggcggcactgcacgccggacttcggcgtggcggtggggaaccggccgcagcgcgcggtgacggcgttggcgaccctgtcccagtccgcggcccgcaggttgcccttgcgcagcgcctcccacctgtcgcggtaggcctcgatgagcgcgagggtctcctcctcggtccagcacggcggcggcagcctccgaccggaggccccgcccccgagccctatgcctccccccgaggaggcagcggccgcgcgcgcagctggggcggcgggacggtgatgctgcggccgtcgagctccttgccgtt

SEQ ID NO: 4613 - DNA, 739 bp, Setaria italica
  misc_feature (1)..(2): n is a, c, g, or t
  Peptide Sequence Number=SeqID_70587
nnttttaaggagaaggtggtagtgtcgccattgtccagtgcaagaaaatatgaaaagataacagcacgggtcagaactgctgtagaattgcatgacacgagcaccaagttcttacacctgcaggttgtgctgtggctcacaactatctagtcttatgcgactgacaaatatctagtcttacaattttacacaagcaagatgtgccaaacagtgatctggtctttctgtgtcaaaagcatagctgaagatacagtagccgtgcctagcaatgaatcagatgaattcaggatggtcacttctgcttcttcgatttcttcggcgggttcttgactagtgcttcaccctcgtcatcagattcaccctcaattgactcatcagggacatcgtttggagcattgtgcttggcgatgtattccttgagaatcaccatgctcttctccttcattgtggccagctgctcggataggataccgcactcagagctgatggcaaacgattctgctccaagaaccaggttagccttcactcttggaccaagactagcctgcgcagcgtttgcttggccttccatcactgcagttcgtgggcgccgggcgccggcagttgcaggagggggatccaaggagggtcaagccaccggagcgcccgcgacggaggcacgggccgagcgggcgccagcggccggcgtctcggcgggagcccggagttactggcggccggcggtggggaggagggtttg

SEQ ID NO: 4614 - DNA, 247 bp, Setaria italica
  Peptide Sequence Number=SeqID_70588
cctgtagccaagccaaggtctcagctcctgagcgacgagaagcagcagaggcgaaccggttagccgtcgtgttcgatcaacagacaatccgctgttgcgccgccgtctgttccctctcccagtgcgtgctcacctccagcaggcgtgccctgctgtcctctcctgcttgccgcgagcccccctgtcgtccaccgagctcccggcccagatgtccgacggcaacgagttcgccgagctgctatgggaa

SEQ ID NO: 4615 - DNA, 741 bp, Setaria italica
  misc_feature (161)..(161): n is a, c, g, or t
  Peptide Sequence Number=SeqID_70589
acattggtgtccttggggaacggcctcactcatgcacctaattccagatccagcaagtccctaaagaaaagatcaccatacgtgcggcacaagatttttgttcccaactcttgtaaatttcagttcaagtgccaacggagaatgtctctgcaggtcctgangtttgaggcaggagccatgcccaacctgcgacggcttgagctagaaaccagtgtggcattgcttaaatgggaaggttgcaggcctgtcggaatggagcaccttttagacctcaaagagatttgtgtatccttgtggcattgccaatgcacaaaatctgaaggaataggtgcagagtgtgccctcaggaacatcgctcaaacacacccgagccgtcctactgtcacaataacaataacataacaatggtgactgagcacccactatggcataccctgaaaatggcaatggtattatgatggagacgacgatggaccgatagatcagaaacaggtcactacaccaatgaggaacacgccatatattatacttggtacggtaggcgtgctttgctgagccccatgtaacttagtttgaaatatataggtcttcgaagaatactgtcatgagcaatcatctggcgtgccatttgcaccatgaataatggttattctcagatagcttcttctccatttcttggcttgtagcacggtggcatctatcatttttaatggtacactaagaatagcctccaacctttta

SEQ ID NO: 4616 - DNA, 603 bp, Setaria italica
  Peptide Sequence Number=SeqID_70590
cgtcacctacgatcagatcaccatggacgcacgcgtgcatgcacgcatggatcgtcgatcagtgtagtagtagtggaatgaagctcggcgcaacaacggcaatggaggaagatcatcgatcgattcagacgtcgacgaccctgaaggagtcccggttcttgatgacgatgtcgtacatgtggacggaggagaaccttgcgaagtcggcggggagagagatgaggtccagcgacccgcgcttgtggaactggtacagcgccgggtcctcgtagtagcgctcccaccccagcgcccgcagctccgactccagctccgcgtacgacctcaccacctgcccgctcggcgtgtgcaccagcgccttccgcttccgcaccgcctcgccgccgcccgccgccccgttctccaccagccgcaccaccccgttcttgaacacccacacgcccgacatcctcgctccttccctttcctcctcgatcggctacttcttcttggctgcggacgctgcacaagctaagcttagctacctggcctagctactttgtgtcgtcgacggtcgatcaacaacagctatagcagctagagctcgagagagagatggttgtg

SEQ ID NO: 4617 - DNA, 748 bp, Setaria italica
  Peptide Sequence Number=SeqID_70591
gatgcaattcaaactgaagttattattgacagaaatcatttcctatccatccagtcctatcaagtaatcgttataaacagacatggagtacaactttacacagacaagtacttaataagacagacaaaatcggatgtgttgtagaccaagcatgtatactgaccaccatccctaggatgcgtactgtggtgcccgggctgccatgctagcaaccttagcccgctgctgctcgcctgtgcaccttggcagacagggcgcggtggaaaactgctcgcgtgacagtgcgcggacgcttctgaggtagccgtcaaagggcacagacccttcctgaatggccttgtcgagcgcatagatggtatcctctagcgccaaatctgccgccgtgcactcaatcatctgcctggacagcacatctgcaggctcgatggcgtcctccgtggcctgggtgttgcctctcctgttgttctccacgacccaggcctccatgacatcggtggccatcatgacgtcctgcaggcggcgctcgagcgcctccttctcctcccccatcctgcgcaccccttgggcgacgaggtcacccctgtggcgcagctctgcctggacggcgaagagggcgtcgacctcggcctcccgcgcgggccgcagggcggcggcgtccgcgtaggccatgtcgacgagcttggcgacggcgttgcgcttgaagacctcggcggggtcctcggtggggggcggcggtgggcagctgggg

SEQ ID NO: 4618 - DNA, 561 bp, Setaria italica
  Peptide Sequence Number=SeqID_70592
atacgctacgtatatgatacacagcatgcttgatacttctagtcactcgtacacctacaagtgcttgaggatcattggtagcccgtgcctgggccgcagcgtgagcacgtccatgggcgcgtggacatacttgggggacagctcgaggacgaacttctgcaggatcatggcgaccacggccttggcctcgatcatggcgaaattctgcccaatgcacgacctcggcccgctggagaaagacaacaatgcattggggtgcttagccgccctcgtcaccccgttctcgaacctctcgggcctgaactcacctgcgtcctcgccccagacatccttgtcgcggtggattgtcgcgattgggatcgtcaagatcgcgccctcgggcacctggacgccaccaaggtcgaggtcggagcccgccttccgctgtatcgacgacaccggaccgtatagccgcagtgtctccaggaggaacatattgacctccttcaacttgttgagcgcgtcgccggtggggacctcatcgccgcactcccgccgcacctcctcccggagcctgtcctg

SEQ ID NO: 4619 - DNA, 547 bp, Setaria italica
  Peptide Sequence Number=SeqID_70593
ctcgccacaacaggcatgctccaagaaggcagttcaagctcttcaaccatctcagtagccaccgaaagacttgtgtccttctccagatcaaatgcgaactcaatgttcttacacttaccattagggacaggaattcttagtaacaaattgacagggtccttgacgctcatatctccttccagcacaaatccacccctccgaagcaccaggctgaaagactccttcccatcacagacagttgcgttgggtaacaaagagacgaaaattggtgtgacatcaagatctagatccaaattttgtgggaatgctatcggttcttgtgctggattagaggttttatcattgatgatgtcatcttttaggagaaaaggactctttaagagctcacttgccggcaatctgtctgcagctgaagccagacagctctctatgaaacttcttacttccacatctttgatcttggagagagcaactggttttataccttcagaaatcttcttgtatatttgaacaaagccctgacattcaccgtaagggcactcaccgg

SEQ ID NO: 4620 - DNA, 2159 bp, Setaria italica
  Peptide Sequence Number=SeqID_70594
gtcggtcatcagggtagcggcgagcgggagggaggagcgcgtggaggcggagtcgggcggcggcatcgggtgggtcgcgtgctgcgtcggcgagagggggattcggtggtggcgtcaaataattcacatctctcccacaatagacaactaactctaagccgtgggaagcctaacctttcatttcgtgatgtaaaaccggttatgcggggcgcgagggtcggtcatcttcttcaagtccagatccatcccgtcatcgtactcctcttcctcttgtggctccgatgcctttctctgcctttcccttgcttcagcagcttccaactgcagcttcttgtggatgtagtcatcatacgacatctcgcaccatttctttgcgtctccgacaatctgttggttgtggcgttcgacgtcccgctccagcctggtcttctcggtgttcttgggctctccccagtagtcatagcggtacattggcttctctggatcatagtaatccttcccatagacctctgtctcgtctacgtcatatcgcccaggctcctcaataggaagaccaagcactttccgacagcagatgtctctgataagggcttctctttcttcaaatgaacggcgccattgcatcagatcatactcatccatctctttgtttcgtcggagcttcccaactttgtactcctctcctctttcagctgcttcctttttcagtttttttatcagctggcgctcagcacgagcagcatccagatcaagttctttgatgcttacattcacaactgtctttttagcagtgtttctttgaaatatccttcagtatattcaactctgtttacttcatcgattgaggatgcatcaactgtggattcatatgttgtatccttgaatttatctggattttgctcctcgtagtctaaaatcatctgctctgcattatgccattcccaaagcgtttcaacaaaaggatgatctgataccaaaggttccttttccatatcctttaaaggtttcttcctaggaatgggtggccggccaccttcacgccacagctgctctgggttagtatcctccttacggtgaaatattggtggaaagtcaaatctattgaatattaggtgatcaatgttgggatatacaaatcgcatttcaagtggaaagcggaaacggtaggggtctcgtttagccagaatctccacatagactttcatgccaggcttgatgtgatgtcggatccaataccagtcattcccttttatcggcacccacccctcatggacacagccaatgtccacaaaggctccctgatggaggtgaacagtcgtcacttgcccataacaaatctgtccaggatagtagaatggaagttcatgcatatcttctctgtagtccttacctcgttttcttctgccagggtagtaatcctgatcatactggtaggattcctgctccaatctatcccggtttgcctccacccattccttgtactgcttcaggaacattttgtacctatcaagcgccagatcctccggcgcatcctccagcttctcaacgttcgtcaccccggccgcggccgccgcctccatgtccagccgctccgacgccgccctgtgcgcctcccttataaactccagctcgtccgggtccacctcccagccgggcggcggccagtcccgcggcggcacgagccgcagcgggagcctgccggcccacgtcgtctcaaggggctcgggcgtgtcacgcgtcgcgaagaggcgctcgatgtaccccggctcggcctccaccttcttccggtaggccggcgtgagcatgcggaaggcctcgagggactccggcgactggagcggcacctcctctccctcgttgaggctgtggcgcgcgaaggctacctccggggtcatgacctcctcccagggcgcccacccgtgctccacccagctccggcggcgggcaacctcttcgggctcggtgttcttaatgctgatcgaggggatgaccggcgggtcggcggcgggggtctcgtcgggaggcgaggggttgacggacgcggcgaggcggcgggggcgggcctgaggagggtcctggggcgtaggctgggaaggggaggtggtggtggaggaaggtagcggcggccggtcggggttggttcgtccttattttttggt

SEQ ID NO: 4621 - DNA, 649 bp, Setaria italica
  Peptide Sequence Number=SeqID_70595
tttgaagagttctaacattagactgcttgccatcttatatccaacaacatgaacaaggaggaggaggaggagtatgattctacatcactcctttttttggttgttttttcttcttttcttaagacagctcgatcgacctgacctgaactgaacacgagaaactacaaggagaggagatcaccagcagacgccttggttgattctctcctctctctttttagttgtatacacagaaacagactactaagcttgaagttacactggacagcagcggcagcagccatcgtcggtcgtcgccatgagacgaagaaaggtctctagcgaggctggtggatgacgcggcgcgcggcgcccctgacgccgacgtgctgcgcgggcttgtccgcgcgcccagcagcagaggcacgcggacaagcccgcaccgacgacggccctcggggatccgaggctgaccgctctgagcacgtcgaggtcgtacgcggcgggcttggctgcctggtggtggtggtcggggcgtagaagaggtcgtcggtgccgaccatgtcgagcaggtcgacggagtcggtcggggaggagcgcggcgacgtcgacgtcggcgtcggtcggggagcgagaggagggcggcgtcgtaggctgcctcgtggagcgt

SEQ ID NO: 4622 - DNA, 1080 bp, Setaria italica
  Peptide Sequence Number=SeqID_70596
aagagttctaacattagactgcttgccatcttatatccaacaacatgaacaaggaggaggaggaggagtatgattctacatcactccttttttggttgtttttctctttctaagacagctcgatcgacctgacctgaactgaacacgagaaactacaaggagaggagatcaccagcagacgccttggttgattctctcctctctcttttagttgtatacacagaaacagactactaagcttgaagttacactggacagcagcggcagcagccatcgtcggtcgtcgccatgagacgaagaaaggtctctagcgaggctggtggatgacgcggcgcgcggcgcccctgacgccgacgtgctgcgcgggcttgtccgcgtgcctctgctgctgggcgcgcggcgagggcgcaccgacgacggccctcggggatccgaggctgaccgctctgagcacgtcgaggtcgtacgcggcgggcttggctgcctggtggtggtggtcgggggcgtagaagaggtcgtcggtgccgaccatgtcgagcaggtcgacggagtcggtcggggaggagcgcggcgacgtcgacgtcggcgtcgtcggggagcgagaggagggcggcgtcgtaggctgcctcgtggagctggtgctgtcggaaccagtggtcccggaaccaggcggtggtcttgacgagctcccaccactcgggcgagaagtcctccacctggcggtacgccgccgggatgaagagcggcgcgttcgggttcagcgacgacgacgccatggccatggtgctcatcctcggttctcctttctactacctggaacaagcacggcaagaaaagcagtcagctttagcctcagcttacaagcgcagagctcgtgctcgtgctcgagctacagcagcatccccgatccgatcgtccgagctcagatccggaaggggaaatcgttaacgtcacagatctgagaaagcttttctggtggtgttcgtgctcaccttttcctcgcttggctccgcttcgctttggacgtgccgagcgagcgagcgaacagggggaatatcccgtgcagttcgtggggtgccg

SEQ ID NO: 4623 - DNA, 1167 bp, Setaria italica
  Peptide Sequence Number=SeqID_70597
ttcagactagaattcagaggacacatttccaaacaaagagcaaagatgaagggagaggcgcctggtgaagagttctaacattagactgcttgccatcttatatccaacaacatgaacaaggaggaggaggaggagtatgattctacatcactccttttttttggttgtttttttctcttttctaagacagctcgatcgacctgacctgaactgaacacgagaaactacaaggagaggagatcaccagcagacgccttggttgattctctcctctctctttttagttgtatacacagaaacagactactaagcttgaagttacactggacagcagcggcagcagccatcgtcggtcgtcgccatgagacgaagaaaggtctctagcgaggctggtggatgacgcggcgcgcggcgcccctgacgccgacgtgctgcgcgggcttgtccgcgtgcctctgctgctgggcgcgcggcgagggcgcaccgacgacggccctcggggatccgaggctgaccgctctgagcacgtcgaggtcgtacgcggcgggcttggctgcctggtggtggtggtcgggggcggtagaagaggtcgtcggtgccgaccatgtcgagcaggtcgacggagtcgtcggggaggagcgcggcgacgtcgacgtcggcgtcgtcggggagcgagaggagggcggcgtcgtaggctgcctcgtggagctggtgctgtcggaaccagtggtcccggaaccaggcggtggtcttgacgagctcccaccactcgggcgagaagtcctccacctggcggtacgccgccgggatgaagagcggcgcgttcgggttcagcgacgacgacgccatggccatggtgctcatcctcggttctcctttctactaccttttcctcgcttggctccgcttcgctttggacgtgccgagcgagcgagcgaacagggggaatatcccgtgcagttctggggtgccgtgccgtgccgtgccgcggtggggagggggcgggtgtttatagccaggcacccaggcgcggtgcgacgacgacgacgagccgagccaggccgcgtggggtggcttcgggtggtggtggtggtgggtggtggcggagggccggatggggagtggtcggcttcggcttgctttctcctcggggacgcggtgtggcca

SEQ ID NO: 4624 - DNA, 175 bp, Setaria italica
  Peptide Sequence Number=SeqID_70598
gagacgaggaactagggctgttgcggcggcggtggatgggatcaaccagatcgtgacggggaacctgacgtcgctgtcggagcaggagctgatcgactgcaccgccgccaccgttgagaaggcccagcagctgccgcactgcccctggttcttcacctccgtcaccgcgcccagc

SEQ ID NO: 4625 - DNA, 1434 bp, Setaria italica
  Peptide Sequence Number=SeqID_70599
ttttttttttttttaaagttaacgatcaaactcattttttttttataaagtaaaggtcaaagtttattccatccatcatttcatcaggcagctcgtgcatgagtgccttttgctccccgatcgatcgagaaattaaacacgctcaccaaacaaattaaaagggaaagaagaaataaagatgagaagtacaaaaggctacgatttgacttgatcgaaaggatgatgcatcttgatgttcatgcgcacggtagtagtgatgcatgcgtggctgcagggggtcgtcgtctctactggcccttggttgggtaggacgccatcttgttgatgccgcagaggccctctggcttgccggtgcccctcttcatgcggatgtaccccttctcaccccagtgcgggccccacgagttcttgacgatgatgtagtcctggcccttgctggtgccgtagcccaccgccgccacgccgtgatccagctccgcgccgcacggaccatcgaacacgccccctttgtagaactggaagtgcctgccggacgcctcgatggcgacgctgatgggctggtgggccagggccgtgacgagcgcctgctcgtcgttggccggcacgtcctcgtacccggagatggtgacgaccttctcgtcgccggccttctggtcgcagtcgccctcctccatgaggtacgggtaggcctcctccgtgtgcaggccgccgctgccggcgatgtaggagaaggcgtagtccatcatgccgccgttgcagccgttgttcccgtccgtgctgcagtcgatcagctcctgctccgacagcgacgtcaggttccccgtcacgatctggttgatcccctccaccgccgccaccgttgagaaggcccagcagctgccgcactgcccctggttcttcacctccgtcaccgcgcccttcttgcgccagtccacctccttcggcacgtcgccgcggctcacgccgccgtaccggaagctgccgccgccggagttggaggtcctgctcggccgctggtggctgagcccgaggtaggcggccttgaactcgtcgtgggtcaggtcggcgaactcgttcagccccagccagtagctgctcacctccctgttaatctcgtcgatgtgcttcaggttctccttgaacacctcgaaccgcttcagcttctcctcgaagctcgcgtacgccttgcggtacttggcaacccactcctcgaacagcttgatcagccggtcatggctgccgaggtcctccggcgagtaccccacgatggagtagaagtcattttccatgtcgtcgccgtgggggcgggcctccgccagcagccacgcgccggcggcgcacaggaggacggcggcgatggagagcttgcccatcttgatcaccagtacttgctcactcagtagctagtaggaaggatcggagaagaggttgctg

SEQ ID NO: 4626 - DNA, 721 bp, Setaria italica
  Peptide Sequence Number=SeqID_70600
ggagcgccggcggcagctggaggagcagggcgagctggaccgggaggcggcgcgcctcgccatgcagctcgtccacgagagcgagacggagaagcacggcctgcagcggcagctcgaggcgtgcagggtcagggcccagctctaccagctcgacgacgacgccatggacggcgaagacgccggcggcgagggaggtcgctgggagtcgaacgggggcggcgacggcaacaactaccagtcgctcgtggacttcttgccggggtcggtttactcctcgtcgccggacctggccaacctccttaagctctgcaccgaagccggcaatggcggtggccgtcgtcagagggatgattattacggcgagccggccgttgcggtggtcgaggaggaagccgaggaagaggaagtgatggccgtcgccgtcaccgtcacggcggccactgaatccagcgggagtgttgttggtgcgactaccaccattgttgctgagcctttacatgaacgaagtaccaatagttgtcacgttgaaacagttgctgaagctgcttaactcgtcccgacaagcattgccatctcttgtaaattgatttctcttgtgtatattctgtcttcttcttccttttttttcagatattgaaagcttgggtgtgtgtgtatgtatagtgatacatgtaaacagtttgtccatcgtggtgttaaagagtagaaatttagaatcttc

SEQ ID NO: 4627 - DNA, 518 bp, Setaria italica
  Peptide Sequence Number=SeqID_70601
aagtcaactcaccaatttcgaagagctaagagtttcaggctgccctgacctagtgctgccggactggttcggagacctaaccaatctcatgatgcttgagataatcaattgcactagcatccaatctttgccagagagcatgaagcagctcaccaatttcgaagagcttatagtttcaggctgccctgacctggtgcagtggtgtgaaacagagaacgctaaggcgctgctagctcacatcaagactaaggaactcaccaactgacatgcacgtgaaatacaatggcaatggttcacgcctttatggcgtacagtgtccaatcggccgcaccctacgctgcggcatagtatcatcaatttggtcatcaggcctttttccgaacaagatgaatcagcttctcctgaggatccacacattcgaattcaaagtctctttcatcaggggtcccttgtttacttgttcgttaggttagtttatttccttttgttaatttaaattaaattaaattaaaaataaa

SEQ ID NO: 4628 - DNA, 414 bp, Setaria italica
  Peptide Sequence Number=SeqID_70602
ggtgtatatagattgacaagtactcaagtggcctctcccctcatttttctgacaaagtacccatgcaagtttcaaggttcctgcttgcagaggtatcgcgacaagggtcggtgcagacaggggtactcatttttctgacaaagtacttacatatggaagtctgtaaggttcatgcttgcaggggatttgcgacaagggtcaagggatacttcagaacaggagatatgccactagactccatgacctcgaatgactcgacattctggccctccggtagctcccaatcaaaatggtacagcaaattagccagtgcaagctctgcaaggcgcgttgcgaatgcaatgccagggcatcccctcctcccagcgctgaatggtatgaaccgaaagtccttgccattatagtcgatggacg

SEQ ID NO: 4629 - DNA, 459 bp, Setaria italica
  Peptide Sequence Number=SeqID_70603
agacaacaacaagaagggaaacgcaacggtcccggccgccttgtcagcacaccacatcttgcagtggcacagttgcctactacgtactacaggcgagttggtccctcggcttgagtggaacaggttctactgctccagccgagtagtggtgtatacgaccactcgtgctagccacgagccccgcgacgactgtcgatgcatgtggcgggagtaactattgcccaaccaccagccgggccgggtacaccagtaaatgtgatgctttgatgcatgactgagtgtttcacgttaatgacagcctacaccgtccgattttacagcgggcatcaggccagtgttgtgcttcaatgcgagctcggtacgtggcgtggctactactccgaccgccagtgtgcagcctgcggcagcgtgtggacatgtggtggtaggtgggtgtgacttgtgacttgtgaggccgcc

SEQ ID NO: 4630 - DNA, 722 bp, Setaria italica
  Peptide Sequence Number=SeqID_70604
cggcacatatcacctgacctagcagatgttgcagcaacatcaacacaaagtagaatcgtagttagagaaccaagctgagcacgtaatgacaaaatatccaattacctgtacccgcattgttattggtagcacgattcaccgcatcttcaaccaatgctcttttatatgcgccagctacccattcggctagttcaagagaggctttatcctcggcgggtaaagaaaatctctgtacagcttcttctcctatatcatagttttccctttgcatgcatacatttagtaactttgaaggagcggcatgtagaagaactaatgcctccttccaactccattgccgctcggaaggaggttgaaggcgttttagaacagatagacgccaatctaagtcttcaatggaatgtttggcatgtttgagcctccattctaatgcttgcctaccagcaggtgacagactagtactggacaggtgatccatatcagggcctttcacttggagattatgactaagtatatcaagtagaagcccaacaaaatatatcaccatgttctttccctcagattcgatattactttcatggcattcatgagtgacatagcactcagaagggactgcttgagacagtttcacacagtcatccatatgtaacaatgataatataatgctgaccatgaaaatctttcttggagtgcttatttgacgtagtcccaggaataaattc

SEQ ID NO: 4631 - DNA, 754 bp, Setaria italica
  Peptide Sequence Number=SeqID_70605
tgggaagcatcatcacttttattacagggtatgaaatgcgccatttttgagaacctatcaacaaccataaaaatggaatccctccccctctttgtcctaggtaaacccaaaacaaaatcaatgctaatgccctcccaatgaacactaggaataagcaatggagtgtataagccatgagtgttctgctttgacttagctttgtggcatgtgacacaacactgcacaagtctcgcaacgtctcttctcatctttggccaatagaagtggtcgcccagcatctcataggtcttatctcgcccaaaatgacccatcaaaccacctgcatgtgcttcctacagcaacaaaagtctaacagaacaatttggaacacataattttgttagctcgaaataaaaatccatcatgcatgtggtatttttcccatcctttccctgttgtacatttggcataaggttcttaaaattcataaacaacagagtataatttttttatgctctctattcccatcacttttacctcaagttgattcaacagaatattttttgcgggataaagcatcagtaacaatgttatctttacctatctcatacttcacaatgtatgggaaagtctcaataaattcaacccacttggcatgtcgacggttcagtttagcttagcctttcaagtgttgcaaagcttcatgatctgaatggataacaaattcttttggtcacaaataatgttgccaagtctcaaagtctcaaatactctt

SEQ ID NO: 4632 - DNA, 1320 bp, Setaria italica
  misc_feature (1295)..(1320): n is a, c, g, or t
  Peptide Sequence Number=SeqID_70606
ccatgggaggcaggctcaataaattttatgaatcatgggaggacaacccagatattggctttgtcatgatgaagggcagcggccgagcgttctgtgctggcggggatgttgttagattgcgcgaacttgtcagtgaaggcaaaatggaggaatgccaggattttttcaagactttgtacaagttcatttattttctaggcacgtacttgaaaccacatgttgccattcttgatggtgttactatgggtggtggaggaggtgtttcgattcctgggacatttcgcattgcaactgatagaacagtctttgcaactccagaagttcatattggattccatcctgatgctgcagcctccttttacttgtcacacctaaccggtcatgttggggaatacgtggccttgactggtgaaaatacgtggccttgactggtgaaaaactcaagggagcagatatgattgcccttggccttgccacacactattccatgagtgagcatctggatctggttgatgatcgacttgcaaatttagtaactgatgacccatcagttattgattcttcccttgcacaatatggagacatggtttatccagacaaagcaagcattgttcataggctggaggtgatagacaaatgcttcagtcatgaaacagttgaagagattgttggtgccttggaaagtgaagaggctaggttgaacgaagaatggtgtaccttggcactgaaacgattgaaagaggcctctccattagctttgaaggtctcactgcgatcgatacgtgagggtagatatcagacacttgatgagtgccttgtccgtgaataccgcatgtccatgaatgggatatcaaagcaattttctcatgaattttctgagggtgtgagagcgcgcctagttgacaaggacttggctcctaagtgggatcctcctgccctggagtatgttacgcaggacatggtggacgcctacttcgcaccacttggtgagtctgagtctgagttgaagctacctacagaaacgcgagaggcattcgtatgatcacacggatcatccaagggccttgacctgataaacgtgctatattttgtgaagccattattgccggcagggcaaacagtcggggatgtggacaaactattcgtgtaaccatatacaccttggcgtcctgaattttgagcgtcaagggaaacctgtgttactttctcattacttgtcaattgtcataagctagcgcttcttcaccatacaataattcaatgagccaggagcactttgtgctgtgaccaaaaannnnnnnnnnnnnnnnnnnnnnnnnn

SEQ ID NO: 4633 - DNA, 400 bp, Setaria italica
  Peptide Sequence Number=SeqID_70607
ccaagagcccatttcctctcagctggaaaatgtggtcttgagccaactggagactccattgaaaatgacagcctgagtgagaagttaaatttaattaagtttgaaattcagctttacaaaacaagagatgagaaatacctcctcgacttgcaaaggttcagcggaccacagctcctctttcttgacttgtgcgcagcctttctagctcagctgaaattattcatgtagatagacattatgccagcaaaagcactgggctagttcactgtatatccatatcctagtgccttcaccagccgccggccagccgtaaagaaccaggaggaatcttgctccataaagtctggttcagaagatagccaggcacaacagcttcgcatgtatacaatctacatactcc

SEQ ID NO: 4634 - DNA, 473 bp, Setaria italica
  Peptide Sequence Number=SeqID_70608
gtaaataataggcaactgttgcctcattctgcaacctgttttgcacagattcaattagcagattcttctacaagcccgacaactaagttaaagaagtttacctactcatcaagcctttttaacttgttgtgcagtgtctggaggcggcacggctaaatagcgtggaagtcgaatcttgaaccacacatgttcacggatttcacggatggtaatccttttcattggatcaacaaccagcattctgggaattaagtcccttgctgaaggtgacaaatgactaggaagggtatatattccaccctttatttcttaaaaaggtttggaatattctcatcatcaaatggaagagtaccacaaagaagagcataaagaataacaccacagctccagacgtcaacttcaggaccagcatatagtttaccagatatgacctcaggcgctgcataattcgggctaccacagctcgtctttag

SEQ ID NO: 4635 - DNA, 460 bp, Setaria italica
  Peptide Sequence Number=SeqID_70609
aagatacccactggttgtacgaagcctattgtccaagagtaataataggcaactgttgcctcattctgcaacctgtttgcacagattcaattagcagattcttgtcaaaacccatcttaataacatcattaagagtttcctcatcaagctttttaacttgttgtgcagtgtctggaggcggcacggctaaatagcgtggaagtcgaatcttgaaccacacatgttcacggatttcacggatggtaatccttttcattggatcaacaaccagcaatctgggacttaagtcccagaatgctggtgacaaatgactaggaagggtatatattccaccctttattttcttaaaaaggtttggaatattctcatcatcaaatggaagagtaccacaaagaagagcataaagaataacaccacagctccagacgtcaacttcaggagctgtggtgttattctttat

SEQ ID NO: 4636 - DNA, 472 bp, Setaria italica
  misc_feature (27)..(27): n is a, c, g, or t
  Peptide Sequence Number=SeqID_70610
aaggtatgattgttatgaatttgaccnggaaagccaggactccatctgcacttcatattatagtgaccaatctttttccagtaaacgttcaactcttgcagagctttcagtacttcagtcattatttctctcggatgcgctcgcgactgaagcccaagagcccatttcctctcagctggaaaatgtggtcttgagccaactggagactccataaatatttgctgccgattcccacgtgctgaacttggtgtttcatatgatgctatgcttgagaatgaggagtccatagcttcttggcattcagctccaagataaccactggttgtacgaagcctattgtccaacaacaaataatatgcaacagttgcctgtacatataacgagtaatccagtcatgaccatagcagcaaaaaatgatgtataaagataacagtgcaaaatgaataacacctcatttgcagtctgttttggg

SEQ ID NO: 4637 - DNA, 751 bp, Setaria italica
  misc_feature (1)..(69): n is a, c, g, or t
  Peptide Sequence Number=SeqID_70611
nnnnnnnnnnnnnnnnnnnnnnnnnnnnnnnnnnnnnnnnnnnnnnnnnnnnnnnnnnnnnnnnnnnnnggttcctgtaagcagctcagctttcaattaaccattgtaatagctgaaattattcatgtagatagacattatgccagcaaaagcactgggctagttcactgtatatccatatcctagtgccttcaccagccgccggccagccgtaaagaaccaggaggaatcttgctccataaagtctggttcagaagatagccaggcacaacagcttcgctatttgtttattttactttaatctacataagtaatctcagctttcaattaaccattgtaatagctgaaattattcatgtagatagacattatgccagcaaaagcactgggctagttcactgtatatccatatcctagtgccttcaccagccgccggccagccgtaaagaaccaggaggaatcttgctccataaagtctggttcagaagatagccaggcacaacagcttcgcatgtatacaatctacatactccagaaattcaatctactggatagattactatttacagctttgtgagcgattcgacattcctctagtgaaacgcaaggaatacaaatgatggaaagcagacaccaggaatcaaagaactctcagctgagctagaaaggctgcgcacaagtcaagaaagaaggaagactagttaggttaccgacttagaaaccttttagtactaaagttacgttaaggtta

SEQ ID NO: 4638 - DNA, 756 bp, Setaria italica
  Peptide Sequence Number=SeqID_70612
aactgttgcctcattctgcaacctgttttgcacagattcaattagcagattcttgtcaaaacccatcttaataacatcattaagagtttcctcatcaagcttttttaacttgttgtgcagtgtctggaggcggcacggctaaatagcgtggaagtcgaatcttgaaccacacatgttcacggatttcacggatggtaatccttttcattggatcaacaaccagcattctgggaattaagtcccttgctgaaggtgacaaatgactaggaagggtatatattccaccctttattttcttaaaaaggtttggaatattctcatcatcaaatggaagagtaccacaaagaagagcataaagaataacaccacagctccagacgtcaacttcaggaccagcatatagtttaccagatatgacctaaacgatgaggaagaattgtgggtgggagagagacacatagcaagttatcagcataaatgaaaccatgaaggatgctagatgtatacctcaggcgctgcataattcgggctaccacagctcgtctttagaaagtgaccatcacgcataacattacttaagccaaaatcagcaatcttaacattgcattttgaatccaaaagaaggttctctggctttagatcacggtgaaccaccatgtttctatggcaatattcaacaccagatatgatctgctgaaaaaagcggcgagcttcttcttcatgtagtcttcccttctcaacaatgtaatcaaaaag

SEQ ID NO: 4639 - DNA, 752 bp, Setaria italica
  Peptide Sequence Number=SeqID_70613
gcaggtaattttttataaaagaaatccataaacgaccgtaaacatttcaagggcatctcatgtggcctgtaagcagctcagctttcaattaaccattgtaatagctgaaattattcatgtagatagacattatgccagcaaaagcactgggctagttcactgtatatccatatcctagtgccttcaccagccgccggccagccgtaaagaaccaggaggaatcttgctccataaagtctggttcagcagaacggctggcacaacagcttcgcatgtatacaatctacatactccagaaattcaatctactggatagattactatttacagctttgtgagcgattcgacattcctctagtgaaacgcaaggaatacaaatgatggaaagcagacaccaggaatcaaagaactctcagctgagctagaaaggctgcgcacaagtcaagaaagaggagctgtggtccgctgaacctttgcaagtcgaggaggtatttctcatctcttgttttgtaaagctgcatcaaaaggcgacacatcagaaagatgaaaaagaaagcacacaacacgaacaaagacaaaatggggccccaatcgtatagggctcgtgattgtgtgaagctgcacaaatgtaggtgtatcagcaaatcattaccatagagtgcacaaaagaagtagtaaacacatggaaacataacgtattatgagatatacataatgataaattcaattaaattaggctgattaaatctgca

SEQ ID NO: 4640 - DNA, 1200 bp, Setaria italica
  Peptide Sequence Number=SeqID_70614
gagtccatagattcttgaaactcagctccaagatacccactggttgtacgaagcctattgtccaagagtaaataataggcaactgttgcctcattctgcaacctgttttgcacagattcaattagcagattcttgtcaaaacccatcttaataacatcattaagagtttcctcatcaagctttttaacttgttgtgcagtgtctggaggcggcacggctaaatagcgtggaagtcgaatcttgaaccacacatgttcacggatttcacggatggtaatccttttcattggatcaacaaccagcattctgggaattaagtcccttgctgaaggtgacaaatgactaggaagggtatatattccaccctttattttcttaaaaaggtttggaatattctcatcatcaaatggaagagtaccacaaagaagagcataaagaataacaccacagctccagacgtcaacttcaggaccagcatatagtttaccagatatgacctcaggcgctgcataattcgggctaccacagctcgtctttagaaagtgaccatcacgcataacattacttaagccaaaatcagcaatcttaacattgcattttgaatccaaaagaaggttctctggctttagatcacggtgaaccaccatgtttctatggcaatattcaacaccagatatgatctgctgaaaaaagcggcgagcttcttcttcatgtagtcttcccttctcaacaatgtaatcaaaaagttctccagatttaacatactccataacaacataaatatcagcaggtgtatctatcacctcataaaggcgtatgatatgagggtgcataaataatctgagtatcttgatttccctcttcactttctcttccatttccatgctcctgatcttccggcgattgaggatcttgatggccaccttatggcctgtcaatatatgctccgcgatcttcaccttaccgaacgatccaatccccagggttttgccaattcggtagccgctcaaagggttggcatctcttccagctccctccatctttgcacctcaccgcgggagggagacgcggcgagctggatcccgcccaacggagcagccggcggcggcgcaggcgcggctcgcggaggatgcgaggtcgaggccggggcccgggagctcgggaggagggggccggagagggagggagggaccgagggag

SEQ ID NO: 4641 - DNA, 1425 bp, Setaria italica
  misc_feature (1)..(23): n is a, c, g, or t
  Peptide Sequence Number=SeqID_70615
nnnnnnnnnnnnnnnnnnnnnnntaccttttttagaacgtcaaaaaggcaacttttttttccaatttttagtgagatgtttcttcagtctgggtatcattgctagtacaatcaccttaacgggataaactgttacaaggactaaagaaagggctaaaaaaatttcacatctagttgaagaggaaggtttgcagcttgcctgcaaccacttgtttaggacattaggtgataactgtctaggcaaaccacaacagcttctaatgtctacatgctccagaaatatatctactggaggatatatggtcattatgtacatctcagatgtaaattgaaactccactgggtacgtcaaggattgtgcttggggagccaatcatgtcagcatcaaagaactctcagctgcgttagaaaggcagaacacaggtccagaaagaggagctgtggtccactgacccgttgcaagtcgaggaggtacttctcatccctcgttttgtaaagctgaatctcaaacttcactgtaggggttgatttctggatgagatcatcagtttcaattatagcagactccgcaccaaagccatcattgccatgcatcatactctcaagacagccagggctccatctgcatttcatgttatagtgtccaatctttttccagtaaacattcagttcttgcagagctttaagcacttcagttattatttctcgtggatgggctcgagactgaagaccaagggcccatttcctttcagctgcaaaatgctgcctcaagccagaacccggagattctgtaaacccatgctgacgaagttcagttgctgaagttggtgtttcagcaagtacttgtgagaaagaagagtccatagattcttgaaactcagctccaagatacccactggttgtacgaagcctattgtccaagagtaaataataggcaactgttgcctcattctgcaacctgttttgcacagattcaattagcagattcttgtcaaaacccatcttaataacatcattaagagtttcctcatcaagctttttaacttgttgtgcagtgtctggaggcggcacggctaaatagcgtggaagtcgaatcttgaaccacacatgttcacggatttcacggatggtaatccttttcattggatcaacaaccagcattctgggaattaagtcccttgctgaaggtgacaaatgactaggaagggtatatattccaccctcaggcgctgcataattcgggctaccacagctcgtctttagaaagtgaccatcacgcataacattacttaagccaaaatcagcaatcttaacattgcatttggatcccaaaaaaaggttctctggctttagatcacggtgaaccaccatgtttctatggcaatattcaacaccagatatgatctgctagaaaaaagcggcgagt

SEQ ID NO: 4642 - DNA, 1984 bp, Setaria italica
  misc_feature (1)..(6): n is a, c, g, or t
  Peptide Sequence Number=SeqID_70616
nnnnnngttcttctagtttttttttttttttggtggcctgtaagcagctcagctttcaattaaccattgtaatagctgaaattattcatgtagatagacattatgccagcaaaagcactgggctagttcactgtatatccatatcctagtgccttcaccagccgccggccagccgtaaagaaccaggaggaatcttgctccataaagtctggttcagaagatagccaggcacaacagcttcgcatgtatacaatctacatactccagaaattcaatctactggatagattactatttacagctttgtgagcgattcgacattcctctagtgaaacgcaaggaatacaaatgatggaaagcagacaccaggaatcaaagaactctcagctgagctagaaaggctgcgcacaagtcaagaaagaggagctgtggtccgctgaacctttgcaagtcgaggaggtatttctcatctcttgttttgtaaagctgaatttcaaacttaattaaatttaacttctcactcaggctgtcattttcaatggattctgcactgaaggtatgattgttatgaatttgaccaggaaagccaggactccatctgcacttcatattatagtgaccaatctttttccagtaaacgttcaactcttgcagagctttcagtacttcagtcattatttctctcggatgcgctcgcgactgaagcccaagagcccatttcctctcagctggaaaatgtggtcttgagccaactggagactccataaatatttgctgccgattcccacgtgctgaacttggtgtttcatatgatgctatgcttgagaatgaggagtccatagcttcttggcattcagctccaagataaccactggttgtacgaagcctattgtccaacaacaaataatatgcaacagttgcctcattttgcagtctgttttggattgattccaccaacaagttcttgtcataacccataccaataacctcacggagtgtttcctcatcaatctttttaacttgttgtgcactatctggaggaggcacggtcaaatagcgtgggagatgaattttgaaccaatcgtgttcacgaatctcgcgaatggtgattcgcttcataggatcaacaaccagcattcttggaatcaaatcccttgctgcacctgacaagtggctaggaagggtatatattcctccctttattttcttaaaaaggtttggtatgttctcgtcatcaaatggtagagtaccacatagaagagcataaagaataaccccacagctccatacatcaacttcaggcccagcatatagtttcccagatatcacctcaggagcagcataatttgggctaccacaacttgtcttgaggaaatgaccatcccgcattacattacttaagccaaaatctgcaatcttaacattgcattttgaatccaataggaggttttctggctttaaatcacgatgcaccaccatgtttctatggcaatattcaacaccagaaataatctgttggaagaaacggcgagcctcttcctcctgcagcctacctttctcaacaatgtaatcaaacaattccccggacttaacatactccataacaacgtaaatatcagcctgtgtgtctataacctcgtagaggcggatgatatgtgggtgcataaacaacctcaatatcttaatttctcttttaactttctcttccatctccatgcctttgattttgcgacggttgaggatcttgattgccaccttgtgtccagtgcttatatgctccgcaatttttaccttcccgaatgagccaatccccagagtcttaccaatccggtaattcctcaacgggttcacatccttgcccgctccctccatcttctgcctggccgctggagggggggagcggcgccggctcgccggggagcggcgcggcggagatgcggcgagacacgaggggtggaggagggggtgcgcaacgatgcgtcgc

SEQ ID NO: 4643 - DNA, 239 bp, Setaria italica
  Peptide Sequence Number=SeqID_70617
tttaatttttgtttactttgaattgactggccttgagaagaatgcagagagtgatattgttgccaaggttcaagctgaggcatcgttgctgaggcacacaaatgcaaatctgagcaagcaagttgagggattgcaaatgagtcggctaaccgaggttgaggaacttgcttatcttcggtggatcaattcatgcctacgccatgagctctgtaactcggatcaagcagctagagcaatga

SEQ ID NO: 4644 - DNA, 288 bp, Setaria italica
  Peptide Sequence Number=SeqID_70618
gttacggatcggccgggccaccgcgggggtttcttggtcgtggtgcttgtagctcggtcgagatcggctgcatggcgtcctccggcgacgtcaaagcggccgtggatgctgtggaggtggagcagccggccaaggcatgcgacggtgaaaccagttcgccagcgacgaccacgacggaagagagcgagccggtgcggcaggagcagcagcatgaagacacagagtccgacgccgatcaccatgaggcggtggcgccgccagacgaggcggccgcggaggtgtcggcgt

SEQ ID NO: 4645 - DNA, 421 bp, Setaria italica
  Peptide Sequence Number=SeqID_70619
ggtcggcggccgcggccgcaccggtggtgccggcggtggcgttggcgccaccctgcagcgatgacagcgcccccgcggcggcgggcgcctcgaggacgcgcacgatgacctcctccccgcgctttgcgagcgtgttgacggcggcgtgcgcggcggcctcggcctcctgcaggaggtgcaggtcgggggccttggcgcggatggcgccggcgctgaactggaagtcggtgatggacttgatgtcctcgttgtacaggaacgtggcgaagacgaagagcgcgaacaccaccgccgccagcgacagcggcgcgccgttcttgcgcgccgccacgccggcgcccagcgccgcctgcttcatcgcgaacggcgccgacgcgaacaccgacttgcgccgctgctgcatctccggagccccccggtg

SEQ ID NO: 4646 - DNA, 856 bp, Setaria italica
  Peptide Sequence Number=SeqID_70620
ttagtaaagtacttaagtaaggtttagtaaattctttccctactactaaattgtttgtagtttgatgaaagttaggtatgttggaggagcaggggcgaagggaaagggcggagcaggaattgtcaaagctgcaggaagttgaagccaaagcacataagttggagcttgaattagcatcttgtacagcgctgctcagcaacatacctgatgtgtcttcttatgccgacatacctcaaaagattgcagatttgcaaaagcaagcattgacaaatttgaacaaagttggtgaagtaacatcacggttgaaagaattagaggttgcgctggaatttgctgatctcagcaagcaacgtgcagaaggtgaagctaaccttgctaaagagagggctgaaagtgctgccaaggaggtcaagcggcttgagcttatgcttgctgcgatcagtgaagaaagagacaaattgagaaaggaacatgctgtggagttggatcaatctggaatggagaaaacgataagagagctggagagcactatacatgagcagaaggaactggttagtcacaaggacactgaactcaatataatgaacgaaagattaaaccttgaagcaaagaaagtgaagtctttggagcgagagggagatcaactacgctctcaggttgcattactagagtccaagttaggtcatggagattactctgcatcgagcacaaaagtactgcgcatggtaaatactcttgcagttgacaatgaagccaagcagacaatagaagcgctacaagctgaactgaagaaaacaaaagagaggctgcaagcagtcgaagaactgaaaggacaagccgatgctgggactgtggt

SEQ ID NO: 4647 - DNA, 1187 bp, Setaria italica
  Peptide Sequence Number=SeqID_70621
taaccttaagaactaaaagaaagaagggactagaaaagtagactagaccaaaggaggtcaagcggcttgagcttatgcttgctgcgatcagtgaagaaagagacaaattgagaaaggaacatgctgtggagttggatcaatctggaatggagaaaacgataagagagctggagagcactatacatgagcagaaggaactggttagtcacaaggacactgaactcaatataatgaacgaaagattaaaccttgaagctaagagttacttgtcgtctattggttaaattacttctttgtctagtttgtactaattgaagtctttggagcgagagggagatcaactacgctctcaggttgcattactagagtccaagttaggtcatggagattactctgcatcgagcacaaaagtactgcgcatggtaaatactcttgcagttgacaatgaagccaagcagacaatagaagcgctacaagctgaactgaagaaaacaaaagagaggctgcaagcagtcgaagaactgaaaggacaagccgatgctgggactgtggtagatgcaaatattgctgaaaagttagcacaacttaagaatcaaattgccacacttgaaaaacgtgaagaaagatacaaggcggtgtttgcagagaggatctcggtcttccggaaagcctgctgctcgctttttggttacaagatagtgatgaacgatcagcagcagtcaaatgggatccctgtaacacgctttattctgcaatcagtttatgcccaaagcgacgatgaaaagcttgagtttgactatgaatcaggaagcactaatattgtggtcaacgattacacgtctcaacaagaaattgctcagcaggtggacgttttcgtaaggaggatgaactccataccagcctttaccgctaacctgacaatggaatctttcaacaagagaagtatatgctgaagacgtgaatgtagtggcaagtcgcattgctggatgtttgtatgtttgattcttcctccattgatgaaaagtatatatgagcactcacacatggtcgagtgaaaattgcattctgctgaggtactggggatcgataattgaagtagaggttggagctttggtggttaattatcccatgtgctcttgtttctgttgtgacaagcatgtgtcacagtatcagcatcacggcgatgg

SEQ ID NO: 4648 - DNA, 289 bp, Setaria italica
  Peptide Sequence Number=SeqID_70622
ccgacagctcctcctccatggctcctccgccgcggcgaaaccagccgcaaaaccccacccggaggaagggcgaggagccgtggctggcggcgagcctccgccccgcgaacttcctccctggcctcgccatcgggttcctcctcggtctcctcctcgacctatcctcgtcgtggagacccaaatcaaaccccgcgccagctccggctccggcagcggcgaccgcgcgcggctccagctccaagcgggcgtcggggggttcgtttgcctccggcggcgaagagcttaagag

SEQ ID NO: 4649 - DNA, 366 bp, Setaria italica
  Peptide Sequence Number=SeqID_70623
accgaaaccggaaacagggtgacggcggagcggcccgagtgcgcgatcatgacgccctccacggggcggtagtcctccagggcggagctgatggtggtctcccagtagacggcgtccccgccagcgtgcggctggatgcgggtcaggtgcgagtcctcgatttgcacgatcaggcccgtgcgctggctgaagtagccgaataggacatggcggatgatctccgccgggccctcgctgcggagcttcagcgtctgcgggtcggcggtcagcttcaggatgaagcagtcctcgccgttcaccttcttctcgcccacgcaccgcgcctccgcgaacagccccgccgtggtcagcggatcgaggccctgt

SEQ ID NO: 4650 - DNA, 293 bp, Setaria italica
  Peptide Sequence Number=SeqID_70624
tgcgccaccaatcgccatcggcctcctcgcccagagtctccgcgccgccgcctcctccccccttctttcccgtctagggtttcggttccatgcgatctcgcgcccgcggcggccgggaacactagggagggcatcctctccgtgcgaatctcgagagccggcgacccaatgggcaagggcgggcaggacgagggcaagcggcgggacggatccgcctcctccggggcggacccggccgcgccggccttcccggcgtgggcgcggaccccgagcgagtgcctcgcggagctggg

SEQ ID NO: 4651 - DNA, 1253 bp, Setaria italica
  Peptide Sequence Number=SeqID_70625
aacgcacacaggttgacatgaatagcagcattaatttgtgcaagatctgtagtgcatgcaatttgaagagatcaaccctaatcacttctaaagaagcagctaaacccttttgtcacttcaaagttgtagtcatgaatgccaatatgcctgcaaaagttcaaagcattgccatatttcgatgtcttattactcctaacctgagtactgtcttgactgcaagctcattctgcattatttgttaccgcaaaacaggctagatacatgtagacggtaagttcttgaaagacagcatatgtacgtagagacgccaaacatctagtaggttgccctacctacgtagctagtagcagataaaagccgaaatgtgcatgcatgggtcatgtcattttcaatactttatacagtagagacaagctaaagtgttcggtactgctttctgacatgaacgagtttaaagcttgcacatgctttgaaccagatgcctgagttcttaccaaatgaattggatcgactgttaattaaagatataacatgtcacttggtcctttgtactgtgtgttgctgctataaactggagatatggaagtacactgttgcagtcttcgtttgagaaaggagctttcgcagctacattattgacatgattgtttcagttggtgcaggagaatctcaaggtccacaatttcagttttagtactgaaaactactgtgagtatgcaccttcgtcttcaaaataccggatgccaacgatgttctcaacaaaaggcgatcaggatcatatgctgcacgtgcgcgcagctccagagaagaggcaacgtgttccttcagcatacaatagatttattaaggaagagatacgaaggattaaagcaagcaacccggccataagtcatagggaagcattcagcaccgcagcaaagaactgggcacattttccaaacatacattttggcctagggccccttgagagtagcaagaagcttgatgaggccattggtgcagcaggtcatccccataaagtccaagatctctactagaggcttacaacacccatcctgattccgtgtgttgtaagtaattttagaagaaaaaaactacctgaaattccgaatcggtttgtgagtggcgcacatatataggtaagtgatatcatgaagaagtaagaaattaagatgtatatatatgtacgagaacattaatgtcttacttgtaattaagttgtctttcttatttcttattgttttgttttattt

SEQ ID NO: 4652 - DNA, 609 bp, Setaria italica
  Peptide Sequence Number=SeqID_70626
tccggtattgtcctaacgtattgtttcttctaactaaaaggtcgtattctaggtggcgatcaggatcatatgctgcacgtgcgcgctccagagaagaggcaacgtgttccttcagcatacaatagatttattaaggaagagatacgaaggattaaagcaagcaacccggccataagtcatagggaagcattcagcaccgcagcaaagaactgggcacattttccaaacatacattttggcctagggccccttgagagtagcaagaagcttgatgaggccattggtgcagcaggtcatccccataaagtccaagatctctactagaggcttacaacacccatcctgattccgtgtgttgtaagtaattttagaagaaaaaaactacctgaaattccgaatcggtttgtgagtggcgcacatatataggtaagtgatatcatgaagaagtaagaaattaagatgtatatatatgtacgagaacataatgctactgaataagtgcttcatcatgttgttatttaatatcggtttgaaataaactatcctttgtgtaaatattagtgtttgcttctgtcaaccttgaatgcttcaatcatgccaattcaaatt

SEQ ID NO: 4653 - DNA, 408 bp, Setaria italica
  Peptide Sequence Number=SeqID_70627
ctgcgcccatcatcgacaagcccagcatggttgcaccctcccagcacagcaaggtaagttacttcatcaggctcaatccatgctggcatttcatcaaacaatttcaatgcatctgccccgtgcccatgtgtggaaagtgcctgaattgtagcattgtaggacacaagtgttcggtcttctagcttgatggaatggaacacttcaagagcccggcccaatgatccacacttggagtacatgtcaataagcgcattgcagacacgaacgttgtcttcagcacctatttttacgagcaaactcgtgcacacctaatccgtcctgtaatgctccaagctgtgcacatgcagaaagcgcggcgacaatggtcacctcatttggctcctcccttggcagaaactcccgaaagct

SEQ ID NO: 4654 - DNA, 349 bp, Setaria italica
  Peptide Sequence Number=SeqID_70628
ataaatcatgctcgcaagcaaatccgaacgagagacgcttccccttcctcttccctacgccgatggagtcgcttgtgtcgcaagcgaggccagcggcggtcctctggctcgccggcttcctacaggccgcgcgcctccaccgcgttgtctccttctgcgccagctcgagggcactatctatcaggatcgcacagtgcttcttgctgaatgggcttatcttcctggggagcttgctaaccctgaaatcggtggtcattccaacactattatgtattcttcctgagcaatgcaatgaaatggggaacgatcatctttgttgatcacacggcagccaccagctatctattca

SEQ ID NO: 4655 - DNA, 321 bp, Setaria italica
  Peptide Sequence Number=SeqID_70629
caacatctagaatgcctcgcaattgcgaaacacactgcatcctaccggcaaaacttttgatccattttcttttctatttccacatattccattttacatacatataagcaatgacaatggacgactatagcaagatctatatcatgccatcaaggaacacatgcaaaaagaaagaaagaaaaaacaaaagaacaagatgccaaaagaggtggcaaaaagaagcagaggctggaggggggcagaggccggacggcagcgcaacagaaaggggcaggcagagccaagcgtcaaaattagagttacaacttacaaccatgccat

SEQ ID NO: 4656 - DNA, 1455 bp, Setaria italica
  Peptide Sequence Number=SeqID_70630
tagtaaaaaactaaaaagtaaactaaagtaattagtaccaaaaagaaggtaggacaaaaaaaaagaagcagaggctggaggggggcagaggccggacggcagcgcaacagaaaggggcaggcagagccaagcgtcaaaattagagttacaacttacaaccatgccatcccttgcgcgtgcgccctaccatggtgagcatccgttagtgacacggccatggagaacatcatctgctcctcgatgctatccggacgaaagtggcttggagccatggcgaagttctcggcgaaaggcaatggttgcatggaccctgcatccgccatgatgtccgatccggcatagctagttcccgcctctgcaccctccgaccagtggtcggttgagcactcgccctcctctcgtagcacttctctgctgcagcttggtgcaatcccactccaggtgtctagtgaactgttctctacagcgcacatgcttccaccggagatgttgcatggtcggcggatcatgtcatagactgggaatgtgctactgccagccatataagagaaatccatgctgggtggctggtgctcagccaaagccgcaactgcacaggaatatccaccaggatgaggcatttccataggagcggctggaaggaatgcctgcctttcacgtgtctgtggctcgattacagggaagtagctgccacaaacaggatttactagatgtccttgttcctgaatggaacgccaaatcgcttccataaccatcatatcctccagattcatatcaacgttatcatcacggttatgcctagaatggaaaggccgcatgctagcctggctagagcatgaaggttcagatgaacagcattcagttccttgctcagcacattgatacgatggcactgaaaaggatgtgctgcaaatatctcgatactccacttctttcgttggggttactgtccggctagaagaacacctgctctgttttcttttcagcttagcctcttcatcttgaatttctttctggcgtatcctcaactgtgcttctatgactttctgctcttcaaactgctctatgctcctttcctccttcgttttcacaccacgatactccacagcataattgggtgttttgcagaatgggcattgtgtaggccgagcagtatgagtcggtttcatttgaagaaagcactctgtacatatccctttcgagcaacattttgaacggttgaggcttgggtagtacaggaagcagatggggcactcctcgaggtcccctccgccggccgcggcgtcgtcggcgcccgggtagcagggcgcgagcttggcctcaaggatcagcttgcgcagcttcttctggtcgatgtccctgtgctcgtagagcccctgcgggcgcgtgaaccgctcctccacccccgccttccgcctcccgcctatccggttccccatccctcccagatccgcc

SEQ ID NO: 4657 - DNA, 402 bp, Setaria italica
  Peptide Sequence Number=SeqID_70631
aagcagatcagatgagccccttgttcctgaaacaagagcgcgtcgcggatcatcagttaaagcgagcgcaatgacctgacgcacggtcaccgccgtctccgtctccgtctcagggtagatagatgcgcgggaaggaagagaggcagagcacacctacgtctgcttggagaaggaggagggcccggcggcggcggcggaggaggaggaggacggcgagcgcttgctgcggaagatcatgtacgccagcggcagcaccacgccggccatcatgatcgccgcccccagcaggtacctcgccggcgaaggcgcccccacctccagctccatcccgatctcctcgtctcgtgctggggaggttctgagacacgcaacagaggataggcaaggcacacaggggatagg

SEQ ID NO: 4658 - DNA, 585 bp, Setaria italica
  Peptide Sequence Number=SeqID_70632
ttttgttgtgccaaatcaaaatttctatgaatactgcttgtatttagtcaaagtgcactcttcatttataaccatatcaaatcagtcaaagaagcaagcattctgggatacacgaggagctaactaatcaggaaatcagctaataattggatgtttcggatgatgcccaatctcgaggggtagttgcagattctcagtaagccaaaacagagaaatacaatcatcaagggacgctatcgatccacccctcactcactaatccacaccgcccatcacacctccatcggggaagaagcagatcagatgagccccttgttcgtctgcttggagaaggaggagggcccggcggcggcggcggaggaggaggaggacggcgagcgcttgctgcggaagatcatgtacgccagcggcagcaccacgccggccatcatgatcgccgcccccagcaggtacctcgccggcgaaggcgcccccacctccagctccatcccgatctcctcgtctcgtgctggggaggtttggatctggcggtggtgcgtgcgacccggtgggtgacgaaaccagacgaccaacttgcgtgcggtc

SEQ ID NO: 4659 - DNA, 585 bp, Setaria italica
  Peptide Sequence Number=SeqID_70633
aagttctgtgattgaacattttattagcaaattgctagtgtgagcgcagatgccacagattcctgtggtatctaggatattcatctaacaatggctgaaatcctgctaattgatagattgagttcttgcccagttacaacggtgggggtttggcagcttttcctttttttcaatagcagtacctgtaaaaagagccatttgtatggaaacaaggaatcgagtcaatctcttggacaatctactctaaacactgtcctgtttcttgccaagttgactataggggcatagtaaacactatcgcctcgcctctgaacttccattaatagaagttacatgcacattggtgctttatgttttcatgctattcatgccctgcttatttctttataaattgactacagcgtacatgaactccataactcactgtacctgccattgttgcccccagcacacaacctcaaacccaataatatcctgtatcatactcttctcttacatattaagctgctatgatggatcaattctccatctagcagcatgtgttctcccctaaattcgtaatatgtaaccccagagtttggttcg

SEQ ID NO: 4660 - DNA, 202 bp, Setaria italica
  Peptide Sequence Number=SeqID_70634
gattcgttatggtgtcctgtctctatgcatgcttggacccactacctaccgaaagctttgctttcctgtcaccaagaaagtaaaaacaagctcctctcggttcctcgccgagatctatccaccaacctcttctgtcttctcttctccaggcgacgggcgccggaggccgacggggaagcacattgcttctgaccgatcgatt

SEQ ID NO: 4661 - DNA, 263 bp, Setaria italica
  Peptide Sequence Number=SeqID_70635
gcgcggcgggccctgcgtcggtgccggtcaacatcccagactggtccaagatcctcggggccgagtacgccgggagctgcgcgggcgcgcgaaggtgggcggcgcacgacgacctccgccgcgtccgcaacgccatctgggagaagactggcttccaggactgaccgagtggcaggcagccccggcaagccagcaccgccgccgcccgccttgacggcaacagcaatgcccgccgcggcctcgttgatcccgttctcgctttg

SEQ ID NO: 4662 - DNA, 493 bp, Setaria italica
  misc_feature (493)..(493): n is a, c, g, or t
  Peptide Sequence Number=SeqID_70636
tgccgccccacgagatgctgcagtgccgggagcgcgccgcggcgtccttctccgtgcgcgagggcgccgggcgcacgctcaagggccgcgacctccgccgcgtccgcaacgccatctgggagaagactggcttccaggactgaccgagtggcaggcagccccggcaagccagcaccgccgccgcccgccttgacggcaacagcaatgcccgccgcggcctcgttgatcccgttctcgctttgaggaggaagggagagactagcgttctctttgattagtggcctcaatcattatggattgattcgatgagattttttttccccttgttttttgttcttcggattctagtcgtgatcgatgaggaagagagtagagattaaagcctctgtttttggcattttttcccccggagaggctcggtcgatgtactaccaccactaaaattaattcatcttgattactagtaaaaaaaaaaaactaaaaaaaaaaactn

SEQ ID NO: 4663 - DNA, 1127 bp, Setaria italica
  Peptide Sequence Number=SeqID_70637
aaggggaaagacggacgggggggaattagggacggaaagaatggcggcgggggaggtggagctgaaggagaaggcggggacggcgtggagccactcgtacctgaaccagaagccgtggcacccgctctcgtacccgaaccagcgccgcaagtggatcgccgagcaggtccacgccaaccgcgcgcgccgccaggaggaggtgcagcgggagttcgcgcaggagcaggagttcttccggcagaccgcgctcttctccaagaaggacaaggagaagatggaggtaatgaaagctgtgagttttatgtacgtgcgcccacctggctacaatgcagagagtgcaaaagctgctgaaattgaagatgagaagaagaagtcagatccaggtgacatgggtcaaggtgctgcagcagcaagtacctcgtcaatgcctgataagggacctgaaaagactcaaccaggcgcagataagaaaaataggccgaaagatgtttttggtcggccattgccaacggaacaagaatttgaggttctaaaaaatgctccaaggttggaaacaggtgctcctgtaaggattaaaccatttggagttgaagttcgtaatgtaagatgtttaaggtgtggaaactatggtcaccaaagtggtgaccgggaatgccccttgaaggatgtgatcatgcctaatgaggagagccgattgaaaagggatgatccacttacaactataatggcgcagactgattcaagtgagcctttgaagtgggaacttaagcaaaagccaggcatgagccccccttcgtggtggattcgacccagatgatcctaatcagcagattgtggcagaagacatctttgatgaatatggaggttttctgggtgattgtgatattccagctctcatttccaacttttctggtagcaaatccacgaaacgttccaagaaaaaagcaagcataagcaggttgcatctgctattcatgaggaatccagtagacgtgaaagcagttaccatttatcatcggactctgaagatgagaagagaagcaaaacatcgagaagcaagagaaagaaaaaacattgttctgattcatcacattctgattctgtggtggatgctagaaaaggcgagc

SEQ ID NO: 4664 - DNA, 1283 bp, Setaria italica
  Peptide Sequence Number=SeqID_70638
caaaagccaggcatgagcccccctccgtggtggattcgacccagatgatcctaatcagcagattgtggcagaagacatctttgatgaatatggaggttttctgggtgattgtgatattccagctctcatttccaacttttctggtagcaaatccacgaaacgttccaagaaaaaaagcaagcataagcaggttgcatctgctattcatgaggaatccagtagacgtgaaagcagtttctccgactcagtcgcactagtagatgagaagagaagcaaaacatcgagaagcaagagaaagaaaaacattgttctgattcatcacattctgattctgtggtggatgctagaaaaggcgagcataagtcaaagcataagcataagaagaaacaccggtcagagtcttcttctgattcagaagttgaggtttgtgatgatacaaggaggtatctgaagcgagaacacaggaaggagaaaagagaggagttaccatcgtccttctataagggtaaaggagacacagaaagcaagaggcattcaaggcgttcaagggagaagcgcctctacagttattcatcgagttctgagagtcacaggcattctctacaacataaggagaaacagtattacagcgactcgagttctggtcgaagacatcgacactcaaggagatcgagggaaaagagatatgacagtgagtcgagttctgctgatgccaataggcgcccgaggagagtgatggagaagcagcacgacactgatttgagcccacatcataccgataggcattcaaagagatcaaacggtaagcgagactatactgaatggagccgttatgaaagcaatagacattcaaggagaatctcgggagaaggggcgcgtactctgattctagtgtttctgattactcagactctgatcggcacaataaacatcgacaccatcataggagaaaatgatctgcaccatatgcaaactgccctttccacggtgtatatctggggatcaccttggatgtaacggcattaagggttacctggcccctttctgaatgaagatcatcaggatccactgagtctggtgtttggtgaccgcctagggccctctgatgtgacagtaatgtacactgtataacaaaatttcatcatgctgggagaacagtagttgttccttaacgattgtgttgctgtagcatgtcctaggggttccggaatgttggttgttgtttaattttgtacgtcagctgcctcctggtgctctgtggaattcactaataatgttttttt

SEQ ID NO: 4665 - DNA, 241 bp, Setaria italica
  Peptide Sequence Number=SeqID_70639
cacagatgctagaaatgaaacatgagcaaactagagcacaaacatctacagtacctggtttgtgaggcaagggtggctgcggaagttcccgttggctagcttcaggatgttggcgacatggtcggggtaatggcacgagaacacacggggcacgatgtcccggtgcatggtgatcgactgcacgtggctccgcggcagcccgagccggcggagcaggaggtcgccgccgcacatgatgcac

SEQ ID NO: 4666 - DNA, 252 bp, Setaria italica
  Peptide Sequence Number=SeqID_70640
ggcgagttgaagaaggccgacagcgccgaccggagctgcggcagggagtcgtcgtcggcgcccgacgacaaggacgcaccaacgccgcccaggtggtagatgccgctgtccggcgggagcaggtggtggtgcggggacagccgctcctccggctgcaggattagcacctcccccatcggcgcgtaaagcagcttctgcaagcagtgaattggattaagcacattttctgaagacgaatcataatccacaaca

SEQ ID NO: 4667 - DNA, 2087 bp, Setaria italica
  misc_feature (1)..(85): n is a, c, g, or t
  Peptide Sequence Number=SeqID_70641
nnnnnnnnnnnnnnnnnnnnnnnnnnnnnnnnnnnnnnnnnnnnnnnnnnnnnnnnnnnnnnnnnnnnnnnnnnnnnnnnnnnnnttttttttttttttttttgtagaacgaaagaaagtttctatttccatttcacatgcgtcctgcaggacgcgtttctgttacaaaagaatcggtgtgtgattgtgtatgaatctatcggcggcgaaccaaccaaagaacgaacgcgcggacgggggccggatcggcccgacgcgaacctatcaccggagtctagccacgacgaggagcgcgccgagggcgagcagctccgcgggcagcagcaccacggccagcaggtgcgcgcgccgcgccgcgtcggtcacggcgtccacgaacccgcccaagccggagcccggggacacgccgtgcacgccgaagggccaccagaggaggaggcgccagcgccagcgctcggcctcccgggcgcgccgggcctccttgcgcaccacgccgcgcacggaccggaggtacgagttcacgtcgtggtcccggtacacggtgccccggggaccgtaggcaccgccgtccttgaggatttccagcgggtgcggcgagttgaagaaggccgacagcgccgaccggagctgcggcagggagtcgtcgtcggcgcccgacgacaaggacgcaccaacgccgcccaggtggtagatgccgctgtccggcgggagcaggtggtggtgcggggacagccgctcctccggctgcaggattagcacctcccccatcggcgcgtacagcagcttctggtttgtgaggcaagggtggctgcggaagttcccgttggctagcttcaggatgttggcgacatggtcggggtaatggcacgagaacacacggggcacgatgtcccggtgcatggtgatcgactgcacgtggctccgcggcagcccgagccggcggagcaggaggtcgccgccgcacatgatgcacggtgcaccgaacgttatcaccggcagcaatgctgaagcaggggcctcgccacgcatcagcagcatcaagttcacgagcagagccaggctcccgccgagggagtggccggtgaaccgcaacctcgcagatttaccgcagctcttcaagtgggatttcacgtatggtagcatctggtgatatatcccctttgcagcctcgtatatgcccctgtgcaccagcacgtcgagttcctcaaatttgacaggttcaaataaaaggttggcctgccaagcagaaattgtttctgagccctgaaccacaaagtatcttgtgctgttttgatcatcgtcacaaacgaaccactcgcaggggcaagatctcgaagaattcagatcatccgcaacggcttgccttgtctcttccttcgccgcaaccatggaagttaccgaatttgttgtggccacaaatgaggcttcgtccatggttaaaccttcaccattctcaccgttcacaaatgccatgatggaagccggatcatccttgacatcattcctagaaccaaatggcataatgcccatggcccgggaatgcaaataagatgcagcggatgacacgacgtggtatgcaccaaaggggtttattccaaggccaccacgttcctccttgctcgccagtgcagcattgtcgacagcttcagatacttgatcttgagattcatccttcgcattgctatgctcctgcttctgatcagggctacttctggccttgtcttcaaacgacgaagtcacaaactgcaaattgtacctccggagacattttggctgaatcttggggatcatgtaggcgatgttgcagaggtaggacatcatggagtactccttggcctcgccgagcgacgccttccgcaggagccgcgagaaggaggcgcggtcgaacacctcgccctcgtcgtaccccacggcgcagccttcgccctcgcccccaccgccgcaggaagcgcactcatcgacgccaccgccggcctcctcctccggttctctgcctccgccgccgccgccggtggcctccgcgtccgccgcctccacccaccgcggctgccacccgcagcatctgcagccacccagttcgaattccc

SEQ ID NO: 4668 - DNA, 1041 bp, Setaria italica
  Peptide Sequence Number=SeqID_70642
gcagcatctgagagagaccgagacatctttgctctctctcgtctctccctctttcttctcttgtctgatgctgctggctggcttcaactgactggagagaaatctactgactgaagaagaatctctactgaagaggagacaagaagagtctatccaaggatactcaactggttggtataggagtaattgagatcaagggccagtcgagacacaagaacacaggatagtgcagatggagaagcttgtgaatcactgcgacatggagctgatgaagatggccatgctcaggcacgaagagaccttcaggcagcaggtccacgagctgcaccggctgtaccgcgtccagaagcagctgatgatgagcggcggcgtgtcgaggccgtcgtcggagctcatcggctgccggcggcgtcagaccaggcgcagctgcaggcagccgcgtcgcgcgctggaccttcgcctccccgctgatgactacatcctcgtcgtcgccgcgggcaacgcgacgcctccgccgaggcaagaggacgggctggagctgacgctcgccgtcggcggcggcggcgcgggcaggaggaagcggcgggacgagggcaccggcaccggaacccccgtggggtcggactgctccggcgggagcctgacgtcgtcgtcgtcgatcaccgacaccaccagcggatcgccgccgttccttctccaggaaggggcggcggcggtgacgcagcaaccgccatggctcgtgcagtgcctcagcctcaagatggctgcggcgtgggtcaatggtcatgtagtaggattttaaggctgtggtgtcagctcgtaggagaggatgcagtgcaggaggagcaggtactctagaagcctgctggtagggctttgctatgtcatgggggctaccttctcaactaagtccggttggccagttcctgattaacgggtacttgcaggccaggttaattttcagtagtgctgttgatcaccatcacgcttggtgtagctcatgtagaaaagcaactctaaagaaaaaaaaaaaggcaactt

SEQ ID NO: 4669 - DNA, 492 bp, Setaria italica
  Peptide Sequence Number=SeqID_70643
tttctataggacctctttggcagtcaccgtcattaggagcactttgccagtcagcgtggagaggttagcctagacctcacggatctctcacagcactgagccagcagtgtcaaagtagtggtatctatatgcccttgatctcccatatatgaacccctgagaagggccgtacatctccaccagtcaacaggtagttcaagatgatctgcaatagtacagaaagctgcaccagtaactgtcaggtgaaccattacgaacacaactctactttgggctagaagaactcagataccccaattgctgagcaaggtcatccacatcttcgggtcttgcctccaactctgactgccctgccttgtctccaaaatcttcgatcaacagctctgcccagaagtcatcattcagctctgattggccattagcttgatccatctttacactatctgtagttccctttccaagctcttgaatgtttactgctaaattctccag

SEQ ID NO: 4670 - DNA, 477 bp, Setaria italica
  Peptide Sequence Number=SeqID_70644
tagttttgtagtttgctgctcctgccttagctttactacttctgtgattaagatgttcttgtcacgcttcagcctgtcaatctcttcctcaaatccgaactcgccaacctccaagcaagaagcgggagcctgctgctgatgtgattgtggcacagctgatgacggcttccttctctttattgtcttcagtaggtgcctttgacccctgaggaaaccctcatttgcagactcccacctgtcaggatcgacctttctgaagccataggtgttgagctgtcggacgaagctggagaagttgctgtgcttgaagagacgcgggagcagcgtgtcggcgaagacgtgcgggtcccagacgacgaagctgttgccggcgcggctccaggagacgacggcgtcggtggcctggtcctctaccaggtcgaacgtcttggtcaggaacggcgggggcccgacctcgtgcagcccctccatcgggcg

SEQ ID NO: 4671 - DNA, 1053 bp, Setaria italica
  Peptide Sequence Number=SeqID_70645
ttttgaatcatcaagaaaagaaaaacggagatactatattgttcaagtttggtcctattttgcaacttgatgtacaaggatcatgacactggtgcgtgaacaaaaacatcatgcttataccagttcaacagcaagctaaggatgtcttcagcaatcagcacatagaaagtgactcaagtactctcaacctacaacccaaatgccagaacctgaccaaagtccacgacaggacacctgcaacgtgcaatgactggtgtatgttacggtagagcacttccacagcttccgccgcctgtaggagctatcggataagagctgataacagctgtatgtcttcgtcggtctttctataggacctctttggcagtcaccgtcattaggagcactttgccagtcagcgtggagaggttagcctagacctcacggatctctcacagcactgagccagcagtgtcaaagtagtggtatctatatgcccttgatctcccatatatgaacacctgagaagggccgtacatctccaccagtcaactgaataaggagcaattgagaatgcttcagaggagaagcactaagcaggaaaaacagaggagcaaatttgaaaatgcaattgcacaaacataaatgggaacagcttgaagaagaaaacaaatatatatcatcattagttgtcagccacgtcggcaagatccgccactactctaatcttcactcctgcatattccagcaagatgaatagaacaaaatgtcactactcgctaagttcagctattctaacagtttgtcattgaatttgaagtgtaccaggtagttcaagatgatctgcaatagtacagaaagctgcaccagtaactgtcaggtgaaccattacgaacacaactctactttgggctagaagaactcagataccccaattgctgagcaaggtcatccacatcttcgggtcttgcctccaactctgactgccctgccttgtctccaaaatcttcgatcaacagctctgcccagaagtcatcattcagctctgattggccattagcttgatccatcttt

SEQ ID NO: 4672 - DNA, 1137 bp, Setaria italica
  Peptide Sequence Number=SeqID_70646
tagtggtatctatatgcccttgatctcccatatatgaacacctgagaagggccgtacatctccaccagataccccaattgctgagcaaggtcatccacatcttcgggtcttgcctccaactctgactgccctgccttgtctccaaaatcttcgatcaacagctctgcccagaagtcatcattcagctctgattggccattagcttgatccatctttacactatctgtagttccctttccaagctcttgaatgtttactgctaaattctccagctcaggcattccaggttcactgagcccatcaagcacacccgaatcgaacacgaactgtgaatcaagcggctcggtctgacttgtttccccagggctgtagaatggagtgttgtcaattggtcgccgccttttctttgagatggcatcctcaagttccttcctcttatcttgctgctggaccaactgctggaagaattctggattcctcattgctcttgccaagaaccccatcatctgtacctgcttctgctcagccacacgtagcctctcttccatggctctcacatgatctttagtagtttgctgctcctgccttagctttactacttctgtgattaagatgttcttgtcacgcttcagcctgtcaatctcttcctcaaatccgaactcgccaacctccaagcaagaagcgggagcctgctgctgatgtgattgtggcacagctgatgacggcttccttctctttattgtcttcagtaggtgcctttgacccctgaggaaaccctcatttgcaaactcccacctgtcaggatcgacctttctgaagcccgtatcgtgtatccgtatccgtatcggagtatccgtgtaacatagcttgtacttcatccagtatcttgttccatctagataggtgttgagctgtcggacgaagctggagaagttgctgtgcttgaagagacgcgggagcagcgtgtcggcgaagacgtgcgggtcccagacgacgaagctgttgccggcgcggctccaggagacgacggcgtcggtggcctggtcctctaccaggtcgaacgtcttggtcaggaacggcgggggcccgacctcgtgcagcccctccatcgggcgcggcgcgtcccggccgcccccg

SEQ ID NO: 4673 - DNA, 669 bp, Setaria italica
  Peptide Sequence Number=SeqID_70647
ctttcatgttccctgatatgaatggtccagcattttgcctagcacaaaatttcttcaatgaaatatttgaaagctctctttcggttagtgaacaaagattcgtgactgttatgttgggatcaatggtaggaacggcaactggaaatttttgtgcttcaggcagagcatttccctcttttgtattttgcacagaaaatagagaaccgccatcataaaaattcagttgtccaggatttgtcaaaatgaaaagtgcagaagttttgcttttatcaggaaccccagtatcaggaataagaatcatatcagcaaaggatccatcaagtttgaggtccatccgtgacatgcatgttactgattctaatccagcagacgactccaggctaagaaccgtgagaacttcttcagatcccatatcatcaccaccatatacaaaaagatgccctcctttattagaatgaattgctgacccagcagaccaatgcaagacaataacaggaagcctacgactccctgaagccagctgcagcttaacaacattagatgaaacatcgatttgcttgtcttgtcttgggaatcttgtagtcatatcccatagaagtatgtctcctgttatatagccaacagcaacaatcgagccccctctcgatgcccaacaaagagagcaaattt

SEQ ID NO: 4674 - DNA, 577 bp, Setaria italica
  Peptide Sequence Number=SeqID_70648
ttagttcaactgttgttgggatgtcggtggccaggagaaactgaggcccttgtggaggcactacttcaacaacactgatgctctggtcatttattctcatttcattttctcaactgtagcagcataaaatctattcaaagtaacaattcaacgtggaagtgcttgttctgtactgtttgttccacttagttgtgccccttctgatttagtatttgtagctcagagtgtgactccagtaccacttgttaatagatcaactgacttcactgtggatgcttagcttatgcccattttacttggacatcttttttctttgctcttgacggcttactgttacttagcgaaaccagaaagagtaatagtgttgtgggtaatatgctcagtgtccttagctgttctatagctcatccttggtttattatacttggcattgatttgtagacactgctttcttgaaatgtaagaccttccccattattttcttaacttgcagatttatgtggttgattcactggatagagagagaattgggagagccagagcagaatttcaggctataatcaatgacccttttatg

SEQ ID NO: 4675 - DNA, 2841 bp, Setaria italica
  misc_feature (2771)..(2841): n is a, c, g, or t
  Peptide Sequence Number=SeqID_70649
agggacagaaaccctaactaaacccgaccccgcccccgccgcgctcccctctccttttcccgcaccgcaagccgggaccaccgagcggcgaccgcgatggggaagaggagcggcgccaagaagaaggacaagaagaacaaggtcatcctcccgccggagctgccgccggaggtcgacgacgaggaggtctacgtctccgaggaagacatcgacttctacgggcgccacagattccacaccttcgaccagaagtccatcgacaggtacgtcgggaggaccgcaggccacgacgaggccgaggtcgagcgcctctatgaagagcgcaacaagaggaaggccaccgacgcctcgaggagaccccgggaggaggatgacgatttggaggtggaccccgttgacgcgctccccatcaagaccctgcaaggggagctcgtctacaacaaagcaaagaaagcaaggtacgaagaaaatactggcagcatgaagtctaaagctcaagagaatggtgctgatgccaagcagagtattaaaaaagaaccgacgggcaagtctaaaaacaaaaagggagatgataaagtgaaaaatacgcaatctcaaactgaagttccaaaggggaagctacactcagatgtgctggaagaagtgaagaaggaactttcagctgaggaattattcgaaaaaaagaaagcccaacttgctgagttggggatggctatgcttgaagatcctgagttgaatattagatctctgaatgatatgttaagcataagcaatgacaaagaccaaaaggtcgttaaacttggtctgatgtccttgcttgctgtgtttaaggacattattccaagttatcggattaggcagctgacagaaaaggagctagcagtagaagtttcgaaagaagtgaagaagactagatattatgagtacacacttctccgctgttacaagacatatctacagaaattgatatcattggagaagcaacgccacttttatcctgtggctgttcgatgcatgtgtgctttattggatacagctccacattttaacttccgtgaaagcctgttggccagtgtggtgaaaaatttaagctcctcagatgatgtagtaaggaaaatgtgttgtgaaacaataagatcaatatttataaatgaaggaaaacatcgtggcgaggcaacaattgaagcagtaaggttgattgcagatcatgtgaagctcaatgattgccagctccatcctgatagcattgaggtctttctgtctttgagatttgatgaagatcttggagaacatgaaaccgaggagcaaaaggtgaaaccaaagaagaataaacgttggcaaaatcaggaggccccaaagcaattgcctgttagcgataaaagaaaaccagacgggaactgatctcaaaagctagagaggaggttgatgcagatcttagggcggtttccttcacccttgatcccaaggagagaaaagggatacaaagagaaacactttctgctctgtttgagacttacttccgtattttgaagcataccatgagcacttcaaacctaaggtccaaggccagtattgtctcacctggtgcctcacacccactactcgctccatgcttggagggcttaggaaaattctcacatttaattgatttggatttcatgggtgaacttatctcttgcctcaagaaactttctgggtacagcgaccgtcaggatgaaacaccccatgataacacactgtctgtctcagaacgcatgcaatgctgcatagttgcctttaaagtctggaggagcaaccttgaggcattgaatgtagacctgcaggatttctttgtacagctctataacctcatattggagtatcgtcctgacagggatcgtggtgaggtgttggcagatgctctaaagacacttctttgggaaggcaggcagcaggatatgctaagagctgctgctttcattaaacgtttggccacatttgctctctcatttggctctgcagaagccatagcagcattaatcacactgaagcatctcctgcaaaagaatagcaagtgccgtaacatgttggaaaatgattctggtggtggttctctttcttccttagttgcgaaatacaaccccgaggcaaaagatccatatctgagtggcgcactggcgtcggtcctttgggagctcagcctcctggagaagcactacgatatctctgtttcttcaatggcatcgaatatcttgagtatggcaaatttgaatcccacccagaaccctgttccgattttgaatgtgaaccccctggaagcatatagagacttgtcaattgaacgggaattatcaaagccagcgagcaaagcattgtcactgaatctcaaaaagaaacggcgtggcaaggagtttgttgtgctaagcccagatgtgcttcagaaggcagattgctctgtggataaagacaagcttgaagagaagttgcagaaccattttgcagtactaagaggtatctcggagaatgagaggttgcgggccgagttgaaccacacattgtcatccataaacatgtacaaggagtacaagaagcagaagaaaaacacgaaatcgaagatcgttaggaaaaaagtagcaagggtttaggcgtgttatttcttgggatttttgtacaccagtaatggaatgggtgttatcctctctaaattttggcctatttatcgtggtggctaccataacgctgagttctgctaccttttttggtttctgtacacggtacttgagtgaaaactnnnnnnnnnnnnnnnnnnnnnnnnnnnnnnnnnnnnnnnnnnnnnnnnnnnnnnnnnnnnnnnnnnnnnnn

SEQ ID NO: 4676 - DNA, 1376 bp, Setaria italica
  Peptide Sequence Number=SeqID_70650
catgaacctgatactacacgaaagtacattggccgatgacttcatattccgaatcaacacacacaaacactgacgctcatacatgtactagttatgcagtacgtgcagaaaacataaaccttaactaaagatcagaggagagcataaacccgtctcctccttccatatcttcagggatccacaaagacagaacactacttcatgcagctatgcaactacaaatcctgcagcaaccgaacatgctagaaatacctaaagatcatgttggaatcatgaatcgtcatggaaatatcaacaagggtggctattgaaatagaggccacccttgtcccggcctcaaaaatgcagccgggattccttgtggtgtttcaggaggaaaaaactggtcggagagaaaggtccagataaaaatggtggtccttcggatgctcctgctttgtgaatggtgatcgtagtagtgcgcgatgccacaagctgtctcttaaaacctgcaacttgtgcgcatcccgcgtcctggttacttcctgtgtgtgaagatcgtgtgcgatcctcagtccttccacatgtaggccggactgcgggggggaggtggaggagatggaagagaaatggaggcagcagaggccatggctgtccctgccgccggtgtcaccgggacatccggggcgctgggcacgtagtccatgctggtcacctcactggcgaagcgagactggaggaagaggccgtgggcgttgtccatgtcgtagtcccagacggagctgcccgggccccaggcgctgaaccacgcctcgtcggccggaccccacccgccgctggacgtcaccgacggcttgaacatggccgcgttaccgtcaccgccctgatgatcggccggttggagctgaggatttggttcgggttccgagttctttgcctgctctgtttcggggagcagaggcttcgcttcactgttgaacggttgctctccgtgatggtgctgtgcttgcttcgtgttggtgtcgtccggcgtcggcggagcagaggacgaggaggaggagcacgacgccgccgcgctggcgctggtgcggccgctcccgccgacgcgacccttgccgaggaacaggtcggggaagttgagcttggcgttctcgccgcggagcttgaaggcctcgcggtcgtacgccatggcggcgtcctcggcggtgtcgaaggtgccgagccacagccgcgtgcggttccgcgggaggcggatctccgccacccacttcccccagtggcgctgccgcacgccacggtagagcttgggcgggcccggcgcccgcagcagctgctggaacagcgccggcggcacggccccggcctggaacccgcgggggctcaggttcagcgcctcg

SEQ ID NO: 4677 - DNA, 1818 bp, Setaria italica
  Peptide Sequence Number=SeqID_70651
catagtagtcatgtaacttaacaagttgagggaggttagggagagctctcagggcagcctttcttatattttacagcaggtagagctgctcacagaggagtttcccatgtcaagaagtaagcggaaacataagggcatctaatatctaactctgatcatctggcacctaacagtttagcataggttgtgctggattggtgatgtagcgtcgcagagtcgatcacgggtcagatggctcacatttcaccggcgtcttgacgggagccacttccatggctgcaggcttggcattttgatcgctgctgaggctgctggcaacgaccagatcgctgacaacgtcgaagttcagtcgtccgctaactttcttcccgctatttagtcggttgttgatagccttcaggtccttggaagggctttgaaacgcataggtactctcaccaacgcatgcatagtagctctttgagcttggggagagcaaagtatccatctttgatgatcgaagtggtgaaacgtatacattatgagtagcagaaaccttcttcggagacatgtcaggaaggtttggaaaacgagctagccgtggagattctggaaatggacctacatcaacaggacctttttcctcttctttcttgtttggactagcaccaggtcctacctccacgagtaaaggcttgacagcaggaataaatacttcattgtagaaagtgataatatcgacatgatcttctcccattttcccattccggcttctcgggggccaatgcacataaacacttcggaaaacttgtggcttgcattgaggttgtttcctgtacccgaaaataatctccttgaacgaaagttccaattgagatatcttagcaactccatatatgctgcacaatatgatctggtcaatatgcctgttaaagaaaagagcagtttgttgggtaaggatttgctggacgagggaatacactcgctccagaacttgctgagaaagttgcaatctttcacagagacttctgattctaatggctgcaagttttgctatcttgctaaagaatacacctattcctgtctctgcgcatgtttcacctcctgctgcaggatttggtcttgttggacttgcaaaagctgattgaagaggtggtggcaacttcgatctgatgatatccttgactggtgatctaaatgaattgctgtccaccagcacatttcttctctcagtgcatgctcttttgggggatctgatttcatccttatctggcgaatgctcctgcttttggaagggaagaggtggcagcccacccagtgagatattatgatgtgctgcaatggcatcaagtgaaggcattggttcagccagtaaacctaaccggttatttctgcagacagtgctggccttgcaacaatcaaggaattgtacattgatgagcctttctcccatgccatgctctccagaagccgttcctcgagagaattcagatgtcgcttcaactctctgggaagtgtatcttcatgcctaacaaaaccctctatgactttactcaagtcaaaagctgtaatgccagtcttctccaacacagctgggaacatcatagtgacagtcttgtgagttgcaagaactaactcagcagaacaggcaatcatacaccgatgaaatcgctcattagacaagagtgatgtaagattgttcccgttcccgctcaagatttgtgactctgctctacacatcgattccagaaccctgtaatatagcttaagggcttccattttactttgttctgtagtcagatgggggagtcaatcttattgcttctctgtgtgaaaaat

SEQ ID NO: 4678 - DNA, 347 bp, Setaria italica
  Peptide Sequence Number=SeqID_70652
caatgggtcggatcgcaccaccagcagcagcagccgacgacgacggcggcgactgccggaacccctccggcggccaatcgcgacgagccccgggctccccaccttccaaaccctacccgtcgaatcgcgcgcctcgatccgttcccgccacgccgatcccgcgccgggccgtccaaaatccggtcgggactctccgccgccgggcgttgattggggattcagaatattaggcgccgcgagccgcggctcccgcccgccgatgcttggctagcggaggaggcggcggcggtggcggtaccatgttgcagtgcctggatggggtgaggcacctctgcggcgtgctcctc

SEQ ID NO: 4679 - DNA, 273 bp, Setaria italica
  Peptide Sequence Number=SeqID_70653
atctaacacacacgaacacgagaaacacaaatgtttctgaggctttctattttctttatttctacaaactctactatctagcttgtacacgtttaggactccatgctagtctccttgcaacatgcaactcaatattaaacaccacaaaacttcattccctcccggattccgtgagctcgcatacttccttctacacgggttcaggcaactggccaaaaaaaagcaattacgtttcctaaatgattaactcaagctttactccaactcttatat

SEQ ID NO: 4680 - DNA, 596 bp, Setaria italica
  Peptide Sequence Number=SeqID_70654
ccttgatggtatatcttgtgacatttctatggaacttgaatgctttggagaatctgctgaagtttggtaacttgtagcagctggtttcctctgatggtcttcagcttgaatgtttgacactaatggaatagtaggaaatggatatgcaggatacccatatccaggacaaataaactgattagaatgctgaacttgccccatgtttttgctatcctggaacagtgcatattgaggagtctggacaggttgcataggagcttgcaaactggctgatggattctgtactttgctctgggagaagccacttgtatcgctggatagtttactttttcctctttcctcctgttttctgcgtgatctcactggtctcttctgcacatctcccttgttttcttgtttggtaatgccaccagaaatttcattaatcagaagcaaagaaggcccatgatgagataatggttgtttattcaatggtacttgtggaatcggaattgattgcacaacattatccatcatatctgaagatgcggaaagaaaatcactgtcgttggcaaccacttcattaccgaatatggagtcactattgctaaatagac

SEQ ID NO: 4681 - DNA, 761 bp, Setaria italica
  Peptide Sequence Number=SeqID_70655
gacattgctcaaggttgcaacagcaactaaagaagaaatcatatcctcacacacaatcgcaggttctatccagtctgagatgttcttgctggatgtggaaaaggatgctacaatggtcaaatggttacatggtacacaaggtaatgatctccagtgccgcagatgatcagcagattgccatcatcaccaccaccactgatttgctatcaagttggcgtctaacagttcattgatcagcatattattgtgacggctgcaacaccatttcttgcttgtctttgcgatcttctgatggcaccctaggagtttccaagggtaccttggactcaggttcaatcttcaagtgtgttgaggatatgatttcttctttagttgctgttgcaaccttagagcaatgtctttgaaacagcaaatgggctactattcgatcaattggatttgttgttgtttctgcttccttagttggagatcttgttctcctagtagatgtgtcatgttctgaagcttcatcttcatctttagtagtcttgttagtgctactcctgtcaccagcaatttgtctctctgtggcactacaggccaaacgaagcaaactatctcgaatacatagtcgagttttggtatccaacttgccaagagcatcttgaagctgataatatattttttcctcttataaagggatcttctgaaattgcaaaactttgtgaacctcgtcgtggcttgttgggatcatctcaggcaaaaagtccttatttgtgttt

SEQ ID NO: 4682 - DNA, 772 bp, Setaria italica
  Peptide Sequence Number=SeqID_70656
aacaaccaatttacttagacttagtactttagacgaatacttactagaatggcaccctaggagtttccaagggtaccttggactcaggttcaatcttcaagtgtgttgaggatatgatttcttctttagttgctgttgcaaccttagagcaatgtctttgaaacagcaaatgggctactattcgatcaattggatttgttgttgtttctgcttccttagttggagatcttgttctcctagtagatgtgtcatgttctgaagcttcatcttcatctttagtagtcttgttagtgctactcctgtcaccagcaatttgtctctctgtggcactacaggccaaacgaagcaaactatctcgaatacatagtcgagttttggtatccaactgtgtgagaaaggtaagaaaaatgaagttaatttcttttctggcgaacatcttcagcaactgaataagcgtcaattaaattgaaagggaagaacaaattgccttgccaagagcatcttgaagctgataatatattttttcctctataaagggatcttctgaaattgcaaaacttttgtgaacctcgtcgtggcttgttgggatcatctcaggcaaaaagtccttatttgtgttttcatctatgacaattgaactccctaaagaatccgcatttttgttcctcggggagtatggttgaagtacaattgtgtcactgccagaaccctcttgaccaaattgttgctgctgttgctgaatagctattagggcttgcatttgctgtcctgc

SEQ ID NO: 4683 - DNA, 979 bp, Setaria italica
  Peptide Sequence Number=SeqID_70657
taggtagttcttggacaggttgcataggagcttgcaaactggctgatggattctgtactttgctctgggagaagccacttgtatcgctggatagtttactttttcctctttcctcctgttttctgcgtgatctcactggtctcttctgcacatctccctacattgattcacattgaattaaggaaaactcaaagtactaattgagttaagcagattaatcagaggatctaaaaatagctttcacaaagagataacaaagacaaaaatagacttggcatattttgagcccatttttcctaacaaaagctatgctttgtgcataatgtactcgaaagcaacaaaaacttctattgcagacttcagagcaccaattgaagcaacttcaggcttccaatatgccatatcacactgttacaacaagattgtcacaaaagatctcaagttatgccaaaatcggtttgtaatcagattcacactgtaattgtgaccagctatttctttataatccattgccctaagtggtaaaatgcaattttgtttcatggcataaatccaaataagaaacatcaaacatcagcatattaattagtacagtttgatacaaaagctcagaagtgatttcattcataaaaagtttgacagggtacaccatatggcttctacctcctgcgagaactggtttggttttccagaatattcacaagtcagatgatttttactctgaacttgctctccagatttagcattagcatctgctacctgccaaaagtgcataacaagagtagccaagaaataattgctaaaagtgtacatatgtatatgcatttatttgtgtaccttgttttcttgtttggtaatgccaccagaaatttcattaatcagaagcaaagaaggcccatgatgagataatggttgtttattcaatggtacttgtggaatcggaattgattgcacacattatccatcatatctgaagatg

SEQ ID NO: 4684 - DNA, 545 bp, Setaria italica
  Peptide Sequence Number=SeqID_70658
aacagtgcatattgaggagtctggacaggttgcataggagcttgcaaactggctgatggattctgtactttgctctgggagaagccacttgtatcgctggatagtttactttttcctctttcctcctgttttctgcgtgatctcactggtctcttctgcacatctccctcctgcgagaactggtttggttttccagaatattcacaagtcagatgatttttactctgaacttgctctccagatttagcattagcatctgctaccttgttttcttgtttggtaatgccaccagaaatttcattaatcagaagcaaagaaggcccatgatgagataatggttgtttattcaatggtacttgtggaatcggaattgattgcacaacattatccatcatatctgaagatgcggaaagaaaatcactgtcgttggcaaccacttcattaccgaatatggagtcactattgctaaatagacggtcaaaatcatcgaagtcaccaatattaccccagtcacaatcaaggaagctgctactcttttcttcgtg

SEQ ID NO: 4685 - DNA, 1061 bp, Setaria italica
  Peptide Sequence Number=SeqID_70659
tttttttaccaagaatgccacaactatctagcactaagaataacgacccattgttcatgaaaaatcattcacaattttcacactactctaaaaccgtatgtcaaaacgcttaaaataatactctacgtgtcatcagtctatcagagacacttgcgtttatgagccatcaacattttctcaaggaagcaactagttgaaaacatgggacggttactctacagagggaaaaaagacattgctctaaggttgcaacagcaactaaagaagaaatcatatcctcaacacacttgaagattgaacctgagtccaaggtacccttggaaactcctagggtgccatcagaagatcgcaaagacaagcaagaaatggtgttgcagccgtcacaataatatgctgatcaatgaactgttagacgccaacttgatagcaaatcagtggtggtggtgatgatggcaatctgctgatcatctgcggcactggagatcattaccttgtgtaccatgtaaccatttgaccattgtagcatccttttccacatccagcaagaacatctcagactggatagaaacctgcgattgtgtgtgagccctaaaaagagcgaacttggctctgccgctctagacatccttttgcttaactcgatgtcctctccagtttctcagggccatttttttccctctgtagagtaaccgtcccatgttttcaactagttgcttccttgagaaaatgttgatggctcataaacgcaagtgtctctgatagactgatgacacgtagagtattattttaagcgttttgacatacggtttagagtagtgtgaaaattgtgaatgattttcatgaacaatgggtcgttattcttagtgctagatagttgtggcattcttggtaagctgtccaaccagcatgggaatatttattttggttttcgctattgctattgatgtgaactctccgatggttctattcctacttctgcttctattaaacgtctaagttgttcttcttgtatttagttactttgttatttgtttactttacgttttagtttagtttatttt

SEQ ID NO: 4686 - DNA, 790 bp, Setaria italica
  Peptide Sequence Number=SeqID_70660
ttaaactgattagaatgctgaacttgccccaggtttttgctatcctggaacagtgcatattgaggagtctggacaggttgcataggagcttgcaaactggctgatggattctgtactttgctctgggagaagccacttgtatcgctggatagtttactttttcctctttcctcctgttttctgcgtgatctcactggtctcttctgcacatctccctcctgcgagaactggtttggttttccagaatattcacaagtcagatgatttttactctgaacttgctctccagatttagcattagcatctgctacctgccaaaagtgcataacaagagtagccaagaaataattgctaaaagtgtacatatgtatatgcatttatttgtgtaccttgttttcttgtttggtaatgccaccagaaatttcattaatcagaagcaaagaaggcccatgatgagataatggttgtttattcaatggtacttgtggaatcggaattgattgcacaacattatccatcatatctgaagatgcggaaagaaaatcactgtcgttggcaaccacttcattaccgaatatggagtcactattgctaaatagacggtcaaaatcatcgaagtcaccaatattaccccagtcacaatcaaggaagctgctaccttttcttcgtgatcattaccaaacacttcagattcaccatccagctgcaacaagaaaacaagggagatgtgcagaagagaccagtgagatcacgcagaaaacaggaggaaagaggaaaaagtaaactatcc

SEQ ID NO: 4687 - DNA, 610 bp, Setaria italica
  Peptide Sequence Number=SeqID_70661
cccaacaacggcgtcacactctactcggacctcatcgccggggtggcaggaggcggagtaccgccggccgccgaccaggcagagcgacacggcggccctgttttactcgtcgggcacgacgggggtgagcaagggcgtcgtgctcacccacggcaacttcatcgcggcgttgacgacggcgacgtcggaccaggacgagctcggagaggggcgcaacgtgttcctatgcttcctgcccatgttccacatctacggcatgtccgtggtcactctcgggcagctgcggcgtggcaacgccgtggtcgtgatggctcggttcgacttggaagccgtgctcgccgccgtgaagcgccaccgcgtcacctacctctactgcgtgccgccggtgatgatcgcgctcgccaggcacggcaggggagggcagttacgacatcagctccctcaggtgcatcggctccgccgccgcgccgctcgggaaggacgtcatggaggccgtggccgacaaattcccaaacgccgagatcatccagagttatggtatgactgaaacttgtgggatgatatcgctggagtacccacaaaagggacgtacccgtccgtttggttcaac

SEQ ID NO: 4688 - DNA, 439 bp, Setaria italica
  Peptide Sequence Number=SeqID_70662
ttttcacagtattctcatgacaacacgatatttggcaacataaaccggcacatgtattagcaccagacactgtcattggtagagaaatatacaaaacctgttgatagaagctatagtgagggtaactattaaggtattaggaaggctgaataaaacagcaagtccttatgcacatacataaaggttgattggatatattttttccagctatcaatttaccaacagtggcaaccctcttgcttgagcatgtccaaagaccaattatacatgttccataagactacaagccttcttttgctttttcaaaaaagtaacctcacattcagcagtaagcacacttctgaagaagctctttatcaataagccaaaccactttgtcagactataacccaacttctttggcacgctggactgggtaaaaatcaagataacagatgct

SEQ ID NO: 4689 - DNA, 667 bp, Setaria italica
  Peptide Sequence Number=SeqID_70663
gcggatggtcacgctcgctagcgccaccctggtgcacgcgtttgactgggagatgccgaagtcaccccctttgacatccacatccgcatgcgacccacccgggaggaaacgggcagggcggaactccagcgggtcaggcccccacagggccgggtcgcgcgcgatgccccacacgttgacgagcagctccgctcccttggggatgcggtagccggcgacctcgcactccgccgccgccatgcgcggcagggagagcggcgtggaagggtgcagccggaatgtctccttgatgacggcgttgaagaaggtcaggcgcgggaggtcggcctccgacagcagcctgccgcggccgacgacggcgtccagctccgcctgggcctgcttgaggatggccgggtggcggatcagctcggctagcgaccactccacgatggtcgacgtagtgtcagtccccgccacgaacaggttcaaaataagtgccttggcatcggtttcggtgatcctatcctcctcgccaccggcgtccttcaccatcgccagcagcaatcccagcaagtccttgccttcctctgtaacccccggccttcctcctatcagcaatgatcccgttcatcatgtcgtcgaaccggcggtgcagcttctcatcttggccacaacgccctgcggg

SEQ ID NO: 4690 - DNA, 192 bp, Setaria italica
  Peptide Sequence Number=SeqID_70664
tgcaccatgagctagcatcaaactaatataaagtcgttacagaaagcatgccaatcgtacgtaaggacgtattagagcaatatatagtacaacatcaaagtgaactactaatgagcatggactttatttgacacaatgcatgctgtgctccaagttatgttatgaggcatctatctgcactggcctccgttg

SEQ ID NO: 4691 - DNA, 465 bp, Setaria italica
  Peptide Sequence Number=SeqID_70665
tgtcgtttgtaagtaaggttctaggtcgtcgggtaggttcggtccttccgacagcagcctgccgcggccgacgacggcgtccagctccgcctgggcctgcttgaggatggccgggtggcggatcagctcggctagcgaccactccacgatggtcgacgtagtgtcagtccccgccacgaacaggttcaaaataagtgccttggcatcggtttcggtgatcctatcctcctcgccaccggcgtccttcaccatcgccagcagcaatcccagcaagtccttgccttcctctgtaaccccggccttcctcctatcagcaatgatcccgttgatcatgtcgtcgaaccggcggtgcagcttcttcatcttggccacaacgccctgcgggtccagccaccggagtgccggcacgaagtcccgacgttaagcacgccgcccacctgcatcacctcaagcacgatctccttg

SEQ ID NO: 4692 - DNA, 592 bp, Setaria italica
  Peptide Sequence Number=SeqID_70666
tttaccttaacgttccaacgccgctccttccctgccgcgcatggcgttgaagaaggtcaggcgcgggaggtcggcctccgacagcagcctgccgcggccgacgacggcgtccagctccgcctgggcctgcttgaggatggccgggtggcggatcagctcggctagcgaccactccacgatggtcgacgtagtgtcagtccccgccacgaacaggttctggccggccggcggcgtttgtttgtcgatcaacaaggcatgacgacggacatacatacccaccgaccttcacccaccttccagtgacagcgatccaacagaaaccatttcttcaattatatgtggaccatgcatggcaaatccaaactttatttattaggtagccaacaagatgggctcgcactgtcactatcatctgcagtgacacctgaacagctaaaatgccgatatgacaagtactgtagataagaaaacgtacgaaataaacgttcttttcctgctgtggttatgttatatgtatgaagatgctagctcactctgtgcgtatgtatgtccgtcgtcatgccttgttgatcgacaacaaacgccgccggcc

SEQ ID NO: 4693 - DNA, 1393 bp, Setaria italica
  misc_feature (1)..(5): n is a, c, g, or t
  Peptide Sequence Number=SeqID_70667
nnnnnagtttttttttgttttttttttctttaaacaatcacaaaaactttatattagtttgatgctagctcatggtgcaatgctcagctagttaataacaatattaggtcgttacagaaagcatgccaatcgtacgtaaggacgtattagagcaatatatagtacaacatcaaagtgaactactaatgagcatggactttatttgacacaatgcaacggaggccagtgcagatagatgcctcataacataacttggagcacagcatgcatttctcgatctatcttgagtttttatgcaatttcgtatgccaatgggagcaacctgggtactggatgaaccatcaacggcaccgcccgctgcagcagcagagtgaaggcctcttccatatccaactcgtccggagtttggcccgccggcatctcccagtcaaacgcgtgcaccagggtggcgctagcgagcgtgaccatccgcaagccccagctgagtcccgcgcatatcctccgccccgcgccgaatggtatgagcccgaagtcaccccctttgacatccacatccgcatgcgacccacccgggaggaaacgggcagggcggaactccagcgggtcaggcccccacagggccgggtcgcgcgcgatgccccacacgttgacgagcagctccgctcccttggggatgcggtagccggcgacctcgcactccgccgccgccatgcgcggcagggagagcggcgtggaagggtgcagccggaatgtctccttgatgacggcgttgaagaaggtcaggcgcgggaggtcggcctccgacagcagcctgccgcggccgacgacggcgtccagctccgcctgggcctgcttgaggatggccgggtggcggatcagctcggctagcgaccactccacgatggtcgacgtagtgtcagtccccgccacgaacaggttctggccggccggcggcgtttgtttgtcgatcaacaaggcatgacgacggacataacaattagtgccttggcatcggtttcggtgatcctatcctcctcgccaccggcgtccttcaccatcgccagcagcaatcccagcaagtccttgccttcctctgtaaccccggccttcctcctatcagcaatgatcccgttcatcatgtcgtcgaaccggcggtgcagcttcttcatcttggccacaacgccctgcgggtccagccaccggagtgccggcacgaagtccccgacgttaagcacgccgcccacctgcatcacctcaagcacgatctccttgaactctctcgcgccctcgtcatcgccggcgccggcggcgaacacccgccgtccgacggccgctcgcgagagcgcgttcgttatgcaagtagacaagaaacgttaactaaacggtaacctaa

SEQ ID NO: 4694 - DNA, 714 bp, Setaria italica
  misc_feature (660)..(714): n is a, c, g, or t
  Peptide Sequence Number=SeqID_70668
ccccgccgaggtccccgccccggccccgtccaagaagaagaagaagccctcgtccaccaagagcaagaagaagaagagcaaggccccggcccccgcccccgtcgccgaggcacccaccagcaccaagcactccaaggctaaggctcctgcgtccagcgaggccgacgcacccggccccgtcggcgacggcgtcgccgccgacaccgcggctgctggaaggaccgtggcaggcggcatcatgtcggccgcgctgggcctcgtcgccctcctcgcctagaaacacggacgccgacgcacgcgcgcgcgagctgggggacggccggcggcctgcacagcacagccacccgggtccggggcgtccggccgccgggacgacgcgccacaacacgacaccatgatgcagctagccgccgtgccccggggctttgacgccgtagctcgtttccgcgctgtgctcttgtccattttttctagctaacaggctgggcacgcctcttgctgtgctgtgtgcagtagttccactcgcgtttggtgatacactacccacctcggattctttcttctcccctccttttctcttgtaccccattgagattgagatgatttatttatatctttattatataaatcattgcatgatcccatacttaacttaaaaannnnnnnnnnnnnnnnnnnnnnnnnnnnnnnnnnnnnnnnnnnnnnnnnnnnnnn

SEQ ID NO: 4695 - DNA, 395 bp, Setaria italica
  Peptide Sequence Number=SeqID_70669
ggccggtgaggttgttgttgtagaggtcgagaacacgaaggctcctgagcgacgcgatgatatcgtcggggaaagtggagttgaggatgttgttggagaggttgagcgtctggaggagcgggagggaggagagcgcggcggccgggatggggccggataggttgagaccggagaggtcgagggagatgacgcgcctgtcggcgacgtcgcaggacacgcgcggccacgagcagagcgcggtgtccggcgtccagtgcgtggcgaggtagccggaggggtccgtgagcgccgcggagaggttgaggagcgcggccgcgtccggggaggagggtgagtcggcggcgtcggcgcagtggttggcggtggcgatgaggaggaggacgggggaggagaag

SEQ ID NO: 4696 - DNA, 312 bp, Setaria italica
  Peptide Sequence Number=SeqID_70670
tcccaagagctatcggaagctcggcgagcaccggggccagtgggcgctccagcgcaagggcctgtaccagcagctgggctggagcgtggactgcgagttcgacaagagcatcctcctctggcacatcgccaccgacctctgcttctacgccaaccaagacgacatcatcggcggtgaccctctgccggcgatgagcagggagatgtccagctacatgctcttcctcctggtgatgcgcccgttcatgatgacggcgagcattgggcaaatccgtttcggggacacctgcgcggaggcctagagcttcttccg

SEQ ID NO: 4697 - DNA, 1164 bp, Setaria italica
  misc_feature (1149)..(1149): n is a, c, g, or t
  misc_feature (1163)..(1164): n is a, c, g, or t
  Peptide Sequence Number=SeqID_70671
ctaccaggtcgtcagcaagctcttcctcagctacggaatggccaacctcggcgcggcgatcaccgcggtccgcaaggtcgcgcagggcgccagggccagggcgttccagcggcaggggcagctcctcgccgccgcgcgcggcgacgccgccggcacccccaagttcgcgtggtacggcgcgtccgcggaggacgtggccaccgtggtgggccgtggcttcgcgaggaccaacgcgccgcggctcggagcgcgcaagcacggcgacggcctccacctctcgccgccgcagtgcccctactcgagtgcaatgctgaccaaggccgacgggaacggcgaggcacacatcgtgctgtgccgcgtgctgatgggccggccggaggttgtcccggcaaagtcctcgcagtcccgccccagcagcgacgactacgacagcgccgtcgacaagctggagaatccgcagtggtacgttgtctggagcaaggacatgaacacgagggtcctccccgagtacgtggtgagcttcaagtgccccaagctgcagccggtacaagaatcatcggaagcgacctcgaagccgaaaacgccttcgccggctcgggacatgttcccgaggcttcttgctgagatcgagctgctggtgccagacaagtgtggtcttttgcaggagtactacagcagcttcaagatggggcagatcaagaaagaccaattcatccggttccttcgcagttacatcggcgacaaagtgctgacgaccgtggccaagaaactccgaggatgctaagttgctagtgcgcggcgcaaggtctctctccttcctgattttgccgtggtgctggtggtgggtggtggtggacgcggtggatctataactccagcgaacgatgcagtacgtgctagctgtgtgtaccgagtagagggggtttacttttgtttctgtcgctttagtttccgttggtcaagggcgtagaggggggttcgcagcaatgttattcttccattaaccaacaggatagacgcagtttctgattttctgagatgtttcaatccttatttttttactagtgttgtgtaacatgtaatctgtatagactgaaaagattaatgcatgaaaccattgaattgtgggcccaaaaaaaaaaaaaaaanaaaaaaaaaaaaann

SEQ ID NO: 4698 - DNA, 670 bp, Setaria italica
  Peptide Sequence Number=SeqID_70672
ggtacgcaatatgctcatcgctgccgtagaagaacgctacaaagatgctgctcagtacagagaccagcttttcatgttgcgttcgaagaaaaagaacgcaatttagcaggccatggcttatgagtccaccgcatcatcaacatttcaccttgtctggcctcttcatgggggacgtacatattaggtggcttttggctgaaacacgtgaagcttaggcaaagatcaagaagcaccatgtaaatagttacagaacttatgtctatacatataaacggagcataattccggatactttagctcagttgcaatggctgtactcaaagtgccaatgggtgcagtgtcacaattgatctcagtgcacagtgctgtgccgcaggagcagttgctttgacgagactttcacgacttggagcctcaacccgtagcggctccaagtcgtgaaagtctcgtcaaagcaactgctcctgcggcacagcactgtgcactgagatcaattgtgacactgcacccattggcactttgagtacagccattgcaactgagctaaagtatccggaattatgctccgtttatatgtatagacataagttctgtaactatttacatggtgcttcttgatctttgcctaagcttcacgtgtttcagccaaaagccacctaatatgtacgtc

SEQ ID NO: 4699 - DNA, 426 bp, Setaria italica
  Peptide Sequence Number=SeqID_70673
agaacgctacaaagatgctgctcagtacagagaccagcttttcatgttgcgttcgaagaaaaagaacgcaatttagcaggccatggcttatgagtccaccgcatcatcaacatttcaccttgtctggcctcttcatgggggacgtacatattaggtggcttttggctccaagtcgtgaaagtctcgtcaaagcaactgctcctgcggcacagcactgtgcactgagatcaattgtgacactgcacccattggcactttgagtacagccattgcaactgagctaaagtatccggaattatgctccgtttatatgtatagacataagttctgtaactatttacatggtgcttcttgatctttgcctaagcttcacgtgtttcagccaaaagccacctaatatgtacgtcccccatgaagaggccagac

SEQ ID NO: 4700 - DNA, 555 bp, Setaria italica
  Peptide Sequence Number=SeqID_70674
atctgtcgactcggataatcagccatcatcctctcgaatcggtgctttttgctcgattccggtgtgtttgtgatgctctcgcgctgttcctgacgttttcgccgtgagaactgcagttcaaggatggagatcatcaacgggtcggtcctcccgcggtacgccgcccccgcggcgggcgccctgacctccgacgcgaggatcagcggccatctccagttgctccggcgcgtgcgcctgaggggaagggcgtgcgggctacaggcggactgcgacagcatgccacgcaggttcttggtcccccgtccccgcggcggcacgggagaagcgactggggagactggcctgttcgctgcagctacggctcgtcctccgacggcgacggcgccgcggccgcgaacttcgacgccagcggggaggagttcgtcgactccaccgtcatcgaggctggtaaccgcttatgcgtatcggatggtttggagataaaaatgcgtgatggcaaaacctgagattgttgttctagtaactaattccttcgtagttatttgttagttactt

SEQ ID NO: 4701 - DNA, 980 bp, Setaria italica
  Peptide Sequence Number=SeqID_70675
gcggggaggagttcgtcgactccaccgtcatcgaggctgttgagctcaggagtgtatcggatggttttgagacaaaaatgcgtgatggcaaaaacctgagatgtgttcagaacaatcctcgagtattgagactgcgggactctgcaccgcaccacgctattgtgctgaagatggaagatggaagcgacctcctgctcccgattattgtcatggaaacaccaagcattatgttgctggctgcacttcggaacattcgaattccaaggccaactatttacaatgtgttattggagatgacgaaaaggatgggatatgaggtacgtttggtgcggattacagagatggtccatgacgcatactattctcgactttatctttctaaggctggagatgaagaagacaccattagctttgacctcaagccatcagatgctattaacattgctttccgttgcaaggttcctatacaagttaataggcatattgcatacaacaatggattgaaagttgtacaaccaaaggtggctgagagttatgtgggctcggacgacatccaaatcacaaggcttgacaggcctgatgaccagccttgcggtgaggcccaagagtttgatttggtacgcaatatgctcatcgctgccgtagaagaacgctacaaagatgctgctcagtacagagaccagcttttcatgttgcgttcgaagaaaaagaacgcaatttagcaggccatggcttatgagtccaccgcatcatcaacatttcaccttgtctggcctcttcatgggggactacatattaggtggcttttggctgaaacacgtgaagcttaggcaaagatcaagaagacaatttacaaccttagtactaggacctacttacaataggggaacgtaacaataattaaggtaggacttttaggactagaaaacaacgtagaaagacttaaggacaaaagaatacaaagaaagacaacatataaa

SEQ ID NO: 4702 - DNA, 372 bp, Setaria italica
  Peptide Sequence Number=SeqID_70676
ctcatcgatatagcaaccagacggatcagcagcagggcgctcgctcacgtcactccggaggaggagtccagtctccactgctcgctctctggagtcgtcttcgtcgggggtgtccagtctagatcgccgccggcacgatgctcgctgcttcgtccggtcaaatggctgggctctgcttcccacgccgggcgccctctccgctcctcaaccgccgcggcctcctccatcggcgccccgccgcgacgccccggtgcgcggctgcatcctcctctccgacgccttcgtccgccgactccgcgcctgaacacccacttcgtagaaagtgctctcccctacttgagagtgttctattgcctggcagaagtgatttga

SEQ ID NO: 4703 - DNA, 475 bp, Setaria italica
  Peptide Sequence Number=SeqID_70677
ccgattgcgatccgaacggtgcgcctttaatgccgggcgcccgaggttcagtctccccggtgatccctacctggcagcggtgttgaggtcgtcattattaaaatcggctgtgcgagtgtgatcgacctaggcagttccacccatgtcaattattttggggggcgtcggggggcagatgagatggtacagccgttcctatcatcctgatcccggcctgaacacccacttcttagaaagtgctctcccctacttgagagtgttctattgcctggcagaagtgatttgactgtgcatgaatggaaggcagttccagatatctggaggacagcggcagaaaaatatcctgacctcgtagctgtaatagatccttaccatgaaccgccgacagaatggacatatacacagcttgaacaagaaatattggatttttctcaaggtctaagggccattggtgttgctccagatgtagtattgt

SEQ ID NO: 4704 - DNA, 227 bp, Setaria italica
  Peptide Sequence Number=SeqID_70678
ggagcagctgctcagatgctcaatggcagacagcagtaactcatagttgccgatggtacagccgaccttgtagatgatgaatttcttcaggttggtaagatcctgcaaggctctaagcagttccatagaaaagccagcacagatctcaaccccagataatgtctgtaaagccatcatctttgtgattccttcagttaatttcaatgcatgccgcttgttcttgttcg

SEQ ID NO: 4705 - DNA, 569 bp, Setaria italica
  Peptide Sequence Number=SeqID_70679
taagttcaccagcttctgcccgtcctccaggcggtcgagcacgatgtcctccagcgcgttctgtgcgtccaccagcttgtactttgcctcctcgagctttctgtcgtccgccagctccctcgcctgcctgatcgcctcggcgtggtcccgcctggccatctcggcctgcacctgcctcgccttgctgctcgcacctgggccttgggatggcgtcgaggtgcgccggatctggatgtcctgcgggacctggggatcctttggcctcccctgggcggtgaagctgtgctgggcttccgctagcgtcgcgtcgtactcgtcgatctcgacgtcgttgccgtcctcgtccttcttggtcacgtccttgaggttaagggtgatgaggaccttgcgcccttctccggcgaagagggtgccgaacttgatggtgatcgtgccggacgaggggccttccgggatcctcgtgtagtcggtgccgcgggccacctcgatggtctccacctcctcctcgtccgccttgggttgggtctcagggtgagctccacgtcctgcgccaccacggtgaggagccc

SEQ ID NO: 4706 - DNA, 477 bp, Setaria italica
  Peptide Sequence Number=SeqID_70680
ttttaacttttaaaaattttttttaaaggtttttaacgttttaaccttttaaaagttttttaacttttaaattttaagttacccttacctactattatttcttccttctgttatgttcttgaattttttttctgtgtatttacttctaagcatgcgaactggcttagatatatgatatgacgtgatgctaaattattctgctattcaagttttacctcagcatgcttgtaatttctttgctgtatttactagtagttgtgtgatttttgcatccatgatgcgtttgtgttttagcttcactagcattacgttctcaatatggcctgttagttcatttgatttttcacatccatgttatatttgtcttgaggttcatcagtcttttagcttcatggggttaaattgttcatgcagtgcactcaaagaagagaaaattgctgcccgtagtgctatactgccgatgctccaagctgaaga

SEQ ID NO: 4707 - DNA, 947 bp, Setaria italica
  Peptide Sequence Number=SeqID_70681
ctgaattcctccaccagcggtccagccaagtgcccccaattcacaacgcatcctcgtctcctctcccaccctccgctaaccctagcgactgccgcgctctcttgatctccgcggggagctccagatctgcaggcgggcggcccggcgtccggatcgggaagcgaagatgacggaggcttgggtgcggaacaagccggggatggccagcgtcaaggagatgccgctggtgcaggacggcccgccgccgggcgggttcgcgcccgtgcgctacgcgcgccggatccccacctcggggcccagcgccaccgccatcttcctcaccgccttcggcgccttcgcgtatggcatgtaccaggtcggccaggggaacaaggtccgccgtgcactcaaagaagagaaaattgctgcccgtagtgctatactgccgatgctccaagctgaagaggatgaaagatttgtcaaagagtggaagaagtatcttgaggaggaggctaggatcatgaaagatgtcccaggatggaaggttggcgagagcgtgtacaactctgggaaatggatgcctccggctactggtgaactccgccctgaggtttggtaagggcctgctcggcactggaaatggcatcatgtcatgaggacatgaataaggcttctaaacctggttactttcaaatttttaccaaggatcagctctttaaacacctctgtatttgttgtgctgtatgaaagttggctggttaataattggacatatcaagcagacttccctgtcttctaaattttgaactatgcttggacgtttatgtaaacatcatttccttgctgtgatgtgtcgtgacagtccccggtgtttcctctttctgtagtcatgcataaacatggaaaccattttattcgaagaaagtttgaaataaccaagatgttacctgcgtgcttacaaaaaaaaa

SEQ ID NO: 4708 - DNA, 315 bp, Setaria italica
  Peptide Sequence Number=SeqID_70682
cctcgagatcagccgccgctccccgtggtcgcctcgaccgggcctcgatggcggcgacctgccggacctgggaggccgcgctcaccagggaagcggcggccgccctgctgcggcagctccccgtgctgttcttccccaaggcggaggggccctcattctcgtgcctctcgtgcggcggggcgttgcacgacctcgccctcctcccgtacggcatcaccggggcccgcctcatcggctcgcgcccgagctcgtggtggttcgccgccacgggcttcctcaacggccatgtgcttagcaacacggccacttggtcct

SEQ ID NO: 4709 - DNA, 518 bp, Setaria italica
  Peptide Sequence Number=SeqID_70683
tgggacggggtaggacgctggaggggcggaggagggccaggcggtcggggcggataaggtcgggagggaggagcggatggataaggagagaggaggggaaaagaaaagaaggggagaaggaaagagaaagaaaaagaaaaggaaaatgaggagaaaaaaggaaaagagaatagaaaaatataagggtattttggacatttgacaccttctttccaatctaaaaagctaggagaagccgttttgccaaacattttccttcaaaataagccagagccagaaaaagctgcttttccagatgagctagagccaaagttatttttgcacgagccaaagccgtgccaaacgggccctaagatagattgttttctgtgtaatgcatgatttgtctggttattttgagagttgagacaattctaacaggacatggggtactccctgtaggttgttacgtgtgatgctaatactgtgtgaggttgcctttcaatgtatgatatgacggtttgacagacttgttaacg

SEQ ID NO: 4710 - DNA, 1219 bp, Setaria italica
  Peptide Sequence Number=SeqID_70684
actgctgctcaacctgcttcagggaaaagaaaaggtaggacacctttaaagacagatagcccgaagattggtgtcagggtgcttcgctctgcctcaggaaagaagaatgaggcatgtagtgagcctgtaaatgatagtacctctgctcaaacagcagtgagaaaagaaaaagttgccgaccctcgaaggatcgcagtcccaagaaggactatgtaaaaatttgtcaaagagttagatatatattgaatcgaatgaactatcaacaaagctttattcaggcttatgccagtgaaggttggaaaggtcaaagtttggaaaaaataagaccagagaaggagcttgaacgagccaaagcagaaatcctacaatgcaagctaagaatccgggaagcttttcggaatatggaccttgttttatccgaagggaagcttgaagaatctttgtttgattctgcaggagaaatttccagtgaagattattttttgtgccatatgtggttcaaaggatgtgactttacaaaatgacatcattctttgtgatggagcctgtgacagagggttccaccagaactgtttgaagcctcccttgctaactgaagatagtaatatccattactaatccatcctcctttggtatccttatattgccaaatcatcattgcatttgtttctcatttgtaatcgtttttgtttgtagtacctccgggtgatgaaggatggctgtgccctgcatgcgtgtgcaaagcagactctatagatgcacttaatgaactccaaggaagcaaactctctattcatgactcgtgggagaaagttttcccttaggcagcttcacttgcaaatggttctaaacaagttgttgcttccgatctgccacccgatcatatagaggacagtgattacaaccctgcattggctgaagaggacatgatgaatgaagacaggttttctgcagaggatgatcgcaaaggggatgaccttggtttgccttcggaggactcagaggacgatgactttgatccagcaggtccagattctagtgaagaccaaaaaatatgaattgaactcagaagaatcagatttcacatccgactctgatgatttttgtgctgagattgctaaatcttgcggccaggatgaagtctcagcatctccattattagatgtgttaaacagtactggtagaatgaaaattcaggctgttggtaaccagtcaaatg

SEQ ID NO: 4711 - DNA, 372 bp, Setaria italica
  Peptide Sequence Number=SeqID_70685
tttttttttgcacaaaaacttatctcatagcttaagctatctcaaaatctctttgatacaactgcgctactcgttctccgcagaatgggatacttttgtcaaaatggttgtttatacagtatacactgaaggttaacagtagagttgtacacagtgtggaaagaatttcctatacctatgtgcactgcaagaggggcgcaaactatgaacacaaccacgagcaaaattttacgcgttgaagagtttgcggaacggcccgtccttccgatctttggccgcctccgtcaatgcaaggaacctcttgaacccagtggtcgctgctccccgcccaagggccgcggcgggggcgagcacgtcctctcgcgtcgccaa

SEQ ID NO: 4712 - DNA, 1601 bp, Setaria italica
  Peptide Sequence Number=SeqID_70686
agcggaaggctccacgggtggtacagggaggcggcgctgggcgcggctgccgccgggggagatgggctggcccgtcgtcggcgccatgtgggccttcctccgcgccttcaagtccggcaagcccgacgccttcgtcgcctccttcatccgacggtttggccgcactggcgtgtaccgagctttcatgttcagcagcccgacgatcctggtgacgacgccggaggcgtgcaagcaggtgctcatggacgacgacggcttcgtcaccgggtggcccaaggccacggtggcgctcatcgggcccaagtcgttcgtggccatgccctacgacgagcaccgccgcctgcgcaagctcaccgccgcgcccatcaacggcttcgacgcgctcaccgcgtaccttcccttcatcgaccgcaccgtgacgtcgtccctgcgcgcgtggtccggcgagtgcgccgacggcggtgaggtcgagttcctgacggagctccgccggatgacgttcaagatcatcgtgcagatcttcctgggcggcgccgacgacgccaccatgcacgcgctggagcggagctacacggacctcaactacgggatgcgcgccatggccatcaacctgcccgggttcgcgtaccggcgggcgctgggggctcgccggaggctggtctccgtgctgcagggcgtgctggacgagaggcgggcggcgacggccaaggggttcacgcggtccagcagcgtggacatgatggaccggctgatcgaggtggaggacgagcacgggcggaggctggacgacgacgagatcatcgacatcctcatcatgtacctcaacgccggccacgagtcctccggccacatcaccatgtgggccaccgtgttcctgcaggagaatcccgacatctttgcaaaggccaaggcagagcaggaggcgatcatgaggagcattccaccgacgcagcaggggctgacgctgagggacttcaggaagatggggtacctctcacaggtgatcgacgagacgctgcggttcgtcaacatctcgttcgtgtccttccgtcaggcgaccaaagatgtctttgtgaacgggtacctgatccccaagggctggaaggttcagctgtggtaccggagcgtgcacatggaccctcaagtgtaccctgaccccaagaagttcaacccttcaagatgggagggccactcgccgagagccggcacattcctccccttcggcctcggcgcaaggctctgccccggcaacgatctcgccaagctggagatctccgtcttcctccaccatttcctcctcggttacaggctgacgaggacgaaccccagctgccgggtgaggtacctgccccaccccaggccggtggacaactgcttggccaagatcaccagagtttcggacgagtactgaattctgatgaagcatatctagctgctggggccgaaaaagggccaaactattgtcggcgatctgtgcaaaaaaataaacagcaagaaatgaagtgttacatgacatgttctgtgcttcagcaatgtgcctctctgcccctgtatgttgttgctcggctagctgtttcgctgctcttcttaatcaccatccc

SEQ ID NO: 4713 - DNA, 2836 bp, Setaria italica
  Peptide Sequence Number=SeqID_70687
ttttttaaaacttaactaagtaatcaagaatataaagacagcaggtggtatttatgcatatatctatagcgatatcatagttcatatcaaggtaagcgtcttccaaaatggtacagcggcaaagccgaaacacaaggcgatgccagcacactcaccaccatcaggtaacggccgagatcgagccccggtgttgcgaggtaggagtactatatacataaaaagaagaaaagaacaacgcatcccatatgtcaaacactatgcacaaaacacaccattctcctggcaaagatcatctcatgtaaggacggtcttattctcgaaccacctctaccggctccatacacctaagagcatatagtacctgctgcaacctgcaactgctgctgctgcacaccagagctcgacgaactacattacctcggtagctttttcttctactactttcaaaactggcaagacgtgcccagcctcggcatctgacgcgggccaccaccagtagtgtgcttccgggcacggaaggcgttggggagcagctcctggaacatgtcgaggaatgcactccactctctagggcccatgtccgacaccttcacaaaactggcgctgggcgggagcagctcattggcgctcctgctcccggactgatgctcactagctttgccgctgtagttagttttactcactttaccctttggaacacctgtatggtaggctttagatttcgcaacgaaaccaagccgcttcatggacgaggatagcttcaagacagaagaaatcttctggggtaatgcactggtcaaggcatcagcatcctccttggtagtgtaggtgttatcctcgtcctcgttctcatcttcctcatcacactcatctaacttggacagtggattcctggaacttgccttcatgctcccaaagttgctgaaagctggtagttcaaaggcatccgaatcatcctcaccgtcaagagggaactgggtgaagtcatcatcgtcatcttcaactccggcttcatcaggaagaaagaactctctttcctcaacccacttccttgcttccatgcagagaatctcaagctcacttggctcctcttcttttccagtgaactgcctgctcatcatctctccaatctcggacaggcagaggccaaatgctgcagcttccttgagaaatattgttgacagcaccagcactctaatgcatgcctcacgtatcatgggtagctccatgcggagcatttcagcatcttttacaggatcaagtcttgcaatgtaatcaagctcctcctcagagaaaggaacagatgcctgcggccagtggatccactcaaagtaaggatcttctaggcattctggcagacaaagaccatgatcaataggaatgagttccgtctgctctccaaaattgtcaaccccagggccaagcttcctcaccagaagatttccagcatgcctatcagtgttgaagattctaatgtcaagtatgccaatcctatgcactgcagatacagggaagcttgacgtcccatggtcgctagcatcaaaatcatgaggaatgaactgctgcagtgatgcaatcttgctcacagcctctgacttgttgcagaagattttgcttttgcagccaacacagtcattcacattgaacactgtgtgtgttatcttgaccagcatggtgggaggaacattggcaaagtgatcataatcaagcaggtaagcagcaacctctcggaaccctgtctcgccaaccctcacagatcttttgaggcctggctgtcccagtgccttccccacaaaaccttttgggttgttcggggcaaatggttcctcatcagttggcttgacaattgcaacacgctctccccagatgttcttgaagtagtaagcaccacccatcccactgttaacagctactgggtcgacaccattccttattgctttgatgacatccttagcaagctgcttcatccgagaggaagggcttgaacagccaaggatttcaatgggcccgctccggtctcgctgccaaacatcctttccagtaggggagaggcaaggtgtggaattgcttcggtgaatctgattccttttgagaagcaaaggtgagtcattgcgaatgctggtaagatcattattcagaaccagatcaccaaaggtcagcgagctctcatcagtgggcacattgagggctatctgcagcttctttttcacagcttgcacattttcacccctctccaactcaatgccaaggacagaaccattgtcagtttggacaaagactctcttccagctcagttgcctcccctcagttctgctacctccaggatattcactgctgaagctccgatccaggactgccacagccatctgtgtctgaacaggacagtccaagtccctggacatagaagagctgaaaggagtagcctttatctgctagctcctctcgtgcactccaccagagaagcaagcagatgggcagcaagggagaggacaaactcttgcaatttgaagccagtagccttggagaagagaaggcgtttttcaccacctctgcatcaactggaagctgggtatcactgaaccatcgattgatatatatccggcgggaccgatctgggcgctcgcgggcaaggaacggccagagcgccgcctccctcctcctgcgtcgccggagatccgacgtccggtcgcgtcgccggcgcagatccggcggccggacggtgcgccgtacgcgtcccacggtggcgcgatttgtgtgcttttttcctctctttgtgtgatttgtccttttccctccgggctcaactcgtcgtagacccaagagacgggttaatgag

SEQ ID NO: 4714 - DNA, 402 bp, Setaria italica
  Peptide Sequence Number=SeqID_70688
actggaaacaattcagcaagacagtggagggaagccttgattcgaagcagtggccacccaattcagggagtggggaactggaaaccacgccggatcaacgtggtaccccaggcggtaaaatagccggaaaagcagagagagattccggcatcagaacctcatctcgacccggggaatgatagggaatcgaaatcgacggtagggcaggcgccgcagcgcggaaggcctcgcttgcttgccgccgtgagctgcctctccggggggagaaactgctcctccccctttctcagttcctcccctttccgcctttcacggcttctttctttctcgtctccccaccgatctttttggtgacgtccgatccactgctttgctttccgttttatcggcgagtcgggggag

SEQ ID NO: 4715 - DNA, 803 bp, Setaria italica
  Peptide Sequence Number=SeqID_70689
tgcgccttcttcttctcccggtacttgcgcacggccacctgtcccagcggcttccgtggctttgggccgggtcatattccctggcgtcgtcgtcgtcggcgccgccggcgaggacctgggtgtgcgtgtggaggcacgtgtgggtgtgcatgggggccgacgggccgggagggttgcagctgtgcgtgtgggtgcaggtggttgtggcgctgttcaggagctcgtcgaagctatcgggcacctccgggtgggagaagagcaattggcaggggaggtcagctccatcgtccattgtgacagagaatgtgccacgaaccaatttcccccctcctgtggtcaatggacaagttgcacgggagagatgcccaaaagtaaaagagaaagatgaaggaatcaagaattcggttctgcgaggatgctgtttgaggctgtaagaactggattactgatcagagattgaggaagcaaactgatggatcaaagatgaaactaactcgcagggcagcagacctcaccactgaacacagtagaacccggcagtattagagaaagggcaacgacctcctgcaagaaacggcgagcccgcccaaattgaactggaaacaattcagcaagacagtggagggaagccttgattcgaagcagtggccacccaattcagggagtggggaactggaaaccacgccggatcaacgtggtaccccaggcggtaaaatagccggaaaagcagagagagattccggcatcagaacctcattcttcgtacccgggggtaattgttatttagggttaattttcgtttt

SEQ ID NO: 4716 - DNA, 867 bp, Setaria italica
  Peptide Sequence Number=SeqID_70690
tgttttgttttctaagtactaagtatttgattgggacccagaacgtatgtctcctagaaagggggatttgtcagcaggatcaatcgcaagtactgtgcccagtccatcaccgttgtttcgcagtgatgaagcagtctgatcagcaggtgaagttttctggtaatatgtacagagtcgggctcccattcctgcatttgaaagaagcaaaggtctctcttcacaatattccattaaaaatcatgtccatccttgacggacaagtcagtttttttcctgaaagccccaggagggcgtagaggcttgtcctcaccaggtaacttctgtgcttttggccatagagtcacttcagtgcgaacaacatgcagaatagagtttggtcgcacattttgcatggctaatgagatgtcatcctgaagctcttttccagaacagaacaatttgatcttctcagaaggcttcaattctaacttctttgaagcttttaatttgacagagaccggagtgtcctctgaatttaccaaaatcctgactccttttcctcccaatgtcataagaatagcagtcatcctcccatggctacaagcagctccttgtaattgcgcggcaattttattttcatgtggataccacttagcttttggtctatgaaagtttgcaatttccttattgctcaatactggtttcatggtttgcagcttatgagctggagcagaatgcaccacctttatgcccattagagcacgttttttagtatgagatttagcttgctgtggcgccttcctattagaataaaacttgtcattggagatgttgaacctgccactcaatgcctttacttgactgtcaaaattctccactgttgtttgt

SEQ ID NO: 4717 - DNA, 643 bp, Setaria italica
  Peptide Sequence Number=SeqID_70691
taaggagagggtgtcgcagtgcctcgaagcgatccaggccaccgtggccctgcggctgcccgctaaaaccgacggccccagcggcggcggcggcagatcctcttcctccgtctccgtgccccggagcccaaccggggtgctggacgccggctgcctgagctacaggagcgacgacacgactgttgcctcgcatgcaagctcctggtgcgatgagaacgacagctccccggtcgtttgcagcaagaggaggaagattagcagatgattagcccaatgatggacggataaaaggcctcttctgcgcgctgatcaatgatcgtctccatgataaaagtcaagcggttttgatagattgcactgactgagtgactgacgaagtggcgagtttggtttgttgggagcttttgatgccgttttcaaaggaggctgaaaggcaaagggagggcaaccaaaagcaggacattttggacatgaggatccagcaaagacgcccgggaggaataaagatggtccgggatggtagaaatgtactgaatttcgtgtgcttttgcaacagtaggcgcgcagccgctgtggcgttgcagaaaagagcaaaggttttgaagttgacaaagctgagacgggacgagacgaccaaactaaa

SEQ ID NO: 4718 - DNA, 414 bp, Setaria italica
  Peptide Sequence Number=SeqID_70692
gtcggcttgctcctccgctgccacaccaaccagtgatcccagccatggcctccggcggcggcggatttcgcctgggccagcgcgtgcacgcttccggtgacccccgccgcgtcggcacggtgcgctacctgggccccatcgagggtcactccggcgactgggtcggcgtagactgggacgacggcgccggcggccggcacgacggctcggtcgccggccgcagatacttcgtcgccgcgggggagcgctcggcatccttcgcgcgccccacagcgctcagccaagggatctcgctcccggaggcgctccgcctccgctaccgcgtcgaggacttcaccaaggaggaacaggatgaaatgtatgtcttctcaacaagccagaagcgtgtgtcagttgaattcgttggccagaact

SEQ ID NO: 4719 - DNA, 1498 bp, Setaria italica
  Peptide Sequence Number=SeqID_70693
aactaggaacaaaggctcaggaatcattaacagcttgcaaaacatgagcttctcactgatgccatgagtttcgacatacaaatctattcacggtcagctgaaaccgaacagctcaatagctcatgtgaacgaagaaacgacttgtagccaaaagcctgattaccctcaatatacacatcatattcacaagctacaatctagctaacaactcgatcaagctacgcctttgctaacgagaatgagccaatgattttgggtttgtgccaacggtctccttcgtccctcccaggcttctccggcgaggcttgcggctgctcttgctgccgctaacaggagcagacatctgtttggttgcagccttgggttcttgatgcttctctgcttcacaggagtcctgaagctcttctaggatagtgaccacagcatccatagatggcctcattttagcttcgtaggacaggcattcaagggcaagggtggcaattgtttgtgcaccactgagagagtattgaccttcgagcctggtatccaggacccggaatatcttgcgcttatgtgtcaggtaaggtcgagcccattcgacgagattgtgctccccttgtggccggtttttgtcgatggcgcggcggcctgacaacatctccagaagcactactccaaagctatagatgtcactctttgcagttaggtgacctgttgaaaggtattcaggagctgcataaccatatgttcccattactcttgtggaaacgtggctcttctcaccaacaggaccatcctttgccaatccaaaatcagaaagtttcgcagaatagtccgtgtcaaggagaatattggaagtcttaaaatctcggtaaatgacttttgcctctgcactgtgaaggtaagctagtcctttcgcagctccaagtgcaaccttcattctaaggttccatgaaagaggttgaaagtacgagcctctcctaaagagatgattttccaagctcccgcgaggcatgaactcgtacactagcagtcggtgttcatcctctaagcagtacccaattagcttgacaaggttgggatgacagaactgacctaggtaattaacttccgccaaccactctcggtgtccttgcaaaccctcctggttgagtcttttcacagcaacagcaattccagtgccaggcctgcagggtgctaatgtattttcatcgatccatcccttatagacagatccaaaccctccttcacctagcacactatcaggacggaagttccttgtggctgatttgagattactgaagctgaagaccttaacattggcagattgcaggatctcgcattcggtcttcgcatttggaggcatggaagctgaagaggctcgactactacagccactaagcctactcccatccttgccaccactctttgagaacatccctgaggcgccagggtgagggctcccatcctaggtctattggtaagtattgtaagtaggtcttcgtacttacttact

SEQ ID NO: 4720 - DNA, 367 bp, Setaria italica
  Peptide Sequence Number=SeqID_70694
cacagtatcacttgattgatgatgatgcggaacgctgaactggtgtttattatcttcctttctgatttaggagttttatttgcagggctcatgattctgtgaagagttgttggagctcatttctgggatgtcgagtgaagatacaagggagtacacacttactcaaagtaaagtccgtatacaagactacaaacaacttaacttctaggctatgttacttttgaatcggaatgctttggctagtgaaatggtccaaatatgcttgtccgtatactgtaacaccttctgatgcacttagtttgctgaaagtactgccttatatttcatctggttattaccatgtgtatcttgtatcagttatggtttg

SEQ ID NO: 4721 - DNA, 502 bp, Setaria italica
  Peptide Sequence Number=SeqID_70695
taactggtgctgtcatactggaaaacctgtgcaggtttttcaaaggggattgccattggcgtctgtcttgagggagtctattcactttgagaaggtatgggtttgtgttatggatgtagtaatgaataatgctatcctcttggttagaaacagtagcaccatctgacccaccgaatgcctaccttttggtaggtgttcagcccagaatcctcaaacttgcctgtgattctgcatctacactgtgttgtgcattgaggttattctatttccatccttttatgggaccaatttaggacttggaattatggcagtgtttgccaaattcgcatggacggtttgctagcattttagttttgcaggtctggtattttttgaagtctgaacaattccgtgatgttcccttttcgttctgctctgtcttgtttttggctttgtgctcactttcttagggttatttaaaagttaattgttttggggtgctacatcggaggtgggcggcatc

SEQ ID NO: 4722 - DNA, 654 bp, Setaria italica
  Peptide Sequence Number=SeqID_70696
ctggctgatcacagtatcacttgattgatgatgatgcggaacgctgaactggtgtttattatcttcctttctgatttaggagttttatttgcagggctcatgattctgtgaagagttgttggagctcatttctgggatgtcgagtgaagatacaagggagtacacacttactcaaaggttctgcctcagaagccagtgtaagtgactgatgtgaggcaatcgaccctattcgagttgtgccttgctagctccagagataagcagcgtacctttgaacaattgtgttgctttccttacatctttctattattcttcattttagttttgctgtttagacattatacactgagattgcaccttacccttctgtaactggtgctgtcatactggaaaacctgtgcaggtttttcaaaggggattgccattggcgtctgtcttgaggggagtctattcactttgagaaggtgttcagcccagaatcctcaaacttgcctgtgattctgcatctacactgtgttgtgcattgagggataaaagattgttttggggtgctacatcggaggtgggcggcatcgtagctgcgcgtgagccgtgtgttgtctgaggaataaagattgtgttctgcatcgtagctgcacgtgagccttgtgtgct

SEQ ID NO: 4723 - DNA, 3275 bp, Setaria italica
  Peptide Sequence Number=SeqID_70697
agtgcattccccagcctccttggggccatgcctagctcctccactggttcctctggtggagttgtccttcccgggttggtgcctcgctgggggagatatgccgggactacgtgaatgggaggtgcacaaaatcagacactgactgtaaattcacccacccgccgcagcagctgctgatgacgttgcttgcggctacatcgtctgtcagtgcctttggcaacacacccatggcaccatctgcggcagccatggcagccgcacaagccatcatggctgcccaggcactgcaggcacatgctgcgcaggctaaagcctcaggagatgcttcaggctcaatggataaagctgctgaagctgatgccctaaagaaaattgttcaaattagcaacctgagtccaattcttagtgtggattatattaagcagctatttggggtatgtggtaaagttgtcgattgtaccatgacggattcgaaacattttgcttatgtcgagtactctaaacctgaagaagcaactgcagcattgcaactcaataacacgaatgttggtggtcgtccattgaatgtggagatggctaaatctcttcctcctaaagctaataataacttgcctatgatgatgcaacaagctgttcagttgcaacagatgcaattccagcaggctctattaatgcaacagtcaatagcaacccaacaggctgctgcacgtgcggccactatgaaatctgccactgaagcagctgcagcaagggctgctgagataagcaggaagttgaaggctgagggatttggtggggataatgtggcagaaaaggatgccaaagggaagtcaagatcaccatcacccactactcgtagatcaaaatctcggtcaagatcacctatcaagtaccgtaggagcaggcgatcccgctcctactcccccccaattagacggtcaagggaacgtcgatcacgttcaccatcaagatctcgccactctaagtatggtagtgatcgatcacatagggacgatagggacaggcataccaggtctggaaggagagagagcgaccgatcccgtgatcatcattcgtctagttcaaggagaaacaggagcagaagtaaaagtccaaggcataagaaaccctccagagatgattctcggtcacccaagcaacaaagagaagaaagtataagtccatcaaaatcaaggtcaactcgggctggttcaagatcaccacgacaccataaaggaagcaaatcatcaccaactcgtgaccgccattctcgccgcagtaggcattcaagatccagatctcctgagagaaaacatcgtcacagtgataaaaaggacagcagaaggtccgagattcaggatgacaaaagaagatctcatagaggtaacagaggtgacaaacatgaaaggtctgtaaaggatgaagtggaacgatcccatagaggtaacagaggtgacaaagatgaaaggtctgtaaaagatgaagtagaaaaatcccatagaggtaacagaggtgacaaagatggaagttctgtaaaggatgaagtggaaagatcccatagaggtaacagaggtgacaaagatgaaaggtctgtaaagggtgaagcagaaagatctcgtagagttgacaaggatgaacgttctgtacaggatccagttgaagatagaaaggtggatacttcaattgttgcacataagaggagctcaacagaatctgatctgaacaatagtagtaaccataagaaatctagacatgatggtggtttggaagaggatgaaaaaaatgatgtgtgtgctgctgtagctgatattaatgggaaacatgaagctggagtagatggctctttaggggccactgaagaatctgctatatgatagcaaccagtgtttacatggtggctgctgtttcatccagctggctgatcacagtatcacttgattgatgatgatgcggaacgctgaactggtgtttattatcttcctttctgatttaggagttttatttgcagggtatgaagatcttcggacaactttcggagtgttcatctgatatattaaaatgtattcttcattaactcgagatttgttccttggagtgaactttctaaatgtaaaactggagcttgtaaggtgatttcatacagtgaggtcgaaaccaaccacatatttgtcgtttcaggctcatgattctgtgaagagttgttggagctcatttctgggatgtcgagtgaagatacaagggagtacacacttactcaaagtaaagtccgtatacaagactacaaacaacttaacttctaggctatgttacttttgaatcggaatgctttggctagtgaaatggtccaaatatgcttgtccgtatactgtaacaccttctgatgcacttagtttgctgaaagtactgccttatattttcatctggttattaccatgtgtatcttgtatcagttatggtttgaaaggttggttaagctacatttggaaaacacagggaattgtgatataggttttatccatcatcctgtctactgcttaagttatcctgtctgcatagaattgcctttctccaatatgccttggcattcattgcttttcgttgtctgtttctttcctctttttccttttgagtgacagggttctgcctcagaagccagtgtaagtgactgatgtgaggcaatcgaccctattcgagttgtgccttgctagctccagagataagcagcgtacctttgaacaattgtgttgctttccttacatctttctattattcttcattttagttttgctgtttagacattatacactgagattgcaccttacccttctgtaactggtgctgtcatactggaaaacctgtgcaggtttttcaaaggggattgccattggcgtctgtcttgaggggagtctattcactttgagaagggataaaagattgttttggggtgctacatcggaggtgggcggcatcgtagctgcgcgtgagccgtgtgttgtctgaggaataaagattgtgttctgcatcgtagctgcacgtgagccttgtgtgctcgctgcatcgagctaagctaagctgtctgccttttaaaccaattttgttttgttcattgcaaagcttacttctatcttgtctcaaaaatcaaaatgcttctgcataacatcatctatggatgagaggcacctcctttgctccttcagttccaaggaaaagagaccaatcatttaccttcatgttaaatgattacattgacactacaatttgtccccctaaaaaaa

SEQ ID NO: 4724 - DNA, 380 bp, Setaria italica
  Peptide Sequence Number=SeqID_70698
cggagtgatggtgcaccccaggttccggaggtaggatatctgcttggctgtgggttccgacgaacccatggaattctctatcctctgcttttggaaatgttcctgtctttctctcgttaattggctacgcttctcaataggaatctgttcccacttgataacatattgtgcgtaaccaaatgcttcatcaccacttaggaatgacttcagctttcgcaagacatccttgcgcttgtaccctttaccccgtaggcgttcatcaatcacaaaactgatcttctcaagaaatcattagcaaggcatgactgagccagttctggacaaggcgaagtttcgttctgttccataataggctttccaattgatgtatccccttccgg

SEQ ID NO: 4725 - DNA, 293 bp, Setaria italica
  misc_feature (291)..(291): n is a, c, g, or t
  Peptide Sequence Number=SeqID_70699
tactttaccagtcatattcttggtgggtacaagacaactgaagataaagccaactattgaatccccactgttggataggtagccacttcagtcatattcttggtcttacagaagccttggaagggccggcctttgcccaactcacaggttgttcctacagttgtcaatggaggaatcctggcattatactttgtattatggggtaaaggacttcttgcttgtggcccattaagtcgctctgctggcggagtatgcaggtgctgttcttggagtcctctctgctgcattatntt

SEQ ID NO: 4726 - DNA, 356 bp, Setaria italica
  Peptide Sequence Number=SeqID_70700
caaaaaagaaaaggcacacctcggtcacagctaaaatctgcatctccaagagagaaacataatttcgcaacacaaactattggaatgaaagaaatggtggtgccaattactgctggcattttatctgctttaaggagagtattagctcggcgtgtttctctcaagaatcaacttaagaggagacttcatgctataactattgcttctgcaacttgttttctttttccatttgcgatgtgggatacaatcctagtgagtacataccgtttacgcttgatttttgtggttgagaagatttgcatctcattactttgattcatattgattgttattttcttgattgcagggctcagcat

SEQ ID NO: 4727 - DNA, 389 bp, Setaria italica
  Peptide Sequence Number=SeqID_70701
tttttttttactaggtaaaacgagtcagcatgttaatcatttcatggatggactaaatgttaaagtgtctccaaaaaagaaaggcacacctcggtcacagctaaaatctgcatctccaagagagaaacataatttcgcactacaaacactcacccagggagacagggtactgtgacaattgcaatacctgcaagaggaatatggatacgcatctacaaaggggttacaggatgcagttgggcaacatgaatggaacgtcacggggacagggacattagcaggtcaaagccatccatgctttctctggttcaaacctccggacaaagattgaaccatgaatctgaggtgtgcaaccgcagtctttcaccatgttgtaacaaggtcatata

SEQ ID NO: 4728 - DNA, 429 bp, Setaria italica
  misc_feature (11)..(11): n is a, c, g, or t
  Peptide Sequence Number=SeqID_70702
ttttttttttnttttttttttttttttggttttttactaaatagttaaagtagtctccaaaaaagaaaaggacacacctcggtcacagctaaaatctgcatctccaagagagaaacataatttcgcactacaaacactcacccagggagacagggtactgtgacaattgcaatacctgcaagaggaatatggatacgcatctacaagggggttacaggatgcagttgggcaacatgaatggaacgtcacgaggacagggacattagcaggtcaaagccatccatgctttctctggttcaaacctccggacaaagaattgaaaccatgaatctgaggtgtgcaaccgcagtctttcaccatgttgtaacaaggtcatatatccttcaacttggaagcgctgaaattggcaactgattgtggaacacccca

SEQ ID NO: 4729 - DNA, 1422 bp, Setaria italica
  Peptide Sequence Number=SeqID_70703
ctcgagaccatcagcagaccgacctgaaccggcgagtcggaccaagcaccagcacctagggaagcgactccggcgggatgatgtcgccgaagccctccgcctccgcctcggcggacggcggcgggggcgcgtccagctctcgctcgaccccgacggcgaggtcaacgccattgcaagtaattcatatcttgggaaacttcatgagaatttggtctgtttactccttatatagctacctatccaacagtggggattcaatagttggctttatcttcagttgtcttgtacccacttcagtcatattcttggtcttacagaagccttggaagggccggcctttgcccaactcacaggttgttcctacagttgtcaatggaggaatcctggcattatactttgtattatggggtaaaggacttcttgcttgtggcccattagtcgctctgctggcggagtatgcaggtgctgttcttggagtcctctctgctgcattatatggaaggaaagttaatatctggaaaaagattggtgggcttgctgctatgttggtagcatactatctcttatcaaatgggtggtctacaagaacacattcaccactatatagctttggaagtgaaccactggagaaggcaacacaaactattggaatgaaagaaatggtggtgccaattactgctggcattttatctgctttaaggagagtattagctcggcgtgtttctctcaagaatcaacttaagaggagacttcatgctataactattgcttctgcaacttgttttctttttccatttgcgatgtgggatacaatcctaggctcagcatctgacagcatagttaaactacaactaccaagttgggcatacttgagtactgttgtgtttgggatggtgctcatattctatgttgacaatgttgctgaggaaaagttgcatctggtcttctcatctccaaggcacttaatggtttcaacaggctgcattattgttttggagatattgtacaaaatggatttctcccttttcgggtttctggtctgctctgtcattttgggatttggtatttttgaagcaacctcattggagcgctcaaagaaaagtcctttagaggcacatgaactatcgaatggggtgttccacaatcagttgccaatttcagcgcttccaagttgaaggatatatgaccttgttacaacatggtgaaagactgcggttgcacacctcagattcatggtttcaattctttgtccggaggtttgaaccagagaaagcatggatggctttgacctgctaatgtccctgtcctcgtgacgttccattcatgttgcccaactgcatcctgtaacccccttgtagatgcgtatccatattcctcttgcaggtattgcaattgtcacagtaccctgtcactagtgcgact

SEQ ID NO: 4730 - DNA, 425 bp, Setaria italica
  Peptide Sequence Number=SeqID_70704
tcaaaagggggagggggcaaggagggtatgaatttacgggaacaacagacatgtacatactgatcaacagcatcggtgaagcatgccccaagtctccctaaaagagctaccgcacattcatccgaagataagaggaagcaacaggggagctcgccgatcctcctatgtccattttcttatcttctttcttcctcacaggcgtggagcattcattgaaatcgagcacccgtccttctgccatgagtttggatagagatttgcttgttgcaagttcattcttccaagctacattttctatattttctttgtcagagttttccttgctatgtcgtttccatgggctaccacttgccagaacctcatgcgcttcctctagagcagcagcactctgctcattaatctgcttcaccaatcctaaggcatcg

SEQ ID NO: 4731 - DNA, 1681 bp, Setaria italica
  Peptide Sequence Number=SeqID_70705
aaccgaagatctctgatgggcatcaaacagaacaagcacaggtcaaccaaccacaatggctatcctaacacagtttaccacctcttcatttcctccattatcatatatgttaaaagggccaagagctgccacaaggaaggcaacaatctaatactatgccaacctgggcagccagcgtcaagaagcaaatacccaaaccctacccatctcggttctcaccggaaacacactgcgctgatacctctagtttgtacagcaaggtgctcgccaacgattacaagggctgggacctgaataaaagcaggcaggtctcttcagatgcagccacatcatcaaggggcaccgatgctgtaggacagggtgcttcagggaaaccgcaggggagatcatggcaccatagggtctccggacgaactagagcgcctgtgggtgtccgttccatcctgttccattgatgagtccatgtctgctgaatcagatggggagccacgtggagtgccttgtaaatgaggagcttctccgcagatctgcggattgatgcaaacctttcacagcttcaaaattcttgtatgtataacccacaaagctaagatccttagaattaagcatcatcttccttgaagccccagaacctggtcttgctggagcagggtcagattcctcaaacttcatgaagttctgtgtatccagctcatcatttacttgaggcttgaaagctgcctccatctcatacaagttgtcccattctattccttgaaaccaaggatgagcctttatttgatctgcccctccactgccaatcctgtgatcaacatcacataataaccgacagatgagatcctttgcttcaagtgacaaacttggactgtctggaaatttcaaatagcttctccaatgcacaatctttcggcacgtagttattggatcatctgaataaaatggtggatagccaacaagcatttcatacatgattgcaccaagggaccaccagtcacattcaactccatatcccttctttagtagaacctccggagcaatataatcaggtgtcccaactgttgagaatgccagttttctcctgttcttctgccagtgctgaagctgttcatttggacttctccacctcctaccatttgctgtatcggagaaagaatgatcaatgtccatggactccctaaggttttcatcagccattggttcatcttcattcaaggttgacaactttgaacaatcaattggcttgcacagtccaaaatctgacaatttcatatgaccattcttgtcgaggagtaggttgtcaggttttatatccctgtgaatgtagttatgtttatgaatggattcgattgcaagaacagtctcagcaatgtagaaacgagccacatcttcattcagagtatcctcccgtatgaggaggttcatcatgtcacctccaggaaggtactccatgataagatagaggtactcagcatcttggaaagaataatatagtttcacaatacagtggctaccaacttcagccagcaagtttctttcagctctaacatgttccacctgacccctgacaagcatttcagacttctttacttttttcattgcataaatgttaccagaggatttttcccgacatagtcgaacctccccaaaggcacctcttccaatgatagtgagcatctcaaag

SEQ ID NO: 4732 - DNA, 304 bp, Setaria italica
  Peptide Sequence Number=SeqID_70706
gcggcggcgtggtgaggtcgcgtcagcgggcggaaacgacagtggcggcgcggcggccccgtgctcgctacggccgagcagagccgcctgactcgagtcgccgccgcgcttgggcgctgggctcgctgtcgccgcccccttggacgtagtgagatctacggccctaagctccgcatctcgatccgtccacacaagctcgggtggtcggtgaaccctaggtccgtccgacggcggttgcgcgtgcggcgtccggtgcttgcccggtggcggttccacccacggactccttcgtaggcgggcgggt

SEQ ID NO: 4733 - DNA, 425 bp, Setaria italica
  Peptide Sequence Number=SeqID_70707
atcacgtcaaattgtttgagacaaactgggatccttatgatgactcagagtgtgatgttgtgcacgacagttttaggagcggtgtgaatgtcgccaaggttataagagcagtaatggagccactggttgctagccattttggagaaaccatactcgacacattattcaaagagtatgcgcaccgtgttgccaaacatcttgagaaggagaaaacgaagcttgcggttattgtcctgtccatgaagaaattaaatcaatctagatatccaagcatcgtgccttaaattttgttgtttcactccaactagttgctaccacgcgctataccagttatctagaaaactcaataatatgcatgtttgtgtgtaatgtgctgcttgttgtggtgctgtttattatcttcatcattgtttgtcgagctacaa

SEQ ID NO: 4734 - DNA, 610 bp, Setaria italica
  Peptide Sequence Number=SeqID_70708
cctctgttctctcggttagcatcattgatcactatgggggcagcattggcatggttcaagaaaagatgagccgaggtgctggtggcagcaacatgagcaaacaggcaaggaacttcactcaggagacatcgactagagactatgagatggagatgcatagtgtgctggaaaccgttgccgccgagcttcactccctttcttggttgactgttagcccggtctacacagaaaggcgtacggctctgcccttccactgtgacatggtcctgaggttgaggcggcttctacactacgccgatcggcatctaactcaaccagcagagaagggagagacggcttagaggggcgactaattggcatgtagatgttacacaggaaaattagggttagttggtgctcaaatccaagtgtctgtgtatgtatctaggtaggtcagggcacattgacgagctccctagcccgattttgcgttgatagtggttgatagctctaattttgggttgaggatgtaattaagcgtgcaaacaggatgatacctctcccttgattcaatgtaatattgttgtaacatttttttgttcgacagattgtttccttggtgttaaaaaaa

SEQ ID NO: 4735 - DNA, 247 bp, Setaria italica
  Peptide Sequence Number=SeqID_70709
tctttgcaatgacatatgttcccatgtcagttcttcgcaacattggggacccaggatcagagtatacgtcttctgatgatcggtcaaataaaatgcgtgggctgacatcttttttatcaggagaaagcacccatgttcttgttttccgagttttataccaagattcatacactaaagcaagagattcatcacaccaggaggtgcctctgcaacaacagaatgaaaatccaagaggcaacaaaataga

SEQ ID NO: 4736 - DNA, 595 bp, Setaria italica
  Peptide Sequence Number=SeqID_70710
tgcaacaacagaatgaatctcttgctttagtgtatgaatcttgttttccgagttttataccaagattcatacactaaagcaagagattcatcacaccaggaggtgcctctgcaacaacagaatgaaaatccaagaggcaacaaaatagaagagttagttactaagaaaaaggtagccaagggataatgtaacaaacatgtcatcttgtttacaggcatcaagcacagtaacatttgaattattgtacctctcactttttttagattgaaagctatttattcatttaaagtttcatgttaggaatattgtagcaagggcagtgaagaaaagcttaatgatccaactaatgtaggttaatggatagtttgaagggcgcacgcatatcgaaggtccagtttatgcagaatctctggctgttcaccatttatgggctcagcattttccatgtaaactatatcacgaggtgaaacttctacttttgcatctccaccatcttgtgtctccaccctgatcaaaataagggtaaagtaaaatgaactataacaaaggagaaactcatgtaaacatgcgtaataaacaaacctaaaactaaaaa

SEQ ID NO: 4737 - DNA, 337 bp, Setaria italica
  Peptide Sequence Number=SeqID_70711
ttttttttttttgtttttttgggtatcaaaaaaccagactgcattcctgtacagagtcattaattgttaagaattacagttccatggcctctaccaatagagtaaatatggatccgaatataccagggcgcaatagccaccaatgattatgcctttcctacattttgtaatttgtaggtactacatgttagtagcacgatcatcttatgcagaaatcaatcaaatataatgccaatcaagccatgccttgtcgaaggcaatgtgcaacagctctggcactttatttctgtttgggcctgctgtcctgagatggtttcacgccaactgaagaaagttg

SEQ ID NO: 4738 - DNA, 522 bp, Setaria italica
  Peptide Sequence Number=SeqID_70712
aggagaaagcaccatgttcttgttttccgagtttttataccaagattcatacactaaagcaagagattcatcacaccaggaggtgcctgcatatcgaaggtccagtttatgcagaatctctggctgttcaccatttatgggctcagcattttccatgtaaactatatcacgaggtgaaacttctacttttgcatctccaccatcttgtgtctccacccaatacagagttgaaggtttatctgccctccaattgattgaacgttttcccttgcgaacactgctcattgtaattggaatgtcctcagccaggggcaaatcacaaagctccctaataaacttaccatctacagtccacaattcaactttctttggaaatctcccacaagctacaatgtaggaatatggacggtagatggaagaaaccattaggtatttatcatctggtgatggatcaatggatgtatatacagctggagggccaattggcttcaccgttccatccaaagaggctaacacaagttg

SEQ ID NO: 4739 - DNA, 735 bp, Setaria italica
  Peptide Sequence Number=SeqID_70713
ggacattgttgatgcaccaccacttcctgtcttgtcattttcgccaaacaaagataagattctgttcctgaagcgtcgagcgctgccaccactatcggatcttgcaaagcctgaggagaagcttgctggtctaaggattgatggcaattctaatactaggagtagaatgtctttctacactggaataggtatccataagctgttggatgatgggactttgggcccagagaaagaggtatatggatacccagtaggtgcaaggataaattttgtcacatggtcacaagacggccgccatatatccttcactgttcgagttgatgaggaggacaacaaaagcggcaagctgagggtgtggattgctgacgtggaatctggagaagcaaggccacttttttaaatcgcctgagatatacctaaatgctatttttgacagcttcgtatgggttaataatagtacactgctagtctgcactattcctgtgacacgtggagctccaccacagaagccatcagttccatctggtccgaaaatccagtctaatgagacaaagaacgtagtccaagtgagaaccttccaagatctgttgaaagatgaacatgatgctgatctatttgattactatgcaacctcacaacttgtgttagcctctttggatggaacggtgaagccaattggccctccagctgtatatacatccattgatccatcaccagatgataaatacctaatgg

SEQ ID NO: 4740 - DNA, 2059 bp, Setaria italica
  Peptide Sequence Number=SeqID_70714
agaggccatggaactgtaattcttaacaattaatgactctgtacaggaatgcagttccatggcctctaccaatagagtaaatatggatccgaatataccagggcgcaatagccaccaatgattatgcctttcctacattttgtaatttgtaggtactacatgttagtagcacgatcatcttatgcagaaatcaatcaaatataatgccaatcaagccatgccttgtcgaaggcaatgtgcaacagctctggcactttattttctgtttgggcctgctgtcctgagatggtttcacgccaactgaagaaagttgatcacagaagcgatcgtggtagatatgaggatccctcagggttcagatcttctcgagctgcactgccgccactggctgacagtgttttgttttcactgtcagtaactgaatttgagtcagccttgctagcaccgtttacacagtagttctgcagccacctatcagtctcccagaggacgtgcataatactctcccttgcagagtacccgtggctctcaaaaggaagtatcaccaaacgagacagcgcaccatgccctttcaaggcattgaagaatcggtctgactgcatcgtcaatgtcccagaattgttgtcctgctctccatggatgagtaggattggtttcttgattttgtttgctgacataaaagggctcatctcaacataggtgcttgttgcctcccagagtgtcctatcctcattctgaaaaccaaatggagttagagtcctgttgtaagctccagaacgagcaatcccgcagcagaaaagatgagaagcatgagctaagagattagctgtcatgaatgcaccatatgaatgaccaccaacagcaattttatcaggatgagccacccctcttttaacaacttcctcaactgcggcctctgcacttgcaactagttgttccacatacctgtcattggcctcttcgtcaccttcaccaataattgggattgtcggacctgacaaaatagcaaaccctctagccaaccagagaagaggggatgtagcaccaatccctggaaattcattaggggagccacggacttgcccagcagcatctttgcttttaaattcaccagggtaggaccaaactagacatggcaaaggtccatcttttgatggatcataacctgggggcagatataagtttgctgtaagttggactccgtccttccgctggtatcttatcatttccttatacaatgaagcaagctgaggatatggatgcgggaaattcgtgatctttacttgcttcttttctggccaagtctgcaagtaatattgtgtgttctctgttttcgattcttttgatgtaagtacctttaactggtcaagggacagttccccatcagttttgtctgacatcagtgcaacaacagtttcataatatttttccttgtcactctcccatatccgctctttacttcctgtatttatatcaaacaaatcgaggaatggaacatttccttctggagtagcgcccatcccattcaacaagacataagtacttccatcttgcttcttgatctttgcaatgacatatgttcccatgtcagttcttcgcaacattggggacccaggatcagagtatacgtcttctgatgatcggtcaaataaaatgcgtgggctgacatcttttttatcaggagaaagcacccatgttcttgttttccgagttttataccaagattcatacactaaagcaagagattcatcacaccaggaggtgcctgcatatcgaaggtccagtttatgcagaatctctggctgttcaccatttatgggctcagcattttccatgtaaactatatcacgaggtgaaacttctacttttgcatctccaccatcttgtgtctccaccctgatcaaaataagttgaaaggtttaatactagaccctaccgaagaaaacgaaaaagtaaaatgaactataacaaaggagaaactcatgtaaacatgcgtataacaaccttctttagaacaaaatttagaagttacgttagtaccttaaacttacttactaaa

SEQ ID NO: 4741 - DNA, 716 bp, Setaria italica
  misc_feature (1)..(65): n is a, c, g, or t
  Peptide Sequence Number=SeqID_70715
nnnnnnnnnnnnnnnnnnnnnnnnnnnnnnnnnnnnnnnnnnnnnnnnnnnnnnnnnnnnnnnnngttccattcccaagggagtgtacgtgtaaccacaccacatcggaattactcaaaactaaagctttcaaattcatttatccccaagcaaaaagcatactcaccaatgtcacacaacatatgacttgatagaaatcctactcatattgtttccagcattattcgtaaggggaaaaaatgaacagcaaaactgatgatacattgtacaattcgcatttgacatcaatcaatagcactaagcaatatccaaaacgtatggactcataaaaaagccctgctctctgcttattgtttcgagctttattcacaagacaaaatgatcagcaaaactggtgacttctttattccttcacgcacaaagctgacaggctatggataagttgccattcactcatcttattgcgtgtttccctgtaactgagcctgcttcaccgcatctatggcactcacatgttcagttggtcttgaccccagcaaagtcgtgggcatgttccgggcccttgagtgcttcagcattgagcctgaggcatatccggagcgggcatgccgtgagctctgtggtttgtgagaagatgaggcacccaccagcttggaagatttgcgatccgatctgccaccgcggtcagaacggtgcgaggaagagatttttgcggg

SEQ ID NO: 4742 - DNA, 2412 bp, Setaria italica
  Peptide Sequence Number=SeqID_70716
aagactaagactagacccgaaggacccttacgaatagtaagaaaatacttagttaataggacgacaaagtaccaccggagcggcgttgcagtgagctctgtggtttgtgagaagatgaggcacccaccagcttggaagatttgcgatccgatctgccaccgcggtcagaacggtgcgaggaagagattttgcgggtatgacggtctgagacctcttttgaaccagttgctctaatagggtgcttgttgtacacagcaaggtttggtaggagacccagcagatacttctttaggtgctcatcaccaacgttcttctgtgcagggttgccgtcaaggttaatggcttctaaagaaatgtaatttgcagctagctgcccgaggcccttcgatgtagaaatcttgttatggcgcaagtccagaaccttaagcttcagaaggcggtgaagaccatctacctcactgatcttgttaccagccagatacagctccttcaacgatgaacaggaggccaatccatggccaattctagatatcctattgtagctgatgtccagcaagcgcagtcgtgttaattctctgaggccttcaattgttgagatgttattcttcgacaggcttaacatgtgaaggccttttggaagagctcctgcagttacgcgcacaattgagttccctgataagttcaataggcgtaagcctgagaatgcactcagtcttgggatcacaaccaagccaaggtttgccaactgtgctgatgatgaagcaggagttaattttgaaatataagtgtaagctatctccatgccaagtggacttttagcatcaggccgcacaggaacaccaactgttggctcactaggtatagctggagcagaaattgaactttctcctagctcatccaaagtgacatcatcgatattaatttggttgatccaatcttcaattcttttaatgttgtaggttcttggagtaagttcatttgggtcctcgtcaatatcagttttattatgctcagcttctccactaatgtcctttgtatcagatatgttcaccgagtcaggcacttcaacgacaagcgactggtggtgtgcgctgtctctgttccacagcttctcttctcgctcttgatccatagcttcactgaggccatcatcatgcccagaatggtgaaaaacatcccctgaatcagcacagaaagggacaactggatccaccgagtgttcaccacaaatgtatttgccatcccagtattcatgacccactagaatcccatccctgataaaattttcttctgtgcttccggcggaccgttgaccctcttcagcagcatcagagcaaccaactgagccattaccctcgatgtttaatttctggtatacatctggagaagaaggtgcgcaatacacatccaaattcgatttgcatcggtgcatttcaccaccactcaggtagtcaaccttctcatcaatcagtgaacataaaccctcataagatctgcaacgagaccctagtatctcagaatcaacagaaccttctcgatcactggtggattcattctgaaatatggcagattgagatcttgggaatttgctttgggcataagatatgcgatgatggctatcagagtcaacagcatgatcacctgaaggctcacaaaagtcatggctaatcaggtcagacgaggcatcaaaagcattctcatttttcgggctgcacaccttagtaggttctccaacaactgtaatagagtggtggcatttgtgttcatggtctgtaaaatcatactcagtaccttcgcaacaattatgatcatgatccttttgaagcatgtttccaagagactggctcttcttcaggtgcccaacctccttgccctcctcatcagagcatgcatatctattcaaatcttctgacctgcagcattcttgatgagatgatgggctggtaccataatgcccgctcacagctgaatgattattttcatctgccatctggtttggattagctgacccagtcatgcagttcactttttgttcctgagcattattcgaagcagcacgcatggcttcatctgctggggaaaaaccctccttggatctgtgttgtgcagtagaggatgaaaagcaaaagaacctaaccataagaaaccaactgcgatctcaactgagcttacaccagattgctttgatcaccaagacacaaaaaacagtatgaaaccaatcacattgctgaatcacaggaccttttctagagaactcagcccagcaaatttgttacatctcagccgccgtcggaacttagccgtaatcaacaaaaagaccttccaaggctcggcgcagtctccagatgtaagttgggcttactcccaaaggcagagataagctgtttaaggaattgttgcaggcccacaccc

SEQ ID NO: 4743 - DNA, 1488 bp, Setaria italica
  Peptide Sequence Number=SeqID_70717
gccagattttcatctgtggaggcttttaaaggtttaatagataactgcatcaatgaaaccatggtgtctaagggcattgctcagatcaaggctagacatcaaggactaaagtcagatcccacggtcatagagaagatatgtgctatcctagaaggcttgttagatgtccgctatagtgacgtttgggacaaatcatttcatataatttctgtggcatttgacaagttaggagagttttcggctgatctattacctgaagcactgaagaacctggcagacatgcaaaacatgtcagatgatgacttctctttccggaagcagctcaatgcatgtattggttcagcagttgctgcaatgggtccaaagaatgttcttgagattcttcagattcggtcaatatgtgctgaaaatgaatggattctccctattctagagaagcatattgttggtgccagtttacaatttttcttaaaggatattctgggcattgttaaatccatagagaaaagcatcaataagctcttgaaggatgacaagcttttctccgccaagagagctgaaggttatgtgtattctctgtggtctttgttgccatcttgttgcaactatccatgtgatacttcaagcaacttcagagttctacaaagtgttttatgcgatactctccaaaaccagcctgaattgcgtggcattgtttgctccagtattcaggttttgattacacaaaacaaagaagccttgtcagtttctagagaagaagacattcttactgacgatgagctaagcaaatctgaaagaagagcaaaggaactctatactaaagatcgggcagaggaaaacttgaagtcgatacgtgctttttcatcaaagcttttggatgtactttgttctatattcttgacgtcttcaaaggatgctattggattattgcagcctgcgataagtgagatagcttccatatcagacaaagatgttgttggcaagttcttccttcattcgataagaaagttgttggatgccacaaaagctgttaatgaagagccagtggatgatagttcaatgcaaatcgaaactgacgccaacacaaatagcatgacaagggctctactattggatttcgcagcttcactgatgcctggtttggctgccaagtctatcaatgttctattcagttatgtgaaacctgcaattaaggatagtgactcattgatccaaaagagagcatacaaggtcctctcgatgttacttaaggatgcagaatttgttgaaaagaatttggatgtcctgttggaattgatgatttcctcgatgccctgtcaatttccctcaaaacgctacaggcttgaatgcctctatcaccttattgtttacattttgaaggattcatctatggttagaaagagggacattattagttctttcatcactgaaatacttctcgcgttgaaagaggcaaataagaaaaccagaaacagagcttacaatttg

SEQ ID NO: 4744 - DNA, 321 bp, Setaria italica
  Peptide Sequence Number=SeqID_70718
gagcccaacccgcagccagccactgtcccctgcgccgcgccaactccaaaccctagcggcgggccgcggggccccgtcggcggggaccttccgccgcttcaggcggctgagatctccgtcggcgccatccattccatccgccccctcgtcggtttctctcatcgcctcgtctcggcctgtttcccctcccgccgactccgcaccgcgagtccgcgagccaggcaaccagcaaccaatccgactaggatttgggcagcagggcgattggcggcgcgcgacaaagggacgcacggcggctggccggagctggcggcggcgacg

SEQ ID NO: 4745 - DNA, 335 bp, Setaria italica
  Peptide Sequence Number=SeqID_70719
agtgcgtggcaatgaaccagcatcatcacttccatcagacaacccagaagcatgtttttctgcttccacagaagcacataggtcctttaatgatgtgtgtttcacattctctgctatcgcaccaatagcatgggctgctgcaacccttgtgtcccaatttttactacgagtgtattgagaaacctttttgagcaacgcatttaactcctggggatgggacttggcaatttctccaatttggcgtgcagccgcaaaccttgtcgcttgtgtcgaaccagtgtctagtaatgtgaggaggcggtgaagacgggacgaattctgggccataaatgatg

SEQ ID NO: 4746 - DNA, 2021 bp, Setaria italica
  Peptide Sequence Number=SeqID_70720
agctgacgctccccgccgccgagctcaggcggctgcggcacgcggccatgagggtcaagtcgaggaccaaggtgggtggcgccggggtcacgcgggaggtcgtggagaagatcagggagaaatggaggacggaggaggtcgtcagggtcaaggtctccggcacgcccgcgctcaacatgcgcctcttccacgaaatactcgagagaaaaacaggaggtttggtaatatggaggtcagggacttcagtttctctgtacaggggattagactatgatgaggctgaacccactaaggggtcaaacaagatttcacagtcccttggcatgaaatcctcaattaaagggtctccaagtccttccttacaacctactgagaaagtgtacaatgcacatgatagcaatggagctttagtttctaatactgggaaggaagaaatagttgaacaagtgccagaaatcaaatatgaagatgaaattgacaagctattggaagaactgggcccaaggtacagtgactggcctggatctgatccattaccagtggatgcagatttgcttcctgcaactattccaggttacaagccccctttcagagttcttccatacggtgttcggccatctcttagccgaagggacactaccaatttacgccgtcttgccaggggactgcctcctcactttgctcttggacgcagcagacaactccaaggcttagcaaatgctatggtcaagttatgggagaaaagtttaattgctaaaattgctttgaagagaggggtacagcttaccaccagtgagaggatggctgaagatatcaaaaaattaacaggtggtataatgctgtcaaggaacaatgactttatagtcttctacagagggaaggatttcttgtcctcagagcttgcagaggtgcttctagagagagaacgattagcaaagtccctacaagatgaagagcaagcgcgactaaaggcagcatcttcattttcttcgggcagcgacgcatatgtacagccaactgtagctggtactctggaagagactcttgaggctaattataaatatggaaataaattggatgaggatcatgaggacaagatggcaagaacagtagcagctgcaagacatgctgaccttgtaagaaagctagagtggaagctcgcacttgcacagaaaaagatggagaaagctgaaagggtactaggaaaagttgagacagccctgaacccaactgaaggtaccaagccgcctgaaacaataacagatgaagagaggttcatgtttcggaaacttggtctaaggatgaaagcatttctgctccttggaagaagaggagtttttgacggcacaattgaaaacatgcacttgcactggaagtacagggagctggtgaagatattagtgaaatcaaagtctttttcggatgtcaagaggacagcgttgtcacttgaagccgagagcggtggcattttagtttctgtggacaaagtctctaaaggctacgccattgttgtgttccgcgggaagaactacaggcgtccttctacgctcagacccagaaatctcctgtcgaagcggaaggctctagctaggtccattgagcttcagagacaccaggccctgagtcgccatttcgcaaagctaaacagaaaggtggagcagcttagagcggaactggtccaaatggaaggcgtgaaggagcaaggcgacgaggagctgtacgccaagctggattctgcgtattcgagcgacgaggaagacatggaggatgaggatgacgaggcctacctcaagcgcttcgacaacgaggtcgctggtgttaccgccgaggatggcgacgaccccgtgtacgatgaggccgattaccctgactctgaagatgaagccgaggacgacgagagtttcgattccgaaaatgatgaagatgccgacgaggctgccggaactcccggcggcgatttccggagcgaagcggggtttggttttcccgccagagagtacaggttaggaggcgatcacaat

SEQ ID NO: 4747 - DNA, 976 bp, Setaria italica
  misc_feature (968)..(968): n is a, c, g, or t
  Peptide Sequence Number=SeqID_70721
ttaaccgaccggacgaaggacgtacgacagcaggcggccgccaccacatcgacaacgcaggttgctcaggcagcgaccgggaaggaggcggggaagcacttcgggttcgatccgcaacgctacgctcaggcagcagctgctagagcatccaatggaatgacagaaccagctgcagccccaagcatgcaccatgcccagtggaatgcccattttgggcatcctgtgcccaagaatgtcttgagaaaacaaatgaagaaaaagccaaaggtcgtgcaaccaccaccatgtgaggtctgcaagattcagtgcgataccctagaggttctcatgatacataagcaggggaagaagcacaagaaaaacttggagaagttacaagactccatcaccccaaaaccattactgaagcccacaagcaatgccatgggaccaactatggcaccttccgctgttgctaactctgtggttccagctgtacagtcaaagaagaagaagatctcagcagcaacgccggcagatctggaggtgaagaagaggcgagttctggaggctggagcagctcaaggagaagtaaaaatctgcacagtttgcaatgttgtcgtgaacagccaaaaggtctacgaatttcacatagctgggcaaaagcaccaggccatggtacagaagcagcaatcgctacattttgtagcctgagacgtcgtctgaagactatcaccgtcttgtctagaagtttcataggaaccagaattcacaacattcatatcttcaaatgtattattaactagctagtgaccacctgctctgtacactcttcttgtagcgtagcaaacgattagtacattgttcggacttttgcgtgccgcagataaattgtggaaagctggccccgaagattgtactgtatgtctcaacttgtttatcaacatgttcacattgcaggttgtgataataaaaaaaaaaaaaaaaanaaaaaaaa

SEQ ID NO: 4748 - DNA, 589 bp, Setaria italica
  Peptide Sequence Number=SeqID_70722
aatcccctgttgtttgtaatcgttgtgggacacagattgtacatcgtcaagtgcaagaacatgctcaactctgccctggctcacaatctcaaacacatcaagctgatggtagtcaagcacagccatcggctgcaacaactcaagcaatcacccaagatccatcacttgccccagcaggctctgctgcagctccagctatgacattgccatctgcagctacagccacagctgtcacagcttctgctgcagcaacaggaggggcaactggtgcaagcacagcaacagcacccccttccttagcagctgcatcagctgcttcttctcaaactccaacagctgagcagtggtaccagcagcaactccaatgctcacagtactaccagcagcagtaccctgggtacaacccttacatgcagcaatatcaacagtatggccaataccagcaggtgcatcagcagtacacgcaacctcaaatgcaagtggcgtcccaaaatatgacacaaggttctgcacagcctacctcatatgttcagcctcaggtgcagtcctctcagctccacccctaaaaagaaaaaaaaccccaaaaaaa

SEQ ID NO: 4749 - DNA, 417 bp, Setaria italica
  Peptide Sequence Number=SeqID_70723
gccgtgtgcaggtgcgccacgccgcgcgcggcgcatagcgcggcccgcatgcgcgcctcccagtccatgggcgtccggccggtgccccggctcccgtggagccgggcggagaggctgccgccggggaggtagtcgacgaccagcagcttctcgtccttggagtagtagtacccgcgcaggggcaccaggttccggtgctccgccgcggcgcccgccgccgcctccacgcacgcgccgaactcgcgccgcgccgcggccacgtcccgcagcctcttcaccaccaccgtcgtcccctcctccagcaccgccttgtacgacgtgcccaggctgcccttccccagcacctccgccgacgcgcgaagcaggtccctccaggtcgaagctgtagtggtggtcggcccccgggcccctgccttc

SEQ ID NO: 4750 - DNA, 538 bp, Setaria italica
  Peptide Sequence Number=SeqID_70724
cccccgccccgtccgcaccagctcggcgtcgaacacctccgccgtccactcctcccgcaccaccgactgcacccagcgcgggaggtccacggcgccgtcgccgccctccagggacgcgtggtgcgcgggggacttgcccgtcagcagctccaggagcagcaccccgagcgagtacacgtcggacctgaacgtcgggcggcgcgcgtccacgagctccggcgcgcggtacccgccgccgctcccgcctgggcgcgcgggggacggggcgaagagctggtggaggcagtagtcggagagagcggccgcgtcggggtctgggcgcaggaggaggttcgaggacttgatgttgccgtgcgcgaggctgtgcgccgtgtgcaggtgcgccacgccgcgcgcggcgcatagcgcggcccgcatgcgcgcctcccagtccatgggcgtccggccggtgccccggctccctgtgaaaccacggtgtgttagcgtttgcgacaacacacatgacacagcaatgcaacaaaacaatgaaatcatcaca

SEQ ID NO: 4751 - DNA, 1079 bp, Setaria italica
  misc_feature (1077)..(1077): n is a, c, g, or t
  Peptide Sequence Number=SeqID_70725
gcgggggcgtccggccgcgcgtcagggaccgtggccacgcacgccatggccacctgaagcagcgccaccatctcctcctcggcgctggcgcccagccgcaccagctccacgtcgaacacctcggccgtccactcctcccgcaccacggactgcacccaccgcggcaggtccagcgtgccgtcgccctccagggacgcgtgcgccggggacttgcccgtcaggagctccaggagcagcacgcccaacgagtacacgtccgacttgaacgtgagccgccgcgaatccaccacctcaggcgcccgatacccgccagcccgcgtcgacgacggcgcgaagatctggtggaggctgaagtcggagagcgccgccgcgtccgggtcagggcggaggagcacgttggaggccttgacgttgccgtgcacgaggttgtgcgcggtgtgcaggtgcgccagcccgcgagcggcggacagcgcagaacgcatccgcgcctcccagtccagcggcgtccgccccgagccccggctcccgtggagcatggcggagaggctgccgttggggaggtagtcgtagacgaggagcttctcgtccttggagaagtagtaggcgcgcacggggagcacgttgcggtgctccaccctgccgagcgcctccatgtgcgcgtcgaactcgcgccgcgccaccgccacgtccttgagccgcttcaccaccaccgttgtgccttcctccagcaccgccttgtacgacgtgcccacgctgcccttgcccagcacctccgccgacgcgcgcagcaggtcctccaggtcgaagctgtagtggtggtgccccgggccctgtgcccacgaacaccagccggctccgctccgcgccgccgcccgcggcggcggcggccgcgccgatatccttcgaggacgaggtgaagtcgccgcccgtcatctcctcagacaacgtcgacggggtcaggccccgggtcggcggcgtcgtctttacgtcctcctcgccgctggctccgcgacggtggcggtggaccgcgcacagcgcgagaagcaccagggcgagcagcgccgcggccccgcgccncc

SEQ ID NO: 4752 - DNA, 278 bp, Setaria italica
  Peptide Sequence Number=SeqID_70726
gcagcaggaaggctcctcttctcgcaagccacacacggcggcgctgctgctgctgcggcctcctggcttcttgctagctagcgttctgtaatctctatcttcgtctagcattgtccaagaggtagctagcacagcagattggaagcagaggcatgtggaggctgaaggtggcggaaggcggcaggccatggctgcggtcgaccaacaacttcttagggagggcggtgtgggagttcgaccccgaggcggcacggccggaggagcacgccgaggtggag

SEQ ID NO: 4753 - DNA, 567 bp, Setaria italica
  Peptide Sequence Number=SeqID_70727
acccaaaatacaacaataacaattccctcctcgcaccaacccgccggcgaccagtcgagcttagcaagaaacgcgcgccagggcgctgcgctccagagtggcatcccatccaagctggtagccgatcgacaagcgagctgagcaagcatgtccgcggcggatgcgtcagccgggactccggcggcgacggcgccgccggggcgcggcaggtgctgcacctccggcgcgacgctggagcttgtgggcgcgttcacggcagtgtgcctggtgctgtacggggtgatcctgtacatgaactacctgtacgtgcgctggagcggcagcgacggcgtgcaccggacggactccggcgcggggccgccggcgcggaagaggcccgccgccgggatggacaaggcggcgctggcggccatgccggtgctcatgttcaaggcggacgcgcacggcagcggagacggaagcgcctcgcccatggagtgcgcggtgtgcctgagcgccatgcaggacggggacgcggtgcgcgcgctgcccgggtgccgaccaacgacgttaccaacgaccgaccta

SEQ ID NO: 4754 - DNA, 593 bp, Setaria italica
  Peptide Sequence Number=SeqID_70728
ccggcggatcctgcggccgccgaggcagccgcggcggccgcggccgcgtcgcggtggctgccgcggatgaggatcagctccttctggcggcgcagctccatcaccttgcggtgcgagttggagtgctgcgtcagcacgaacgtggggctggccgccggcctgtactccggcatgaggcgcccggacttgaaccgcacgccgcacgcgttgcacagggtcttggggcccaggggcccggtccgccactgcggcgtcttctccgacgcgcagtgcgtgcaccgccgcacgccgccctccatgcccacctccgcccccgcggcccccccggggcccgggctcttcttgccgcggctgccgttggcgccattcggccgccccggcttgttcgacgacgggaagtccgaggacgagcaggacgatgatggcgacgactgcgatggcgggcgcggcacgagggagtgccacgccgcggcagccgcggcggtcgcgcgggaacgcttgctacgcgcgccgcggccaggcgcggccgtgacgcagctgtcctgaccacccgagttgccaccaccgttgccggccgcgttagcagcagcggc

SEQ ID NO: 4755 - DNA, 543 bp, Setaria italica
  misc_feature (29)..(29): n is a, c, g, or t
  Peptide Sequence Number=SeqID_70729
ggtctagttcttcttagtttttttttttnttttttttttttttttaccttttactaataataagtgtttaatttctgccccgatttgctcagtagaagtttgtaatcaactttgtaaccttctaaacagtatggctatggagaaagtgaactaagtactctccccgtgctatctagaatgtcatagcaacaactgaaggctatgttttgttagactatactactactcatcaaaataaatgatttagctcacaactttcctacttggggcaacaagcattgagatggtttttcttggttttctttaggtatattaattccacactccctgagcaccatgtcctgggaaatgatcgaattggaggagcctcttcttccagaaagcaataggcactagcaccaagccaccaagtcgagaataggacaatatgccagcttttctttacaggagctagagggaagcaacggcttcaggattaacgcagggtggcctctttgcgttgtagtagaaatgggcaatcatttgaactatctcctctgaagt

SEQ ID NO: 4756 - DNA, 668 bp, Setaria italica
  Peptide Sequence Number=SeqID_70730
taaacttaaggggaacaaaacaaaagaacaattaagaagaataggtttttacttaggttttactttaaggtaataaattaaattaccaacaactaccctagaagcaccatgtcctgggaaatgatcgaattggaggagcctcttcttccagaaagcaataggcactagcaccaagccaccaagtcgagaataggacaatatgccagcttttctttacaggagctagagggaagcaacggcttcaggattaacgcagggtggcctctttgcgttgtagtagaaatgggcaatcatttgaactatctcctctgaagtccttatctctttctctctgtataagatcttgtttcccctaaggaacaataactgtggacattctcttacttgaagtgcatatgccaaatctctctcgatatttatatcaacttttacagtccgaggaggtaaccgatctttagcattccagtataccttagcagccttttccaattcttgaagaaacctccaattgtcagcagctctgttgtagcgctcgaagactaggacgaccagggggctggggtggaatgcgaagctctcccactccaagcaattgatttccttgacccatcccttgtcgacctccccttcccaatcgaatactaccaaccccgtaccaaccgtacaac

SEQ ID NO: 4757 - DNA, 439 bp, Setaria italica
  Peptide Sequence Number=SeqID_70731
gccgagctgcctcctcctcggagtcgcgccacgcccaccgcccgccgctctccgcctgctcctccgccgccggatggcctcctcagagcccacccgcgctttccagctccgcctcaacccgctcaccggcgactccgagtggctcgtcgtcgacgaggcggaggcggaggcggaggcgcctgcgccgagccaccacaagcagctcctcgccgccacctcctacctcgacatgctcaacgacgccgcccgcaaccgcgcctaccgccacgccatcgaagccacagtcacggaccccacctcccgcgtcctcgacatcggagctgggactgggttgctgtccatgatggcagcgcgagctttgtcagctgttggaggtgaaggcaggggaagcgtgtcggcatgcgaggcctaccttccaatgggcaaattaacacggagg

SEQ ID NO: 4758 - DNA, 210 bp, Setaria italica
  Peptide Sequence Number=SeqID_70732
gtccattttgatgtgtcccgggagaatggtgggtcaggagcaccgcaatgtggttcctccaacgtatttgatcctccacttgaaggtcaagctgccaactatggtatgcacgggagcaactcaggcagtaacaatggaaccaatgggcagaatagaagcacagctgctgcaaatgctgaacggacaaacacggagattgcagcagctgtg

SEQ ID NO: 4759 - DNA, 322 bp, Setaria italica
  Peptide Sequence Number=SeqID_70733
tggggccatcaacaaaggtacacctgtaggtggcaatgggagtggaagtgtcagcggcaatgacacatatgtgaaacggatggccccgacaccacgagaagcacagctgatgaaatatagagagaaaaagaaagatcggaactttgggaaaaaggtgcggtaccagagcagaaagaggttggccgatcagcggccccgggtccgaggacagtttgtgaagcaagctgtgcaagatcagggcggatgggaaggagctggagatagatgaccccccctggtgtggctctggctcgagctctggctctggcatggctgcattgga

SEQ ID NO: 4760 - DNA, 255 bp, Setaria italica
  Peptide Sequence Number=SeqID_70734
gttgtcatgtatgatcttggatcagtttgtcaacagaactgcaccgagcagccgttggcttacggtagagcagagcagctgctggtgtggtgcgtcagtttcagtcaatatatatctcgttgcgtacggtcgtttcccttcggttattaacaagtttacttgcaaaaagatcatgctttgttccttggttagtgcacctgactgattgactttatatttttcatttacacgtcggactattagtgttttttgcca

SEQ ID NO: 4761 - DNA, 356 bp, Setaria italica
  Peptide Sequence Number=SeqID_70735
ctgcaaatgctgaacggacaaacacggagattgctaatggggccatcaacaaaagtggacctggaggtggcaatgggagtggaagtgtcagcggcaatgacacatatgtgaaacggatggccccgacaccacgagaagcacagctgatgaaatatagagagaaaaagaaagatcggaactttgggaaaaaggtagcctgttttcaattgaatgcttctttaggcaagttatttaggaccttttcatttccaactcacatgaaccagagaaatagtgtatcataaaaggttcgcttcaaaggttggctaaatagaatatcgtacatataccatgttatttgaaaggaattataaaca

SEQ ID NO: 4762 - DNA, 371 bp, Setaria italica
  Peptide Sequence Number=SeqID_70736
caatggccaaaaacatggatgcccagcaggcagcaagaggtgcagatgcccctaattgctcttccaaagtgccagaagggaaagatatgaaccgtggtaatgttttgccattacttgaattgagtttgaagaggtcaagatcatctgcagatggtgccaatacaatccaagatgaacagcggaatgtattaagacgatcagatccctcagcattcacaaggtaccatacatctgcggtttccaatcaaggcgggacaggatttgtggggagctgttcaccgcatgataacagctctgaggctatgaaaacggactctacttacaacatgaagtcaaattcagatgctgctatgataaacaaggctccaatg

SEQ ID NO: 4763 - DNA, 1374 bp, Setaria italica
  Peptide Sequence Number=SeqID_70737
gccgccgtcgcctccgcctccgaccgccatgccactgccttcccctccgccctccgtctcctgacgactcggccgccggccacaagcttgctgagttgtcttcagcttgccatttcccatttgctgactcgcctacaatacaaagaggtttctgagttgttggatgcaaccgaggcgctcttcgatgcaagcgtaatatgtgctcgaccacctattcattaactcaagacctgcctcggatcaatcccaccactttcgtctacctcttcaagtcaggctgatgggaggtacccatcagcaaccgggtgtggatggacaatccgttagaagagatgccagactgcttgggaacagcgcggtggatgtggctgagggcaatgggctccagcaaggggacagcgacttgaggagcagtgaccctgatggcctgctcagcgggccaaccactggtctgcagcagggtgacacggaaaatcagcagcagcaacaggtctgctgggagcgcttcctccagaagaagactatcaaagtcttgctcgtggagagtgatgattcaaccaggcaggtggtcagtgccctgctacgtcactgcatgtacgaagttatccctgccgaaaatggtcagcaagcatggagttatcttgaagatatgcaaaacagcatagatcttgttttggctgaggtttttatgcctggtgtttctggaatttctctgctaagtaggatcatgagccacaatatttgcaagaatattccagtgattatgatgtcttcgaatgatgctatgggtactgtctttaaatgtttgtcaaaaggtgctgttgacttttttgtcaagcctatacgtaagaatgaacttaagaacctttggcagcatgtgtggagacggtgccacagctccagtggtagtggaagtgaaagtggcattcagagacagaagtgtgccaaatcaaaaagtggtgatgaatctgataacagtggtagcaatgacaacgacgaggacgatgaggcaagcatgggacttaatgcaagggatggcagtgataatggcagtggcactcaagcgcggagctcgtggactaagcgtgctgtggagatcgacagtccacaggctatgtctccagatcagttagctgatccaccagatagcacatgtgcacaagtggtccacccaaaatcagagatatgtagcaacagatggctaccaggtacaaacaacagaaactgcaagaagcaaaaagacactaatgatgactttaaggagaaggacttggatataggtgcccctagaaaattaaatacggatagtcaatgtttccccaaattgtagtaggtccctattgtaagtcctagtctagtattggtcgtcgcgag

SEQ ID NO: 4764 - DNA, 2620 bp, Setaria italica
  Peptide Sequence Number=SeqID_70738
taattagacaaaggggtaatggcagtgataatggcagtggcactcaagatttaaatgatctgatggggttgggtgtcaatcagagaaaggcgcggagctcgtggactaagcgtgctgtggagatcgacagtccacaggctatgtctccagatcagttagctgatccaccagatagcacatgtgcacaagtggtccacccaaaatcagagatatgtagcaacagatggctaccaggtacaaacaacagaaactgcaagaagcaaaaagacactaatggtatgatgactttaaggagaaggacttggatataggtgcccctagaaaattaaatacggatagtcaatgttccccaaatgagaggcccatgaagccagcagatggtcgtcgcgagtacccaccagaaaacaattccaatgagtcaatgatggaaaatttagaggaggctactgttcgagctgctgatctgattggttcaatggccaaaaacatggatgcccagcaggcagcaagaggtgcagatgcccctaattgctcttccaaagtgccagaagggaaagatatgaaccgtggtaatgttttgccattacttgaattgagtttgaagaggtcaagatcatctgcagatggtgccaatacaatccaagatgaacagcggaatgtattaagacgatcagatccctcagcattcacaaggtgcaaaacataagatcagtgtcattactgagttatgaaagcaacagtacattgcgtactaactgttacttttgttgcaaggtaccatacatctgcggtttccaatcaaggcgggacaggatttgtggggagctgttcaccgcatgataacagctctgaggctatgaaaacggactctacttacaacatgaagtcaaattcagatgctgctatgataaaacaaggctccaatggcagtagcaataacaatgacatgggttccactacaaagaatgttgtgacaaaacctactacaaataaggagagagtgatgtcaccctcagctattaaggctaatgcacacacatcagcatttcatcctgtgcagcactggacggttccagctaatgctgcaggaaaagcaaaggctgatgaaatggtcaacaatgcaactaagaatggtcaccctggtgaagtgcagagcaacctcgtgcaacaccctcgtccaattctctacgtccattttgatgtgtcccgggagaatggtgggtcaggagcaccgcaatgtggttcctccaacgtatttgatcctccacttgaaggtcaagctgccaactatggtatgcacgggagcaactcaggcagtaacaatggaaccaatgggcagaatagaagcacagctgctgcaaatgctgaacggacaaacacggagattgctaatggggccatcaacaaaagtggacctggaggtggcaatgggagtggaagtgtcagcggcaatgacacatatgtgaaacggatggccccgacaccacgagaagcacagctgatgaaatatagagagaaaaagaaagatcggaactttgggaaaaaggttcaaagaacatataagcctaacttccctacctgaaacttactttttcttgatacggctgtgttatggaatctgtctttttaggaattttgattgattgttactctcaatatttttcaggctatgaagaaagaattccatatttttgtttcttcatttttatatgatgtatttgagaaagctttggatagaaccggtttctttctgatggctgtctgccattttcaggtgcggtaccagagcagaaagaggttggccgatcagcggccccgggtccgaggacagtttgtgaagcaagctgtgcaagatcagggcggatgggaaggagctggagatagatgaccccccctggtgtggctctggctcgagctctggctctggcatggctgcattggactccaaacacttgacaattagacagttgattcttccttcgctggttcgatctgatatgatcgacaacaccccatccttcctttccatcattggtttctccacattcagtctctactacgacctaccctagaaagaataaacaaggtactcctatcaatcaatcccctacatatgtgcatccgtcagcatgtagaggaacaagtgcaggtcttggctccagatggactgtaattctacgcggagtcatgctcgctcctatgtaactatgcgtgtacaagtgtactcgtaatgtctgaacgctagtactgttgtgtgttgtcatgtatgatcttggatcagtttgtcaacagaactgcaccgagcagccgttggcttacggtagagcagagcagctgctggtgtggtgcgtcagtttcagtcaatatatatctcgttgacgacgaaaaaaaaaaaaaggttattaacaagcctgcttgcaattgaatgcttctttaggcaagttatttaggaccttttcatttccaactcacatgaaccagagaaatagtgtatcataaaaggttcgcttcaaaggttggctaaatagaatatcgtacatataccatgttatttgaaaggaattataaacattatgttttctgctaggaaaaaaggtgctcaaagaacatataagcctaa

SEQ ID NO: 4765 - DNA, 791 bp, Setaria italica
  Peptide Sequence Number=SeqID_70739
tcctgacgagctaccagctgcacgatctgagcgaggtggagatcccgcccacgctggaggaggtcgacctcaccgccaaccgcctcacctccgtcgacccacgcatcggccgactcgccggcctccgcaagatctccttccgtcagaacctcctcgacgacgacgccgtcgcgccgctctcgtcatgggacgcaatcgccggattgcaggagttggtccttagagataacaaacttacaaggattcctgatgccagcatcttcaagggtcttctgattttcgatgtatcttttaatgagatatcttccttgactgggctgtccaaggtttccagcacattgaaggaactttatgtttcaaagaatgaagttccaaagatggaagaacttgaacacttccatgcattggaaattcttgaacttggtagcaacggattaagggtgatggaaaatcttggaaccttgacaaatctacaagagctatggctgggaagaaatcgaattcgaactgtcaatttgtgtggtttgaaactgatcaagaaaataagtttgcaaagcaacaggctaacttcaatggatgggtttcaggaatgtgttgcattagaggaactgtaccttagccataatggcattcaaaagatggaaggcctctctaccttgcagaacctccgtgttttggatgtttcatctaacaagctaaccactatagaaaatattgaaaccttaaccaggttggaggacctgtggttgaatgataaccaaataccatcacttgacgggatagaggctgct

SEQ ID NO: 4766 - DNA, 1062 bp, Setaria italica
  Peptide Sequence Number=SeqID_70740
ggaaaatcttggaaccttgacaaatctacaagagctatggctgggaagaaatcgaattcgaactgtcaatttgtgtggtttgaaactgatcaagaaaataagtttgcaaagcaacaggctaacttcaatggatgggtttcaggtactttactataacatttcctgtttgcctgttctaattgatgcttgttaatatatctgttttgcaattcaggaatgtgttgcattagaggaactgtaccttagccataatggcattcaaaagatggaaggcctctctaccttgcagaacctccgtgttttggatgtttcatctaacaagctaaccactatagaaaatattgaaaccttaaccaggttggaggacctgtggttgaatgataaccaaataccatcacttgacgggatagaggctgctttggctggttcacgggagaagttgacaaccatatatcttgagcgaaatccctgtgcaaaaacaccaaattactcatccacattgaagaaaatatttccaaatcttgagcaaattgattccgatatcatagcatgaaactggcgaatcgttgcatagatactcaggcaaagtatgcctgttcttttttttcctgctggagaaggcatattgagctctgtgaaggaattgtttgagtcttttgatcatgctcagagacattgaggaaccagttatctgctgttcacgggatatgcacgccattgccaactctgcccggcctatggggttggagaagctggacaggcaggatatgcatgtaagcctttacgagctgaatagtagtgatcggtaaccaaataatgaacgactgatgcttgaaccagcagagatgtgaacccatgttgctattttgaagatgctgcatttgctttctctgtagctttatttcacgctgtttattttaccttgataagaatatgagatgaggaacagttagcacttagcagctcagctcatctgtatgttactaaaagtaggcacgtatgtatgttggatgacaattcgccaatttgcaaggattgaagtgatgacctgcaactttttta

SEQ ID NO: 4767 - DNA, 1616 bp, Setaria italica
  misc_feature (1)..(16): n is a, c, g, or t
  Peptide Sequence Number=SeqID_70741
nnnnnnnnnnnnnnnngcacttcaaggattaagtaactctgtagctggaatctgcccatgtcaatagattgagcacatttggtgccatcaaattcttcaattgcaggagcctcgcacaatggcaagttctgtgtggtattttttgttacaaaagaaattgtacaatcaacaaatgatgtaagctactgtatctgttagtgagtacatactcgaacctggagacagacaaagtctagacaccctttctctttacaaggcatatactgggttcagttcagtatctgagagctcagtattgtcataccaggagcttgagccacttcttcttgacatcttctccttttttctaatcttccgtatacgttttgatttcaccacatagtatgtcattgtaccaagtacaccagccattgtgacaccacctatcagagataccagtattgctgcccactggaagtggcggcctagcacaatatagcaggaggcaatgaaagaaatcgtagtgcaaactgaggctatccacataagcttgttgatcacctcaacaacccttcgttcagacgtggtttctcccctgacaactgttatttgaactacgactaccgccaatgatgtaaatagagctacagcattgaagatgaagaaaatcttaaaggaggtagcctgaacaacaactgcaagtccattgtcggcatttccaccaggtactgtgaatatagctgcaaaagcaactgttgcaaacagcacagcaacaacagttacagagttggtagcattgttgatgccttctctgtgcaacttcctgagttctttagcaatgccatgaacatttttgttggtttttctcgtttgctccagttgtgtgtggacatctttctttatctctgtcactgtcttccgcagctcatctcgaggctgattcagctccctagatctgagtgcaccatgctgagttaaaatatccttaatttcgcaagactcttcacataccggcaacccttcagctatatcatatgcagtcttgtggtctctggtcagtgcattgacatgggtatctggtagccgcaaaagaacactaactatctctgctcgcttttttcttgttgcgacatgcaaagccgtgttcccatttttatctggcagcattacaattgctggatcagcatccactaaggctctaagaacatcacagcttgttccctttacggccatatgaagagcagtttgacctttcttgtcatttcttcttgctagctgaggatctttctcaagtaatgctttgacaattccaacatgtccctgtcgagcagcgaaatgtaaggcattttttccattgtctctggccatttccaccaatccaaagtcatcttgttccaacaacagttcaacaacttcgatatggcccctcatagctgctgatataagcggggtagtatttccaggaccaaatgtcttggcaagcatcctgtcatgaagtaacatttcctgcacaacagcacgacgcccttccctcgccgcgacgtgcagcgcgtcgtaacccgacctattctttgccgccagcccctcggcgtccaggtgccggagcagctccaccacccacctcgaggtgccccctc

SEQ ID NO: 4768 - DNA, 503 bp, Setaria italica
  misc_feature (487)..(487): n is a, c, g, or t
  misc_feature (496)..(496): n is a, c, g, or t
  Peptide Sequence Number=SeqID_70742
ctgcaccacacagctcttctacatccatatccaaatttgacagctttagcaccgccttgctctttccctctcgcctcccctattttcctctctccgcaaagcaatccagcagcaactaacttatccaagtcaagccacaacacctcctcacgcaagcaagcggccactcaaggccagctcacgatgctcctctcctgtgaggctgtagacactaggacgggatagctcaaaggcgctccagtcctagtgtctacagcctcacaggactggagcgcctttgagctatcccgtcgctccctggtgacagtgctacgggttcagcgctgcaccaagtaggccggggctcgacgcctagcgtagcgtgcccgtgcaggagctccttcgacttgaagccatcatcgtgtctgtgccggagctgcggtggtggactgtgcagactatcgtcacgaccaggagcttggcgccctgatgactgtaggccacccgntagcccttnatcgacg

SEQ ID NO: 4769 - DNA, 1662 bp, Setaria italica
  Peptide Sequence Number=SeqID_70743
tcgaaaacgaaagagcccgtgtgaactagagaggtcaggaaagaggaaaagagagataaattggaggctattagcgagaagccatcagtgctaggttcaaaatccatagtcctgtcctcacttgagcgctcgtgagctcccgccggcggttaaagattgcagcttcaagttctagtccgagaaacggttgttgctccgccatggaggtggggtccgagcaagggctgatggcggggagggatctgttcggcatgccgaagagcccgccggcgcaggtgccagggccgccgccgtccgcggccatgcagagcgtgcgcatggcgcacaccgcggatggcacccctgtgttcgccccggtgacctcctcggcagcgccgccgtcttaccagccgcagggcgcggcccacgggcctagcatgtctgcgacggcggccactggaggcaatggcgccatggcgccgccgggcatgggtgagccggtggccaagaagaagcgcgggcggccaaggaagtacggaccggacgggtccatgtcgctggcattggtgcctgcatcggcggctacaaggtcgccggcgacggggcagggttcttctgggacgttctcaccagcggggttgaatcccgcgaactctgtgccgggggtgtcgccggacggagtgaagaagcggggccggcccaagggttctaccaacaagccgcgcatggatgctcttgggtcatcaggagttggatttactcctcatgttattacagttcaagctggggaggacgtttcatcgaagattatgtcattttctcagcatggaacgcgtgcggtttgcgttctttcagcaaatggtgccatatcaaatgtaacgcttcgccagactgctacttcaggtggaactgtaacatacgagggtcgatttgagatactatcactgtcagggtcattcctcctgatagagaatggaggccagcgtagtcgaactggagggctcagtgtgtcactggctggtcctgatggtcgtcttttgggtggtggagttgcaggacttctcatagcagcttcaccaattcagatagtgttgggaagcttcaattctgaaggcaaaaaggagccaaaacagcatgctccttcagaccctgcatcggcaccactgaagatcaccccgaccaccactatgggacccaacagccccccttcaaggggcacattgagtgaatcatctggtggggctggaagcccaccaccactgcatcaaggcatggctgcaagcaacagtaatcaaccaccaatcatatccagcatgccctggaaatgagctctgcatccttgaccaaatccaggcaggctcagatctacaattgacgaactgcctcccaggcaggaagtagcaatttgcgcttcagtagcgctcgttctctgactagcgtatgcagtgtaaatcgaagcttgagtagggagagtactgtagctggtaagtttgtagctctattgtaggcttcaccctgaattcctgtgctaggtgataatgtattgagctttgaccatgtgatccttcgtagtgttaccaaatgttattttactccatgttctatcaaatgttatttagttatatgttataccaatttgaattgattaggctggaagattcctgtatgaatatgttgtttgcg

SEQ ID NO: 4770 - DNA, 370 bp, Setaria italica
  Peptide Sequence Number=SeqID_70744
accaggcatatccactccttccagaactgcaaagcacatccagcacaggtcctacagaatgtgcaagctcctctggaagaggcttaatctgctcggcccctttatgctttgagcagaacccttcacgcttccaggcggtagcatctccacagtcacaacatccaccccctgtatacatgatggagtaatcatgatccttgtgattgccattctggaagcatgggacacaaattgcacacgtggggtcattttcacaggtccggcagcgatacgcaagatcactctgtccccagactgacccacaaacagcacgatctcctgcagaggaacgatccaggtcttgagcatcgcttctggctcatggttgaac

SEQ ID NO: 4771 - DNA, 1944 bp, Setaria italica
  Peptide Sequence Number=SeqID_70745
ccagcacgcacttgtgcacaaaatactctgactctcagtggatgctccatcacaatcgaagcaaacccataaggctcacaacctctaagtacctgagaaaagaactcacaggattgcacaactgaatgttcatctggcctggcatcctctccaaaacatttcttcatcgccttccgcaacagcaatgaaagcatacggtgcaaagggatatggaaagaagtttcttgtgaactgacgtcaaagataacatgaggccaacctcttgtgttgagtattcctagttcctcgattcttgaatcaggatgagcgtgcaaaaggctaccgtcagtcagagtataagtaatggcattctcagggtgcaactctatatctgtagtgttgctgctgtcatgcatcttccctttgcctgtcctgttactagctgaaggtatctcttcttggtcaatctgcatcctgtcgcaattaccatgaacaggagaactagatacatcacgataatctgcagtaccatctggttgtgatccttcatttatcttgacacccatcacgcctatatttgtatttgaactggttcccttatcagaagtccgatcttcaggcgaagccataaaattacgagaatcgctgctgctaggatcaagggatgacagcttgctcctcagagctatgtcaggttccaaccaactttcaatagctttcaggcattgaagaattaaccaggcagcaggtgacggcaaaccacaactcaaagaactgtctcggatgcttaaattggatactgagctctcctgggagacccttccaacttttgcatgccgttgattttcagcactctccatgccgtttatcgcagaggagcaaacagtaacatcagttgattcatgttgatcaggaggagaaaatgcaccctttatcaggaaggttctggacaattccaaaatagtgccccagcacgaaaggtgcagatagatgttcattttcatcttcagcatgaatacttgtcactctcttctgaggatccataccttgcacaagtgataagagcttaatccatgaccttgttagatcaggcctctcataagcaacatacttagaaacttcctcatgactcaagacatagcgtgtatcatccaataatcgaacagaagcgtcaaataagtttccccatttgtttgtctgtaaacgaccatcctcaccaatgcaagaaagaaacagatctgtcaagcatccaagaagaacacccaacaaattaacctcatgcacaagccttgtagttagtgtaggtactgtgaatatttgcacagagaaagttggcatcagtggatactcctccagtagcgaatcattgcaccctttgataacttcaccaaatgtgacagggtagtagcgtataaaaccttggcaaactcatacttaaaagcaggatcgctgataagtttcaatagcaactcatgcaattttttagcaaccttcttgtcaagcaacctttctgaccttattaatgcatccaacagatcttggcactcacggatccttagggacagaaaactaagaaggctttcactgcaagtgcagaactgaagcatcatgttagtaattgacattgtcaactcttcagcaaccctcttgcatgagctactaccatcaccctttgcagggggtggttccaccaggcatatccactccttccagaactgcaaaagcacatccagcacaggtcctacagaatgtgcaagctcctctggaagaggcttaatctgctcggcccctttatgctttgagcagaacccttcacgcttccaggcggtagcatctccacagtcacaacatccaccccctgtataaatgatggagtaatcatgaccccacgtgtgcaatttgtgtcccatgcttccagaatgggacacaaattgcacctgttgtaatgttctaacgtgacgttgt

SEQ ID NO: 4772 - DNA, 170 bp, Setaria italica
  Peptide Sequence Number=SeqID_70746
ttttctatcatccttggctcattgattacaccatacccatccggtgcactgttgttctcccatccatgatgtggagcatagcgcccatgatccatttccaaaattcagcacttgtgttatcctgcaggttctaggtgaccttttaaacttttgggtgcagacttttcagt

SEQ ID NO: 4773 - DNA, 1303 bp, Setaria italica
  misc_feature (1214)..(1214): n is a, c, g, or t
  misc_feature (1221)..(1303): n is a, c, g, or t
  Peptide Sequence Number=SeqID_70747
tcgttctcggcgcggggcccgaacccgcagtcccggagattctcaagccggacctgaatagcccccggcctgaacatcctagccgcgtggccgagcggcgtcggcccggccggcattccctcagacacccggcgcaccgagttcaacatcctgtcggggacctccatggcctgcccgcacgtctccggcctcgcggcgctgctcaaggcggcgcacccgacctggagcccggcggcgatcaagtcggcgctgatgaccaccgcgtacgtgagggacaacagcaacgggacgatggtggacgagtcgacgggcgcggtggccggcgcgttcgacttcggcgccgggcacgtggacccgatgcgcgccatggacccgggcctcgtctacgacatctcccccatggactacgtcagcttcctctgcaacctcaactacacggagcagaacatccgggccatcacgcggcgccaggcggactgccgcggcgcgcggcgggccgggcacgcggggaacctcaactacccgtccctctccgccacgttcgttgccgcggacgccggcaccgggagggcgacgacgatgcggacccacttcatccggagggcgaccaacgtcgggggtgggccggcggtgtaccgtgcgtcggtcagcgcccccgaggggtgcaacgtgacggtgcagccccggccagctggcgttccggcgcgacgggcagcggctgagcttcacggtgcgggtggaggccgcggtggcgcccggggagaggatggagcccgggagctcgcaggtgcggagcggcgcgctgacgtggagcgacggccggcacgtcgtccgcagcccgatcgtggtgacggtgcaggcgccattgcagtgaccgggagtgcgagaccgatcgatcacggcggagcaggcgggagctggtgctagtgaagcgaacacagcctcggtgttcttgtaaggtatcgctccgtggaccatgagtccgtaaggtatcagtggtgtttttatcgttgctgttagctgtagtatactccagcatggaagagctgtataattaagtagtagtattagctacgtatgctatacgggaagtctggaactctgcctcagagttctctacttctctggccttcttcaccctttctgctcctctcactatcgtcttcccctctttcctgaagcattgcagtgggtcaatgggaaggtttttttcnctaaccnnnnnnnnnnnnnnnnnnnnnnnnnnnnnnnnnnnnnnnnnnnnnnnnnnnnnnnnnnnnnnnnnnnnnnnnnnnnnnnnnnn

SEQ ID NO: 4774 - DNA, 452 bp, Setaria italica
  Peptide Sequence Number=SeqID_70748
cgtaagggattgcagaatggtcctgacacaatcatgcattctgcatcttggcatgtcaggtgattcaatctctggttccagaaggttcctcagaaccaattcctcgtaatactccgcagcggtatcttctgggctgcagtcctcttgttcctcaatgaagccctctgatatccacagccgggtgacattaagcttgctaatcgtggagtcttccggcaggtgcaagcagtactggaggcactgcttcaagtgagatggcaagtcattgtaggccatgcggataggccctgctatgtccttcgtgccatccgggatgtcagcagaagaccatccgtcacatttagtactcacctccttcaattcctcatacggtcggtccttcattcgtaggacaccacctataaccttgatagccaatggcaccttgccatactttttgaacaagtgtttat

SEQ ID NO: 4775 - DNA, 851 bp, Setaria italica
  misc_feature (1)..(72): n is a, c, g, or t
  Peptide Sequence Number=SeqID_70749
nnnnnnnnnnnnnnnnnnnnnnnnnnnnnnnnnnnnnnnnnnnnnnnnnnnnnnnnnnnnnnnnnnnnnnnnagttaatttatcctataaatgggccaaacccatatattccaacaggccgtcgtacaatcgcttacaaagtcttcgtggaacgggatgcatttcatcatgccacgcgattaggtgaggataaaacatatataattaattacatcaacggggtccaactgacatcttaattctaaatcttcgctgaactacactgcaaagaaccaagtaaacagataacaaagatagaagagcatgcgatgcgatgccactgatcaatttcgagccattcagaggcactgcgacacaaaggcgagggaagcgccaagcaggaccaggagcaggtggccaacggcggagggtgacgcggccgcggtgccattgatctgtgaggagcccacggccacgggcagctcgtcgccggcggggagagagcaggtggcctggtggccggccccggcctcgtcagccgccatcagcgcctggatcacggccgtggccgcctccctgtgccgcgtggcgttccgctgcagcagccacgtcaagcccatgacctggcagtcctcgcgctgctcctgcctcgccttcgccgacgacgtggcgttggtcttcccgctcagcttgttgagcgcacggaggcacttggagcagccggcgatccccggcagcgcgcagtccctctccagccttctcgccatcctgccctccggcgccgggcacaccggccgccgcagcctcaccccgcagtagcagaactccacgtcgcacgccgccgtcccgtttgccagcgccggtgcttccct

SEQ ID NO: 4776 - DNA, 710 bp, Setaria italica
  Peptide Sequence Number=SeqID_70750
accagtagtccgattttcagtaaacgggagggagggacgctgctgcggctgctgctaccgtgcttctcctaaacggaggcgctccatttttagacatcggtggttactggttaccagcgagatcgatttctgatagggagagcgattgcgagggttgcgggggaggagggatttgggatggccggccatgaccacgtggtggttgatgtggagggcttagcgaagtccaaggacgacggggttgccgagccgtctgagggtgtgagcgcctccgcggctgctgcgtctccgtccgcggtcgttgacttggtcgacgacgaggagggaggcggtggggaggaggagccgctcatccaggcggctgagtgccggatatgccaggaggaggacagcgtcaagaatctcgagaagccgtgcgcttgcagcggcagcctcaagtatgctcatagagcttgtgttcagcgctggtgcaatgagaaaggagacactacatgtgaaatttgccatcaggaatacaagcctggttacaccgcaccacctcgtgttgaaccagatgagacaaccatagacattggtgaagatttgattatggatttgcgtgacccaagaattctcgctgtagcagctgctcagcgtcgtcttcttgaggcagagtatgatggttatgctactacagatgctggtggtgctgcattctgccgttctgctgc

SEQ ID NO: 4777 - DNA, 1360 bp, Setaria italica
  Peptide Sequence Number=SeqID_70751
taagaaaaaaaaaactcggaattttcagtcttctccacagccgtgcgaacgaccccgaccggaaggaggaggagcggagagggaggaggaaccgaggaacccgtcgccaccgccgccgccgccgccctccaacgccgctggtgaggagatcgatttctgatagggagagcgattgcgagggttgcgggggaggagggatttgggatggccggccatgaccacgtggtggttgatgtggagggcttagcgaagtccaaggacgacggggttgccgagccgtctgagggtgtgagcgcctccgcggctgctgcgtctccgtccgcggtcgttgacttggtcgacgacgaggagggaggcggtggggaggaggagccgctcatccaggcggctgagtgccggatatgccaggaggaggacagcgtcaagaatctcgagaagccgtgcgcttgcagcggcagcctcaagtatgctcatagagcttgtgttcagcgctggtgcaatgagaaaggagacactacatgtgaaatttgccatcaggaatacaagcctggttacaccgcaccacctcgtttacaccgcaccacctcgtgttgaaccagatgagacaaccatagacattggtgaagatttgattatggatttgcgtgacccaagaattctcgctgtagcagctgctcagcgtcgtcttcttgaggcagagtatgatggttatgctactacagatgctggtggtgctgcattctgccgttctgctgcacttattttaatggcactgttgctgctgaggcatacattgtccatctcagacaacgaagggaacgatgatgatgcttcaaccatattctcacttttcctgctgcgagctgctgggtttctgctgccctgctatatcatggcatggatcttcagtgttttgcatcgccggcggcaacgacaggaagaggctgctctggcggcagcagaggtggccttcatcctacagtcagcccggggccgcggcctccagtttgccatcgccccagactccccagccactccgcagcagcacgagcacgagccagcacagccgcaacagcaatagctaacgacatagccccagtagtagctcctcgcggctgctgaccatactatacaaaccctggctcatttcgttgtttgatgccccactgcttcacgagggttaggcttttgcttcctgtttggccaagtaggatgcgattcagcgggaaactctctgtacctttatttcgagcgagtgtaatcgaagcatcggattcaatgtaaattcattgtttacattatgacgctgcctttactgccacccgaattcgaaatgttgcttgtactgttgaaaaaaaaa

SEQ ID NO: 4778 - DNA, 457 bp, Setaria italica
  Peptide Sequence Number=SeqID_70752
ccgctaaacctaatgtctatcacctattatactgccaccagtaaggatcttgaaggtaagcagcaagaaacctgcataatcagtaattaagaataatcacattcaaaaacagaagctagatagctatgctatcctatcctcagttatctccgatggcacaaacgccatgaaccttgacataggagttcgattatagggggccaaatccagcagcccccttttctccatcatattcctgcattcaccatgaatgatacaaccatgttgtgcattaaccttcgcacacttgctagaatcatgcgtctagcaacagttttgctccaccaccagctgcatcatgagagcgtgcgttgctacgggcatacaaattatcccttgattccaagtcaaatcaagctgcacacaaaaaagacctgcatctgttggggatggaaataattaaataaagcatctgttt

SEQ ID NO: 4779 - DNA, 658 bp, Setaria italica
  Peptide Sequence Number=SeqID_70753
aaacccgctaaatctaatgtctatcgcctattatactaccaccagtagggatcttgaagctaagcagcaagaacctccgatggcacaaacaccatgaaccttggcataggagtgggattatagggggccaaatccagcagcccccttttctccatcatattcctgcattcaccatgaatgatacaaccacgttgtgcattaacctttgcacacttgctagaatcatgcgtctagcaacagttttgctccaccaccagctgcatcatgagaacgtgcgttgctacgggcatacaaattatccctacatgcaaaacaaatgtagaatcgcatcacatgacacgaaattgtcattgggcataccattaataccaagcacagaatgaaacaaaattaaaattcatgtgcaattgcatgtgtaatagataaaaacataacaatatcagattgcgacaaagatgattactccaaccgacaatttggatgtacaacatgctaatgaccacatcacatgatttcacgtaaacagaaaactcaatgaacacataatcttcctctattttcttcatcagaaatatcaatggagccaccagtcaccagccctacccatccccctataatttgggtgtacaacatgctaatcgtaccatgaaacaaatgt

SEQ ID NO: 4780 - DNA, 1271 bp, Setaria italica
  Peptide Sequence Number=SeqID_70754
aagtagcgttatcgcccatatggatgttccaagctatgtcaggtgtgattatgcataccttatctgccaacaagctgcacacaaaaaagacctgcatctgttggggatggaaataattaaataaagcatccgtttctctggacacaactctcactgcagagttgtataaaagacattgggtttgaggcttgatgcttgatgattgtatacttaaacagcacagatatttatggtgaaatttcaaataaccagaaaacttatataaaacaggggcatgacagggtagttagataaagaagcacaagttccattacagttgctaatatatctataagttcatgtaatttaataacctccacttatttgatcgcaacatctcataatcatagtgggagaagatcagaagaaccaagataggttagtgaaatcaagaatggagaattcccaaactaaaattaaacttttttcaaggaacagaggtatgtgtccaaactaaaattaaactactcgacaaacctcccaaatctcaccccctaatcaccagcatcccaaataacgtacattaaccaggaaaaatatttttaaatatgcatgcttatagtaaaccaaacctggcatagaacccagacgataaagattctacatttttttcttccatccaacctctctagaacctcatctgcagtaccacattgcagagcaggtcacagtcctccaggccctccaaatcttcaatatgctagcacttgtgatatgttctgaagaatacgctacaaatgttcccggcctcttatagcaagccagctcctctcaaataaacacatagtagcatctttcttccttcacacctctctttctccctctgcctccaccgagcaagcaatcctcgatagctagcaacctgccaaccagtttctttccttttcttcctccaaattagcaagcaacaggtcaaatataatcagcagcacacctcttctctgttcttctgtccaccatgattgcagcagcaaccagtagttctcccttcttcctgccggcaagcacgacgagctgatcatgaacccagctaaccttctctccctccaatagcagcatgcatcagcagcagcacgctaaatccatctctaaaatccccaagctccaacatcaccaccatgacctcatctctagatctccatcgattcttgctgcacctccaaccaaagcacggcatctcctgagattctcctcctacccgagccacaaatccagcacgggctcctcccaat

SEQ ID NO: 4781 - DNA, 328 bp, Setaria italica
  Peptide Sequence Number=SeqID_70755
taggcgcttggtcaatggtgaaagtggtgctgactgctgccccaatttatcttttaatagccatggatttaccaaaatggttcttcaaagctattgataaaagacgacgagggttcctctggaagggtcatgaacaggccaatggtggcaattgtctgctagcttgggagaaagtgcagagaccacttgagtatggaggccttgggattcataatctggaatttcttggcttggcattgaggatctgctggttatgggcaacaaaaaacaaccctgacagaccttgggctggtctcctgttacccgttccctcaaggctcaggctctc

SEQ ID NO: 4782 - DNA, 283 bp, Setaria italica
  Peptide Sequence Number=SeqID_70756
ctcccccgcctcgcccgttcccctctcgctttcccctcccccgcctgctcctccgccggcccccgtcctagcctcctaggtttagcgcgatccccagacaccccccccctccgcgccgcccggagagcagttgcctgcccgcatggtggcccacgcgtcggcgtgagggtctgcgcgcgcgctcgtggtgtgtatcgggggataggtagatgaggccctccgccgctgaggccggcagcggcgccgtgatgagggccgctgtggtgggtctcgtgctggtcgg

SEQ ID NO: 4783 - DNA, 797 bp, Setaria italica
  Peptide Sequence Number=SeqID_70757
tttttttttgttttttcctatggattagtttttactttggaagcttagtctgaatttacagaagccagttctcaagtccatataatatgtacagctagttacatagagccataaccagtgtcaggttatccggaatgcacactggaatgcagcagggcaccatctttatttacaccatccagacgagccgaacctgtcaaaagtcataaacaatcacaaatccaccaacggagagtaactagacagaaaacggagctacacaagtttagaacctgtcaggcccagtttttccgcttggacctcagctgcatcagtttgtccttccatgatgcggcatccttatatctctcttcaacagctgcgatgagcatgttccgcactaatccgaactcttgagcctcgacgcagggctgtccatcgggtctgtcaagttctgtaaacaacagcccctctgatagaccagctgctaccgcctttcttgctggctcaattggccttatgccatcactgtatgcaagacttctatgaacttgaataggaaccttgcagcgaaccgcaatgttgatagcatctgaaaggtcgaagatcaaaggtgatactgtctgtagggtcttctatctttgttagataaagttcagcacaatatgcttcttgaattcttttgtttacccgaacaagttttacaatgtggacattgcgaatagctgccatcaaaagtacgcttggcatctccaagacgatgattggaagtaatgtttcgctcccgtcttcaatcctcaaaacaatagctggttgtg

SEQ ID NO: 4784 - DNA, 1050 bp, Setaria italica
  misc_feature (948)..(948): n is a, c, g, or t
  Peptide Sequence Number=SeqID_70758
attagttttacttggaagcttagtctgaatttacagaagccagttctcaagtccatataatatgtacagctagttacatagagccataaccagtgtcaggttatccggaatgcacactggaatgcagcaggcaccatctttatttacaccatccagacgagccgaacctgtcaggcccagtttttccgcttggacctcagctgcatcagtttgtccttccatgatgcggcatccttatatctctcttcaacagctgcgatgagcatgttccgcactaatccgaactcttgagcctcgacgcagggctgtccatcgggtctgataaaagtgcaagtgtcatgaagaatgcagaatataggtcagtcattgagctttctgcatcctaaacagaaaagtgcagacggatctcctaaaagtatgtccaggacaaggactatgaaaaagcatcaatttattagtgcctctttggtcttttgtcctcacagttttaattattagagcttccaccgccccactctcctgtacatcatagctcagagtgcatattttgtttgtttgtgggataatttgtggaagcatataagtaaccaatttatgggcaaacacaaaccaaagtaaaccaccactgctgcagctattgcatcacattattgatttcaggcaatcagcaacaataataagtatactttctaaaagacctgtcaagttctgtaaacaacagcccctctgatagaccagctgctaccgcctttcttgctggctcaattggccttatgccatcactgtatgcaagacttctatgaacttgaataggaaccttgcagcgaaccgcaatgttgatagcatctgaaggtcgaagatcaaaggtgatactgtctgtagggtcttctatctttgttagataaagttcagcacaatatgcttcttgaattcttttgttacccgaanaagtttttacctcataacccattttatcaatcatttccttaacaacttgatatattgtagtcgtgcctacacagaaaagcgtcatagactgcatctagtgtt

SEQ ID NO: 4785 - DNA, 1494 bp, Setaria italica
  Peptide Sequence Number=SeqID_70759
catcatcgctctctgtaaaagaattaacattaacccgaggttcgtaacatctctctatattggtgcaactcacttcaaccaccaattgaggcctaacctccatatactcactagcacatcatgtcatgaagatattttacttccgaggacatgtacattcgtgccagcaaacatgacagatttttgttttccatggattagtttttacttggaagcttagtctgaatttacagaagccagttctcaagtccatataatatgtacagctagttacatagagccataaccagtgtcaggttatccggaatgcacactggaatgcagcagggcaccatctttatttacaccatccagacgagccgaacctgtcaggcccagtttttccgcttggacctcagctgcatcagtttgtccttccatgatgcggcatccttatatctctcttcaacagctgcgatgagcatgttccgcactaatccgaactcttgagcctcgacgcagggctgtccatcgggtctgtcaagttctgtaaacaacagcccctctgatagaccagctgctaccgcctttcttgctggctcaattggccttatgccatcactgtatgcaagacttctatgaacttgaataggaaccttgcagcgaaccgcaatgttgatagcatctgaaggtcgaagatcaaaggtgatactgtctgtagggtcttctatctttgttagataaagttcagcacaatatgcttcttgaattcttttgtttacccgaacaagttttacctcataacccattttatcaatcatttccttaacaacttgatatattgtaggtcgtgcaatgtggacattgcgaatagctgccatcaaaagtacgcttggcatctccaagacgatgattggaagtaatgtttcgctcccgtcttcaatcctcaaaacaatagctggttgtggtgcactctctggaatgtttctcccttgtgaattattatgcacacatcgcaggttcttcccatctcgcatcttgattacatacccttctgatccacttctcacctcaactgcttctagcacagttgaattaacataatcttcatcactctcgctaaagtttccagccatgtatccattaccatcagaagatgagctgaagctacagcaaacatggctggaattcttcgcgggcggctgagagattggagaaatgaatctagtaacgttcctgtattttgacatggcaccaaagaatgctgtcccaagctgcccagatttgaccagagagttgctgatgagagcagcagcgggcagttttgcttgcatcgctggacggcatagaacaggcccctccatcgccatcaatcagcagcaatggccgccggtccttcggaaccgaggaagcagagcaacgagaaggcgaccgggagaagtggattattgtttggtttgtgacgatggatggatgtgtccgggtaggaaaaaggaatagagagaggttggggac

SEQ ID NO: 4786 - DNA, 526 bp, Setaria italica
  Peptide Sequence Number=SeqID_70760
ccgcttcagctactctcagcagagcatggatacctgatgccctttctatcacctgctacccattttcccaaatctcatcctgcataagggtagccagtgcttccaacactgctacgtctgcttcacgctcttcgccttccagcattcgcaacagaggattgacggcgccggcttttaccaagcagaaagtgcttttgacagtgcactggcagctgtgaactatacagtaggattcagctgatggaggaacacaaagccaccttggcgattttgacttacgcaatgtcattgtactctctgacaattgagccaaggatgttgctgctttggacttggcatctactgatccttctgaaagcaatttgatgaggcaaggaaccaccccacatccaactgctaagctctgtagtttcttatcccaggtaactgtgaaccgcataaatacaccagcaataccctcgagtaaccacgacctttgaggtgtcctagaagctgtgatgtttgctcacataagatgatcagaata

SEQ ID NO: 4787 - DNA, 760 bp, Setaria italica
  misc_feature (7)..(7): n is a, c, g, or t
  Peptide Sequence Number=SeqID_70761
tgaaagntgcttctctgcctcctgcaaactcaggcagagaagatccgcaagcctcttcagggtgatccttgcataatacttggagacaaccaagatattctgaacagagcaagaattcagattcaatagacaaatataaagcaaaataactaaataaacattgaccaaactaagcaatacatgctcaatgaccctcagcttcaaatcttctggagctttggcacccaaagctcctccctcattctcatattcagatttaaagaattcccacaagctagtccactgaacaacctccatggtaaccagctgcttcagcaataatctgaaatttgggatctcagataggtttttatcctctagggtagcgttgagaagacttgattgcataggctcatgaggagccagcaccaagtaccaacagatcttcctaagaatcggtatccactttgctggatcctcctttatagcaggaatatcataaattgccttgtaacagcggcagatttccaggtaatcattgttgtgcgagtagtatctgggaagagacaatgaagaataatgatttgctccaataagaaacacaattgtgaaccataaacagaacaaagaaattggcacataatttggggagcagatgaaatgaaaagcaatttccacagtaacaatggtaatcaaataaaaggccatggtgcatcgatctaatagagcagaagcatcacgtaccgaatcatgtgttcatagtagatgcgctttaattctt

SEQ ID NO: 4788 - DNA, 373 bp, Setaria italica
  Peptide Sequence Number=SeqID_70762
gtttattgtacagaagcaatgatcaagcccatcattatacagtacctcaatatcaacatccggtaacaaggaaccagagttcctaatccatccaggcatctctgcgtacatgtggctctctaacagaaaatacagaatgatccgtctatctcgtatgatcatgagacgaagaataatgtcgacgcgactccatatgagcgagacagcttgtgggtgccgacgccgacgggggtgacgtgacgtgacgtgaacccgcaccgaacaacacgggcgatcgatcacagctttgtgcggtcgtggcactgctggctccgcacccgcatctccgcgacgccgaagacgaagctgcagtcggagtaggccacggcgtgcc

SEQ ID NO: 4789 - DNA, 830 bp, Setaria italica
  Peptide Sequence Number=SeqID_70763
tttagagaagaagaaaaggtcgtgaaaagaaaagcgtgtcaccataatgtaatgcgacctgtttatgtacagaagcaatgatcaagcccatcatcatacaatacatcaatattaacacccggtaacaaggaactagagttcctaatctatctaggcatctctgcgtgtggctctctaacagaaaatcagaatgatctatctctctcgtgctctactggaacgtatgatgagacgaagaatatgccgacgcgactccatatgagcgagacagcatgtgggtgcgtggccggtgccgacgccgacgccgacggcgacgggggtgacggggaagcaaagaccggttgccaggcaccacgtgacgtgacgtgaccccgcaccgaacaacacgggcgatcatagctttgtccggtcgtggcactgctggctccgcacccgcatctccgcgatgccgaagacgaagctgcagtcggagtaggccacggcgtgccgcttgaagagccccaggatcgtgaccctccccgggatcctggtgctggcctccatggccaccgacccgctctcgacgtccgccaccagctgcgccaggtcttccgcgaggcggtccgcctgcaccgtgagcgccagcttcacctccccgtcgcccttgctggggatccggcccgggtcgatctcggcgtccccgacgtgcgcgccgcggtaggtgaggtccgtgtggcccccggagtcgtaggcgaaggaggccgggttggggttgtgcacggccacggtgagcagcagcgtgatgttgagctggagggagatggccgggaaggtgaggcgcggggacgaac

SEQ ID NO: 4790 - DNA, 512 bp, Setaria italica
  misc_feature (479)..(512): n is a, c, g, or t
  Peptide Sequence Number=SeqID_70764
gcgcgctcgcgctgggccgctgcggctccgccgacgtcacccgctgcggcgccgtgcgcgtcgaccgatgccgcgacgccagcgtgtccgggtgcggcgccgtggccgtgcgccgcggcaaggtgagcgtggtcgaggtgcacaagcccatggcgccgccgatgtaccagcaggcggagcctgtcctcgcggcgccggtggaaatcatgagcaagtgaacgggaggctctacaagtctacgtgcatgaacgatgccgtcctactaccatgttcatatcagtatgatgtgatatttcgtatttgtgtgatggggaaccggggtatttacgaagaactacatgctttttcgatattaacctgtaatgtaatcctaccaatatgcatggatgttttccattttttttaatgttagcactgtacttatgtatgtcactttataacaacaatatatctaaataaataatattgttttgggtaannnnnnnnnnnnnnnnnnnnnnnnnnnnnnnnnn

SEQ ID NO: 4791 - DNA, 271 bp, Setaria italica
  Peptide Sequence Number=SeqID_70765
tggtcacctccagtgaccccagtaagttcacgacgatcgattgtttctgaatttgactctgaactgaaactgatataccatgcatttgtgaataatctgaattgcaggctacggaagttgcaaatacgtctcctgacggtacgcagcaagtccaggcagcgcggtggcaggggcaccagcctcgagtccacatcatcctccaggctcgagccgcggcaacgctgggaggttgctgcgacacgcaacaggagataggcaaggcacacagggg

SEQ ID NO: 4792 - DNA, 1885 bp, Setaria italica
  Peptide Sequence Number=SeqID_70766
gaggtttcaaaaagacacctgcaagcaacggctggttgagttgccaatcaatccactcccttccaaatccactcccctcccgatgctcccgctcctcctccacctcctgctcgccgccgccgcctcccatggcgcggcggcacagggcggcggcctcccgtcgttccccatcggcgtgaactacggcgccaacgccgacaacctcccctccccggccgccgtggccaccttcctcgccaccaagaccaccatcaaccgcgtgaagctcttcgacgccaacccggccttcctcgacgccttcgccgccaacgccccctccatctccatcgccgtctccatccccaactccgcgctcccttccttcgccgacaaggccacgggcctcgacgccgcccggggctgggtccgcgacaacctcgccgcccacgtcgccaacggcgccaacgtcacgctcctcctcgccgggaacgagatcctcggccccgtcgtcgtccccgacctcgtcgtcgcgctcctccccgccatgcgccgcctcagccaggccctgcagctcgagaagctgccccaggtgcgcgtcaccacgccgcactacctcggcatcctcgcgccctccgacgggatcccctccaacgcccggttccgccccggattcgacaacaaggtcctcgcgcccatgctcaagttccacaacgacaccgggtcgccgctcatggtgaacgcctacccctacttcagctacaacgcgcagaacctcaactacgccatcttccgccccaacgccggcatctacgaccccgccaccaagctcaactacaccagcatgttcgacgcccagatggacgccatctacaccgccatgaagaagctcggatacggcgacgtgcagatcgccgtcggcgaggcgggctggcccacgcaggccgaggctggccaggtcggcgtcgggccggaggaggccagggacttcaacgctggcatgattcgcgtctgcagcggcggcaaggggacgccggccatgccggggaggacattcgagacctacatcttctccctgttcgacgagaatcagaagcccgggccgattgcggagaggaacttcggcatcttcaacacggatttcacccccaaatacgacatcggactcctccgcgaaggatcgtctgcatctccaaacccttcgccgaatccatctcccaagccaagcccgaacccgtcaccgaacccctcaccctctggcggagggaagtggtgtgtggccaagaccggtgcagatgtgacgaccctgcaaaacaacatcaactacgcctgtggttatgtggactgtaaacctatccagagtggcggtgggtgcttcgaccccaataacgtgcagtcccatgcttcatttgtgatgaacgcgtactaccaggccaatgggcgccacgactacgactgcgacttcaagggcaccggcatggtcacctccagtgaccccagctacggaagttgcaaatacgtctcctgacggtacgcagcaagtccaggcagcgcggtggcaggggcaccagcctcgagtccacatcatcctccaggctcgagccgcggcaacgctgggaggttgatactgccgggcttgcgccaaatacttctatactcttgtctgacactcatgcttcttgctatccatacctactagttcttagaagatccaccattgttatccctcagcacgagggaggtgtactaccccagttggttgtagcttgtgtttaataatctggtttggccgtgcggcgtaattttttttcttcttcttgtgtagtgaaggaacagtgatttaacttgatcattccattccattctatgtagaaacaaaaattccgacccatttcatgtttggttgagg

SEQ ID NO: 4793 - DNA, 943 bp, Setaria italica
  misc_feature (928)..(943): n is a, c, g, or t
  Peptide Sequence Number=SeqID_70767
cctttcggccgctttacgcaacgcctttttaatcccttccgccctccgcttcccgtccccccaccccagcctgcacctgccctgcgccgcgccgcgccgcgccgtgctgtctctgacccggcggccatggcggaggagcagcagcagaggtggcaggagggccaccgcctgtgcgccaacaactgcggcttcttcggcagccccgccacgatggacctctgctccaagtgctaccgcgacctcaaccagcagcagccggccgctgctcccgcgccgccggccttcctgccgtcctcctccaccgccgccgcttccgtggctggcgtcgcggccgtggccgagcccaaggctccagcggcggtccccgcgggaggcaggcaggcgggcaggtgcgcgagctgccggaagcgcgtgggcctgacggggttcgcgtgccgctgcggcgccaccttctgcggcgtgcaccggtacccggagcgccacgcgtgcgccttcgacttccgcgcggccggccgcgacgccatcgcgcgcgccaaccccgtcgtcaagggcgacaagctcaaggacaaggtctgagggccaggagcctcgttccctccattcgatccctcgcacttttcctccacgcgacgccggaaggaggaggaggcggaggacgacgacgacgactgccggaacggatcgtcgggactgtacgaactactactccgtgtaccctgcgactggtgtactgtagcttcaactgcatgtgtaagccgacggcccgtcggccatcgcaaaatccaaatcgaaaactaaattggtttcgaataagaggtcccgatcgtgaggccttcttgcgggcagttgtgattcatgagtttcccccaacaccatcttcgtcttgagcgccgaattcgctcgaatgattggaggcaaaaaaaaaaannnnnnnnnnnnnnnn

SEQ ID NO: 4794 - DNA, 811 bp, Setaria italica
  Peptide Sequence Number=SeqID_70768
ctcgccggcggccgccgccgccccgccgcacctgctgatctggagggtgtccctgagcgtcggggaggagggggaggaggagaccggcggcagggtcgagctcaacgtcgttgaggaggatgtgctccgatcacgatctgtgtattgtgatcagtgcagagtcgtgggatggagtgggcacccagtctgtgggaagcgataccatttcatcatcgagaacgactgcaaccagctttctggccaccggcgcacctgctgccttcgctgcggcactcccatggtcgctggagaatcaaggtgggaggcacatttcagaaaatatacatcattgcataacaggaagtggaaataggacctgttaaatacatgacgagtgatgtcaacatgccgtgtgttagatgcctatacatgtgtgattgaatcaaggtggtgctgcactgcctacatgctgtaaatcagtgcatgctcgaatctaatgcagagtttcaaatggattgcatctggatggggcttgtttgcacatgtagaaagttatctctgcaaccttctctctttaataaatcataagccaagcaatctgattgatgtgctgtgaacttgtgatgctctgaatactagttgcatgttctcttacttcgaatgcaatgccttctccaggtgcgcactgtgcaactttgatatggatggtgaggagatcgaagagtgtgcatacctgcatttggatgactcctctcacttgctgcacgctgtggtgcatgcaaacggctatgggcacctcctcagggtaaatggccgtgaaggtggttcaaga

SEQ ID NO: 4795 - DNA, 599 bp, Setaria italica
  misc_feature (5)..(5): n is a, c, g, or t
  Peptide Sequence Number=SeqID_70769
catcntaaccatgattgattcaatcttcgttgtcatatcctgttagcatacagcaacaaagcatctgcagtggaatcttgtgtctgatgcgttgtttggttgcaggatggagtgggcacccagtctgtgggaagcgataccatttcatcatcgagaacgactgcaaccagctttctggccaccggcgcacctgctgccttcgctgcggcactcccatggtcgctgcatttggatgactcctctcacttgctgcacgctgtggtgcatgcaaacggctatgggcacctcctcagggtaaatggccgtgaaggtggttcaagattcctcactggccgtgacataatgagcttatgggatcgcttgtgcaaggtgctgcatgtgaggtaaatgaaaggagcagaacaacaatctttgattggaatcgacacttatccaaaatgctatccttcaacctaactgtcatttccatcactgcaggaaggtcactgtcatggacatctccaagaaacatggaatggactacagactcctgcatgcagtcaccagtgggcacccatggtatggcgaatggggatacaagtttggtgctggaagctttg

SEQ ID NO: 4796 - DNA, 2387 bp, Setaria italica
  Peptide Sequence Number=SeqID_70770
atccggttaatcggcgacgaggaagacgacggaggcggcagatctgcggggatccgacggcggctgagggggagatggtggtgaacggccggccgctgaagagggcgaggacgcgggtggaggccagggacttcgcggggttcccggcggccggagatggcggggcggccgggacgttcagggaggcggtgagggggttcctcgcgaagcacgcgaggctgctcccgcttccgtccatcttctcgccggcggccgccgccgccccgccgcacctgctgatctggagggtgtccctgagcgtcggggaggagggggaggaggagaccggcggcagggtcgagctcaacgtcgttgaggaggatgtgctccgatcacgatctgtgtattgtgatcagtgcagagtcgtgggatggagtgggcacccagtctgtgggaagcgataccatttcatcatcgagaacgactgcaaccagctttctggccaccggcgcacctgctgccttcgctgcggcactcccatggtcgctggagaatcaaggtgcgcactgtgcaactttgatatggatggtgaggagatcgaagagtgtgcatacctgcatttggatgactcctctcacttgctgcacgctgtggtgcatgcaaacggctatgggcacctcctcagggtaaatggccgtgaaggtggttcaagattcctcactggccgtgacataatgagcttatgggatcgcttgtgcaaggtgctgcatgtgaggaaggtcactgtcatggacatctccaagaaacatggaatggactacagactcctgcatgcagtcaccagtgggcacccatggtatggcgaatggggatacaagtttggtgctggaagctttgcactaacctcagagacataccaaaatgcagtagacatgctttcaagtatacaactggcactgtacttctcgaacagaagccccatcaggactccattgcagaacacaattgctctttattgggcactctgcgatcgccaactagtgacactacgggaccttttccgctttattatgcacctgcttcatcaagctcagaagatgtcaaaaccctcaacttataagcgcaaagaacttgcatctgatgtgctctgtgcgtggactaaagatgattttgatcgagcagaagctgcaatgcttaaggttctccgggttgtgcaaactggacagtgggtagcttggcgtgcacttcggggagctgcatcaaaggctgttgattcacaagagctgcttgattattctcttcgagaactgggtggaaaacaactggatgatggccattttgttgctgtccgctgcaatgcattcctattccatgacaagcaggctggaatcttcctccattcggtcaccagttaatgcagcaacgtttgagccctctgttgaacatctcctgcatgatcttagattcctctacgatgctctgctgaacccagagtccatgctgtcttcacagccagaggtggtgggttcatcagcacatagtgcagcagcaaagattcttgattgcaagcagttcatcaagcattatgacaagcatgctctcaggactccttctaacccattcttgctctctgtgaggtgctccattgaactacttgatcacccaaaagactacacagcacctccagaggaacttgtacttttaccagcaagtgctacccttgctgaactgaaagtgcaggcttcaagggcatttcaagagacgtacctcatgttccaaagcttccaagctgaacagctccctgactttccaaacttcagtgacacaacccccgtgaagcatgtgcttggatcaggccagcttgttcggttaagaggacgttgcactggagattaccggaggattgtacagttcaggatggagaggggtttggagaactggactgtggactgctcatgtggtgccaaggatgatgatggggaacgtatgctagcatgtgatgtttgtggagtctggcagcacaccagatgctcagggatcagcgattttgaggaagtccctgaaaatttcatctgcaggaagtgtgctagcccacgcaaaggaaaggccatgggggtggggtagcaatggtggtggaagagtggaggttagtgcggcagggaggtgcaaggacgagattggatcatctgttggtggtgcaggcaagtttgggcgcatggcaacagttggatgaatgtacataatgtagtgaaatgtgtaaatagtgagatggagagtagtaagctacccctaaaggcttttgtggaccttgagtggttaatggatcttgtttatgaccactgatgtgatgtcaatctattctccttgcgcacccattctctgatctgcatcttcagttctgcgttgcg

SEQ ID NO: 4797 - DNA, 744 bp, Setaria italica
  Peptide Sequence Number=SeqID_70771
caacaaagtattagctttacaaaacatatttattacaccttccatgttccatacatacatatacacaatctaacatatatagatttctagtatccagaagccttgtaacagtgcgttcatcacttttataggtcagctttagcttcagcgaatcagcctaatttgttgcttttgcattagctgctgttgaggtcatcctcttctacagccggttttgcttaaggtatctgtagtatacaattattcttttgtcatatgtgaagatacttcatatttatctgaattttgccagtgtgaaatcttctttcagtagtgctagatcttgcctctaatgtacatttttccccaaatcagataaagcatccaagccacaacagtgcatcccatgctattcctcaggccaagcgccagagaagctcaatctgtagattgctgcttgagagaggaggcagttaggcagcggcccctgctgctcgacggagggagaggcagccgctgttcccggaggggtgaccactgcttggccaacaggcttggcctattggccacaggagcacaagggcagaagcccgccgcgagcggaggcacgcggggtcgccggcaagggagggcggtcgcgcaccgtaggcagcttgggactggggttgtgcgcagctgccggcgaggcaagagtggcttgcgctagcaggcagccagggtgtggtgccagcggcggcggcatgggagaatagccggtgcaccatg

SEQ ID NO: 4798 - DNA, 397 bp, Setaria italica
  Peptide Sequence Number=SeqID_70772
cgaggtggacgagggcggcactgcgggccaaggacactctgccgtgcctgcaacgaaggaggtggatttgggctgcattcagggggaagtacaagatgtggctcctgtggtctctgaagcgaagatggacgtggacgagggtggtgctgcaagcaaagagaactctggatcttccacactgagcgaggtgaatgtggggagcattccagaggcagtgcaagatttggctcccgtggcgtctgaaatgaagatggaggtggatgaaggctgtgttcaggaacaagagtgcactgcagcggctgcggaaggcgaggttaagatggaggaaggtgatggcagagtggtgaatcaagggcctgctacaccggctgatggccttcaggtgaaagaggaggta

SEQ ID NO: 4799 - DNA, 319 bp, Setaria italica
  Peptide Sequence Number=SeqID_70773
agatgattgtttggtgctagaactgtactgcttgggtacagaatgagacgaaacaccattcccagatgattgtttggtgctagaactgtactgcttgggtacagaatgagacgaaacaccattcccgtattcaggacctttcttaaacttccagtggctagaattttgtgatgcaagtttgcgaacagctgaaacaaaatcacctggtccacctgatacggtggacgacccacgcccattgaagatgccaaggacatccatgttcccccgttgcgaaacaggattcctttgtcgataaatagcttctctggctttctca

SEQ ID NO: 4800 - DNA, 548 bp, Setaria italica
  Peptide Sequence Number=SeqID_70774
cctgtctagcctgtcaggtatatttttatgtgaatactttgacaaacacatgaaagatccatgtaacaaataggatgatagtcttaagccagccaactctactcacgctcaagcagcatgtactaatagcatgagcaaaggaaaatgcaaatgtaaaaatgtggcatgtcacaatgctcatcgatgcatgtggcctgtgtgtaaggcgacaattaaaaaattacctgctcaaagcaagcatttctgaccctagcataatcacgagcttccccccttgattcggagtacatatttgctggcagattcaatacaaagataatcgatcagtttacaattggagcagagtgtagataaacgaacatcaaatgctgaataattcaatatacttgtccttttttcccacaactccaagtcaaactgtcaaaataggaagtttatggcaaacctatgctcttatttcaaggaaaaaaaattatgcttccaatgttccacaccaaattgtgatttgacaaaagacaataaactaaacttacgagaaataacggaac

SEQ ID NO: 4801 - DNA, 333 bp, Setaria italica
  Peptide Sequence Number=SeqID_70775
ggtttataaacgaaggtacgaattctgctgcattgggatttaatgatgtggctttactaggtaacagtgaacacgtgtctccactatttgaaacaactttattcagagaactcatctttaacagaaattacatgcaatattacatgtacaggagagattctttcaacaaagagttacccaagcccttgcttcgcttaattgctctccggccgacgctaaagcggcgggaaagaaaaaagacgccggccccttcttttttttttcaccgcacgcacgcgacaggacaccggcgaattactgaccagcaaacccagtgctaagatccgaaccaga

SEQ ID NO: 4802 - DNA, 1885 bp, Setaria italica
  Peptide Sequence Number=SeqID_70776
actccctgtgtgtccttggctagttctctttagtttttttttttattgggaatggaatgtgaattgaatgaagctatgtataattttacactgtattctgttgtcaggctattctcctgctgcctcttttaatatacagctacaaggaaattacagtgcgttctccaacgacgctttttttgtgtttttcatacatctcttttctcctttttttgggtggtcctttctatctccatggtgtcttacctaagagatgttagtacaccatgacgcggagaagacctggttgaggctgcgaataatggaaaccttcgtccaggaggaactgctccactgcaatgggcaaccttgcggtgcgtgagcccttggtgtggtggcctgtcccgacgcataccatgacctgcatcctctccccccgcagccctcgctgcgcttttcatggcagcaagctcaacctttagggtgtggattgcttcgctcacatgcagtccatgtaaatcgatcagaccatcacctccccgttgcgaaacaggattcctgcacaatttaacaagctcaggacacaactgagttaggccttaacatgtcatgattacgaacactgtggaacacagattcaaaaagaaaaaaaatgtcatgattccaaacaattaaactttggaactctattaggtgtgataacataactgcataagaaggaattcaatctaaatctagtgaaaggcctaagataggagacctttgtcgataaatagcttctctggctttctcatgagctgctttcatttgcgcattgtacgcctgacccttcatgctcagttccttggccagagctttgttgccaaccaagtaagcctgtctagcctgctcaaagcaagcatttctgaccctagcataatcacgagcttccccccttgattcggagtacatatttgccactgcatcaccagtctcaagccatggagcaactcttgcaccgctaacactttgaaatttgttcccagatgattgtttggtgctagaactgtactgcttgggtacagaatgagacgaaacaccattcccgtattcaggacctttcttaaacttccagtggctagaattttgttgatgcaagtttgcgaacagctgaaacaaaaatacacctggtccacctgatacggtggacgacccacgcccattgaagatgccaaggacatccatgttccccttactgaaaccattctggtcttcagctgttggcagagcagggaaatcccctgtgctaaagttcggtgctctgggggtcaaattcattgcgtgatttggggtaggatcaacttgcatctctagctgggtgagaatatcaatggtgtggttgaagtcgcatccatttgcatagtatagctctgcaaggctctctgctgaaaaaccaggaaactgtgatgctaagtattccaaggggtcaacaacgccatcagatgcagcagcatactcgctagcaaaactgtcagaaaagcctgcagcgctttcagagccataatgaaggtcctgattctcattagcaatgcgaagatcaccaatataattttgctcccagttgcttgaccccaaataattgtcttcgtaaagtagattagtatgttccagttccaggcccttggtagctggagaagataactcttgatgttctcttgagaagcggctggaagttgtcccataaaagggtggcgcattcaaggatagtccagcaagggacaattcttcaggcccttgttcaactttctcaaaagaagagaagtctggaataatgtcatctggaagctgcttgcgccaaaactggtgtgcctcatcatccgagttgttagactttgaagactcggacctatctaagattgttttccag

SEQ ID NO: 4803 - DNA, 457 bp, Setaria italica
  Peptide Sequence Number=SeqID_70777
gagagactcccagctgggcatttttaattgtaaggtggagtaccaaaccctggctggccaagaaacttactgaaaccagtttcttagggaggtaccctgtacccacagattgtgaaccccgggtttgagctcggatgtctgtcctctcaactggaggcattaaccatccaagctagtgctcggtttagattgctatcgatttatcatacataactgcatatttattcacctaattgtatttaagactagttttatgataatttcttctcaatgctcaattgatgattaaagcatagcaaatttcatatgcatgcagaaacaaattttagcgttcaagtcaagcagatgaaccaaacacagaatcttcaattaagttaatctgtggttcttaaataaactgtttcatatattccaaaatgtggagattgtgcaattgaagtacacacttgttgcagaa

SEQ ID NO: 4804 - DNA, 431 bp, Setaria italica
  Peptide Sequence Number=SeqID_70778
ggcggtgtcggagccgcggggggagcgggaggaggatcgcaggttcctgttcggagactcgtatcgcaggagggtgttcttcaactacgagaagaggattaggacgcgcagccctccagagaagatctttgagtactttgcgtctgtccacagcccagagggtgagatgtacatgttacctaccgatttgatgagggcggttgttcctgttttccctccatccgagtcgaaaattgtaagagaagggaggttgagggggaacgccacccgggcgagctacattgtgctctgtctgagttttttatgctattcgatacaaatggtgatggagtcatctccttttctgagtatatcttctttgtaacattactcagcatccctgaatcaagcttcaatgtggctttcaagatgtttgaccttgaccaccattg

SEQ ID NO: 4805 - DNA, 1230 bp, Setaria italica
  Peptide Sequence Number=SeqID_70779
cgccgtcgcccatggaggccgtgcgcgcgtcggcggcgtgggtcgccagctgctcctcccatgtccgtcgacctgcaagaaattgagaaggtggtggacaaaaattcaggggaatgttccaaaagttgaatgggatttcgaaggaattcattacttcgacaacgggccgctcacagtccagtacctctttgtcttggatgcacttaacttctgcttctggccagataaggatttgagctatgaccatttggcttctggactgaagttagccttggagaaagataagactgccctcgatgcagaccgcctaaagaactacaatgggccccagctccgccaacttctgaactggccacgaccactgccaattgaggaggaaagagtacgcctcctccatgaggttggactggaacttgaaagaaactttggaggtcaggctgctaatctagtgaagtctgctggaaactctgctgcaactctaattgaactcattacccggcattttcctggtttccgggatcattcactttacaagggacaccaggttttcctgtacaagagagctcagatctttgttgctgatttgtggggtgctttcaagggacaaaactacggcgagttccatgacatcaattccatcaccatatttgctgactacattgtccccgctgtcctgagggagcttggcatactgaaatatggctcgaacttatcttgctcgattgattcaaaccacgagatcgtgcctggaagcgaggaggaagtggagatccgtgcttgctccatctatgcagtggaaaagatgagggacctgatcggcaaaaagtttggaaagcagcttctgagcattgacattgatctctggctctggtcgtgcggcgtgcagaacatggcgctgtcacatcaccgcaccctgtcgatttactactgaggcaagcaggcaccaggcaggtattcagctgcaggggctgctggtgctggtgccgtggggagcgcgtattcagtcattcagctgcccgagcgttgtcgtggaactgtaacagctatagttgtcgaaaattttgtccccttgagaatgcacaaaaaggtgcaaggtattgtagggtcgtcgcattaggatggacggtgctagtagtttaacatttaaagactagaacagctgttgtttcagatgaattgtactcgtatggagtggatgctgctgctctccagattgatctcgatggatga

SEQ ID NO: 4806 - DNA, 295 bp, Setaria italica
  Peptide Sequence Number=SeqID_70780
tgggctctttcccgttccgtaacggcttggcttgctcgccagtcgccaaagtgatttgccaacgcagcggcagcgccgccgagcacgaaaccgccgggagcttcctccagacctcctcccaccgctccggagtgcgctgccgccaccgtcgctctctgtcgtagggggcggagatccacccatccattcattcatccgaggcgcccattggtctcctctttgttggcagggcatcaacactttcctgaatcaatgatgtgctggggtttgctggtgttatcactacatgctcttt

SEQ ID NO: 4807 - DNA, 1780 bp, Setaria italica
  Peptide Sequence Number=SeqID_70781
cgaagggtccggttacatcagtatttgcctgcacttcaggtaagttctaaacaaggacgctcacacatcaaagactcatgtaactactgcctcctgaaacgggaagagccagggtcagctataaacaagaggaagtagctaggggcggtaactgaaagtctgaagcaacctcctgctaactactagtggtcagatttgttgttattttttccttgctgtcctatgacgtataacccactggggttaaaggttaaccccctccgttggtcaaaatcaaaatcaattaacccaccaacactgactgcctgctagaaccatctgcgcaatctggactcaaatgacctccggggtctattgtaccttgtcttagctaatccgctatcactaacactaccacccacaacatgatcatgagcttctgaaaattcctctgaccatggttctaggggaatatgactgtcatcctttgctttcctcttttgcttctcgagctgcttgacgttttcagaaatttgatgaattgtcttgttaatcttggtaaatctccgctccataggctccacaacatgggaaactgtatattttacgtcatcaaccatgatttcgccgctccccaacacaacatcacgaacgctctgaggaaaactcaaccgcctgtctttggtaccaggaggagtttgcaatactgttaagctgtcaatccctcctccgacttcttcaggatctggagctcccagagaggcataatcagacatgacagcaacattgcaaacacttctttccccacgtctgtaaggtttagctggaaatactttcaaatgaaccacagctgcaacccccatctcaaggcatataatgtaatcctggatacgtgtttgcaatctttgtgccaaatgtcctttaaaaagcccagttgagaaaagaaatgcaacagcaacaccttgccaccaggtcaagaatacaatagatttgaaagtaagaaacttagacagaggtttaataggttccagcttctccttggtagcagtatagaactgtataaggcaatataacgcccatgtctggctgaaatttagtacaacagccaaatatggatacccatatttccatgcaaactttccttctccatagattcctagaagctccatgaatattgccaagacagcacaaataggcttaaggatcatatattgaacaataccaatcttcacagcatggtagaagtcgggaccaaggtaccaatttctcatgaagcagttcaatgggaaaggatgcttcacaatgccataatcataatcataatcatcatctagcagaggcgagctctcactgatttgaagccgaccctccataaacctaatggtactttcctccccacctaagcatgctatcaaatatctctcgaagcaatacatggcaaatgcctcgtaacagtcccgcatcagttcacagatgaatgcaacattcgaattcagtaatgagaagaatgattgaacagcatatactggaaccatcagaataaggccaatcatgaatttttgctcctcaggttgatggtatgcacacagatgctcaaaggttagaaacaacgacagaacaagagcaacagttacagatgttcctgcactcaaaattggccagcctggtaatgacttcgacgcagaaacaaagccaggagagaacatgttccctgatcgagccaaacaactgctcacatgggtcagcaccaaaatgaacggatcactatttttcagtgccatgctgttggaagaggtaatgg

SEQ ID NO: 4808 - DNA, 673 bp, Setaria italica
  Peptide Sequence Number=SeqID_70782
tgcagtggccctcaagttcaaagacaaggttctcttccattaaccgtgagacgatgtattcacggaggaaaccattgacttggcaccgagacatcctcatgtaatcaacacttgttcttggcgcctggatcatgcttagattgacgatcttggaaaaggagctctccccgttctcctctgcagtgttttctttattgtctctagagtatccctccgctatccaccgcctcaccaaacgcgtccgccggatggtgtggttcacagggaagattgtcaggtagaagatacatggcttcaggtaatccggacaggaacgaaagtaggaaagcaaccaggaaaacgtgccttctagactctgtgtggtaactggtgcgttggcctccaacttcgacacaaggttatcttttacttctatgtcgcgcaccatcctccatgactcagctacagcacatatgaccttcggaagtcctccacatttctgtactaagatatcccttgtttgctcattccgatgctttatttcctctctgtcatgactccaatcatactccttattcttagttactacccggttgaagagttcaacggcataacgaacttctagacctttgacattccgcaccaagttcctgtctgttgcacagtgattggcaacattttcttcattggtaac

SEQ ID NO: 4809 - DNA, 448 bp, Setaria italica
  Peptide Sequence Number=SeqID_70783
acacatcagtgtttattccgcgtggctctatggttgtagagtatgtgggtgaaattgtggcagcgggttgccgccaaaagagagatcgaataccagtctgggaaacgactacaatataagagtgcctgttatttctttaagattgacagggagcatattattgatgccacccgcaaaggtgggattgcaagatttgtaaaccattcatgccagggcccaaatcagcttattttttcaaatgaacccttttatattcattcaattctctcaatctgtgttggatcagccaaactgcgttgcgaaaataatctcggtcaggaatgagaagaaggtaatgttctttgcagaacgtcacataaacccaggggaggaaattacttacgattaccactttaaccgtgaagatgaaggccagaggatcccttgctccttcttgtcagtattctaa

SEQ ID NO: 4810 - DNA, 3192 bp, Setaria italica
  misc_feature (3146)..(3192): n is a, c, g, or t
  Peptide Sequence Number=SeqID_70784
tgagaaattaacatgccaatgcttaagcaatagaattgcaggaagaagcttatctcaagcttctcgttgtaaagatgtctctgataaagtaatgaaccagccttctattgcaataacggagaggctgaagaatatatccgaagcttcagtggctgatgatagttcgtccaaagccgtaacagagagaaagggcccttctaaagattctgtagtatctaaaggacaaccaaagtttggtttctcttctggatcatcaagcattgtggttacaaagtttcagatgtcacctgaagttcacaaagtgtcatctactgctaaacataggaaacataaaaatgtatgtgatgaaggatcaagaattgagaaatgttcagcatccagctatgtgcctgccagtagtacaggatgtgaggaagccctaaatagttttaccagatctcagttggctccatctcgagtgaagcgcaagggtaatcagatttctgtgggaagtagactagaggaaaaggacaatgaggagctttgttttgggctgccaaaaagaatgagaacattgaggtgctctagtaaaaattctgaatcagaagattgtactaggactagttcccagtcgtcccagaaggggggttgtcaaccacaaaatgaggttaactcattttcttgcagggtgttgagaaccaagcgaaaacatcctaccatgcaactgaataagcctgtgaaacagcttcatagccagaacaaggttttcaaaggtgatggcaagctaccagataccaagggaaatttttttggtggattagattcctttgatagaaaaaaacaagtagaggatacgactccgggtagaacaaaacatcaccaggaagggagtcgagcatttgtccgcaaactacctaaatatgtgtctctaaactgcattgttaatgaacctaacagtgaagatgcttgcagtgggagtgctggaattgattcaagtttaattgccacgggaatggcaaatgataaccgaaaatctcccaaaatcgttccactcagtctggttcttaaaaaggctaagagatgtcattctgttaaactctgtaagaccgaaagcacccacttgtatgaaaaaaaagggctcagattgttctgtgaacagctcatcagattgttctgtagataagtgccccattgatgatgaaggttgcagtccacaagctgaatatgaaatgcagggttccaaaaggagtaggtattcatctaatggtttgaggtcacattttatggctcactgcaaaagaccatctggtgttcttggagaagatgatcctcttggtctaaaagatatggaaacaaatcgcctgtcaataacatcatcaagaagtaatgggaccaagaatcgaagagcaagtgtatcccttactaggattaagaggcataagaaatttgcaaacaaatcagcatgctattccagcagtggcaaagaaaatgctgtgctaacccatgaagaaaatgttaggagagacagtggaagactcagcttagatgctccatgctgcgtttgtggaatctcagacccagagccttgcaatcaatttatagagtgctgcaagtgctatatcaaagtgcaccaagcttgttatggtgttctaaaagttcctagaggtcaatggttctgtagaccctgcaagactaataccctgaacacagcctgtgtgttgtgtggttatggaggtggagctatgacaagggcactgaaaaccaagaatattctgaaaagtttgctcaaaagtttgatgactacagcaagatcagaaaaaaatgttgattcattaagaaacggaaggagtgagtgtacaagcctgcgaaatccagtagacagtgcacgtggggatagcattgcgaatggggagaacattaccagcaattcctggacctctattaatcacaattccagtttacttggaccacgaacaatgcagtgggttcacatggtctgtggactttggacacctggcacaaaatgcccaaatgccaccacgatgagtgcttttgatgtatcgggtgcttcacctgccaagagaaatactgcatgttcaatatgtggcagaactgggggctcatttattaagtgccgagatgtaaattgtttggtgctctttcatccttggtgtgcacatcagaggggtttgctgcaaagtgagcctgaaggtgagcgcaatgaaaatgttggcttttatgggcgatgcatcgatcatgctaatgatttttctagtcgcattaatcctaaggaatgcttgagaagcagcagctggacatgcgcacgtacagagggttttaaaggtcgaaagggagaaggctttcatggtagtagtcacaagaaatctgaagagtacagtggtgagttcagtgtttcccaagaacagataaatgcttggttacgcataaatggttcgaagcctagcgggagaggacagaaggaatacatccattataagcagttaaaaggatggaagcatttggtagtgtacaaatctggcatacatggacttggtctctacacatcagtgtttattccgcgtggctctatggttgtagagtatgtgggtgaaattgttgggcagcgggttgccgacaaaagagagatcgaataccagtctgggaaacgactacaatataagagtgcctgttatttctttaagattgacagggagcatattattgatgccacccgcaaaggtgggattgcaagatttgtaaaccattcatgccagccaaactgcgttgcgaaaataatctcggtcaggaatgagaagaaggtaatgttctttgcagaacgtcacataaacccaggggaggaaattacttacgattaccactttaaccgtgaagatgaaggccagaggatcccttgcttctgtagatcaagatactgcaggcgttacctcaattagtttactattgtgccatcttactgtgtaacatgtctatatatcctttatttttcatcctttagaacacttcattgcatgtctgggagaacaataaactgcttgatgtatataaactctagggacttgcatctggcagtgccagtttatcttttgtgaagccaactgaactatctgctgtatgtgcagtagtaggtctttcatctgacgcaaaannnnnnnnnnnnnnnnnnnnnnnnnnnnnnnnnnnnnnnnnnnnnnn

SEQ ID NO: 4811 - DNA, 1130 bp, Setaria italica
  Peptide Sequence Number=SeqID_70785
tttttttttttaggaataaattacggaaacgaatgcttcattgcatgtaagttcaaacatctcatcatagtttacaggattggtaattctaaataatctgctaaactaaaacaaagatacacgattttctcaggaagagagcagaatgtcattgaactgatcaagtccacctatttttcatgtgtctctctctgttacaaaacttgctgctaacagcaactacagttcttgtatacatttaatcatttatctttggctactacattttatacattttattacagtgagatgccgcaacattatgcgaccacctataaagtcctaagacaacaaaagatgatggtacacgtatgtacagcgaacttattgttcgattgctgtctatgatcaatgaggtcagcacgatcagcagatcttctatcagtcaagtattagaatcagtggctcctgggcagagcatgacatgctttgtcatggaaagcagagactgtctgactgacctgaagcctgaacacatcctagtcgatcctgcatcaacctaaaaacttcagcagaaactacctgaggattgtttcatctcagattccttggaaccattcagcttgctctggagtacagatcgttgctgttctttagctccttgtgctaaagaaagcccatgcgcaagccatttctgtatcacaatttatacttggctctggcatatcaacggcgtaatcatctggaggctagtccatcagcaccgtactttcagaatgttgcatgtacagaggttcccctgttatgctagttgaagaagtatgtcgaattcagaacttccctcacatcaaagttcccttgtggcggacagggtggaaattctagtgtaggaaacgacgtctgaaactcctccagcaaattttcaagaattggcatgctgtaaagctccacaaattgttctctcaagatctgattcatttgatcaacatcacatgcatgcaaccaaaaatgagtcatgcacccctgcaaaatcaagaccagcctccttgcaagcaattgccgtcatcatcatatgtgaactatccaggagtgcacaaaattcggtaggaaaagctgccttttgccgttggactgcaatcgcatcaccctca

SEQ ID NO: 4812 - DNA, 513 bp, Setaria italica
  Peptide Sequence Number=SeqID_70786
cgacgagctgcgcgccatcgccgaccggatggcgcgcgcgggctactcccgcgagctcgccgacgcctactgcggcgtccggcgcgacgtgctcgacgagtacctctccgtgctcggcgtcgagcgcctcagcatcgacgaggtacagcgcatcgagtggaagctgctcaacgacaagatgaagaagtgggtgcacggggtcaagacggtcgtgcgtgtcctgcttgctggtgagcgccgcctctgtgaccaggtgctcaccgcgtccgatgaccttatggaggagtgcttccttgagtccaccaagggatgcattatgcagattctcagctttggggatgccgtggcggtctgcccccgctcaccggagaaggtcccccggatccttgacatgtatgaggcgctttcagaggtgatccctgaaatgagggacttgtgcatagggagttctggggatggtgtgatcagtgacgtgcaggccattcttgataggcttggggatgctgtgagggg

SEQ ID NO: 4813 - DNA, 818 bp, Setaria italica
  Peptide Sequence Number=SeqID_70787
tgacgtccctggtggtgtcgatgatgccgttcatcatctccgtgtagcgcgcgagcaccagcggcccgcgcacggcgacggcctcgtacgccacgaggttgcgcaggaccacctcagtggtggcgtccagcgtgatcacggggagccacagcgtggccgccgccgcattgaaggcgatgccgtggatgccctctgtcgtcggcaggaaccggacgccgcacttggccagctgctccaccgacgggatcttgatctccttcgccagcggcgcgctgccggcgacgccctccgtgttcatgccgctgagaattccctccacgtccacggacgccaccagcttcctcaccaccgacaccacccccgggagcgccggcagccggcgcgtcatcttcccgtagagcttcgacacggacctcatcggccaggagacaagcaggctccccatgttgaggtgagacgacacctgcgagcaggctttcttcaccgtgttctcgtcaccttgaggcggctggacacctgcaagctctggcgccgcgtcgagcagctgctcctctacatcgtagagggagcggtcctgggcctggtcgtcctgatgggccgtcggattcttgccgccgccgccgccggtgttctcgtcgaagacggcgccgggcgggaacgaaggaaagtaggagagctccagcaggtggacttcctcagcgatggtgacgtctgcacgcatcttgatgggtgacacgtgcttgataaaccggtcgaggacggtgcacatcatggcacgggcggtggtgacatgctgctcggcggcagtggcgccggag

SEQ ID NO: 4814 - DNA, 525 bp, Setaria italica
  Peptide Sequence Number=SeqID_70788
caggtcaaggctttagtaggtgatccaactcccggcaacaactccagcttccacttgccgtggacgacgattcacctgtgaggcagattccagcggcttgctcgagcaaggtcacgatgggggaagccttcttgagctctgtggcagcggccggcggaggagctgtagcctcatagctctgcctgactagcgatgtctcacggccgctccaagagtgattctatcagagtgctcagaatggatagtgtggattccttcttccgccgaggtgccttgctcatgctcagcatcaacaggatgccggggaactgaaggatcagaacagcaccagtaagatgccgtcctgtcctaatgagcttccatgctcattgaagcgagaggttcaagtccttgagaagcgactaaatgatcaatttgtcatgcgccgtgctcttgagaaagcactgggttacaagccttgtgctattctttcatcaaatgagagctgcattccaaagccaacagaggagctaataaaggagattg

SEQ ID NO: 4815 - DNA, 300 bp, Setaria italica
  Peptide Sequence Number=SeqID_70789
gcaggcagcctgggccacatcttgcatttgcatgaaagtgtgtatatgacgaaggatatcctctggaagctggacctgggatccccttatttcagcataatctgaatcatcaccttgttgacaaggtgaggcctttatttgagcggccaaacaagtcgacccatcaccggttaccgggcactgcggctgcccctttgcggacatcgcgtccatctcctctagcacccccatggccgccggcccccaaatccaagccaagcctgctgaatcgaggtctcctctctcttgccgatccggccg

SEQ ID NO: 4816 - DNA, 232 bp, Setaria italica
  Peptide Sequence Number=SeqID_70790
gacccggcctgcggcccgctcatcgacggcgtcgccatccgcgccctgtacccgcccacgctcgtccgcgggaacatgctcaagaacggcgggttcgaggaggggccctacttccttcccaacgcgtcgtggggcgtgctcgtgccgcccaacatcgaggacgaccactcgccgctcccggcgtggatgatcgtgtcgtccacgtacttgacggccttggacgacacgatca

SEQ ID NO: 4817 - DNA, 428 bp, Setaria italica
  misc_feature (423)..(423): n is a, c, g, or t
  Peptide Sequence Number=SeqID_70791
cgactcgcagccgcaaagcaggggagagggagtccttgtgaacagaagagaagcaccccggcagcaggaggaaggaggagaggcatgatgcgccgcgtcgcgctgttgctgctcgtctgcgcggcggcgcgcgccgccgccgtcgtcaccgacggtaagagctccgagctaatcatgctgtagtacgtatcattatatatctcgttctgttatgctgttgctcagttctcagtagatgctggtacagcacagataggactgagtgagttgtcctgtccttaacattaacaaaggggcctctgttcagacttcagagcttccaagcccagttcccggccggaatagttctcaaagctaaccaacatacgattcccgcgtgtccatatgctgagctgtcgttgatcgtaaacaccacgaaaaacntaata

SEQ ID NO: 4818 - DNA, 1502 bp, Setaria italica
  Peptide Sequence Number=SeqID_70792
gtgtccttcgactcgcagccgcaaagcaggggagagggagtccttgtgaacagaagagaagcaccccggcagcaggaggaaggaggagaggcatgatgcgccgcgtcgcgctgttgctgctcgtctgcgcggcggcgcgcgccgccgccgtcgtcaccgacgggcttcttccgaacggcaacttcgaggagggcccgcccaagtcggcgctggtgaacggcacggtggtgcgcggcgcgaacgccatcccgctctgggagacgtcgggcttcgtggagtacatcgagtccgggcacaagcagggcgacatgctcctggttgtgccccagggcgcccacgccgtgcgcctgggcaacgaggcctccatccgccagcgcctcgccgtcacccggggcgcctactacgccatcaccttcagcgcggcgcgcacctgcgcgcaggccgagcgcctcaacgtctcggtgagccccgagtggggcgtgctcccgatgcagaccatctacggcagcaacggctgggactcctacgcctgggcgttcaaggccaagttcgacaccgtcacgctcgtcatccacaaccccggcgtcgaggaggacccggcctgcggcccgctcatcgacggcgtcgccatccgcgccctgtacccgcccacgctcgtccgcgggaacatgctcaagaacggcgggttcgaggaggggccctacttccttcccaacgcgtcgtggggcgtgctcgtgccgcccaacatcgaggacgaccactcgccgctcccggcgtggatgatcgtgtcgtccaaggccgtcaagtacgtggacgccgcgcacttcaaggtgccccagggcgcgcgcgccgtggagctggtgggcgggagggagagcgcgctggtgcaggaggtgcgcaccgtgcctgggtggagctaccgcctctccttcgccgtcggggacgccggcgacggctgcaccgggtccatggtcgccgaggccttcgcggcgcgcgccaccgtgaaggtgccgtacgagtccaaggggacgggagggtacaagcgcgccgtgctggacttcaccgctatcgccaaccgcacccgcgtcgtgttccagagcacgttctaccacatgaaggccgacggcacgctctgcgggccacttgtcgacgatgcctcgctcgtcgggctgcgcaagaagcccgccgccggccgccgcctgctgctgtaaggcctttgttgatttgcacgcgcctcggtcgcgcgcggtgatgtaatatggtgggcgtgtggtgggtctagtactggtaggcgttttggtttggtgtgcgcttggtatatgagatgtgtgccgtgccgtgcgcgccctgtggttgcggttgcagtggcgcgtgcatggagtttttcttgtgaagaagaagggaggcggtggcctggctcgagggtttataagacttttgagtaactttaacgacacgggattaatggcaaatgttactagtaaaattgttccaaaaaaaaa

SEQ ID NO: 4819 - DNA, 878 bp, Setaria italica
  misc_feature (86)..(86): n is a, c, g, or t
  Peptide Sequence Number=SeqID_70793
atcgggcgccgctcccccgagaagctgttcaagatcatcgacctgcacgacgctctctccgacctgttgcctgacatctctgacanctttgcagcctccaaggccgcggaatcgatatacgtgcaggctgctgagatcaggtcgcggctggcagacgccgtgcgcggtatactctcggagtttgagaacgcggtgctccgcgacccgtccaagactccggtgccaggcggtaccatccacccgctcactcgctatgttatgaattacagcagcctcatttcggactacaagaccacgctctctgagctgatcatctcgcggccatcagctagctccaggattgctactgagggcaatgaggcagcaccggccttccctgatcttgacctgcctgatcctgacagccagttgccccttgctgctcatcttatctggattattgttgttcttgaacacaaccttgagagcaaggcatcactctacaaggatgccgcactgtctcacctacaatagatgcacaatgtgcactatatcgtgcacaaggtaaaggattcagctgagcttcgggggcctaattggggatgagtatttgaggcgactcacagggaagttccggcaggcagccacaagctaccagcgaactgcatggttgaagatcctgaattgtctcagggatgagggcctccatgttagtggtggcttttcgtctgggatatccaaatcggcactaagggagcgattcaaagcattcaatgctgcatttgaggaagcacacaggatccagtccacctggtatgtgccagacacacagctgagagaagagcttaggatctcaatttcagagaagctgctcccagcatatcgatccttccttggaa

SEQ ID NO: 4820 - DNA, 289 bp, Setaria italica
  Peptide Sequence Number=SeqID_70794
gtcggcgtgggcgtggtcgaggtagaggaggtagggtgtgacgcggccctgggtgtcggcgtagttccggcggcggaggacgcaggcggggtcgatgccgtaccccccggggggcgcgaagaggagcggcgcggtggcggagaggtcgggctcgtagttggccatgacgaggcggcacatgcggggcacgggctcgaagtcggcggtggaggcgaggccccaggtggcgctgtcggactcgccggtgtggaggcagcgcttccaggcccatcgcgcgcaggccaggcag

SEQ ID NO: 4821 - DNA, 378 bp, Setaria italica
  Peptide Sequence Number=SeqID_70795
attctgccatccagacaaaggcttcaccaaaaacataggcaggtagaagccctgtggacactgtaacctaaacttaaagcaaaggatgcataggaaggaatccactctgtttttagcataaagctgttggttgataaaatgacagataacatcatagttccaccagacatccattaagcccaccttgtacaaagaattgactgataatagccgtgttgagttattcgacaacaactaggtactcgtggccacctccacatctgctttctttaagctgtaaatgaacagggacaaacttgaaagtaataaagtcacaagctggccaatataaaatcccacttttgatggtcggaactaggtccctcttcaatcttgcaa

SEQ ID NO: 4822 - DNA, 1098 bp, Setaria italica
  Peptide Sequence Number=SeqID_70796
aaacaaatgcattgctatatgttacattacaagcaaattcgttgcaactttagaagtgagctttacaagaaacaacatgatcaatagagtttggtctcatttgtcacaaaaaaataaacaggttcacctaatcaccttacatcaccataactagatacagagaatctagttcaaaaaagctatagcttttgaggtgtaggaagattcaagacatgctagtataattctgccatccagacaaaggcttcaaccaaaaacataggcaggtagaagccctgtggacactgtaacctaaacttaaagcaaaggatgcataggaaggaatccactctgttttagcataaagctgttggttgataaaatgacagataacatcatagttccaccagacatccattaagcccaccttgtacaaagaattgactgataatagccgtgttgagttattcgacaacaactaggtactcgtggccacctccacatctgctttctttaagctggccatatatgttatatagatggtccaaagaaacgagaatgaattgctcaccagtggctgtaaatgaacagggacaaacttgaaagtaataaagtcacaagctggccaatataaaatcccacttttgatggtcggaactaggtccctcttcaatcttgcaatgatctcagggacagtctcaccttgtagtcctgcattatacgagaagaaaactgagttgataattggtccatatactgcttgccctagaaacatcttcttcaatgtgttcactacatccttttttgggaacactttcgagataaagttgaaccaaagatggagggtaggtcctgagatcagcaacccataactagccatacgcatggtcctaagaaaatcaagtgattcctcaggaccaagtgtgaacatctgggaggtgaggtccgcggcggtgaagatggtagcggcggtgacgctcttggtgagcacgggccgcgcgtccaggaggccgaggtaccacccgacgacgcccgccccggcggcccctaccgcgccagtctttctgctcgggggcccgaaggaggagcccacggggcccgggcgcgccggcggcagcg

SEQ ID NO: 4823 - DNA, 379 bp, Setaria italica
  Peptide Sequence Number=SeqID_70797
tttaacaaactaagacaaactacaagaattaattctatttcagacgatcgccgagtatgccaaaaatgtttaccagatccctatcccaagaatgttttacaattcatttacatgcaggatttccagaaacgaaattaacaggaagggcgccttcttctattggaacacagttttgttgcacatggtaaacacgtgaaaagctgttaatgcctccaccaggcataacacgagagcccagcaagccaacaccaaatacatgtctactgtgtacatacttccacagagctacatcagctaccttgttaaatgttacaaaaggtcttctatatggcctgcaggctgcaaccagctacagttcccccttttacttgacagtatg

SEQ ID NO: 4824 - DNA, 1600 bp, Setaria italica
  Peptide Sequence Number=SeqID_70798
tttttgttgtgcatggtaaacactgtgtaaagctgcaaatgccccctacattcaccaggcgtaaaaagagagcccagctagcctacacaaaatacatgtgtactgtgtacatatatacttccacagagctacatcagctaccttgttaaatgttacaaaaggtcttctattacccagggtccggggctatatgcgctgcagttcccccatttacttgacagtatgagatcaactgaatatacatggtcatatctgtgctttactcactctctgaccagattatttcccaaggtccacctttgctccctaacctccagaaaccagcaattgctctcaaactcataaatagagtaagaccagcccagatgccaccaagaccaaagttaggagcagcaataagtacgaatactgatgagacagcccccgcaaaaaacgtggagtatgcagcataggcaaagtcagaaacaccatagtagagcccatcggccacaaatgcaatagcatttaccggctgagaaatagtgacaaaccaaactccagattgggcaacgtccaaaactgcaggatcatctgtaaacagcaaggacaaagatccaaacccaacaaataaggtagcagcaagcacaacaccagtcacacctccaacctgcaggattctgtatacaaccatgcgggcttgcttgtagttccctctcgcatattcgctagcaagtagagcctgaccagcaagggctagagcatcattcagcagagaaattgttaaccacacttgcaagcatatctcatagccagccattggaacaggcccttcccttgcagccagggatgtagatagtgtcagtgtcaggagtactgcaattgttctaccaattagcaatccaccagatttcaggtaacgaattactccatctccaatgatattccatgaaaacaggtctacttcgttattcagcttccaaaggaggatgaatgcagtcaaatactcagaggacactgtcgccaaggcagcgccgcttactcctagaccaagtgggaaaataagtacagcatccagtattgcatttaataggttgccagcacccacagcatacaatggtgtctttgtatccaggaatccacgaaatgcaccctgagctgcaagtgccactataattggtggagcaccatatgccctcaacgtaagaaattgttctgctggtgctcgcattggtgaatcgacgggtataccaatgatgttcatcagtgtcccagatccaacaatcagtgccaccatctccaacaatccaatgccagcagctagagccaaggatgtcgaaaccgccggaagaaccttcttttgttggcttgccttcttttgtggcgtcaaaaattcatctctttgtcctgtgatactagaactattggcatcgacagcctgctgctcagcaacaaaagatgtggtgacattaagcaatggcacattgaaaagcttggataccagattgaatacggaagcagatgcaccaacagccgcaagttcagccgagccaatatggcccacgaaggcggtgtcgacgagcgccgtgattgggtcggcggcgagcgcgagcacggcgggcac

SEQ ID NO: 4825 - DNA, 384 bp, Setaria italica
  Peptide Sequence Number=SeqID_70799
caaaaacccaaccatatgatgggcgtactggtcaaatctaaacaactgggtttaggtatgctatgaaatacacagttgaaccggaagatgcaatccatgcaacagttgaaatctattgtacgatgttgccaaatcttagcagaggattttgaggctactagtatatgattggatcggaacatgcaatgcatgcagcggttatgaacatctattgtaatttgtaagccactgccacaatttgcagttatctagaccgcaagaaaaaaatggttactatttgaacgcattcatttcaaacaataagagttcccctattgaaaagttagcgggcatgaggcaaattggtacatagttaatgcaagaccacagttcgcccccttcaaa

SEQ ID NO: 4826 - DNA, 369 bp, Setaria italica
  Peptide Sequence Number=SeqID_70800
agaaagaaaatcgagattatgaataccatgtcccaagatgaatttgttgcctacataaggaggcaaagcagttgtttctcaagaggtacttcatcatacaggggtgtgaccaggtgatgatccttctttgctaaatgaactaataaccatttgatatcctttgaatggagcgaaaaaaatgttttgcttaactagggacgtttgaatggtctgttgcgattttgcaactttctctaatcactttcttaccaacagacgaaaagacggtaaatggcaagcacgaattggtaggattggtgagagtagagacaccaaagacatttaccttgggactttcgacactgaagaagaggcggcatgtaagtcttt

SEQ ID NO: 4827 - DNA, 569 bp, Setaria italica
  Peptide Sequence Number=SeqID_70801
taataaggtgcaaatgggtcacaatacaagacgaataagatgcttaaaaatgcattaggattcatgatatcagcatatgctctggataaagagtcattctcctaatagcacgtccagtcacgtccttaattttccagtgttcttaagctgatccttcattaatttgtgcatggaacttggtttctactcttggctgctgtttggtcttcagtgtacttaggtgagtggtgctactcgtggaaggggctcatttggaacacaaaactgctcaagttttaacttcttttctggcatcacaggcagctatgttactgaagagcaagctgcaaaggcacatgatttggcagcccttaaatattggggcacaggtccaaacaccaaactgaacttcagtatttctgactatgagaaagaaatcgagattatgaagaccatgtctcaagatgaatttgtagcctacataaggaggcaaagcagttgtttctcaagaggtacttcatcatacaggggtgtgaccagacgaaaagatggtaaatgtctttggtgtctctactctcaccaatcctacc

SEQ ID NO: 4828 - DNA, 1053 bp, Setaria italica
  misc_feature (931)..(931): n is a, c, g, or t
  Peptide Sequence Number=SeqID_70802
tgggtggaggagctagcgccggcgcaggcgggggaaggaagctggtggcggaggccatgcacaagtacgccgcgccgcggtcgtcgcggttccacggcgtcacaaggtgcgggccggcaaccctggggaataggggcgcggtggccgcggctgtcccgtccgggtgcctctcgttttggtttggattgattaggttgttcgctgctgctctggccgcacgctgaagtggagcggcaagtacgaggcgcacctctgagacaaaaccagccaggtcgagggccgcaagcgcaagggcaagcacgatttctgactatgagaaagaaatcgagattataaagaccatgtctcaagatgaatttgtagcatacataaggaggcaaagcagttgtttctcaagaggtatttcatcatacaggggtgtgaccaggtgatgttccttctttgctaaatgaactaataaccatttggtatcctttgaatggagcaaaaaaatgttttgcttaactagggacatttgaatggtctgttgcaattttgcaactttctctaatcactttttttaccaactgacgaaaagacggtaaatggcaagcacgaattggtaggattggtgagagtagagacaccaaagacatttaccttgggactttcggtgagttataattttctaccttgttgaacttccaaagctttctgaatgatagtcactaggcactatgagcttgtttctgtcaactagaaaggtactgttgattgatatttgatgtgcaattatccttaagtaaaattggccatggcttgcagacaccgaagaagaggcggcagaagcttatgacatagcagcaattgagcttcgtggtgttcatgccgttaccaactttgacattagtaactactgtgaagatggtttgtgaaaactagaaggcccgtnagaagtggcgaagctggaagttccatcggaggtcatgaagctcgctggacaatagacactagaaatctagaatagcaacatgtacataattctccatttcatttccttgtcataatatttca

SEQ ID NO: 4829 - DNA, 445 bp, Setaria italica
  Peptide Sequence Number=SeqID_70803
aaagtaataaccgacgccgcggtcttcgcggttccacggcgtcacacggtgcgggctggcaaccctggggaataggggggcggtactgcccgtccgggtgcctctcgttgtgctttggattgattaggttgttcgctgctgctctggccgcaggctgaagtggagcggtaagtacgaggcgcacctctgggacaacaccagccaggtcgagggccgcaagcgcaagggcaagcacggtatgcgcgctaccaacctcaactccgagctctagctcactgtaaaatcttctgaatgtttcaaccattgttgtatatatacgagatgaaaccaactctgcagtttaattaggtgcgtcaatgccatgtactaaacggcaggatcagtttccagattcatttctttttgctttttgcagcagagtagctaatcagtcgagtacatcata

SEQ ID NO: 4830 - DNA, 417 bp, Setaria italica
  Peptide Sequence Number=SeqID_70804
ttttatttatcttgaaataggatatatagcaccgcaaaacttgtgctttatgaggtacatgtattgtgctcaaagttatgtttctgtaatctttatgattttctatcagaaatgttaatcgccataataaggtgtaaataggtcacaatacaagacgaatttgatgcttaaaaatgcgctaggattcatgatatcagcatatgctctggataaagagtcattctcctaatagcacatgtccagtcacatccctaattttccagtctttttaagctgatccttcatttaattgtgcatggaacttggtttctactcttggctgctgtttggtcttcagtgtacttaggcagctatgttactgaagagcaagctgcaaaggcacatgatttggcagcccttaaatattggggcacaggt

SEQ ID NO: 4831 - DNA, 510 bp, Setaria italica
  Peptide Sequence Number=SeqID_70805
cggcggcggcggtgaggaggaggaaggagtggggtgggaggagctagcgccggcgcaggcggggaggaagctggtggcggaggccatgcgcaagtacgccgccccgcggtcgtcgcggttccacggcgtcacaaggtgcgggccggcaaccctgggggaataggggggcggtggccgcggctgccccgtccgggtgcctctcgtcgtggtttggattgattaggttgttcgctgctgctctggccgcaggctgaagtggagcggcaagtacgaggcgcacctctgggacaacaccagccaggtcgagggccgcaagcgcaagggcaagcacggtatgcactctaccaacctcaactccgagctctagctcactgcaaaatcttctgaatgtttcaaccattgttgtctatataagatggaaccaaccctgcagtttaattaggtgtgtcgatgccatgtgcaaatgcattgccttaggcaaacagtggcacatgtactaaacggacggtt

SEQ ID NO: 4832 - DNA, 966 bp, Setaria italica
  Peptide Sequence Number=SeqID_70806
ggcggcggtgaggagaggaagatgggtggaggagctagcgccggcgcaggcgggggaaggaagctggtggcggaggccatgcgcaagtacgccgccccgcggtcgtcgcggttccacggcgtcacaaggctgaagtggagcggcaagtacgaggcgcacctctgggacaacaccagccaggtcgagggccgcaagcgcaagggcaagcacgtgtacttaggcagctatgttactgaagagcaagctgcaaaggcacatgatttggcagcccttaaatattggggcacaggtccaaacaccaaactgaacttcagtatttctgactatgagaaagaaatcgagattatgaagaccatgtctcaagatgaatttgtagcctacataaggaggcaaagcagttgtttctcaagaggtacttcatcatacaggggtgtgaccagacggtaaatggcaagcacgaattggtaggattggtgagagtagagacaccaaagacatttaccttgggactttcgacaccgaagaagaggcggcagaagcttatgacatagcagcaattgagcttcgtggtgttcatgccgttaccaactttgacattagtaactactgtgaagatggtttgagaaaactagaaggcccgtcagaagtggcgaagctggaaggtccatcggaggtcatgaagctcgctggacaatagacactagaaatctagaatagcaacatgtacattatttctccatttcatttcctttgtcataatatttcaccctccttttggtattcctgttaccttcttttttcccctttcgtgagttttcaccgcgccttgttgtgtaagccagtatttactggctctgaaggacagtgtgatgttgtattccagcctcaccaaaaggtcttactaacctttgatgcagcagcgaaagttacaatgtcgtagcttgatggatggttgtttttgtttta

SEQ ID NO: 4833 - DNA, 476 bp, Setaria italica
  Peptide Sequence Number=SeqID_70807
ttcccctggtgatcttcaacggcgagttaggcgaggtggtgtcgaagatctcgatgtggcggtactgttctacattcttacggggagcagccgacacgttcgccggggacttctcgatgagggtcgccacggccacgctggtctcgctgatggccgccggagtcatggcgcggatgccttccggtgtcacccgttcctccttcttggccttgatgtcgtaccggaacacgccccagtaaacatccaattttttcgtatcgtcaggcgtgttggctcggtggaagaagatgacgttgtcgctgccccacgtcggccagccggcgttcctgatggtgaccttgcgctccaggccaccctgcgcctgccgatccacgttcatgatgacgatgtcggtcttcaggtgctcgatctcgccgttccaccggtgaaactggaagttggccaccgccaccttcttcccgaacggcgacacggcc

SEQ ID NO: 4834 - DNA, 766 bp, Setaria italica
  Peptide Sequence Number=SeqID_70808
tttgaattcttgacaggtgatgatatgatatatcgacagcattccttgtccttgtgtgcaaacctcgccttaaatgcttcagaaatcgtctcaagttcttctctttttctctgaccatgttggcccatatattaacaagtttgttctaccaaacctcctgtcagctatctttataagatttccgcaggattcagccatatctgttttcagtgggtactcaactagctaatgaacatagatgaagtcagaaatgtgcatagcggcaaaatagtttggtttacatagcatgaggaactcacaatgaagcaatcttttccaaccaatggtgaccttgcaagttgatcgagtagtgtgctatagtttacctccagatatggtggtgttacactaatataatcaaaggaaggatatttacctgagagacacagaaatagagttggcgaagaggaaataaaaactttaaaaaaaactcgaccagggggagagacgtccccctgattttgtcttaagaagattgtgccacgactcgaacccaggctggctcagcgaactgcttctttggcgtgttctgctgaccagttgcaccgtgagagtgttaagggatccaattaccacgttgctatgatttattatacaattttatcagtttactaatgggaaatctgatcatttatgtccctaagattattaaactaaaataatgcagttgactcttgaatgctaagcagaaattccacaccttacaatacaatatgcagaccactgc

SEQ ID NO: 4835 - DNA, 1354 bp, Setaria italica
  Peptide Sequence Number=SeqID_70809
aataggaaagtaatggaagtgtacaagcctttccaaagaatactatatggggcatcaattagcaaagcaacgtaatctggaggtctctttcccaaggtgttatgaaatgtgacttgatgccgatgcttggaaggcagagggccattttttccttctgggatgtggatcggtgaaccagaatgagagagacgtatgatctctcaatgcaccgagatgactgtatttctatgcgaaggctaggtcagtcatctctgtgcggaagttgagaacttaacctcacccaaatggtggtttgaattcttgacaggtgatgatatgatatatcgacagcattccttgtccttgtgtgcaaacctcgccttaaatgcttcagaaatcgtctcaagttcttctctttttctctgaccatgttggcccatatattaacaagtttgttctaccaaacctcctgtcagctatctttataagatttccgcaggattcagccatatctgttttcagtgggtactcaactagaatgaagcaatcttttccaaccaatggtgaccttgcaagttgatcgagtagtgtgctatagtttacctccagatatggtggtgttacactaatataatcaaaggaaggatatttaccttgagatttttcggcattggccaagaatttttcaacacggagcatatgtatgtgtgacacatcaagaaatccagtacactccagatttggtttaagtacctcagagataacccaaggatccatctcaacaaaatgggcctctgaacatcctcggctcatagcttcgattccaacagatccagtaccactatacaagtctagccaccgacctggtctgagtgaggcaggagaaccaccagctgattgtaaaatgtcaaaggctgctcctcggactacttccatcattggacggacattcctatctttgggtgaaagtaatttccttctacggacttttccacctagcacctgaagcaatttgtgagtctcccgaggctctgccgccttcgccggagcaaccgccgcttcctccgcctcctgccctctccccgaccgccgccgcccccgcctatccctcctcctctcttcccttgggcccttttctgcgtcgtcctcgaagtcgtcggggttgagcccgtaccgctccaggaagcgcctgcgctccctcgccgccgccgcggcgcctgaaggagccgctgaggccgcgacggggagacggcgaacggaggctcggacggatactggcttactagggttcgggacgggaagagacgggaggaaggggtgcgcggcgagagtggaggacgccatcggcgacgagtggcgcgagctcagcagcgac

SEQ ID NO: 4836 - DNA, 442 bp, Setaria italica
  Peptide Sequence Number=SeqID_70810
ccaagggcacaagctgaggtaaaggaattcctggtatgtcatgtttaccaagcagggaagtgtaaatcatgctctgtgactcctcagatgccacttactgctgcagagaagattatggattctcatggtgtggatcaccttcctgtagtctctgaacatgctaatcttcaggacagtggacttttgataggttttgtagacagagaatgcatcgccattgctcgaagagccatggcagtgaaagaatttttcatttctacatatgagatcagaaaggaagagagacctagcacggaagggagatgacacaattcaggaagacttgttactttgcaagctgtatgatattttttagcttggataatggctggtgaagcaagcaaacctggcctgagttcatgtggcatctattctataactggtgaagactcaagagctaagg

SEQ ID NO: 4837 - DNA, 479 bp, Setaria italica
  Peptide Sequence Number=SeqID_70811
cctggctgcctgccaagtgggccacatgcctttgcgggcccacatggcagtgtccgtccgggggccgataaaacgtgggcccacgggcgccgcgcccactccggcggcggcctcctccctttcttctagagggacggctcgaagttgaggcgcgaggtgtaggtagccttgggcgtccagttcctggggatgacgtcccgggccgtgagcgtcttcttggcggacagcgtggccagcctcacggagaagggccccacgagcgggccccgcaccaggcaccacgtggccccccacacgtgcttcatgtccagccactccaccgagttggcctgctttatctgcatggatccaatgtcgccttcgccgtcctcgaactcgacgagcagcgagagccagaagttggtcgagccctcgttcacacggaatgctatgttcttcccgccgtacttgcaggccgtcctcctgtagacgacgttcag

SEQ ID NO: 4838 - DNA, 735 bp, Setaria italica
  Peptide Sequence Number=SeqID_70812
ttggtagtacgaccttggtgggagctgaggcggtgaccaggtgaccaaggacaccttctggccaatcgtcaaggcggtaggagacatggtgtcgtccttgacatgtacactcaatggtatcgtctgagctctaccgatctcttctttgtttcagtcttttaccaagatgaaaaaacaagaagagaacctgataattttctggtactcttggttgcaggtctggcccttgcaaggtgatgtgaccaaaattccagcagatgtctgagcagaacctcgatgttctgttcctcaaactcgattgcagccaggacaacaaggtcagttggattactttgctctcttgtgtattcactgctctgtgctctgtaggatatctggatatggcatgctgaaaaacatcagtacttgctacttgcagcctcttgcaaaagagctctgggcataaaggttgtgccgaaattcaagattctcaaggatgggaaggttgtcaaggaggtcactggtgccaagatcgatgaatagctcatgcaattgaaacagcgaagtgaagctgagaaataccctgagtggcaagctgatatgaagctcttgctttgctaactgttaaacagcaatgtttcaagaccgcctagcttaccaccatctccaaaccaaaataagtgtttctgtttctattgattctcagtccattatagacatcttggcattgtctcctttcttgttcgtattccttct

SEQ ID NO: 4839 - DNA, 263 bp, Setaria italica
  Peptide Sequence Number=SeqID_70813
ccggtggaaatgctaatgccagtgccacctccggcagcagtggtggggttttgcggttggggaagggtgggtggagactctgtcaagcgcgctggtggtgccgagcaaccgcaaattcgttctggatttgacgggcagggcgacatttgaggcagtgcggtcgttccttgagtttgtgctgtggaaactgcacgccggcacaagggctggaggtgatgccagagttggggctggattgcgtgccttgaggcatatgagtgata

SEQ ID NO: 4840 - DNA, 1090 bp, Setaria italica
  Peptide Sequence Number=SeqID_70814
agaaaaaccaggacaacaaagccagtggcagttcaagctgccacaggtaatactgttgtggggcatcgtgctacaccaggtgtggcatttgttccaccaaaacctacttttgtcaaccacaatgatatagcaaagaccgttcaacagtttctgcaccaacctgcaaaccatcctagctggactccaccatcaactgagtacatgcattctcgcttgggctgtcaaatatgcaaagttgctatcactgatacagacagtttacttgtttgtgatgcctgtgagaggggagtacacttgaaatgccttcagcagtatggtaataaaggtgtccctaaagctgagtggcattgttcagcatgcctgacgcagagtaagggcaaacccctgccaccaaaatatggcaaggttacaagaactgttgttgcatcaaaggctgcaccaccaggtggtggagcacaagtttctttgccaggatcagcagaaaacatggccgcaaaggagaatcaccaaaagttggctgcaaatggaaatcttatgaagccaatctccattcaaggtggcagcactgtacacaacattaatgtattggcgctgagtgctatcacggctggttcacaatcacaattagcttctaccttaagacctccaataggaaatactgttaaagctgaaacctcctctaatggaaaggagggaactgggcagcagtgcagtagtatgttacagcctgatgtgaaaccccctcctgataaaaaattgagaagtggttcctctttgaactctgcggggtcagcaaacgatatcatgaatagtgagcaaactgcagaaatttctggtgctgaagcaaagatcaagtccgaagcaaactctgacccccctttgagcaggaatgaggaattggttgatagtagtggaacatctgttgagcaaactaagattgttggttctgaagaaaagcctagtgcacaagcgacctccgagacagataaaatgaaagatagtgaaacaactgccaacactggatcatcattagatcaaagaagaaactttgctactgaagaaaagctcctcagtgaagcaacttctgagg

SEQ ID NO: 4841 - DNA, 949 bp, Setaria italica
  Peptide Sequence Number=SeqID_70815
gctgttccagcaagagcaaccaaacgccgagagaaaattgaaaggtacggccttagatactgagaaccctgatcgcacaaggattccaaaatctccaaccttaacaaaagaggaacaaaagttcaccatcaacaagtaatactgttctaccaaggaaacacatggcggtaggaagttttgaatcaagcatctactaaaattttgaggtgatcatctaacaagctgttctaatgtagtgtcagaaaccagaaaaatattaaatggtggcactttaatagatattatctaatcgcataatagctccataatagtattctagcatgacctagttttgtcagatgttgcctaaatgtcagcactagtaccgtgtgacactaccagaaagtacaattagaatgcatcaggaaagtcaaactagaagtacaatagtgatatttaaatcaatttgatgatgaagataacctcttggggaagttcatgtgcaagcagaaataaagtcctggaccagccaccaacagaaccctggagcaaaaaggcactcccaagagccatcccatcggtgaagttatgaacaccatctgagaaaaggttaaggtagccgaacaccaagttagagtttgaagtagacgaaacatcacttgataatgctttgtcaggggcaggatgattttcagaattagcaggctctccatcagtggccttggtactgccagaagagctcctctatatttatgctgcaggggcatcagaacccaaggacaccaatgaatttcttacgtatagtagcttctgattcatgaagacttccatcaccatcactcttttgatgatttaatttggccttatcactggaatcatgccttttatggtggtgatggtgcccatgacccatgctatgagccccattttgagaattgtcttcaacatacctcacaatcttctcaacgat

SEQ ID NO: 4842 - DNA, 1481 bp, Setaria italica
  Peptide Sequence Number=SeqID_70816
tttttttttttttttccatctggcaaattgttttataattagtaattagtatcaaacatttgatgtgataggaattttaggaggtcctaaagaaccaaacaccccttagcccccatcttccaggctggaactgtccaagaattataccggattggagcaacgcggttcgatctaaagctgcaactggttaaatggagattcagatcattctaccagagaaatgcctagagcgaccagcatccccattgccagggaaatcagctgaactactgagcttttaagggttgttttctggtcgttcatctgcgggaggactcccgcgacagcaatgtaaatgaaaccaccagcagtgaagccctcaatcaaagaagaatgtccagggtcttttcccaacgataatgctagtgctgttccagcaagagcaaccaacgccgagagaaaattgaaaaatagggccttagatactgagaaccctgatcgcacaaggattccaaaatctccaacctcttggggaagttcatgtgcaagcagaaataaagtcctggaccagccaccaacagaaccctggagcaaaaaagcactcccaagagccatcccatcggtgaagttatgaacaccatctgagaaaaggttaaggtagccgaacaccaagttagagtttgaagtagacgaaacatcacttgataatgctttgtcaggggcaggatgattttcagaattagcaggctctccatcagtggccttggtactgccagaagagctcctcttacgtatagtagcttctgattcatgaagacttccatcaccatcactcttttgatgatttaatttggccttatcactggaatcatgccttttatggtggtgatggtgcccatgacccatgctatgagccccattttgagaattgtcttcaacatacctcacaatcttctcaacgataaaaaacagtacaatgccaaatagtatagacaatcccacagaaagatctttcagtgagtgtgcatgcgcatgctcttgagcatgatcatgaccctcatgatcatgcgagtgagaatgccctccaccaaaagcatgtggtagttgatgaagaaatgaatctccaagcattgctcctgccccaaacactgcaagtgcatccaccatggcctttgacggtttcccctgaaagaagatgacagggaggaggacgaggcagatgagcgacgccatgctgaccagcagcgagcaccccatcgcgctcagccacacacccatgggcgatgtctccatgccgtcgtggtggtggtggtggccgtggtggtggtgatggtggtgggcgtggtcgtgctcgtcgaaaccgaaggactcgagctcgagatccgcctcctcggccatctcctcgggaaggagccgccggatctcgtcgtggctgtggtgatggtggtggtggtgctcgtggtccgcgccgccgccgcagctgtgcccgtgcccgccgtggt

SEQ ID NO: 4843 - DNA, 357 bp, Setaria italica
  Peptide Sequence Number=SeqID_70817
cacgcgctaagcgcacccgcgaatctacccacgctagcggggccgggccagaggatgctgtccgtggcgggggcggtggaggttggggtgaaggcggccgctccaatggcggagtgctgaggcgctcgggaagggaggagagggcggtggttgcggcttcgaccctgcgaacgagcgagcggggatgattcggtaccagatacggaacgagtacgggctgtcggatccggagctgtacgcggcgccgggggaggaggatgacccggaggcgctcctcgagggcgtcgccatggccggcctcgtcggcgtgctccggcagttggggatctcgccgagtgagtgctgctacctgctccg

SEQ ID NO: 4844 - DNA, 356 bp, Setaria italica
  Peptide Sequence Number=SeqID_70818
acgatggcgtcggcgagcgtgcatgccgggtggctcttgatcacgctctgcagcattgctcttcgtgactcggggctcttggccaaactagtccatgggagctcggcaatggccggcatctttgggctcagctggatcctctcattcctcttcacattcccactttcgtcaatgatgccatcctctatcagcttgggaatgtgcgccctcagcacgaagacggcggccgaatacgtcaagaacaaggcgacgcgcacgcccaccgtggcggccaggtccagcgcccagttcatggagacgtcgaccaccacccaacgggtgttcctagctctgatcacctcctcgaggcggccaag

SEQ ID NO: 4845 - DNA, 418 bp, Setaria italica
  Peptide Sequence Number=SeqID_70819
gctaatttttgtttggagaaaactcacaattccatgccgacgcggtccacatgaccacaaaactagaccggagatactgtgctcttgttgaggtgatatacagctaaacaattttgacatcgcaagttgatctctacacagatgagtaaggcagatgctgatgagccccttttgtggtcaaattgtgcaggttcaggcttgtggttcactagtgactgaagagcagccccatgcgatgctcattccgatggaatacttcctgatgggatacggtctttacagacctccgcagcaggaaactagccccaggagtacactgaacccgttctgcatatcgcctgagcttctatcacccgagagtatgggagtgaagctgaagcccatcaagacgcggatatcccttaattgttttagtcta

SEQ ID NO: 4846 - DNA, 1554 bp, Setaria italica
  Peptide Sequence Number=SeqID_70820
ccagccaagccaagccaagccagcggaggagagagagacaggaggtgggagggagagggaggctgggaagcggtggaggttggtggcacaacaggaggaggaggaggaggaggagcttctggagaggagggttaagggaggcgtctgtccgccatgggggactccagcggctcggtgtcgatcgacgtcgagcggatcttcttcggcggcaaggaacatcgagtgagaacgagacatggccctctttcggtttctgtgtacggagacgaagacaagcccgcgctcgtgacttatccggatgtggctttaaatcacatgtcttgcttccaaggattgttcttctgtccagaggctgcgtcgctcttgcttcacaatttctgcgtctaccacatcacgcctcaaggacacgagttaggagcggctccgatttcatctgacgtgcccgtgccatctgtcgatgaccttgcagatcaggttgccgatgtcctcgattttttcagtttaggtgctgtaatgtgcttgggtgtcactgctggtgcctatgttcttaccctctttgcgacaaagtatcgagagagggttcttggcctcatgttggtttcacctctgtgcaaaggcccttcatggagcgaatggttgtacaataaggtattattaaacttgctttattattatgggacacgtgggttagtcaaggaaagcttgcttcagcgttatttcagcatggaagttcgcggcaatgggcaagatcctgaatcagagattgtccaagcctgcagaagtttacttgatgagaggcagggatctaatgtctggcggttccttcaagcaattaacaggcggcatgacttaacagaatcattgatgaagcttcagtgccggacgctaatttttgttggagaaaactcacaattccatgccgacgcggtccacatgaccacaaaactagaccggagatactgtgctcttgttgaggttcaggcttgtggttcactagtgactgaagagcagccccatgcgatgctcattccgatggaatacttcctgatgggatacggtctttacagacctccgcagcaggaaactagccccaggagtacactgaacccgttctgcatatcgcctgagcttctatcacccgagagtatgggagtgaagctgaagcccatcaagacgcggatatcccttaatgtttagcatgggcagatctcggatagcggccattgcctgacacccgcagctcatgaaagtgaagactgcttgggctgagttgcgcaaccgcaaagttttgatgcctttctgcgcctggtgggcgaagaagattctacaggctgaaggcagttttgttgatagggagcagaggttgttgtggtcttgggaagggggaatggctgtttgttcatatatttgtagtcagtacacatgtatatctccacacgacatcctttcatacagaaaatagacaatagggacaagaatactacggaataagacggaccaattagacctagaacaacccgacaagactacaatagaaaagtagaaagaactaga

SEQ ID NO: 4847 - DNA, 1372 bp, Setaria italica
  Peptide Sequence Number=SeqID_70821
taagaacgaaagtgcgagagggtgacaacaggactacatgtgatgagagactaatcgacgcattgccccctgagagtcacaatgcaagagttgcttttcttactcctaaaaatgttacaccagagaagatgtcatgcgtggtccatcttgcaggcactggtgatcacacatttgaacgcaggcttcggcttggtgggcctcttctgaagaacaatattgcaactatggttcttgagagcccctattatggacagcgacgtcctagcatgcagcgtggtgcaaagctccagtgtgtgagtgacttgttactcttagggaaagccacaattgatgaagctcgcagtctcctgtactggctgcagactgaggctggttatggcaagatgggcatatgtgggctcagcatgggtggtgtgcatgctgcgatggtgggatcccttcatcctacaccaattgctacactaccatttctcgctccacactctgctgtggtacctttctgtgaaggggtctacaaatatgccacagcttgggatgtgttgagagaagatgcagcagcattaactcaagatgtaacatctttgacagaggatgcagcacagaaaactggggtcactattgagcaagtcagagataggttgcggtcagtgttgtctttgactgacgtcactcgatttccagtcccaaagaacccacaggctgtcatctttgttggtgcaacggatgacggttatattcccagacattcagtcatggagcttcagaaggcatggccaggctccgaagtccggtgggtaacaggaggccacgtttcatcctttttcctccacaacgacgcgttccgcaaagccatcgtggacgcccttaacagattgtagcaccgaggggaagtcatcattgtgatgccagtttatattgtgtgactgttctgaacttggggttgcgaattgcggcatcagctgaacccacaaccgtatgccatgataggcacaccctgtgctgaagggttttggtaaatgactatttgttgtagcttaattgttctgcttcgcatgagatcggagggaggctggttgtacatcagatagcatgtaacaccccattatttggcagtagttctgcaataatttatcctgtcaccatttatcaatcttctgagtgtctgacatgtcaacactggctgaatcagcttggcaatttggcagtttcaatggttattccttcctatttcctaatgctgaatcagctcctatgtatacatagttacatatatataaatactcctagaactgatgtcaaatagtcgagaaatgggtcatctgaattcctgatcacctctattaacgacaatactactatcagctccttaccc

SEQ ID NO: 4848 - DNA, 480 bp, Setaria italica
  misc_feature (1)..(50): n is a, c, g, or t
  Peptide Sequence Number=SeqID_70822
nnnnnnnnnnnnnnnnnnnnnnnnnnnnnnnnnnnnnnnnnnnnnnnnnnttttttttggggtagtccgtcgcttgtcacttttgcgttattcgtttcttttacttcttctttcccccatccaccaactaaatggatacatttttcttctgcgacaaaacttgattgatacataacctatggcttttctcaatggcctttgtgcaatcacaaagcccaatgtaacgaatcaaacaggcctaacatcaaatgaaagaaaatctcccaagaaccgcctccaggacccagctaatatacaactcttgctatctcctccagtgctgatcatacgatcttcgaccatcactcgggttgtaagcatcttgcttccccaggttccattgcctcgatgcctccgggttctggccctgctggcgcgaattccaagacctcgaggattcaacattgtagctttgaggctctatttacgttattttctttt

SEQ ID NO: 4849 - DNA, 1425 bp, Setaria italica
  Peptide Sequence Number=SeqID_70823
tagaagattcagcgccactgagaagcattatcgctatgttaaatctcatgatgttacttactgggcacgaagctttgaccaggatctggagagaacgtgcaaagagcaagatagccgaaggtgttggaccactgggtttggtttgaattttagagttattgctctatcacctgggttcagaagactgtctctagaacactttgcttcatcttataagaaggctaacaggagagtgatatttctggactacgatgggactcttgtgcctcagtcatcgctcaacaaagctccaagtgcagaagtcatttcaatccttaacagcttgtgcaatgatactaagaacactgtatttatagttagcggaagaggaagaaattcccttagtgagtggtttgattcatgtgagaaccttggtattgctgctgaacatggctacttcatcagatggaacaaagcagctgaatgggaaacaagttcatcaggtcagtgttctgaatggaagctgatcgcggatcctgtcatgcatgtatacacagaaacaactgatgggtcctccatagaatgtaaggagagtgctctagtgtggcattatcagaacacagatcatgatttcggctcctgccaggcaaaggagctagtgagccatctggagcgagtcctagcaaatgaacctgttgtcgtgaagcgtggtcatcagattgtagaagttaaacctcagggagtcagcaagggcattgctgtggacaagatcattcggacactggtaagcaaaggggaagtggcagatcttttgatgtgcatcggtaacgaccgatcagatgaggacatgtttgagagcatcaataaagcaacctcccttgctgagcttcctgccattccggaggtcttcgcctgctccgttggtccgaaggccagcaaagctaactactacgtcgacggttgcagtgaagtgatcagattactgaagggtgtaatagatgtttcatcccaaaaggataccaccagccatagccatgtgaactcaaacgatatacttgaggttgtcagctgatccataagcaaatcatctcaaaatacttggagcaaacagcaaagcatgtccagtctgccattctcaaatctccaatgcctgcaagctacccacagttagaaaacagatcacgtggagtttgaaatcagccaacatgaagcattggcattgattatgcaaagacaacagggatcacaaatcgcaacttactccaaatagcattgctattgatgatgcgaagacaacagcagccacaaactgcaagtttccttatctgcaggcaaggcttctagcggggtgatgtctgcaactgaagtcaggcctgacgccgaaaggaggctcctgtacagcaatcacaaaccgcaagtcccttgtattgttgttgctagtcggta

SEQ ID NO: 4850 - DNA, 254 bp, Setaria italica
  Peptide Sequence Number=SeqID_70824
attattatttgcatacataaagaatgagagctaggaaatacagcacctgacagatggcaaataattaggatacttaagtacatgaactgaactaattcaagaaacacccacaacaactttgtgccatagataacgattcatgacatgtgaacggagtaatactatgtgcctaagtaacaataaaacaagcaggcaataatcttcaaaattcatggctattccaaaagaaccctcaaaatgtgaacaagagattt

SEQ ID NO: 4851 - DNA, 3509 bp, Setaria italica
  misc_feature (3501)..(3509): n is a, c, g, or t
  Peptide Sequence Number=SeqID_70825
tgggtacctggaggcgatcctggacagccgcaccgcggcgggaggcagcggcggaggagggggagtgggagtgggaggcggcggcggggacccgaagtcgctggcggcgggggcgtcgccgacgggggccaccagccccccgcggcccgcacatgaacttcaaccccacgcactactttgtggaggaggtggtcaagggcgtcgacgagagcgacctccaccggacatggatcaaggtcgtcgccacccgcaacgcgcgcgagcgcagcaccaggctcgagaacatgtgctggcggatctggcacctcgcgcgaaagaagaagcagctggaacttgagggcttccagagaatgatagcaaggaggaaggagcaggagcaggggcgccgtgaggcaacggaggacctggccgaggatctgtcagaaggcgagaagggggacaccctcggcgagctggcgccagtggaaacggccaagaagaagttccagaggaacttctctgacctcactgtctggtctgatgacaatagggagaagaagctttatattgttctcatcagtgtgcatggtcttgtccgtggtgaaaacatggaactaggtcgggattcagatacaggtggccaggtgaaatatgttgtggaactcgctagagcgctgtcaatgatgcctggcgtttatagggtagacctcttcactcgtcaagtgtcctctcctgacgtggactggagttatgcagagccaactgagatgttaaccactggttccgttgatggagaggggttgggtgagagtggcggagcgtacattgtgcgtataccgtgcgggccaaaggacaagtatctcaagaaggaagcactgtggccttacctccaagagtttgtcgacggagctcttcaacatatcctgaacatgtccaaggctctgggagaccaggttggcaatggtgggaggccagtcctgccatatgtgatccatggccactatgctgacgctggagatgttgctgcacttctttccggggcactgaatgtaccaatggtgctcactggtcactcccttgggaggaacaagctggagcaactgctgaagcaagggcgcatgtccaaagaggagattgattcaacctacaagatcatgaggcgtattgagggtgaggagctggccttggatgcgtcagagcttgtcatcacgagtacaaggcaggagattgatgagcaatggggattatacgatggattcgatgtcaagcttgagaaagtgttgagggctcgggcgaggcgcggagttagctgccatggccgtttcatgcctaggatggtggtgatccctcctggaatggatttcagcaacgtcgtggttccagaagacattgatggagatggtgacagcaaagatgatatcgttagtttggagggcgcttcaccgaagtcaatgcccccaatttgggctgaggtgatgcggttcctaacaaatcctcacaagccaatgatcctggcactgtcaaggcctgacccaaagaagaacatcaccactctcgtcaaagcctttggagagtgccgtccactcagggaacttgcaaaccttactctgatcatggggaacagagatgacatcgacaatatgtctgctggcaacgcaagtgtcctcaccacagttctgaagctgatcgacaagtatgatctgtacggaagtgtggcgtttcccaagcatcacaaccaggctgatgttccagagatctaccgccttgcggccaaaatgaagggcgtcttcatcaaccctgctctcgtcgagccatttggtctcaccttgatcgaggctgcagcacacggactccccatagttgccaccaagaacggcggtccggtcgacattacaactgcactgaacaatgggctgctagttgacccgcacgaccagaatgccattgctgacgcgctattgaagcttgtagcagacaagaacctgtggcaggaatgccggaggaacgggctgcgcaacatacacctctactcgtggccggagcactgccgcacgtacctcacaaggattgccgggtgccggttaaggaacccgaggtggctgaaggacacaccagcagacgccggtgcggatgaggaggagctcctggaggactccatggacgcccaggacctgtcgctccgtctgtccatcgacggagagaagagctccctgtgcattaacgagccaccttcatcggacccgcaggatcaggtgcagaggatcatgagcaagatcaacaagtcgtcagcgcttccaccatccatgtcctcagtcgacagtgccaagaatgcagctgaggccaccggcagcatcgtgaacaagtacccgcttctgcgccgtcgccggcgcctgttcgtcatcgccgtggactgctaccaagacgatggccgcgctagcaagaagatgctgcaggtgatccaggaggtcttcagagcggtccggtcggactcccagatgtccaagatctcagggtttgctttgtcgactgcaatgccgttgtccgaggcgctccagcttctgcaactcggcaagatcccagcgaccgacttcgacgcgctcatctgtggcagcggcagcgaggtgtactatcctggcacagcccactgcatcgatgctgaaggaaagctgcgcccagatcaggactacctgatgcacatcagccaccggtggtcccatgacggcgcaaagcagaccatagctaagctcatggttgcacaggatggttcaagtgacgtgatcgagcgggacgtggcgtccagcaatccgcactgcgtctcgttcctcatcaaagatcccaaaaaggtgaaaacaatcgatgagatgagggagaggctgaggatgcgtggtctccggtgccacatcatgtactgcaggaactcgacaagacttcaggtcgtccctctgctagcatcaagatcacaggcactcaggtatcttttcgttcgttggggtctgttcatggggaacatgtatctgatcactggggaacatggcgacaccgatgctgaagagatgctatctgggttacacaagacggtgatcctccggggtgtcactgagaagggctcggaagcactgctgaggagctctggaagctaccagaggacagacgtggttccatccgagagccccttggtttgttacacagatctgaaagctgacgagatcattctggctctaaagcaggtctctaagactaccagcagcacgtaaatttgctgctaggaaggctggtctctgatatattcttgctgttcataactgaaaaggcatactcgttttgacctttttcttcactacataacttgtgcaaagtaccgtgactgtatgtcttgcagtgaaaaataactaggacactgctaattttactactggtgggcggtgggcggtggctcacctgattgtgaacagtgattaaataatgttattcttcttgaatagctgtattcagagcatacaaagattgtttactgttaaaaannnnnnnnn

SEQ ID NO: 4852 - DNA, 253 bp, Setaria italica
  Peptide Sequence Number=SeqID_70826
gcgcatcgccaccctcacatcacatgcgcgcataggccccggtcgagcaggtcgcaatcaccaccatgccgcccccgctgctcgtctgtctcctcctcctcttgctcgccgccgcgaggccgtggcccgtcgcggctggggcgccgaagaccgcggcgaagccccgcgtgttcccgctgcgggcgcgtcaggtgccggcctgggcgctgccgcggccgccgagcaagctgcggttccaccacaacgtcagcct

SEQ ID NO: 4853 - DNA, 581 bp, Setaria italica
  Peptide Sequence Number=SeqID_70827
tttttttttttttgttatccaaaccagacgagatgtcgttacgtgttcacagttagttgatcacgatcgatcgagcgagcccaaactttggacacgatcagtgagcaatcatagtacatcatccaaacccacacgaacatacaaatcgttatatgcattgcaccgacggcgatgaggtcgttcaattcacttgtccggcgccggcttggcgccgccgccgcggccgacgaagctcttcttgcgctcctcgatgaaggtggaggagcgctcgttgatgttggacggcacccgcagcacgggcggtatccgcggccggagcccgctccgcctcggcacccgctgctcgtcatctcctccgccgccgaccgacgacgcctgccgcttcttgaacagagacctcttccgctccagcggcgctgccggggtgccgccctcctgctcgggcagccggtcttccttgatcgtcaccgacttcctcaccttcgtctcctccaccgccatcgccgccggcgctggccccaccggaccgtcgtcggcagcggcggctcccgtcttcggctcaggaacgtcccttgtcgtcg

SEQ ID NO: 4854 - DNA, 523 bp, Setaria italica
  Peptide Sequence Number=SeqID_70828
ttgctattacttccttgaagcacttgtttgaccgaatttgcttgccatgctcaaactaatttggttgccatgttcactccaagatgtttgctcatacccatctctcgataattcttaaatgagacaaaagaggggataatgcaagaccttcatttacatcaaaagtcccaagaaattataatctggattcccttcttacactaaccctagttcttcagcactatcaattgaaaacgagttaccaaggaaaactgtgctcagccactaagagattgcgacgaactcgcttgccggctgccatgaccgaaacagccaaacagattcctaaatacacggcgaatccgaccttcaccgccatccacttgcctctctccctctggccatgtcaccctcctcgggccgaccccgttactgaagcccccatccagctcggtgtagacgaccgggagctgctctctgggcccgccggcgaacctccctacggcaaatccaccgcgtggaagtcgccagatagtgagccccg

SEQ ID NO: 4855 - DNA, 667 bp, Setaria italica
  misc_feature (1)..(19): n is a, c, g, or t
  misc_feature (36)..(36): n is a, c, g, or t
  Peptide Sequence Number=SeqID_70829
nnnnnnnnnnnnnnnnnnnctttttttagttttttntttttttttgttttagcaacaggccaatcatccatccaagcaaatacaaaatttatggttcatgtatgtctctccatgccatatactagtatcgttgttcaggaaatttcagacattgcaaccactacttggaatgaaaacaaatacatacagctttcatcaaagcagaagctcgacctatctaataggagtaccacccattaattattacatagaagcatggtcttgggcgaacttaactgtcatgtaagcagatccaagttcagtacacagaagaagggtgcagagtctgaagcatgcgtttaggatcctgcgttggaggagtttcccgcatccttcttcttcatctcctcaaacttgtcgattgcgacctgcagctcatccgtgcctcccactgctctcatggtgtagtagtagaccccgaggacgaaagcagacagtcccccagccaccaccaggttcctggtcttgggtgcaagacttctgaatcccgccatccgtatccccccggagccaacggctaccaccgggtccactcgccgtgttgccgccgccgatgacctagagcacgatcgtcccagtctcccgccgccgccgccgccgccgttgtctagtagggtttgttttttca

SEQ ID NO: 4856 - DNA, 732 bp, Setaria italica
  Peptide Sequence Number=SeqID_70830
acttatatgaggtgggagagagttacttcaatgagcttataaacagaagtatggtcgagccagtaggtatcgacttcgaaggcagagcccagtcttgccgtgtgcatgacattgtgctcgatctcatccgttccttatcaacgaaagaaaatttcgtcacgatatgggacgacactgagaccacatcttcaaaattcaaggtccgtagattatccctccaaaattctagtgcaccaggatctgccacaaccaccttgttgcaagtgaggtcttttacagccttcagtcccgccgtcgattcgatgccatccctctcacagttccaagttctccgcgtactggacctagaaggttgtgctctcaagaaatgtggcgaccattttaacctgaagcatgttggcaatctctctcaattgaggtaccttgggctgagacgaacctacatccatgaactgccggtagaaatcggaaaattacagtttctgcagacactggacatcagaggagctcatggtatacaaaaactgcctcagaccatctctaggctgcggaagctgatgtgcctgcatcttgattgggacacgaagctaccaaaagggttgagcaatctgacgtccctggaagagctgaccgggctgaggatcggccaagattctgcacacattgtgagagaggagctcagccatctcacggggctgagggtgctaaagatgagttgggagaaggacacgg

SEQ ID NO: 4857 - DNA, 1112 bp, Setaria italica
  Peptide Sequence Number=SeqID_70831
aaacgaaacgaaactaaagaaacgaaactaaccgaacgaagttagggtactcccaaatccgccaagcgcaaacgcacgctaccaaccaacgcgagagcgcaccaccaccgcacgcagccatggccgtcgcctccgcgtggtccaagcccggctcttgggccctcgccgccgaggagcaggatgagctcccccccccgccgccgcccgtcgtccccgccgccgacttccccgacctcgccaccgccgccaccaccaaggtccccaagaagaagaaggcccagtctatgcctctttccgatttcaactccggcaagttcgtcacgcgcgcatcccgcgggcctggccccgaggtgacgaccttcgatctccccacgggtccccgcgagcgcaccgaggaggagctggccaacacgcggggcttcggggccgggcggtggggcggcgccggaggaggcccccgcggttccgacgagccgcgccgcggcggatctgaccgcgaggacttcggcccgtcgcgcgccgacgaggcggatgactggggcgccggcaagaagcccttggagaggagggctatgggaggattcggctgggactcctcagcgtcgcgtgccgatgacgtcaatgactgggtctccaccaagaggaccgcaccagccccgtttcccgagcgaagggagcgcggcggcggcggtttcggaggcgactctatctcgcgcgctgacgactccgcgagttgggtctctaataaaagctattctgcgccgccgcccctgcctgctgacggccggaggggtgggccagtttggggcttcaacagggatggtggtccggatgctgattcttggggcaggaggagggaggagatgagcaatggtggggacagcagcgttggccggccccgtctcaatttgcagaagcggaccttgccgcttgccaatggcactgatggagagaagccggaggataataataaagaggatgataaggaggagcagcgacccaggagcaggtcatcgaacccatttggcacagcccgcccgcgtgaggaggtccttgctgcaaaggggaagactggaggaaggaagagcctatagtggagaagctagagattc

SEQ ID NO: 4858 - DNA, 318 bp, Setaria italica
  Peptide Sequence Number=SeqID_70832
cgtgtctcagcctcctcccaggcggagatacaccagcttcgcatccaggcgattgctaaggatggcgaggtagagaggctgaaagttgaaatctccgagctgcacaagtcgaagtgtcagtcgctggagttgattgagcagagagatgctgaaataaaagaaaaggatggcatcatccagagctactacgataaaattgtaaatctggcagacagttctgctggtaaaggggctagggtacaagaggttgaagccaagtttacccattgtcaggcaatgtgcaaccgcattacccaggagaaggagctgcttgaaaag

SEQ ID NO: 4859 - DNA, 598 bp, Setaria italica
  Peptide Sequence Number=SeqID_70833
gaaaggatgaccaacatgtgcatttcattatgtgaaaagctcctgggtgaactagcctctagatccataaatttcttcatcagcaaaagctccaagccaagggtgctggatgtggaggacagcctgcaaagggctctcctccaggcgcaggttatcattcgatgaggccacaggacgccacatcacgaaccaagctatgctccagcagctggacatgctgagagatgccatgtaccaaggctgttacaaacttgacgccttcagataccaatatcacgatgaggaagatgccaaagatcaggttgtgagtcattcttcttctctgttgaatctaaattccctaaaaggaatcttttcgtgcaaaacaaagacacagattttggaacagctgcaagatgcccttgacaatttgagctctatgatccttgatgtgaaagaactggttgtgttcttgacgggctaccctcgcctctaccaccagccatataacatgcatctactgctgagcaactgcatgtttggccgccagatggaagcagagcttgtcctcaacttcctattacacacacaacctaacggtgttgaagaattggaggtc

SEQ ID NO: 4860 - DNA, 725 bp, Setaria italica
  Peptide Sequence Number=SeqID_70834
acgaaaccttacccgaacccaacaacggctggaaaaagctattacctggcaggtgacttggactactggagtggactgacttgaccaagtaacctctgggaaggcgaaaagaacccaaaagacgagtcatcgcctgactattacggtccattcaacagctatggtgatggctccggctctgggtccgtaagcaaagtcctgggtgaactagcctctagatccatcaatttcttcatcagcaaaagctccaagccaagggtgctggacgtggagggcagcctgcaaagggctctcctccgggcgcaggttatcatcgatgaggccacaggacgccacatcgcgaaccaagctatgctccagcagctggacatgctgagaaatgccatgtaccaaggctgttacaaacttgacgccttcagataccaatatcacgatgagaaagatgccaaagatcaggttgtgagtcattcttcttctctgttgaaactattacctggaaaagctattacctggcaggtgacttggactactggagtggactgacttgaccaagtaacctctgggaaggcgaaaagaacccaaaagacgagtcatcgcctgactattacagtccattcaacagctatggtgatggctccggctctgggtccgtaagcaaaggtttgacagtaaagatctctgtacctttctcagctggtagtgctactcaatcactgacaggcagg

SEQ ID NO: 4861 - DNA, 982 bp, Setaria italica
  misc_feature (976)..(976): n is a, c, g, or t
  Peptide Sequence Number=SeqID_70835
taatgggcgtagaggaaagccaaagttttgtccatttaggctatccaatgatgaatctgtattgatatggttctcagggaaagaagagaaacatttaaggttgagccatgtatctaggataattcctgggcagcggactgcaatttttcagaggtatccacggcctgagaaggaatgccaatctttttctctaatctcacatgataggtcattggatataatatgtaaagataaagatgaagctgaagtatggtttgctgggctgaaaacattgatttcccgtagccaccaaagaaaatggagaactgaatctagaagtgatatcctttcctctggtgcaactagtccaaggacttacacacgccggagttctcctctgagttcacctttcagcagcaatgacagcatccacaaggatggcagtgacaattaccgactccgtactccatatgggagcccaccaaagaatggattggaaaaggccttttctgatgtcatgctgtatgcagttcctcccaagggctttttaccatcggattctaatgccgggtcggtccattctatgtcttctggacactcagataacacaaatgggcacccaagaagcattccaatggatgctttccgagtcagttattcaagtgctgttagttcatctagtcatggttctggtcatgatgatggtgacgctttaggcgatgttttcatatggggagaaggaaccggggaaggaactcttggtggtggtagttcgagagttggaagctcctcaggtgcaaaaatggattgccttgtaccaaaaccattagaatttgctgtgcgacttgatgtacagaacatatcttgtggaggaagacattctgcacttgtcactaaacaaggagagatctattcatggggtgaggaatcggggggacgcttggtcatggtgtcgattgtgatgtatcgcagccaaaactcatcgatgcttctttcncatata

SEQ ID NO: 4862 - DNA, 331 bp, Setaria italica
  Peptide Sequence Number=SeqID_70836
ggccgccaccgccccgccagcctctctttctcccgcctcccgagcgcccgcccaacggggccaagcgcagtcgcgccatggcgccgttccagatgcgcttcgggctccagatctcccctgcgcgctccgactacgaggaggacgacgaagaggaggaggacgaggaggaagagtacgacgagatggagagcgaggggacggcctcgcccccgatgacgatgctgcgggcggggaggggaggtggtggagcagggggagggctggtgggcgcggtggtcggagcgctgcggaggtcgctggtgatgtgcagcgccggcgccggtgggggacg

SEQ ID NO: 4863 - DNA, 287 bp, Setaria italica
  Peptide Sequence Number=SeqID_70837
ctgtagcggctaattaagtcaacagcaccactaagctcccgaggacctctcccaaacttgccatcagaacccatctgattagagctagacatattggaaatgcatgcccaccttagaaacaagaggatggatctccactccagcaagtccagtatccagtaccagtcaaaaggggaagatgaggaagcagccgcttctcaacaagggaagaattgggcggaccggaggtctaatttgccctgccccgtcggctaaggttagggcgccggcggtgtagcgcaaccaat

SEQ ID NO: 4864 - DNA, 652 bp, Setaria italica
  Peptide Sequence Number=SeqID_70838
agctccaaagtgcaaagacacgctaaaaaggaaatgtgtacttatgtgctctcaaaccttcactggaaaaagaaaaggatgcccatatgcatataaagttatatataggcatatagcaagcaattaagcacatctaaacaaattaagcaatacattataagaattcaagaagtgcatacctctgctagaagtgatattgaaaagaaagacttcagagccacactcattaacagcataaatggagttgaactaataaagaaacatgaatggctggcaattaacgaagtccatagcatatttcactgatttttgtgcttttgtgctgtcataaaaaaacaagggatattacaacaacaaataaggaatattaggaaatatgttatgacaattatgaaatgttgattaattatatgggatagtacttttcttgtgattttggacacttgccgaacttccagttacttcttgcttcctcttcttctcatgtttcttggaatgatcacctcctgactcatgattcccactcttgtcttttttcttttctttgtctttgtccttatctttatctttatctttactccggtccttatgccgatgtttgtgtttcttctgctcctcctccttgtctctgtctttctctttgtgtttctta

SEQ ID NO: 4865 - DNA, 1308 bp, Setaria italica
  Peptide Sequence Number=SeqID_70839
tgatgtcactgatgcactgttgtctgtaacacagttttctggatcatgcatatttatccactgccttctctgttacataaagtcacaaggttgggaagatatcctggccccgctttgggcctgctgttgtctgaattacaggatcatacattgcaattaatgctgaagaattgctaatggacataagctggaacgacgcgaaaataatttacaactccataagaaaataatttacaactccatatgccaaagtccaagctcctcgaagaacaatatacatggtgtattccatcatagcttatatcttgtttcctccggagcagcctagtatgaattttccgtctgtggtaactctgctagaagtgatattgaaaagaaagacttcagagccacactcattaacagcataaatggagttgaactaataaagaaacatgaatggctggcaattaacgaagtccatagcatatttcactgatttttgtgcttttgtgttttcttgtgattttggacacttgccgaacttccagttacttcttgcttcctcttcttctcatgtttcttggaatgatcacctcctgactcatgattcccactcttgtcttttttcttttctttgtctttgtccttatctttatctttatctttactccggtccttatgccgatgtttgtgtttcttctgctcctcctccttgtctctgtctttctctttgtgtttcttatgcttccttactttgtccttggacttgatctttggtctcccagatatggttggtgtacctttttcagcagaaggcaaatctactggtgcagtttctcgcagctgaaatgcttgtcctagcgtttccatgtcaaagggctgaatgtaagcagtcttctcacttgggtatgagttttggaagagttggtccaactccatcccttctcctttacgaatttctgtgtcgcccacaacattgttaagataatttgtatctgaaattgccaatggcaaaggtttcttgcaaaagaaactatgatggttcagcagcttgtagcggctaattaagtcaacagcaccactaagctcccgaggacctctcccaaacttgccatcagaacccatctgattagagctagacatattggaaatgcatgcccacctgtagggctctgcgctgccttgcggttcctcccggcggcgtgaggtgaagagcgagcgccgcgaggaggccggcgagcgcggaatccctggagcgcggcggcggccagacggcaagctacgcagcgagaagcggtgacggtgaggacgtgaggtagcgtgagc

SEQ ID NO: 4866 - DNA, 404 bp, Setaria italica
  Peptide Sequence Number=SeqID_70840
ttgttccggtccgtttggttctatttcgcgccggcggcgttggcgttgccgctggggtcgtcgagcccgagcggcgacggcgccgcggcttcctggaggaaggagtagtagaaggcgaagtcgtcgtcccctgctggcgctggagctgcaccggttgctggagctcccccaccgctgcttggtgggcggccgttggatggggatctcatatactccgtctcggcctgtgtcgccaccacgcacacacacacacaaagcagctagacgcaacgcgggtcagtcggcctcgcgagccggtggtgggttcgcgtcaaaggcaggcaggcgagcgagcgaaatggaagcgcagcaagtcctccgtctccgtgcgattggtgcggaagcagcagagccgtggcgatttg

SEQ ID NO: 4867 - DNA, 495 bp, Setaria italica
  Peptide Sequence Number=SeqID_70841
ggagggcggcaccgcggcgaataagaaggcgcgggcggacgagtacaggaccaggaagcagcgcgtgcacgccgcgctgtgggtgaaggagatcgagaagatggaggaggcgcgcctcggcggcggaggcgtcggcgctgacgacatcgaccggctcctcgactcgtgctctgatatctttgattccggcaatgctgattttggtgattccaagatcccaagcactactgagatcaaaaccaagcctgacggttgggaaactaccacaagaggtcaggatggcaatatatgggagatctcacagcgagaagaggacattcttctccaggaattcgaaaggagaatggctttcagtaaacagcagattgctagcttcatcaaaacccacattttcagtcggaggcgtcctatcgatggctggaagtacatgattgaagagattggcccaaacgcaagaaaaggaaaggggagcgtccaaaaggctaccaaagtaga

SEQ ID NO: 4868 - DNA, 237 bp, Setaria italica
  Peptide Sequence Number=SeqID_70842
ctaccatcacactaaagaactgaacgcgagagggactgaaggagggaggctcccctcaacttcggagctcaatccgatggaatactctgcggtgcccaattcctgattgttcaaaactgtaatctaatcctatcgcctcatgtgaacaactcagcgactgaaattctctctgaagcatgggtgaaattcccgagccggaagctgctatggccatgccggagccgtcgtcttgcctga

SEQ ID NO: 4869 - DNA, 1312 bp, Setaria italica
  Peptide Sequence Number=SeqID_70843
agggctaacatcacataaaagattcaactttcaccgagcaagttcagaaactactgtgagtctgcgaatacgaagtaaactcaagcgtggcattttgcaaaatggttaagcaaatcctggggctgtcgtggtcattctgtaacgctagtctgtgttcagttcatagcactgaacagaaaacaaaaggagtgttctgattttctttctgccaatcactatatcgaaggaaactacgagcgcttgcgtctctttgcgctatcatctatgaaggactcccatttaccatggtccagcttgctgagatcttctaggtctccgatggaaagcaggtagtgtgtaagcttcaccagctcgtggtcattgtccctgtttgagtgcgctttcctgaatggcctgatcacgagaccgttctgtggattcatgacgaaattccttcgtaggtcatcaaacatgatggtgttcttctcattgtagtactcagggaattgagcccaaatgacaccaagaggcttgcagtcaaaagttttctttctactttggttttcggattgcacagttatcatagccaagtgatccataagagcagtaattttgtagtcggggttgccaagaactccaagttgctccattttcaactccacccatttcatactagtagctgaccatatcatgatgtcatattttgaatatgctgctgctaggaactggtgaagatatggacgcatgagttccttaggattctcagctggcgacttatggtcaaacagagtatagtcaatatctaagaccagcagcttctttcctttacgacatggattcaagagcttgatcttatactgacttgcacgccgctttaattttgcttgtagacatctttatccttaatgggtgtatcttcattctgctcgaagtcaaaatcatcgagtaactccggatcatcttcttggccaacaaatatttcttcttcaacagttccgatcatgctgatctttccgttgggcttgaaggggatggaggagaggagggtggagtcgtcgatgcccttgagcatgatcttggggtagagcagcgtctggcgcttggggagcacccccgtggcctcgcagatgcgcagcttgagctccccgagcgtgtcgtccccgaccatccgcaccgtctgctcctgcccgcaccacttcaccacgagcgttatctcctccggcggcgccgcctccgccaccgcggcgagggagggcgcgtccgccgtcgggggcgccgccgccgacgaggacgagggcgtgtccgccatgggctttggctgcggggagttcga

SEQ ID NO: 4870 - DNA, 539 bp, Setaria italica
  Peptide Sequence Number=SeqID_70844
gtcctgcaatgtgcagtggtgaccagtcaagcgacggcggcgtgacaagactcacaagagttgagtggaggagggtggagaccaagtcgacgaattgaggtgcgggtgttcacggtggtggatggcggctagaaaaaggcactggcgtggtgattggagggcatggcttctgtatggcagttgagggccacggtgtggagcggccgtgcggcagtggtgaccacgaagtttggcaaagaggctggcgtgggaagaggtggccagcagaagtgcgtggatgagatcattggcatggcttgcagcgggctacgggggctagcattgcttggcaatgtctggatcggtgtgggacatcattggtgacgacggcgcaagcggtgacgatggcatgtcagtataacggctttgtctttgaggtgatggtgctgcagcagggttagtagtggtgtgtttctcgcaattctattgagttgtttgagtagagcagtggagttgggcggccgacgatcgtttgagttgcttgatgcggtggtggtgtc

SEQ ID NO: 4871 - DNA, 454 bp, Setaria italica
  Peptide Sequence Number=SeqID_70845
agatggaacaagagccttcctacacaaggggacaaacatgggagtacgcctcttcacttcgcttcgtctctgcaccaggattcatttggtttcttctggtgccctccttggattcgtaattattggcgtaccaggatttccaacatagtggcaaaagtatttgaagctaacccagcagctctgtaccaagcagacaacagcggactgttccccatacatgtcccgccctccgtaggtaccacaagtaccgtagaattttttctttcagaagtctcctagtagtgctggattgcgcaatgctaaaggaaggacgtttcttcatgttgccgttgagaaaagaagatgggagatagtctcatttgtttgtcagactccatctgcagaatggattttgaatatgcaggacaaggacggaaacacggcactgcacttagctatcaaaagtggatgctta

SEQ ID NO: 4872 - DNA, 1324 bp, Setaria italica
  misc_feature (1317)..(1324): n is a, c, g, or t
  Peptide Sequence Number=SeqID_70846
cgtcaagaagtccatccacgcgtacgtcgcgcgcgcgggggccaccgtcgtcgaggtgcccctcccgttccccgtcgcgtcggccgacgctattattgccgagttccgcaccgcgcttgccgtcgccaaggaagggggccgtagggtccggctcgcggtcatcgaccatatcacatccatgcctagcgttgtcatcccggtgaaggagctcgtcgcaatctgccgagaagagggcgttgacaaggtatttattgacgctgctcactctatcggccaggtccctgtggacgtgcgtgacattggggctgatttctacactagcaaccttcataagtggtttttctgtccccctgccgtggcctttctgcacacccgcaaggatgatccgatagcctcccagcttcaccaccctgttgtctcgcatgagtatgggaatgggctgcctatggagagtggatggattgggacacgggattacagtgcccagcttgttgtgtctgaagctatcgattttgtaaatcgttttgagggagggattgaggggatacgcacccggaaccatgagaaagtgattgagatgggtaggatgcttgctgaggcgtgggggacatttcttggctcgccacctgaattgtgcgggagcatggttatggtggggatgccaggttgccttggtgtcgagagtgatgatgatgcaatgagagtgaggactatgttgaggaaggacttccaggtggaggtgccaatatactacaattcaagaagggtggaagggcaggagatggcaaaggacaagagtggtgatccagtgacagggtatgtgaggatctcacaccaggtgtacaatgtcagggaggactacgagagactaagagatgctatcaataaacttgtttctgagggattcaccagcagcaagttgcggccttcagagaagcaagaatcttaggagtgatgatgaccttctagccaggcagcagtccacctgaagacagccgtggccgactacttaggtgtgggtcgggtcaacgcagccagcgccacatcgtgatgtaattccccctcccatggccaagccagttgatgaatgtagtgtaccttcaggaactgacatgtgttgtatttggcgttcagtgtatgtaacaataatgccctggcatgtcgtcttccttcttcccctcatttccgttttctgctgtaacctgagaataatctgaatgtaaggtgatttacagctgctgtagattgattgctggtttccgatcaaaaaaactgagacacgcaacagaggataggcaaggcacacaggggataggnnnnnnnn

SEQ ID NO: 4873 - DNA, 254 bp, Setaria italica
  Peptide Sequence Number=SeqID_70847
ggggcgttgtgacggcgcaccatttcctggagatctcataggaacttgtggcacttgggtttgctcggatcgtcgggcttctccgcttctggggccttgacttcctccgtagcatcaagagaggccctccagtcaacgcagagttccccgatcatggtcgtaccagcgctctggccgaccgcggccctctttcctccacgcgatgccaccgccgccgccgtctttgcgccagagtccttgtcgtccgccttcct

SEQ ID NO: 4874 - DNA, 1115 bp, Setaria italica
  Peptide Sequence Number=SeqID_70848
cggcgggtgctctgcaggctcaccgagaactcggataatgcctgggccgtcgccgcgcacggtggcgtcacggcgctgctcaacgtgtgcacggaccacggcgcgcgcggcggcgagctcgtgtgcgcggcgtgccgggtgctgcggagcctcgcaggcgtggacgagatcaggaagtacatggtggccgacgccggcgccgtgccggcgctcgtgtcgctctcgcagggcgccgccacggacgacgcggcgcggatccaggcgatggagctcctcgccgccatcgcctccggggacagctccgccagggaggccgtcattcaggaaggcgccgtcgagtccctcgtccgcgcgctcgacccgtcctccccgacgcgctcctcgaaggcgcgcgaggtcgccctccgcgccatcgacgcgatctgtctctcgccgccgacctccacggaccggctcctcgccgccgggttcctggaccgcgtcctctccctgctacgcaacggcgacaccacgctgcagcattgcgccctcaaggcggcgcaccgcctgtgccaggtgtccgaggagatcaggaaggcgatgggggacgctgggttcatgccggagatggtgagcgtcctccgcgcggccaagtccccggaggcgcgggagatggcggcggacacgctctgcgccatggtgtccgtgcaccgcaaccggaagcggttcgtccaggatgaccgcaacgtggcgcaggtgctgcagctactgggccccgaagaggagaagcccacgccggcgaagcggttgctgctgtcgacgctgatgcacctcacggacagcagctccggccggaggaagatcatgtcctcggagcacgtcaggaatctcgagaagctcgcggagactaatgtcccggacgccaaacggatcgtgaagaagcttggcgggagcaagctgaggagtattttccatggcatctggagcctgtaatccttggcgacaagaactagctgtcacttactagtactgtacctctagctaacacacatgttccttgcatcttttgttgctgtgaaggaatcaaagaatgaatcaccagtgatttgtcaccccatgtgtatatcactcatcac

SEQ ID NO: 4875 - DNA, 307 bp, Setaria italica
  misc_feature (291)..(291): n is a, c, g, or t
  Peptide Sequence Number=SeqID_70849
agaaggcgatcgttgaacgatcacctcctacttgctgaaagaagcttcctgcaagcggaaggacttcaaggaagagcatggtttaagcatctggtgagcaacgccgtagcttgttcaaaattgaaaattgttaactctctgcactatttgtcttccgacaccctttattctcccagctgtattcacctcctgaggactatgaaagcaagctatcgttcttccctgggatcgccgagccatctcacggtcgggcaacctgagtgccgaagaacgcgaggtgtcaattcaacntgaagtgtggaaggtc

SEQ ID NO: 4876 - DNA, 278 bp, Setaria italica
  Peptide Sequence Number=SeqID_70850
gcgccctgctagtgtagtgtcgtcgctgcgtggtgcttgctccccgctcgttgagattgagtcttgcatcctctagcgatggagccccggtgctccgtgctggtcctggccctcgccgccgcgctctccgtcgcagtggcttacgacccgctggacccgaacgggaacattaccatcaaatgggacatcatgtcgtggacgcccgacggctatgtcgcggtggtgacgatcaacaacttccagatgtaccggcagatcatggccccggggtgacgggg

SEQ ID NO: 4877 - DNA, 450 bp, Setaria italica
  Peptide Sequence Number=SeqID_70851
gcagcaatcggcgcgtggcgttcttgcagtggccggccggctcaaggatggggctccgcgactccgccgcgctggtggctctggtgctcgcagtcacctgctccgttgcaggttcattgatctgaaagcccttagcttatttggaatctcaattcatttgccgctctccttaatttgcactgaaccatggtaatcttcttcgttcgttgctcgccattgtttcgcgttgcagtggcctacgatccgctggacccgaacggcaacatcacgttgaagtgggatgtcctctcctggacgcccgacggatacgtggcgatggtgacgatgagcaactaccagcagtaccggcagatcatggcgcccgggtggacggtgggttggtcgtgggccaagaaggaggtgatctggtccatcgtgggcgcgcaggccacggagcagggcgactgctcc

SEQ ID NO: 4878 - DNA, 1024 bp, Setaria italica
  Peptide Sequence Number=SeqID_70852
gtctccttctcctccttctacaacgacaccatcgtgccgtgcgccaagtgcgcctgcggctgcgagcacaagacctgcgtccagggcgacacgaagcggccgctggcggtgacggggaagcacgagcacgggcacgcggcggcggcgcgcgggcaccgggacagggaggcgccgctgctgcagtgcaccacgcacatgtgccccgtgcgcgtgcactggcacgtcaagctcaactacaaggagtactggcgcgccaagatcgccatcaccaacttcaactaccgcatgaactacacccagtggacgctcgtcgcgcagcaccccaacctcgacaacatcaccgaggtcttcagcgaactctacaagcccgtcgtcgcctacggatcaatcaatgacacggcgatgttctacgggctcaagtacttcaacgaccacctgatgcaggcggggccgtacgggaacgtgcagtcggaggtgctgatgcgcaaggacgccagcaccttcaccttcaggcagggctgggcgttcccgcgcaaggtctacttcaacggtgacgagtgccagatgccgccgccggacgcctacccatacctgcccaacgccgcgctgccggccaccgcggcgtcgcttggcactgcggtggcggccgtcgtcgcggcgttcgtggtgctggccgtggtatgaaacatgagaacggatgagaaagacacaggagatcgatcgacctagtgctagaaccggccggcatggggagaacaaaaagaaggatgatgttttgctctgtagatacagtcaacgttttgggtttcaggattggtttgtatgttctgaacatactgaaaaactccaagtttttgttttttcttccattaagtggacgggcaggagcataattttgaaagagaaatatgtgcatctaacgtcaagctaagccatatagctatgctgatgcagtgatgcctgaatgcgatgggatcgctgataattgtatggtgaagcaagtttttcgaaaaaacaattgaag

SEQ ID NO: 4879 - DNA, 1841 bp, Setaria italica
  misc_feature (1832)..(1832): n is a, c, g, or t
  Peptide Sequence Number=SeqID_70853
cacgcgcgcgcgcgatttcaaatcgagtcctcgttacgcaactcgaccaaccggggcgtcggggcggccggccgcgcatggtggtgacgtgccatctcgatggcatcttcctcttccgcttcctcttcgtgtccagcctttatcttccggcctcttcctcgaggagcttgtaagaccagctagcagcaatacggcgcgtggcgttcttgcagtggccggccggctcaaggatggggctccgcgactccgccgcgctggtggctctggtgctcgcagtcacctgctccgttgcagtggcctacgatccgctggacccgaacggcaacatcacgttgaagtgggatgtcctctcctggacgcccgacggatacgtggcgatggtgacgatgagcaactaccagcagtaccggcagatcatggcgcccgggtggacggtgggttggtcgtgggccaagaaggaggtgatctggtccatcgtgggcgcgcaggccacggagcagggcgactgctccaagttcaagggcggcatcccgcactgctgcaagaagaccccctccgtcgtcgacctcctcccgggcgtcccctacaaccagcagatcgccaactgctgcaaggccggcgtcgtctccgcctacggccaggaccccgccggctccgtctccgccttccaggtctccgtcggcctcgccggcaccaccaacaagaccgtcaagctccccaagaacttcaccctcatgggccccggccccggctacacctgcgggcccgccaagatcgtcccctccaccgtctacttcacccccgaccgccgccgcaagacccaggcgctcatgacgtggacggtcacctgcacctactcccagcagctcgcgtccaggtacccctcctgctgcgtctccttctcctccttctacaacgacaccatcgtgccctgcgaccgttgcgcctgcggctgcggccattccggcggtggcgcacatggcggccgcggtggccgttcccacggaagccacggcggcggcggcggcggcgccgagtgcatcgccggggactcgaagcgcgcgctgtccgccggcgtgaacacgccgcgcaaggacggggcggcgctgctgcagtgcacgccgcacatgtgcccgatccgggtgcactggcacgtcaagctcaactacaaggactactggcgggccaagatcgccatcaccaacttcaactaccggatgaactacacgcagtggacgctggtggcgcagcaccccaacctggacaacgtcaccgaggtcttcagcttccagtacaagccgctgctcccctacggcgccatcaacgacacgggcatgttctacggcctcaagttctacaacgacctgctcatggaggcagggcccttcggcaacgtccagtcggaggtgctcatgcgcaaggacgccaggaccttcaccttcagccagggctgggcgttcccgcgcaaggtctacttcaacggtgacgagtgccagatgccgccgccggacgcctacccatacctgcccaacgccgcgctgccggccaccgcggcgtcgttccgggatggtcgccgccgccgccgccgcgttcctgctggcgatgctcctggtggcatgatcgacgtaatcaggctgcagagatcttggcactttttgagtctccaattactattagacagacagcctgagaaagaaaatgatacatagaggcagcacaagtttttcctgtgattttccttctgtacacgtaatacagattctttgttcgaatgatgtgaatccacttacttaacattggcaatgcttttctgaaaaaaaaaaaaaaaaaanaaaaaaaaa

SEQ ID NO: 4880 - DNA, 1495 bp, Setaria italica
  Peptide Sequence Number=SeqID_70854
acgcggcgtcggcagctttcggcccggcgctccttcccggcggcgaggagaacgtggggcagttcatgtacctggaaggcatggagtacaacatgtacaacacctacgacgtccacttctactcctccttcgccctcctcgccctcttccctcagctcgagcttagcctgcagcgcgacttcgccatggccgtcctcatccacgacccgcgcctccgtcacaccctcgacgggaagaccgtccgccgcaaggtcctcggcgcggtgccgcacgacgtcgggctcaacgatccatgggtcgagctgaacgcgtacatgctccacgacgcggcgcggtggaaggacctcaacccaaagttcgtgctccaggtgtaccgcgacgccgcggccacgggcgacgcggcgttcgcggcggcggcgtggccggcggtgtacgtggccatggcgtacatggaccagttcgaccgggacggggacgggatggtggagaatgacggcgtcccggaccagacgtacgacatctggtcggtgtccggcgtcagcgcctacaccggcgggctctgggtcgccgcgctgcaggccgccgccgccatggcgcgcatcgtcggcgaccgcgccgccgaggcctacttcatggtgaggtacaagaaggcgaggcgcgtgtacgacggcgagctctggaacgggacctacttcaactacgacaacagcggtcggcgcgacgagctcgtcgatcatggcggaccagctcgccgggcagtggtacgcgcgggcgtgcgggctggagccggtggtggaggaggccaaggcccggagcgcgctggccacggtgctcgactacaacgtgatgcgggtgaagggaggcgccgtcggggcggtgaacgggatgcggcccgacggcgccgtggacgcgtcgtcgacgcagtccaaggaggtgtggcccggcgtgacgtacgccgtggcggcggccatggtccacgagggcatgacggagtccgcgttccggacggcgaagggcgcacacgacgccgcctggggcaaggacggcttcgggtacgcgttccagacgccggaggcgtggacggaggacggcggctaccggtcgctgcactacatgcggccgctgggaatctgggcgatgcagtgggcgctgtcgccgccggagctccacaaggatctcagggcggcggcctcggaggagtcgccggcagacgccgccctggggcaggcgcagttcgagaaggtggcgagcatgctgaagctgccggaggagcagcagcccaagggatacctttgggccatctacaacctcattaggcaaatggtgttcccagcataagagctggaaaaataatattatcgtgcagggcaaatccatgcctttaaacagtcagtgttcagtgccggttaggaactgccacgagatttgtcaccggaatgataatgaatagttcatacgtgagcaacgatgaaacttcaagcttcaaaaaaaaaaa

SEQ ID NO: 4881 - DNA, 369 bp, Setaria italica
  misc_feature (369)..(369): n is a, c, g, or t
  Peptide Sequence Number=SeqID_70855
actaaagaataaagatttaaaagtcttgcatggaacttcagtgtaattaggaagaatcctagatttttttttggctttctgtcagagttagactgaatggcatgttaagaatttcagtgacatcgggtgagccaacatacagcttatgtgggcctgttttacctccaagcttgtaatgctgctgaaacatggcttattttgtcttaagccaatcttgaggcaaaccaaaatgttaatctagcttgagtaccttatgggccatttgtcttttcttatactccaacccagtggtgtgcatgatcaatagatttagcaagtgtacaccattaacatgaatgcactatcagttattgtcaatgccatcaaacn

SEQ ID NO: 4882 - DNA, 374 bp, Setaria italica
  Peptide Sequence Number=SeqID_70856
gtcctcgccgcagagaatcgaaagacagcgcagcgaggggaagggaggggggaaaggggcagcagcgccggccacagcgagcgcgttcgaggatcaaaatgtgagggcgagccggtgggctctgatcgccgattcgggagccgccgcctctccgccggtgcgctgatctcggacacacaagatgctggatactagctggagtgccgtttcggcctacgtgtcggagtattggtctgtgataatcgccaccgccgtgttcgcttgcgttggcgcagcgacgatctactacacggtgaaccagctgaacaagaacatcagcctgagcctgataaaggctctcaaggtcagggcgaagcggtacaagaaatggaagg

SEQ ID NO: 4883 - DNA, 532 bp, Setaria italica
  Peptide Sequence Number=SeqID_70857
gggccagcgctgcggggacagcggcaactacaccttgaacggcacctaccagggcaacatccggcgcctcgccgccacgctccccaagaacacctcctcttccccaacgctcttcgcgaaggactccaccggcgacgtcccggacatcgtctacgcgctcgcgctctgccgcggcgacaccaacgcctccgcctgcggggactgcgtcgcgacggcgttcacggacgcgcagcaggtgtgcccctacaacaaggacgccaccgtcttctacgacccctgcctcctccgctactccaaccagaacttcctcgcctcaaccgccggcgacggccgcgggtacgccctcatcctcatgaacacgcagaacgtcaccgcgccgttcagtgtgttcgacaacgccgtggccgtgctcctcaacgccatcaccaactacgcggccgacaactcgaccaagaggttcggcacgggggtgcaggggttccggacattcgacagcaacaacccgaggatctacgggctggcgcagtgcacg

SEQ ID NO: 4884 - DNA, 629 bp, Setaria italica
  Peptide Sequence Number=SeqID_70858
gacaggttagaaaaagatgaatcctaaaattctcaccaaaatcagaaatatcaaacaataaactctaataatcatagtcattggtttattatattttctaaaaagttataaacaactatcattatgaaaatgaaaaaataagagactagtaggtaaacaattttgattgttaactaggagttaaatttctaaataattttcaaatacaatagttttaaaatattagtctgtgtggaagcacaggctgatggactagtgcgtgaaattaaccaacatcttcaatttccaggaaacatgactggtagagttttagctattgtactgcctatagttgtcatgatgctggctactgtagtagtttgctattgtctctggaggaggaagaggaaaccagcaggaaaattattactgattggtaagtgattccatcgtttaccattcaaacaaagctgaaatggtgtcatttttcaatattgtacctaagaaaactaaaatatcatggcattgacatcatttagtacttgttccattatgatagattcaacaaatccagaggacatacgaagtattgattcactcattattgatcttgcaattctacgagccacaacagaaaattttgatgaagg

SEQ ID NO: 4885 - DNA, 2449 bp, Setaria italica
  misc_feature (2399)..(2449): n is a, c, g, or t
  Peptide Sequence Number=SeqID_70859
ccattgcgcgcacgccaagtcgccaaggccatggatgcgcatcaccaccacctgccctcctatctcgccgccgccctcttcctcgccttcgccctcgcgccgctcgccgccggcgaccctctaggccagctctgcggcagcgtcaactacaccgccaacagcacgtaccaaaacaacatccagcgtctcgccctcgcgctccccaagaacatctcctcgtctcaggcgctcttcgcgaccgccagccttggcgtcgtgccggacgtcgtctacgcgctcgcgctctgccgcggcgacaccaacgcctccgcctgcggggactgcgtcgcgacggcgttcacggacgcgcagcaggtgtgcccctacaacaaggacgccaccgtcttctacgacccctgcctcctccgctactccaaccagaacttcctcgcctccaccaatggcggcgagaaccaattgttcatactgatgcccatgccctcccgaaacgtgaccacgtcgggaaagcagtatgaagccatcacgagcgtcctcgactacggcgacggccgcgggaccgccctcatcctcatgaacacgcagaacgtcaccgcgccgttcagtgtgttcgacaacgccgtggccgtgctcctcaacgccatcaccaactacgcggccgacaactcgaccaagaggttcggcacgggggtggaggggttccggacattcgacagcaacaacccgaggatctacgggctggcgcagtgcaggccggacacgacgccggccgactgccggacctgcctctccggtataattcagcaagggccaaagtatttcagcgggaagcagggtggtaggattcttggcctgcgctgcaactacaggtatgagcagtacccgttcttcgccagcaccccgctgcttcagttgccggagcctgccgtggaggccccgccgcccgcgcctgcgccggtgaacgggacgccgccgacgactggaggaggaggaagaggaaacatgactggtagagttttagctattgtactgcctatagttgtcatgatgctggctactgtagtagtttgctattgtctctggaggaggaagaggaaaccagcaggaaaattattactgattgattcaacaaatccagaggacatacgaagtattgattcactcattattgatcttgcaattctacgagccacaacagaaaattttgatgaaggcaagaaacttggcgaagggggatttggtgcagttttcaagggggtcctccctaatggtcgagaaatagcagttaaaaggctttcccagagctctcggcagggaataaaggagttgaaaactgagcttgttttggttgccaagcttcaacacaagaatttggtcaggctcatcggtgtttgcttggaagaacatgagaagttacttgtgtatgaatacatgcccaacaatagcctcgacaccttcctttttgatcctgataaaagcattgagctagattgggagaagagattcatgataatcaatgggattgttcaaggcttgcagtatcttcatgaagagtctcaactgaagatagttcatcgggacctaaaggcgagcaacgttctgctggattctcacttcaatccgaagatatcagattttggcttagcaaggctatttggaagtgaccaatcaaaatatgttacaaatcgtgtcgttggaacctacggttacatggcccctgagtatgctttgcgtgggcactactccaccaagtcagatgtgtttggcttcggtgttttgatgttagagattgtcgcaggaagaaggaactgtggctcaaatgactctgagcaatacgatcatctgcttagtttggtgtggggacactggaccatgggaacagttgtggagatcattgattcatccttgagaagccatcctagtgtagaccagatgttgaagtgcatccatatcgggcttctatgtgttcaacacaaccccgcggataggcccgtgatgtcagctgtgaatctcatgcttagcagcagcactgttccccgccaagctccatccaggccagcattttgcttccagaagagtggcgtcaactcgaacatgtactcggcagctcaccgagaacaaggaatttcccagtccacaagcagatcggatgtgtcagtgtcagagaacgaacttacaattactgaacttgaggcgagataagtcccaatgtactggtgaactcttttagtacttctgttgcaagaaattaaaagaagccttgaaattagaaaagtccctacgtttttttttcgaaacgagccagcacgagagctgccgctttattaataaagaggaatgcccgacaggcgtaacaagaaaagaaaaaaaaaaaaaaaacaaaaactgagacacacaacggnnnnnnnnnnnnnnnnnnnnnnnnnnnnnnnnnnnnnnnnnnnnnnnnnnn

SEQ ID NO: 4886 - DNA, 410 bp, Setaria italica
  Peptide Sequence Number=SeqID_70860
ctgccgcgctggagttcctgcgcgtgttctgcggcttggcgtggttgtgcgtgcccttgtacacgatctcggtgatctggccgtccagcgaccgctccaccttcttcttggttgggcagctcgggaaggtgcacttgtagtagctgcgcgggttctcgctccccttcacctgcttctgcccgtacttgcgccagttgtacccgtcgtccgacgaccgcctctgcgactgcgcctggctgtacccgccgccgctcgccggaacgtgcgccacgatcgcgccggcgtccgacgaccccgcctggaacggcccgccgtaggccgcctggttggagcccgcgtccatgccttgttgctgctggtagccccatggctgctgctgctgacttctgtatgcatcttcacccagtggg

SEQ ID NO: 4887 - DNA, 1386 bp, Setaria italica
  Peptide Sequence Number=SeqID_70861
tggcgccgccggcggcggcgccaccggcggcctcggccggcggcgccgcgtcccacgggcacgtcgtggttgtgcttgccctcgtaggtggtgatgacggcgcggttgtcgtgggaggcgcgctcgacgtgcttccgcacggggcaccccggcgtggtgcacttgtagtagctccgcgggttggggttccccttcaccaccttctgcccgtacttgcgccaccggaacccgtcgtccaggatgtcgatgtcgctcagcgtctgcaccaccagtcggggctcgcgcaccggcttcccgccgctgccggagctgccctcgttctcgccgtcctccgccttccagcgcttggcgtcgggctcgtcggcgtcgctccggtgcgacccgttatcggcctcgtcgtcgccgaacgtcaccgacgagttctcgggcgtcgcgccggagagggcctggtcctccgccgccgccgcaccggaggagttgcggcgcgtcgagagcggcttcgggtggttgtgcgcgcccttgtacacgatctgcgtgatgcggccgtcggccagggaccgctccaccttcttcttcatggagcagctgttgtaggtgcacttgtagtagctccgcgggttctcgctccccttcacctgcttctgcccgtacttgcgccagttgtagccgtcctcgagcttggtgttgctgttgccaccgcagttgttgccgccgctgctggccttgttgctcgcggcgacgacgatctgcttgttcatggcttccacttgctgatccttgaacgatgggaaggaagctgtctgcgtgggcatggcgttggagcctgccgtgtggaaggagaagtcgttgaagccgcccggcgcccgggtctcgtcctgctgggactgggaggcgatcagctcggcggcctgcttccagtcgaacctctgcgcggggatggcgccggtggtcggggacgccaggaggttggagcacgagttgaggaggacgggcgagtcgagcagctcggcggggctgagcccggccgggatggcgaagtaggaggacggcgacatgggcggcggcgagatgggcaggctgggcggctgggccgacttgaacttgggcacgccgcccctggcgccgcggtggaaaagccccctcggcgaccgatcctggctttcggcgccgagcatgtctccggagcccgagagcagctcggtgaaggaggtgatgaagggcggcggcgtgaatgtgaacccaccgtgctccaagctccccgtcgaggacgccatggcgagcgaccgcggagcagcagcagagcagcccgagcagaggaggagccgatgagacgagacggggtgcgtgacaccgtgagcaggggaagggaagaggagaccggagagg

SEQ ID NO: 4888 - DNA, 334 bp, Setaria italica
  Peptide Sequence Number=SeqID_70862
gcaatctcgttcgcaacagccaacaggccagcgacagcgatcaagcagcaagcacgaacgcatagcatccagcctctccggtgtgacaggccttgcacttgcacgtatggcctcttcttccccctgcttctcgctgctcgtgttgttgctagcggcgcactgcgggctcctgctcgcctcggctcacggttaccctggcggctcagcgctgagctccacgttctacgacgcgtcgtgcccgagcgcccacgacgtcgtccgccgcgtgatccaggacgcccgggtctccgacccgcgcatcccggccagcctcatccgactccacttccacgac

SEQ ID NO: 4889 - DNA, 449 bp, Setaria italica
  Peptide Sequence Number=SeqID_70863
ctgcatagcaagtacagtagccagcatcttcagtgatctcgtagcagctcggagtcgtgcaagggcgcgctcatggcggcttcttgcttcccgtttcctgggtggctgctcgcagcgcactgcacgctcctgctcgctttgttgttggctggaggtgcccgtggccaccctccggcgctgagctccacgttctacgacgcgtcgtgccccaacgcccaaagcatcgtccgccgcgtcatccaggacgcgcgcgtctccgacccgcgcatcccggccagcctcatccgcctccacttccacgactgcttcgttcagggctgcgacgcctcgctcctgctcgacgacgacctcccggccatccagaccgagaagaccgtgcccgccaacaacaactcagcgcgcggctttcccgtggtcgacgacatcaagcgcgcgctggagcgcgcgtg

SEQ ID NO: 4890 - DNA, 518 bp, Setaria italica
  Peptide Sequence Number=SeqID_70864
ttctggttgtcaaagtcgtcgacgggagcgcccgagagccagaggcggtacctgccgttggcggggaggaagcggtaggagacgtggcgtaggaggacgtagccggcgtgccccgagccgacgggcttccacaggatagggttcacgccctgctcgccgtagtccccctgcacgacgctgtggccgcggtgccccggcggcgccgggtggggcgaggccgcgaggtaccggccgtaggcggcgctgtggaggaggacgtaggtggtgccgtcgattgtcatccggtgtacctgccatgccgcgttcatcgacgagcggcggccccagctcagggagacgcccaccccgtcctcgccggcgtggaggtacccgccgtgcacgcggctccgcagccgtacatgagccccctcgggaaattgctgcatcgcgtctggcgccagtgcggcggcggcggcggcggccgcgggggccatctggcggcgagcgggaggcttcttcttgattgcctgcccgctgct

SEQ ID NO: 4891 - DNA, 251 bp, Setaria italica
  Peptide Sequence Number=SeqID_70865
ttgcaaagacattgattaattaacaccctagagtcaagttcgaagcagcataattaatgagctcatgcttcactggatcccaagcattcaaggcttgtttcgaatcactgaccttagttgctaggtgaaatcagtggcttcatgaaccaatattcttcttagggaacactgttgccaggtgacattagttgtaaatgttgccataatttgcaagttaacctcaacacccaaacagtaatatattgtaaata

SEQ ID NO: 4892 - DNA, 281 bp, Setaria italica
  Peptide Sequence Number=SeqID_70866
cccagctttgctttcctcgtccgcttcctgccggcccgctcacctccctccgccccgccccgctccgcgtcgcccatcgccaaccgccgacgagatccggcgcgggaaaatcccctcccagatccaccgcgagatcgcgggctcggggggccctgaacccagtctcatgcgatcccgttagcccggcctcccactcctcctcctcctcctcccgctccagtcgccatggcggggagcgacctcgagccgctgcgcgccggcgcggcggtggggaagcgggg

SEQ ID NO: 4893 - DNA, 506 bp, Setaria italica
  Peptide Sequence Number=SeqID_70867
ctgccattcgcactgaagaatgggcgaattgggaagctaagcatcaggattccatggaaaaagcttggatgggaccctattattattgtcatagaagatgtctttgtttgtgcatgcccgcgggaggactctgagtggagctcagattctctggataagagagaactagctggaaagttggctaaacttaatgccattgagcttgctaaattttccagaagagttacagataaccaaacgggccagtcatttttatcctacatatcggcaaagatactggacaatatccaagtttctatgcgaaattttcatatcgtatacatggatactcacaatgatcaagggaactttgtatttggtttggaattctccagtctctcaatacaaacagatactcagaagcaaagttttaccatgtcattgatggctaggtctagacaagatgaagtaaacaagataatagagatatcagatgttggaatttactgtcatcagttagaacagca

SEQ ID NO: 4894 - DNA, 265 bp, Setaria italica
  Peptide Sequence Number=SeqID_70868
ccatcagctcgggaagagcttgcttcgaggcttggcatcagcagatgctctatcgcaagcacgggtagagcgatggcactctccgagctgaacctcaagtacttcgcgcctctaaagcgcggcgccaggttcgttgttctggtgagagtcgtccaaatcaagggcgcgcggatgttcgtcgaccactttgtcgagacgctgccggaacgcaagctcgtcctggaagcaacggccaccgtggtctgcctcaacaaagactaccgcc

SEQ ID NO: 4895 - DNA, 965 bp, Setaria italica
  Peptide Sequence Number=SeqID_70869
ttaaattaaacttaaattaccttaaagtaccttagaccttactcagtcagtttttcatgaattttgaggcactggtcacatgttggtctgtcccctgtcgataatcctctataaaggtacctgcaagaaaattcatgtttaaatcatgttgctttcatacaccgctttccacaaaaatcataaacaaaagagcacgtaaggaaatattgatgcctcgctccaaaaccttttactgctcatagagcaactgctatagccccctgcttgtcacagcttgtactgaaaagcagatttctcagctaaccagcagggagaaaaaaaagcagaggttgtaccaaaagccaggattctgcagtagcttattggtaagcagattctgtgaatgaactaaaaagcagcaataagcagaagctgctttccaacagcattttaaataagaagcttatgcaacaagcagaagctgtgccatcaaaggagccaaagaatcatatgtggacagatgttaggagacacacacatcaattaaagtgaagaagaattgcagtgaagtagtgcatagacaactcaattggccacaaattttgtcataaaaatgtgttgcaacttaataaataataggaaataggagtggcaatgtggataagcctaggtacatcagtcagcatatctgatcaacgaacatgatggtgcagaaagcactattaagattaagacagaagtaatgtatccaaatttcatgctccggtaagactaagtacagtgattgtttaactcttgaagcatactgccacactttgtggatgaggccagacttcaagctcacagaatcaaagaaagcaatagacaatcttaccttaccttaactgggttgatttaatttagcttagcttgtatagctctatcttgaagttttttcctttagggtactttggtgcccctttttgttttattccttgtacagtttc

SEQ ID NO: 4896 - DNA, 702 bp, Setaria italica
  Peptide Sequence Number=SeqID_70870
aagttcaaaacagcataatactacataagttcatattcagccattctagtaaggtacaatgaagctctaactgaaactgacagatgacaaaaaaagagatgcaaaacagctaactaaaaattttcatatagctaagttgtctgctatgatttatcacaagcaggaagcaaacttcgttctgcccaccctcagagatgaagctcacacagtgtttgcagtgtcagcaagtgatcgcaatatacatcctaagcctgccttctcagtcagtttttcatgaattttgaggcactggtcacatgttggtctgtcccctgtcgataatcctctataaaggtacttcatgaggatgtcgtagtactcaggatctagcgaattgaacatgccgtcgacgtccttaatcgccatcatcgcccggtgcaccacaatccaattcgccgacttgcatcgctcatctcgggtcttgaggggcgacccctcgagcgccgtcttcagggcttccaccggcttcgactgcttgaggagtgtctcgatcttgcgggacttctgctcgatgcgggtgatgatggcctccaggttctcgtcagcgtcggggtacgccgacgaggaagccatcccgccggcgactgggaaggcgggtcgggtcggctccctcttgtgctaggtgctctgttcttggtggtattctataggaattacggacta

SEQ ID NO: 4897 - DNA, 823 bp, Setaria italica
  Peptide Sequence Number=SeqID_70871
gtttgacttaggaacaaaaaagacatctattcagtgtcccagggtcccagccatttgttcagctctgatggtacagaaaaatctcctaaagagtttctactaaagtggaccaaaaaaaaaaactatagtacaaacagttgaaaagaacatgatgctacataagttcagccattctagtaaggtacgatgataactgaaattgccagatggcaaagaacgagatcatgtacaacatacagttaacaatttttcatacagctaatttgccaaaagtaacacagcatagagcaggaaccaaactttgttctgtccaccctcagcagagatgaagctcacacggtgtttccagtatcagcaagtgaccgcaatatacatcctaagcctgccttctcagtcagtttttcatgaattttgaggcactggtcacatgttggcctgtcccccgtagataaacctctataaaggtacttcatgaggatgtcgtagtactcgggatccagggagttgaacatgccgtcgacgtccctgatggccatcatcgcgcggtgcaccacgatccagttcgccgacttgcatcgctcgtcgcgggtcttgaggggcgatccctcgagcgccgtcttcagggcctccaccggcttcgactgcttgaggagggtctcgatcttgcgggacttctgctcgatgcgggtgatgatggcctccaggttctcgtccgcgtcggggtacgccgctgacgaagccatcccgccggcgacgagtcggcgcctggctgcggcctgcgggtcgggttggcttctccgcactgctgcgtgctctgttgttg

SEQ ID NO: 4898 - DNA, 937 bp, Setaria italica
  misc_feature (1)..(55): n is a, c, g, or t
  Peptide Sequence Number=SeqID_70872
nnnnnnnnnnnnnnnnnnnnnnnnnnnnnnnnnnnnnnnnnnnnnnnnnnnnnnnagtttacgttactatacttgaggcgataacgtggcttggagagggcatgcagctgctttcctaaaatatgccaatgtggccccggaagtccttcggaaaggtcgtgttagccagacgaaacgcgaggctgcctattttgttattgtcttacatgatttgagtacagtagtcattgctatccgtggaactgagacaccagaagatgttataactgatggcttgtgtaaggaatgttcccttacgatggatgacttggatgggttgatcaagaattgttgaatcagctcgagagctgtacacagtacttgagggacagcccatgcatcaagataagtcagacacagtgacagctggattcttatcttctcttcttggggatggttgtgagtgccatggatacaatattgacattgttggacattctttaggaggttctgtagctgcacttcttggtattaagctatacggacaattcccgaaattacatgtgtatgcatatggagccgcaccatgtgtggattatgtgatagcagatgcatgctcacaatttgttaccagcatagtccacaatgatgaattttctgcacgattatccatgaactcagtgattagattgcgtggtttggctgtcaaggctctgtcaaaggcttcgcccaattctgctaaagtgggtaaactagttggtgggatgatgaatgccagaacggatgagaaaaatgccatagagcattgtgctccaattggtgctctgcagatagtcagtgaggctaagctaagtaatgataaaatgcatggaaggaatccaatgcatacaataagaggtggcttatttctctttggcaaagcaatatcttgcttggtaaataccccaaaatatcgagt

SEQ ID NO: 4899 - DNA, 508 bp, Setaria italica
  Peptide Sequence Number=SeqID_70873
atttcttcgtaccgtcttatggttgtttcgagttcgtccgaggtcagtggtgatcagacgctagctagtacaggcgggcaagtcaaaattggaaccattagtttggcagcttgctgattttgtggcctttattctttgcaatctgctttctgatcgttttgtgtcgttaattccgtgatcttaacgcttttgagcaagaacaacagttcgaaagaaagatcttgtgattttcttgtgacatttcggtctgttcaattcgcaggcagaggctatagttgtctgccttggaagccgcagccatgcaggaagctctcctctctccggccaatgccggcagcctccgctcggcatttgagctcaagccgttcgccttcggggaccagcgcctcgcctcgccgcgctacctcaacctcgcctgcggcggcacgggtggcgacgacgctctgttccgctgctcctcccccttcagccccagcttcggcttctcctcgccgtcgccgctcgccac

SEQ ID NO: 4900 - DNA, 1042 bp, Setaria italica
  misc_feature (5)..(5): n is a, c, g, or t
  misc_feature (10)..(10): n is a, c, g, or t
  misc_feature (15)..(15): n is a, c, g, or t
  misc_feature (20)..(20): n is a, c, g, or t
  Peptide Sequence Number=SeqID_70874
ttttnttttnttttnttttntttttgttttttgggttcatgtaattattttctcattacaattcaaaaccaacagccttttcacattaacacatagcatcatttgtaaaatagctattagaagcttattatctaaattagctattagaagtttggtattccagaatccacactagaacagacacgatcttctatgtcttaaagaattattccatcttggtaacatcagattgggcaagtgaaccatgatgtcagctgctctgacccaattacaagcatttagtgacaatgaaaaagtacatcaaaaatataataagagagcactaatgtttatttgctcaagtgcttcttgaaccaaacccctatgttgaggaagctttcgaaatcagactgaggcttgtcaattccgtggatatcttctgggaagacaatagttttggattcgattcccctctccttcaaagcccttgcatactgcaggccattagaaacaggaaccctgagatcttgcgctccaaggagaaagagtgtaggtgttttgacctttgaaatatgtgatattggtgacttctggtggaattgacaaagatcatctactgaaggagactctgagaagtactttttcccttcttttccataaatctcgacaaagcaccaatcagggatgtcagtggtacccaccatcaattgtaagttacagactgggtttcgagcagctgctgcaacaaatgtatctggagcctggccgatcaaatgagtggtcaagaaacctccatgtgaacctccaactacggcaactttagatggatctattagtcctctccttataacaaggtccaaagccgtcaatacatcattgacatcctgagaaccgatatttccaggaagggattgcagtgcttcttccccaaagcctaatgaacccctgtagttcacaacaagaagattatatccctgcgaaaaaagaaaagccaaggatttggaataacttgatgggtaaactgagtgtggtccaccatgaagaacaacaattgttggattta

SEQ ID NO: 4901 - DNA, 1519 bp, Setaria italica
  misc_feature (1484)..(1519): n is a, c, g, or t
  Peptide Sequence Number=SeqID_70875
tgacaagcttggagagtttaatgctggtaggtgtgtatgatgagaacttctcgacaaaatttgtgaagattctggatcaattgcgttatatccgggtacttaagatatcagcaatgcccttcaatgctgaacttttgctatccagtgtcaaaaagttcatccatcttcgctatttagaactgagatttgattctgacttgcataaacctttgcctgatgcaatatgtaagctctaccacctacaggtactagatgtcagacattggagaggtctggatgacttgccaaagggtatgagtaatcttgtcaacctacgttgtctgtttgttccagggtcaggatcattgcactcaaatatatatcgagttggtcaacttaagtttctacaagaactgaaagaatttcgggttcgacaagagaatggctttgaaatttcacagctggaaaatttaaatgaaatcagagggtcgcttagtatttttgatctcgagaatgccacaaagaaggaagaggcatatcgagcaaggattaaagacaaaaagcatctgcgaaaactttcactatcatggggaactgcaagcataagtcctgctgttcagaaagaaataatggaagttcttaaaccacatgattaccttgaccagctttgtgtcctcaattatgctgctgctactccatcatggttacgagaaaatttctcactcagcaatttagaaagcctccatctccaaaactgtgcagcaatgcagatcctaccaccatttgaggagatgccattcttgaagactctctccttagttggtatgtcctctctgaaagatgtcaggattgactttggttgtggcagtgcgaataaagatacagcttcccagtcctctgaggaagacgaactcgagttaagtgaaatcgaaatatccaagtgttcagctttaaaatccataaggcttcattcctgcaaagcactgactaaattaagcatcaacaactgcgaagcactagctttcttggagggtttgccatctccagatcaactgaagcactatgttgtccatggatgccctcagcttccacctggttccatctgatatcaactatctaattaagaagcggggagatcgagctgctgattggtttgtcctggatagaccggatgtgggcaggatcgattattctaaatttgtcgttctgactattctcattggaggcaacttgaactaaataaaatgggattgatttgtctccagatagaccggatgatccgtaatgaggtggtacaaataaaagctgtttgcttagatgactagatgtatgggacaaatccaagaatatgtttgattagatgtatttgatgatacgagaatatgtttagttgcttagaagacatgtattacatccttatataatttaattattgtaacaaaaataatttatgcaattatcaatactctgtgataattaggtcaaactgctaatcattagaaatnnnnnnnnnnnnnnnnnnnnnnnnnnnnnnnnnnnn

SEQ ID NO: 4902 - DNA, 2904 bp, Setaria italica
  misc_feature (2544)..(2544): n is a, c, g, or t
  Peptide Sequence Number=SeqID_70876
gaactaagcaagcaaactacaaatctggaatcttcctttgctgattataaacatttgatttttttattagacaaataattactcttactcaacacgtttgcttaattgcttctactgtatatattctactagtaatgtcactcgcaagcagcctctcccttggtgcctgcgttttcccacccttccttttttttcccccataggattccagaagcttgcacacacaagatacatgcaactgaaagcacatcggtcatccatctatgaatacttgccaccacatagatcggctatcgtggagacgtaaattaacgttgcaacttgcaagagtagcagctaccattctacaaataaagcatacaagttcaggctgtacaccgtttcccaatcaatgaaacaagctgccgatcctacatcctcactagctgctagtcctctccaagctgttggtcctagcattctctcgcatcttctccacgatatgcctccctctctcttcgatggtccgcctcttctcttccagcttgtctcccatcctcttcccgaaatccatcatccgagctctcctcccaccttttctcttcgcatcctctccaatgatggatgctgatgcctgcggctgctcccccactggtatcacggccctcagagatgtgtacgtgggagacccaactctgctttctgaagcatcttcctggagcttttcagtgaccagcagtggcctcctcagctcatcattttcattgctatggacagactcaccagctggacccggtgaagactggctgtgcaatgatgcttctgccacgggctcttgctttgcctcgtcaatggatgccactgctttcagtgattcctcgctcccagctgatgaaatgggtaaactcggcatcggccttttgctactaccatcatccttcaggccaccttcctcgggctgagttgatgctgtagctgtagcatggcttctcatctcagtggtctcgtgatttagccaaataaaaggagcatccttgcgagggacccagtcatccttttctgccaacatccacggcatggagatgctttcacaattcggaagtactaagttatcacgaagtgaagccttgaatctggagccaataagtgtagcaatatgactgttggtgattttcctatccccaacagaagattccaagtcccattctagatcaggcattgacttaaatccataccaaatctgatcagaaggagggggcttcacatgtatccgcaaggtacctcgaacagatgaaatcctaattgccagagaaagtggaacctgcgagacatgatcagctatcgaatgcaatatatttttccatcttgatatatacgctgaggtccatccagtgctcttcgactgagttgatacatctgcttcgtctttttccccagccaaagaagatgatgtatgtgaacctttcaattggttaccatactgttcaatactttcaagaagatcagaatcaacttctccatcagcatctgctccaaaattacttttcataatgtccttttgcaactctggttcctgaacctcaagccttgtttcaatgtgcagcagtattccacttgaatactcaaagtcaacctcaaaggcccacaactcattcagatccagcggaaggactctcattgcatgtacataaggtggaagttccccaaggctgaagtcagtaagtgtaatttcacccacataagatggggtcctcatatttgacaaagtcctctgaatgcgtgctttgatagccttgtttatctcatcactcattttagcatcaaaaaacaatcgcgatgataggagattccaacaaagtgtaccttcatcagcaactcgatcatctgcattcacatcaggcgaagctggaagctgtccattgtgattcaatgcagcagctggggcagttgctttcaccgtatcttgcaccgaactgctgccgagcttgtcctcttgtggacctattaatgcttcaataaacggtgcaccctgatagctgcgcaatttatcaagtatctttttctctccctgcactgatgatcctgaacttgttttgccctctaatggagcctttgcagatgccttctttgccaacttcttgaggaatagacggacttttgaagaaccatcagtctttgatgtcctgtccgtaacctcatggtcctcaccagagagtactgggggctttaggaaacatgggtattcagaattcagcaatgatatgtatttaaggaacttgtcactaaggtaggcatgccaatttaacttttccttgtcagcagtggctgcaacacgaagtgctttacaccatgattccttctcccaggaagtgtcagtataaagatagcagaccttgcttccattataaatctcagagtccttgctttctaattttattggataccttttagcccattttcgtgagggcatactcgatgcagaaactgcaaggactgtgcaattcagaagctcaatggttgcctgggaaccatcaggaccagacaagcacagcgagtcgcccttgnttttagccatcttctttgcagggaaaacctcggcaatattctttttgtctttcgtctctttgggacctccaactgataggcgctcattactaacttttggtattttttcttggctccagtatccacagagaacccttcttctcgtagtaggggaacgggcgttccccgggcagttccagttcgtcggcggccggctcctccgccgctgcctgcctgcggcggaggcggcgaactagggtgagggccgcggccgcctcgagcgcggccagcgccagggcccccaggaggaaacctagcaggaaggcgagcgccatggccgcgccggcgacgtggacctggttgtaattcgagctttccggc

SEQ ID NO: 4903 - DNA, 1446 bp, Setaria italica
  misc_feature (1348)..(1446): n is a, c, g, or t
  Peptide Sequence Number=SeqID_70877
cctcgccgcctcccatcgtcgcgctcacgctcccacacccccggcccccgctgccgcgccacaccaacaccgcactccaccgccaccatccccatcgctgtcgttcgtcatcggcgcctttcctttccccgcacggaaccctagcagctctccgcgcgcgctataagcctataaggcaccgccgcggccatggcgcccgcaccggcatcgctcaccgcttcccgcgccctctcccccctcctcgcgcccgccagagtctcctccgggaggtggagcagcctgtcggtctccgtcggtgcccggcccgcgaccgtgacggtgtccgtcgcggcgttgaccgcgcagaggaggctggttgcggcggcggcggcgacggagatggcgcccgcggcgagcggggaggaggggagcaagcctttcatcgaggagatgcgagcggtcgccatgaagctgcacaccaaggaccaggcccgggagggggagaaggagccccaggcgccgcccgtcgccaagtgggagccgtccgtcgagggttacctacggttcctcgtcgacagcaggctcgtcttccagacgctcgaggacatcgtcgaccgcgccaccgtcccgtggtatgcggagttccggaatactgggttggaaagatcagaggcactcaagaaggatctggagtggttcaaggaacagggccacacaattccagaaccatcggatcctggcactacatactcttcccttctggaagagttgtccgagaaggaccccccaggcatttatctgccatttctataatgtgtactttgctcatactgctggaggccgaatgattggcaaaaaggtttcggagaagattctgaacaagaaggagctggagttctacaagtgggagggcaatctcacccagctgctgcagaacgtccgtgacaagcttaaccaagtcgcttctagctggtcccgggaggagaaggaccactgcctggaggagacggagaagtcattcacttactccggacagctcctccgccacatattcacctgatctgacattgccctctggtctaaacacaaacgctgtaaatacataatcaatgactttcaagaccttgttagtttttactggggagggggcatctcctccaccaggaacgatttaccttcaggtcaagttgccaagtgttactgttaaataaaccatggccccattctccctccctatgtgtacaaactgcaattctcaacactggcatgagataagtgtactgggtatttgggtggctggtgactgggatgagataaggaatctgcgtgcgatgtctcaatgactaacaaaaaaaaaaaaaaaaaaaannnnnnnnnnnnnnnnnnnnnnnnnnnnnnnnnnnnnnnnnnnnnnnnnnnnnnnnnnnnnnnnnnnnnnnnnnnnnnnnnnnnnnnnnnnnnnnnnnn

SEQ ID NO: 4904 - DNA, 485 bp, Setaria italica
  misc_feature (436)..(485): n is a, c, g, or t
  Peptide Sequence Number=SeqID_70878
tgatcgacgtggcggcgaagcacggcgtgacggcggacatcgaggtggtgggagcggactacgtgaacacggccatggagcgcctcgccaaggccgacgtcaggtaccgcttcgtcatcgacatcggcaacaccctcaagagctccgactgatcacaatctcacattggcgcgcagcagtttctgctgtttctgcttgtccttttcgtgtcagcgatattgtagcggggtcggagatatacatgtagtgtattcattactgtgttggttatgttcaaataatgcagcgtaataacatgttaatgtaaatgttgctgagggtggatgaattggttgttcctgtaaaacgtgctattgttttttcatttctttttccctccgtattttgctagaagaatgggatcggaaatgcaacaaattagaaactaaaaaccccnnnnnnnnnnnnnnnnnnnnnnnnnnnnnnnnnnnnnnnnnnnnnnnnnn

SEQ ID NO: 4905 - DNA, 271 bp, Setaria italica
  Peptide Sequence Number=SeqID_70879
gccgcttccacctcctcccttcctctctgtcctcctgcccggcgctagatcccctcgtcgcaaccgcaccagggagcgtccctcgctaccaatcccgtactacgagcaggccttgcaccctaaccctagcctttgggggaagggaagcaggtagacagagcggatgtggaggcgacgcgagccttcaatggggaggagtgcgacggcaggcatgagggatgagcatgaacgcgacgcacggaccctggcaggaccgtcgggcgtggggcag

SEQ ID NO: 4906 - DNA, 296 bp, Setaria italica
  Peptide Sequence Number=SeqID_70880
tttttttttttttgtaatctcgttctcactttctttgtccacgctttacatcattggcgagtggttttcctttacattcagataagcaggaagagtccagggtcagtggaacttcttttctttctttcttctttcagcaaaggcggcatttcctcgatttcctgatgttcaagtgcttcgcaaaaaagaaaagaaaaaaaaagaataccgataacttaggaaacgaatggactacacagatttagcatctctttgcatagacttttttgaacgaataaattactcaaaattagcga

SEQ ID NO: 4907 - DNA, 1168 bp, Setaria italica
  Peptide Sequence Number=SeqID_70881
cacagctccagacccacccaccaccgccatccccccaccgcccatccccaaacccaccgcgagcgaggaccggatccgggcgatggcgacgctccagcaccagccgaagccggcggcggcggcggcgccgtcgacgaccacgggcggcgggctgcgcgccatggacctgtacgagaagctggagaaggtgggcgagggcacgtacgggaaggtgtacaaggcccgggagaaggcgacgggccggatcgtggcgctgaagaagacccggctcccggaggacgacgagggcgtgccccccaccgcgctgcgggaggtctcactgctgcggatgctgtcgcaggacccgcacgtggtgcgcctcctcgacctcaagcagggcgtcaacaaggagggccagaccatcctctacctcgtcttcgagtacatggacaccgacctcaagaagttcatccgcagccaccgcgccaaccacgagaagatccccgcgctcactgtcaagatcctcatgtaccagctctgcaagggtgtgaccttcgtccacggccgcggggtgctgcatcgcgacctgaagccgcacaacctactcatggaccgcaagaccatggcgctcaagatcgctgacctcggcctcagccgcgcagtcatcgcccctctcaaaaagtacacccacgagatcctgacgctgtggtacagggcgcccgaggttcttcttggcgccacgcactactccacgccggttgatatgtggtccgtgggctgcatattcgccgagctggtcactaacaacccactcttccccggggactcggagttgcagcagctcctgcacatcttcaagctgcttggcacccccaatgagcaggtgtggccaggcgttggcaagctccccaactggcacgagtacccacagtggaagcccacgaagctctccacccttgtccccggtctcgatgccgacggctacgatctgctcgggaaaatgctggagtacgagccgacgaagcgggtctgtgcaaaggcggccctggagcacccgtacttcaacgatgtgaacaaggacctgtactgaagcgattggaacccaccgagcgagccttcatcagttgggcatggagagcttctataacttgtactgtagcttggttggtgtgttaacatgatcccctcg

SEQ ID NO: 4908 - DNA, 294 bp, Setaria italica
  Peptide Sequence Number=SeqID_70882
gcgcgcgcgcgtccgcgaggaagtggcccggcacttcgagcatcagctcggccgccgtcgccgggagcggcacctgccgcacccgcccgtccgggagcacgacccgggcgccccgcccggtcccgggcgtcgtcgccagcgtgcacgacgcgaagttgcccatggtagacccggggttagtttaagctctcgctcctcccgcccccgcgcgaggatgaggagctggggagtgtgtgtgcgtgagcgcgcgcggggggacccggcggtttgcggcgagatcgcgtgcgtttgctt

SEQ ID NO: 4909 - DNA, 832 bp, Setaria italica
  misc_feature (802)..(832): n is a, c, g, or t
  Peptide Sequence Number=SeqID_70883
ctccctcctctccttctccttccccctcccaagaaacaaaagaaccagccagccagctcttgcagagctcaagcgacgcagcaatgtctctggcaccatccatcccttccatcaaggtgaaggtggggggcgtatcggtggcgcccccgcaccgcgcatgccggtcgtcgtttgcggtgatcaggagctccaaggcggaggggcccatccggagacccgcggcgcctccgctgtcgccaccgccaccgatgccgcccaagacgccggctctgtccacaccaccgaccctgtcacagcccccaacccccgtgaagccggctgctcctcctgcgtcgtcggagcagccacagacgcctcttgagcagaagccggttcaggccgcagctccgtcggcagctgtgcagaagccggtggctggggctgtcacgctggagtaccagaggaaggtggccaaggacctgcaggactacttcaagcagaagaagctggaggaggccgaccaggggcccccctttgggttcttgccaaagaatgagatttccaatggaagatgggctatgtttgggtttgcagtagggatgctaacagagtatgcaacaggctcagattttgttcagcaaatgaagatcctcctctccaattttggaattgtggacttggattaatggtggacgcttggtgttgttgttgtataagtcttttaaatgaaatgtacctacttgatatggcatatagaaaattcaatcttgcacgttgtttaacttatataacttagtttcaattaaaaaaaaaaaaaaaaaannnnnnnnnnnnnnnnnnnnnnnnnnnnnnn

SEQ ID NO: 4910 - DNA, 851 bp, Setaria italica
  Peptide Sequence Number=SeqID_70884
tttgtatcaactcaggatgaagccatcccacctaatatattattttattaattagagtgaaccatatagtacaagtaattggttgaaccacactattcaggactgtccatgtagtgtgtagtgcatgcaaccaaacacactaaaactagaaaaaaaaacaaaagaaacaaaaaattacaagaacaaagggcatcgtgaagtaatcaccaatatttaaaccgatcaaaatagaaagcattggcacgcatcctctccgtatgaagctttgggcgaaaaaccttgaagcacagtgctcctttgcagttggcatcaaagatcacaagctcctggcagctgtgatgacactccccacggtgattccatactcctcgaagatcttttcaccaggagcactcgcaccgaatctgtcgatcccaataatctttcccttggtcccgacgtatttctgccatccaagagtacaacctgcttcaacactaattcttgcagtaaccgactccgggagaacactctccttgtattcatccgattgttcctcaaaaagttcccagcaaacaagtgacacaacacgaaccgccttcccctccttccttaactcatcagcagccttgacagcaatctgcaattcagaaccggtactcaacataatgaggtcaggtttgttcccagttgagttgtcggagatgatgtacccacccttctcaacaccctcaaccgaggtaccaggcaggtgaggaagtttttgcatggagagggcgagaacagatggcctcttcctgttgaggactgcaactttgtaagcccagcagtctcattgccatctgcaggacggagcaccaatatgttgggca

SEQ ID NO: 4911 - DNA, 419 bp, Setaria italica
  Peptide Sequence Number=SeqID_70885
cccatgcactccgataatgctgtatcagaggaaggtaatgaaagaagacacgtgggagtggcttagggcgaggtgggattgggctgtgctcgtggttgatgtcatctggaggctatgggtttgtcacggttgatgaccagtttggtaatagtcctttttacagtggggctgcttgggcttgttttttggcggatgcatggcttgccctttttgtcttttcttctttttcccattttgtatgaggagaaactgcaactgtttgcagatatcagtggtcgattttcgccgtggtgcgtttgtggaaaacaggtacattgttgttgtatattcattactgatataatttgtgttgagaaagggaaaaaaaaaaaaaaaaataaactaaaaaagaagaactagaccaaggacacacagggata

SEQ ID NO: 4912 - DNA, 2346 bp, Setaria italica
  Peptide Sequence Number=SeqID_70886
cctttatgccaaaggaaatcgatgatgatgatgatgatgtgatatcagggagccagcaagtcccagtaaacaattatgatgtggtgaccagtgaaaaggagagcactgctagagaaaataatgtagcaaagattaaagtagtggtaaggaagagacctttgaacagaaaggagctatctcgaaaggaagaagacatcatatctgtgcatgattcatcatttttgacagtttacgagcctaagctcaaggtggacttaacagcttacgtggagaagcatgaattttgttttgatgctgtcctggatgaacatgtttcgaatgatgaggtgtaccgtgaaacagttgagcctataattccaattatatttcagagaacaaaagcaacatgttttgcttatggccaaacaggcagtggcaagacatacacaatgcagcctttgcctctgagagctgcacaagacatggttcgtcttttgcgtcaacctgtctatcggaatcagaattttaagttgtggcttagctatttcgaaatatatggtgggaagctctttgatcttctatctgacagaaggcaactactgatgagggaagatggcaagaaacaagtttgcattgttggtctacaggaatttgaggtttctgatgtccagattgtcaaggaatatattgagcgaggaaatgcagcgaggagcactggctcaactggggccaatgaggaatcatcaaggtcgcatgctattctgcaactggctgtgaagaagcacatcgttgtaaaagatactaggagacagagagaccgcgatgctaatgaagctaaaagtacaaaggctgtggggaaaatatcatttattgaccttgctggaagtgagcgtggtgctgatactacagataatgacaggcagacaaggattgagggagcggagataaataagagtctgctagctctcaaagaatgcattcgagctcttgacaatgatcagatacacattcctttcagaggaagcaagcttactgaggttcttcgtgactcatttgttggtaactctaggacggtgatgatttcttgcatttctccaaacgcaggttcatgtgaacacactctaaataccttgagatacgctgatagggtcaaaagtctttcaaagggtggaaacacaagaaaagagcagtccacagggcccactaccgcttctagcagggattcttcgtcagctccatcttatccattgcctgctgaacctgaagaaatccctaatcagattcaagagaagagaccggttgatactaatcggaagggcactgaaaattttatctccaacccttctggggagcctgacagaaattcctttagtatgattccaagttattctaatagagggagagaagaaaatggtgcagcatctagtttcaatgatagggagaggtatgatttgaagtccggccaaactgcttacactggtaaggcacagttggttcagaattcagcaaatacacaagaagaggagaaagccacaaaagtctcacctcctcggagaaaggcttacagagaagacaaatctgataggcagagcaactatgcaaaaaaggataatgggcctgagactggtcgggctgggtataagaagcagccgcaacagcagcaaaggccaccatctgcttcagcttcgtctaggcaatctgaaaaggaaagttcttgtgatgatgtggaaattgatgcaattcttgaggaagaggaggctctcattgcagctcacaggaaggaaattgagaatacgatggagatcgtgcgtgaggagatgaaccttttggcagaagttgaccaaccaggcagccttattgacaactacgtgacacagttgagctttctgctctcacgaaaggctgcgggcctggtcagcctccaggcacgcttggcacggttccagcaccgtctcaaagagcaagagatccttagccgcaagaaaccttccagatagtttgatcatcaaagacactggctttttgcctggtcattcgattgcttggagctcaactatggtccattagcgttttttctcccatgcactccgataatgctgtatcagaggaaggtaatgaaagaagacacgtgggagtggcttagggcgaggtgggattgggctgtgctcgtggttgatgtcatctggaggctatgggtttgtcacggttgatgaccagtttggtaatagtcctttttacagtggggctgcttgggcttgttttttggcggatgcatggcttgcccttttttgttctttttctttacttttttccctaattttaattggttgtctaagtactaattacttaagttttactaaattagta

SEQ ID NO: 4913 - DNA, 285 bp, Setaria italica
  Peptide Sequence Number=SeqID_70887
gggttcgtcgacgacctgggctactcgcggcacgaccccatcttcgccatgcgcggcgcgatgcacgccgtgcgcaacgacatgatcctgctagagaaccagatcccgctcttcgtgctcgacctcctgctggggatccagctcggcaacccggagcagaacggcgccgtcgccagcctcgccgtgcggttcttcgacccgctcatgcccaccgacgcgccgctgctccgcaaggaccggtccaagctcgagtcgtccgtcggcgccgccgcgccgcggcggcgt

SEQ ID NO: 4914 - DNA, 1166 bp, Setaria italica
  Peptide Sequence Number=SeqID_70888
aaggtgaactgctgctacatagtacaatactacgaagtaacacactaaatgatctttttgggacaatcagtatcagtttaaaaggattctctcttcttcttgctcttagattgcttcgccaggagaacagaaagcccagtcaatgcaaatttcttcctctttcctgaaattcttttgcggggagccatatcttctctacacaaaacaccactgcggttcagaatctgaccaagtgagatatttggcatctcgcttgccttgtcgtcccagacacttttgtcatacccatcaggccccattaacttcatactcagtatctgcccaattgacaaagtttgcttgaaagatctatctgaaacatcatcagtaatatccatgctgtgtgaatctttacgaggatgggctgcgtttttgaacttcggagatccgcagatagaccgctttctgtgtccactctcagatttccatctccgaaggatctcttcaactgcaagctttccatggtttgcagcttcaaccctctttagggcctcttgtagcgccttcttgcattcttcacctcacttggcatcctcgagcctcttaaccgactcggactctgagctgttagctatatccacctgcaacatagcatctcctactttcttcttggagttttcatcagcttcaagagttttggaacacagtgtgaaatactcctctattgagagagtcactccatcagaagagttgtcaccttcaaaagaactttgactgctcaatagagctttgatctctgcaagtgcaagggactctgctgctctagctgcttcttccatctttttggctgcaatacacctgatctcagctgtgctaatgctggcctttgcctgctcgatttctgcagccaacaacatcgcttcagattttgaatcatttgccatgctcctgagctgctgaacctcagttgtcattttcttgatctcaataaaaatgtctgagggatctttgcgtctcttctgcagatccttcagagtttccagcttttgtgctgtctgatcaagctcatcctccaaatgagaaaccaaggaggtgttagaggaaagcttttcttggcctctttcaagtaatattttctccttcgctatgctatttcgcagtaactcaactgcagcccaagacccgac

SEQ ID NO: 4915 - DNA, 1132 bp, Setaria italica
  Peptide Sequence Number=SeqID_70889
actccatgatgatcgagttgtccaccctgcgagccgcgaccggggatttcgacgacagcaacaagcttggcgaaggcgggtttggcgcagtgtacaagggcgtcctcccggacggcgaagaggtagcggtgaagcggctgtcgagcagctcgacgcagggcttggagcagctgaagaacgagctggcgctggtggccaagctgaagcacaagaacctggtcaggctcgtcggagtctgcctggagcagcaggagcggctgctcgtctacgagtacgtccccaaccggagcctcgacatcgtcctcttcggtgccgagaatcagctggactgggagcagaggtacaggatcatcaacggcatcgctcgaggcctgcagtacctccatgaggactcgcagctcaaagttgtccaccgtgatctcaaggctagcaacatcctgttagacgcgaacatgaaccccaagatctcggacttcggccttgcaaggatcttcgaccgggaccagacgcaggcaaacacaagccaaatcgtcggaacctatgggtacatggcgccagagtacgtgatgcgggggaactactcggtgaagtcggacgccttcagcttcggcgtcatggtgctggagatcgtcacggggaggaacaacaacgacagctacaattccaaacagtccggagatctcttgaacactgtatgggagcattgggaggccaggacggtgatggagttggtagacccgtccatgaacggcggcttcccggagggcgacatgctgcggtgcatccatattgggttgctctgcgtgcagggagacccggcggtccggccggtgatgtcgtcggtcgtcatgatgctcggcagcgacacggtggccctccaggccccatccaagccggcgttcgtcaccaggaagggcgttgccaacacaaccgattcgacagtgtcgctacagggttaaccggaacaattttctttgcctttttccttttccaaggaacaattttcagttgatagcaccagaagaacgacttgagtggtccgtgtgtctgtatctgtataggtgtgtcacaaaatgcgcaagacccatatgtgtctttgagcccttgatacaaaaagagtggcccttcgtac

SEQ ID NO: 4916 - DNA, 940 bp, Setaria italica
  Peptide Sequence Number=SeqID_70890
taacctttctccgatatctagaccaacacaaaccaaaattgaagatagtttaccatcgattagcatcaagacttcaaggtttgcagtgaggaagctggcaatcgatgctaatatcaatgagcctagttgaaaaaacacataatgtaagctcatgactacaataagcaagcataagttcaaagagctacctgaatgaaatgttattggttcattcaggaaatagcttcatggtgtagttgaattgagcacaatgaagcttttacttaaagctcagataggttctctggttgccacacacggataaggcggtcataaaatgaacaagtagcaacaactgaagaatttccattctgttctgcttcttcatttttctgccaatccgcaccgtatgctaaggactcatgcttgcaatatgtttccattaccgtagcatctccagaacctactttaacaatggcaaacccattgtgcatgcatgcagccaatacaacatctgcaatactaggatgatacttcatcctccagacaccacctcctagatttatcgatttctcgttaacaggttttgccatcaatctcatgtcccaaactctgagaaattcatcataacttccagtaagtagcatgttcccgtcaaatggattctgagcaaaacaacagacacccatattatgagactttttattttggaaaacaatgttcgatgggctttctctcaagtcccaggaactgaaacagcagtcgtccgatccactgtacagtaagtgtggccttgtacgatcaaaataacatgtccagacttcgaattgatgtgccgcccactgttctgatatctctaatcggtcctctctcacagacaccacagacagtgagccatctgataatccaacagacagagactcagcagtttggtccagtccacatataagcacattgaaag

SEQ ID NO: 4917 - DNA, 242 bp, Setaria italica
  Peptide Sequence Number=SeqID_70891
cgtgcgtatacacacgatcatggatgataatgacacggttcacaagcgttcagcaaattaattagcaggtgctgtacttgtaccgacgggcacgagcgaggccgtcagttgttggtggtgaacctgtaagaagcgtaggagatcgaggcgttggtccagctctcgtggatctgctccgccttggcgccgtccccggcggcgcccagcgcgacgtgcagcgggtagaagtggtccggccacgg

SEQ ID NO: 4918 - DNA, 298 bp, Setaria italica
  Peptide Sequence Number=SeqID_70892
ccaaatctgtggatgtatgggttgatggattgatgctttctcatggtacctcagagaggattgtcagaggacgaagacttccaaacttattgaaatgttggcgcacttctttataatttgatagtgtatctgcatcactgcagctttaattatgttctctctatagttcaggtagtacgatgttgtgtctgagctatttgaaataaataaatgaatagaaaggtggcatatgtcgttaattcagaatcttcaagccatgttgccgatttttgctccatgcagtgacttaaaaaaaaaa

SEQ ID NO: 4919 - DNA, 257 bp, Setaria italica
  Peptide Sequence Number=SeqID_70893
ggtctgcaccgagagctggcacacggggatgtcggcgtccgggtacatgagtatcagcggcacccacgcgccgtggtcgagcccgcggctgtgttcctctttcaccgggccgaacccggcttgctccaggagatccttggtccgcagggccaagtccggggcgccaggcgcggggtacttgagctggacgaggacagtggcaaagagttgattcaggatcagagaggaaaagttcagacttcagagcaattcaagca

SEQ ID NO: 4920 - DNA, 1087 bp, Setaria italica
  Peptide Sequence Number=SeqID_70894
ccccagatggagcgctacggcgacatgaccgagtatagcaagctcagcaggctccgcggcggggcctcgggagtcggcgccgccgtcaccgttggccccgccgccgccggggccatcaccgtcgtgctggcgctcgaaagcaaacatcttgtggcacacgccaccaccggcgaccagcggtggactctctcggccagcaggctcccgcgtgtgctaggacgaacggtgtctttccatggcaacctgtacgcggtgacgcccaagtttcgtcaaacgaacagcgtgcacatctggcaaattgatcctccggaactggatgctgcagagggtcggactcttctgccaccgaggatcatcgcccactgcccactggctgcaattccagacgcagtccacctggtcgaatgcggctcggagctcatggttgttggcttcaatgattccaaacgtacagacctggctgtttacagagtcgccgacctcatcagtggaagggtcgttcccataaccaacattggagagcatgctctgttccttgggacacggcccttgtatgcatcacagaacaaggggctcccttctgttgtggctaactctatcacctgcaggtatagagtgacaaagaacgatgcactgagggggggacgtcctttccgaattactgaacaataccatataggtactggcacctggtctccagctactgacgaaggcatttcatgctggaatgaacctccggcaagcccttacatgctcatccatcatatttttacctgttgccagcacagttattggaataaaggtctcatattccacgataaaatcaagcttgattggtcagtgaagccaaatctgtggatgtatgggttgatggattgatgctttctcatggtacctcagagaggattgtcagaggacgaagacttccaaacttattgaaatgttggcgcacttcttgccgtgggtccagctctcgtggatctgctccgccttggcgccgtccccggcggcgcccagcgcgacgtgcagcgggtacaggtggtccggcaacgggtgcgccagcttcccgtgcggtgccttctcctcg

SEQ ID NO: 4921 - DNA, 1383 bp, Setaria italica
  Peptide Sequence Number=SeqID_70895
ttttttttgtttttttttttttgttttttttttttttttaacttattgaatatcattttcccgctcattttattccattatttgaatcacttgcggttcacgcagctgaactgaaccgatcgtgaggttggagtggaggcgaccactcgaaacggcgcaaccgcacaacattatcaatgcacgatgccacgcaccgacgacgatgacatgcccgttgcttcgaacaaacggtcatcatcatcagttcacgacccaaatgcgcaattaacagctacagcaactgcctgcaggcaatggagttcctctctttcccgtctgtctgtgtgcaagccacatgacaacagatgccgtgcgcagttgggccgtcagctgttggcggtgaacctgtaagaggcgtaggagatcgtgccgtgggtccagctctcgtggatctgctccgccttggcgccgtccccggcggcgcccagcgcgacgtgcagcgggtacaggtggtccggcaacgggtgcgccagcttcccgtgcggtgccttctcctcgtacctgttcacgtcctcgtaccttccgttgaggagcgagtccttgagccaggtgtcgaactcggcggcccactgcggcacgggggagccaatcatcggccccaacttgtgcaggttgtgggcggcgttgccggagccgaagatgaggacgccttcctcccggaggggcgccagcgccttgcctaggttgtagtggtaggtgccgtcgcggtcggtctgcaccgagagctgccacacggggatgtcggcgtccgggtacatgagtagcagcggcacccacgcgccatggtcgagcccgcggctgtggtcctcctccaccgggccgaacccggcttgctccaggagatccttggtccgcagggccaggtccggggcgccaggcgcggggtacttgagctggtacatgggctcggggaacgggatgccgttgaagtcgtagatagtgtcgttggtgccgcggatgacgttgactgccggcgtggccgtctcccagtgccccgacaccacgaggatggcgcgcggcggccggtcccccgcgacccgctccggcagccacgactcgaacaagtgccgcaccgggacgtcgtcgatgacgagcgtcggcgcgccgtgcgacaggaagaaggtgtccatggccgggcctggtgctccctcctcggcgcctgctgcggtggttgttgcgtcgcctggcctcccgatgctgccgcgcttctgcccctcgtcctcccgcgtcgcgtgccgcgcgcctggtttgggtctggcagccgcagctctggcctggttctgccccattaatcccgcgcggcacgagctgctgctgccaaacaggcttttcgcgcgcgtgcga

SEQ ID NO: 4922 - DNA, 213 bp, Setaria italica
  Peptide Sequence Number=SeqID_70896
cgtgcctcacgatccaaaactacctcagctagctaccaccaacgctgccgccagccatggcgtcgccgccgtctcctccacacgccgaagggggcgcgagcgccggcgccgtgtgctgcatgtgcggcgaccagggcctcccggacgagctggtccgctgcaggcgctgccgcgtccggctgcagcacaggtactgcagccgacctctacccg

SEQ ID NO: 4923 - DNA, 575 bp, Setaria italica
  Peptide Sequence Number=SeqID_70897
tctacacctcctctgccatcctcgcctcctcgccttcctctcactcctcgccgaaaccccaccccccaacccggatcagggcgtcgcgatgctggtggaggcgatccccgcgctgtggagcgccgtccacgggtggttcacccccgccgtgctctttgtcgtgctcaacatcgtcatcggcaccatcgccgtcacctccaaggccgccgcgccggcggacggcgctgccgccgagggagaaggcgccgcctcgggtgcgggtgcgggtgcgggtggcggagaggagccgtaccggaagctgtcccgcgtgccctccatggcgttcgagcggctccggtcgttcaacctcaaccgcttcgccgcgcccgggcccgagcccgccgtggcgggggaggtggatctggggtacgaggagcagccccccgcgccggcggtggagaaggaggagcccgtgggtgagcgcgagcgcgaggtcgagccggagccggagccggagcaggagccggtgaacgagcacgcggcggcgcacatcaatagggaagacgaagaccggtaacggaaaggaacgaaaagaa

SEQ ID NO: 4924 - DNA, 801 bp, Setaria italica
  Peptide Sequence Number=SeqID_70898
gatcctcggcggccggtgggcggccgccgcagcctccgcggcgtcggtggtgctgctcctgctgccgctcttcatgctcacggcgctggtccggcgcatgggccagtacctcccgctcctccaccgcgcgctgctgctggcgcaggcgtacctcgccatctacttcgcaacgctcgcgctcgccgccgccgccacggggctcgagccgctccggttcttccacgcggcgtccccggccgcgtacgcctggacgcaggcggcgcagtcgctcgggttcatgggctacctcgtgctccagatggtggacctcgtggccgtcttctccggcgcggcgtcccccgaggaggacggcaacggggacgccaccaaggcgctggggctcgcgcagatggtggtggggctcgccgtcggcctgcactactacgccgcggtgttccaccgcgccgcggccggggaggcgccccgcgccaactggcgcgtgtacgccgtgtacgcggcctgcttcgtcgtcgtgtgcgcctgcgcgcgcgccgagaggaggaagaaggcctacctcgccggcaccgacggcgccgccgaggagtggaagaagagctgaccagagtgagagggaggcagaggcacagtaacatcaggacgggggcttgtgtgaaaaaggaaatacaatatggcggtaaaccaagggcttgagtgtaagaatggtcagaatttaggaaggaggaaaaaggagggtataaaaggaaaagaagcagggggggacacgtgattttctttttcctttcctacatttgttatttatta

SEQ ID NO: 4925 - DNA, 1450 bp, Setaria italica
  misc_feature (240)..(240): n is a, c, g, or t
  Peptide Sequence Number=SeqID_70899
tttttgatatgacttacgagacctacaaggcgagcatttctaggcaacataacataacactgccacgcacaaacaagagactgggttgaagagcatttcttcatgacctagttggcgagctggcaaaacgaacccatatatgtaagaccagaggggtgtcttaaactcaacatcgatttacacgttgatgaggaaccagtaatagtggaagttctggactactgtccccttggcgaaagngaattctgacaattacttggttgtgccagatgtcttcaagcagttgatggcctcacataatgctttgtcaatctcaacatttgctgggtccagtttgagaccatcaagaaatgcatcgcatgccttttcatagtccttaagtagcatccgagcagctccttgcaggtagcaagcctttgcccagccagggcgctgcatcctgcaaattccagaatcactcaatgcctggtcccctagacccatcttcagccagcaaaggcacctatttgagtacaaggttgagtcatcatcagggcactgatctgctgccatagagtagagctttgcagcagtagcataatcctttctcttgtaagccttgtttccttctaacttgagatcatctggtttcattttgtacatggggtcatccttcacagatggcattgatttcacataactgattatcccctcaacgctccaatcccgcacatatggaacacgagaagttactggaagtagaatctcgacatctttccttctgttctcatatgcagctatttcaattggaaggtgaccaaaatcatcacgaacatcaggatctgcaccagcctccagtaagcaattgtagaagtcagttaagccattgctgaccgcagttattaagggagttacagaaccaacacccttcacgtcagcaccagccttgatcaaaagtttcacacacttgagcgagccagcagtgagagacacaaaaagaggagtgcatacagtgttaaataccttgttacaatctgcaccgcggtccaacaaaatcttcatagcaccatcctgcttaaagaaagcagccatatgcaatggtgttccagtatcacaaaacgagtcaacattggccccgtttgagagtaatgcttttactatatcacaatttcctcctgcagcagctaaatggagagcggtagatccttttccattaggcttatctggattagcatcatgatcaagaagatactgtacaatgtccaaagtgccactacgaactgcataggccagaggtgtatctcctgaatcatcggtcgcgttgacgtccacgaggagctcctcgacgaggtacgcgcacatggacatcctcccgctgcccgcggcggcgtgcagaaccccggcaccgcggctcgtcacggcctcgacggcctccctgatgcggccctttccggcgtccagcgcggtcgcg

SEQ ID NO: 4926 - DNA, 544 bp, Setaria italica
  Peptide Sequence Number=SeqID_70900
ccgaggtggtgcgcgagatcctcaaggtctccgatgtgcagacggccgggatcaaggcgagcaacagcttcgatgcgttccacatcgccgcgaagcaaggccatcttgaagttctgaaggagatgttgcaggcttttcctgctcttgccatgacaacaaattctgtaaatgctacagctttggacactgctgcaattcaggggcatgttgatatagtcaatcttctactggaaacggatgctagcctcgccagaattgcgagaaataatgggaaaacagttttgcattcagcagcaagaatgggccatgtggaagttgtaagatcattgttgaataaggatcccagcattggtttaaggactgacaagaaggggcaaacggcactgcatatggcctcgaaaggacaaaatgctgaaatcgtggtcgagttgctgaagcctgatacttcagttgtccatatcgaagacaaaacaggggaaccgacctttgcatgttgctagtcgaagggatatcattatagtgcaaactctattatcagttgagg

SEQ ID NO: 4927 - DNA, 907 bp, Setaria italica
  Peptide Sequence Number=SeqID_70901
gtaaaaagccaaaacaacctctagtgtttttaaaaattgaaggcaggctttgtattttagcaaggaaacagataattaactgtatgccacctgattctgcgaaacatgtttaaccgattacacctcggccgctctaaagctgctaagaaattattatcccaacaattcacacctagccgtccaacgcgaatatatcaacaaaatgcaaccgttgagatccggcaaaatgaatttcaacctaatctaggacagctcacggcaacgctttgcggcagcaacaacagcactgatcagcgttccacggaatgcacccttctcgagctcctgaaccccagctatagtagtccctgctggagaagtgacctgatccttcagttgacccggatgttttcctgtctggctcaccatggttgcagcaccaagaaccgtttgagatgcaagaccaagagcaaggtcccgaggaagcccagcagcgactccaccatcagccatggcctctattgctaagaaaatgtaggccgggccactaccactcaggccagttacagcatcaaaatatttctcttcagctgtccaaacttttccgatggcactgaataaactttttacacgattttcatctttctgagtagccatctctcccaaacacatcactgatgcagcttgtcctacagctgaaggggtgttgggcattactctaataattctccgctgaccagaccaatcctgcaaatctttcatcttgatgccggcagcaatagacaccagaagtttttcatccgacagcagtggcttcagttcaagtagaacctgctttacgatctggggcttcacggagatgacaatcacatcgctctcatcgacaacctgggtgttggtgtcgagcaggctacgcgtccttattggt

SEQ ID NO: 4928 - DNA, 1291 bp, Setaria italica
  misc_feature (1)..(28): n is a, c, g, or t
  Peptide Sequence Number=SeqID_70902
nnnnnnnnnnnnnnnnnnnnnnnnnnnnttttttttttttttttttttttttttttttatttaattaaactgcatgttaatctttgattgatcagcacatcacgtgcatgtacaaattactcacgtcgcacttattcgttctgtatgtagctccattaccatgtttgcacttacaccgtgacacattgaacgatcgacattcacttcaagcgcgtctgcacatgtagctaaaccagcacgaaggagcgcagcagatcactcagagctcggaggtgcaggaggatggaagctagcggcaccgccatggcctgctgcggcaaacccttgcccttcctcgccgtagctggcgctctgatcgacgtccggcgccgccccttgctgccaggccgggtcccaggccggaacttgccaggccggcatcatcggcgccggctgccccatcggcgggtagtagtacggcatcccggcggcgggcgccgcgcctcccccgacggcgccaggcccggccgccgcgaagccgagcgcgctcccgggctcctccttggcctcctctcgcggcacgatgtcgacgaggaagtcgaagacgtcggtgcgcgcgatggctgcggcgacgtcgttgcgctgcagggtgcggcgcttgttctcctcggcgtgcagccaggagcggatggtgagctcgaggatgaagagctcgcacgccttggcgaacaggacgggagcctccgcggagatcatgcgcacgtcctcgtcggccttcatgatcttcttgatccgggccagcggcagctggtggttcttgaagtccgacgccgacgcgcgctccgcctcctgccgctggtacccccagaacgcctgcagctgggcctgctgctgctggagcaggtggtggtgcggcaccggtggcggcccggccgcgccagggacgccgggcaccggggctccgccggtcgccgggggctgaccagtggagtagggcagcggctggttgtccatggattcaattggttgctacttgtggccgttccgatgcttcttctcgcctgctcggcgttgtagctgatagctttgtgcctgaacttgaggtggctactgtcggcttatatcaagctttcttacaggagtagtgagctcctctcagctccttcagcacagcaaccgcgcgcgccacccagacgctcttcagcatggagatcggaagcaggagctagcgatgaccccgcctcctcccggccggccagtcccaggctctcccagctgccgctgccaaagcctgagcaaaatggcaagctcc

SEQ ID NO: 4929 - DNA, 1227 bp, Setaria italica
  Peptide Sequence Number=SeqID_70903
ccccctttgtacatcaagaaaaccgaaactgaacatctgatcccttcacttcaccgtcatgggagcttcggtgccgttctgctgcacggcgtagacgtcccgcgccttcctcgcctgcttctcgcagtccagctcgagctcctggtctttgctcgcgccatgcacttggtctttctccttgccccacagcaacatgtacaggcccagaattacaaccacacctccgattatgcttccgacgtataggttctcgccgaagatgaagtaggccaggatggccaccatgatcgtcgacagggggttgaacatggtgacgaagacggggcctttcttctcggtgcaccacagctggacgaagaccgtgaagccgttgcaggcgagtcccgagtacacgatgcaccagaacttgaggccgaagccgatgagccagtcttccggcttgtgctgcatgaacaccgtgaagacagtcgactcgtacccccccaaccgtgcacatccatgccgtcagcgagagctgggccgggtacctcttcagagatgatgcctgcatgatgtaccagatggaccagcatatgcagctggccacggcaaggactgaacctttcacccaactgtcatgcgcgacggcgccgcctccaccgccgtggatgtgaacaggcgaattccagaggcacttgatcgccgctcccttgtacagggtcatggtggtcaccccggcgaaagacaccacggtccctgcgatcttggcgagccctcggaggctcttggcgtccacgatctccatcctgaggatgatggcgatgacgaaggtcatggaggcgatggtgttcaccatggaagtgacgaacgttggggacgtgtacttcaggcttgcgaagtacatgttcagagtcaagctcaccccgagaagcgacagcacgaatatctccatgaacagcatgaatgtcattttgggcctcaaccccctctcatggtagtaggcgaatggccagatgaggacggcgacgagcaggtgccggtaggtgacatagacgtaggggttgagcccccggttgaaggcggcctcggtgatgaagtacatgagcgtgtagcacagctgcgccaggaccatctggacgtgcggcgcgtaccgccgccacacccctcccttctcagcgacctcgagagccatttctgcgggatcactcctatctccactgccccttcaacccaagcgtgaccagtttc

SEQ ID NO: 4930 - DNA, 261 bp, Setaria italica
  Peptide Sequence Number=SeqID_70904
gcggcagatcgagagcgagagcgagcgaccgggcgagggcgagagcgagacgaatggttcaggacaggaggcgagaggaagcaaaactgacgcgtcttacgtcggtgccagcagccaatcgaacggtttctactgaaccagccgaacggctgggcttttcagcccagccgaaaaaagcccagccgactgtttcagcccacgggctgtaaaacggaagagcatttatacatgtgtacaggtcaggcaagcacccaccgccgc

SEQ ID NO: 4931 - DNA, 437 bp, Setaria italica
  Peptide Sequence Number=SeqID_70905
acttctcacccagcatgaagtagtaccttgatgcctctgtctggttagtgaataccacataagcacggacggcaccatcatccttgcattgcatccggttgacatacatgtacctttggtgaagccccagtgaggatgcggtggactcgctgccgctctggtagtgcaacctgaacggcgatttgagcattgaattgaggtaagcacacgagaaagtcctattctcgaacacctggagcgcgtcgagcctccccgcaggcgggggtgggcaggaggcgctctccgcgtacgcgtatccctcctcagcgtaggcgacgagtgagagggggtcgatgggtgtgatggtgtcgacgctctcgaggcggccggtgacgaaggaccgcgtcaggttggcggggtgggaaaccgaggcggagcacgacggggaagtgcacggg

SEQ ID NO: 4932 - DNA, 1385 bp, Setaria italica
  misc_feature (1377)..(1385): n is a, c, g, or t
  Peptide Sequence Number=SeqID_70906
cacccacccatggcggtttgatctgatcccctcccacacccgcaccacttcctcccccaactctccctccctccgccgctgcccccaaccgaagcacgcggcacccagcaccttctcgctctccgcctcctccgcaccggagatccgtctctgctgatcagatttgtggacatggctgataatgagaaagaggtgggagagggaaccaccccccgtggggcggactgggaagtggtgactctcacagcgtccgcctatgaagcggcgcccgggcctgctggaacggaagcaaagcctgttaatgaagagcacagttcatccaatgaattgctcatgtctggtcactttgtgtttccgcccagtgagcacgagaacctgccgatacagaccaggttgtatgagatacaaccagagaaagatgtgcaggaagttagtaccggtgtggaagattatagtatcaagaatgatgctgggtctgagagagttcagttctatgatgaagggagaaacctctcagctgatgacgtagagatgagagaaacctctcacgatgaagatgatggccatggttttgttgctcaggatgatgacaatgaggctggtgatggttctgatgaacaatcgggccagccttttaagcctgcagacagcaagagccatgatgctggtgcttcatgtaaatgctggttgaagaagcacatgacatgcctgtatcaccaagccaaggaaacaaatgctatctggtctgtggtggttgcagctgccctggttggaattgtgattttggggcgttggcacaaagataaattgcaccttggccaccttaagtggcgctcgggctcagcagtaagaggatgatcaacaagtggtcttagttgacacaaagctctgatgagtcttcacaagtcacctcaagtcgtaaccaagatggtggatgcaatatgattgtgacggtgacgaaaaggagtacgggcaatgtaataatatgatgtttgactagaattttatttgcagcctacaatgaatgctggggttctaagatgtcaaattcaatccgaccattcgcatcatcttacctctgtacttgcaacctgggcacctggcacattattttaagttcctgctacttttgctgtgatataagttttaaccgatccccgatgtggctgtaaaatatagaattgcatactgcaaagtctgttagaacttggttgttcagtgagggcaactgaaatgcatttgtgcttttgcttgtggcaatggaaaacctggaaatgtttggcttctaatttgtaactcctgagtactgaaatactgttttggcaatgtgccatagaaagcattatggttggtatttgataaaaaaaaaaaaaaaannnnnnnnn

SEQ ID NO: 4933 - DNA, 365 bp, Setaria italica
  Peptide Sequence Number=SeqID_70907
ccagaaccctagcctcgccgccatggcctccaccatgctccgctccggccaccgactcttccttcgccgccagcgcctctccgcggcattctccaccgcctcggccgaggagcttatcgacgtccgcaagcttcccaccgactacgacccatccacctttgacccgtcctccccgtcccggccgcctccgtccgaccgggtgtggcgcctcgtcgaggacgtctccttcctcaccctcgcagagtccgcagctctctcctctctccttctccgccgcctcaacatcccctctgcacccccaatcgccatcctcaactccgccgcagggctcggcggcggcgccgccgccacggccggcgcggcgg

SEQ ID NO: 4934 - DNA, 612 bp, Setaria italica
  Peptide Sequence Number=SeqID_70908
gtacagtatggccagttctttccaagatcacaaattaaataatcggagagtatatattatctaaagtgaaagaatttgggttcaatgttgtcccctcacctgaagttggattcttgaaaacccttggtgggaagctcgggaaaagcaatgtgaagctcgttttacagtttcttgacgagcaagtcactgaaccttccacaaaacaaacctatggagccattctaaaggacttgaaatctatcaagacttttgcctcaggaattctcgtccccaagacctacatttggcctgtgaacaaggatcattacttgcagccagctactaatttggtgaaagatgctcatgccctaggcttggaggtctatgcgtttaagtttgccaatgatgacatctcaagttacaactacagctacgatcctagtgccgagtacttgcagtttattgataattctgacttctctgttgatggtgtcctcacggacttcccgtccacagcttcagcagccgtagcctgtttagcacatactaagcacaacccgcttcctccctcccggaaatgataccaggccactgatcatcacccacaatggtgcaagtggcatcttcctggtg

SEQ ID NO: 4935 - DNA, 1390 bp, Setaria italica
  misc_feature (1)..(22): n is a, c, g, or t
  Peptide Sequence Number=SeqID_70909
nnnnnnnnnnnnnnnnnnnnnnatttttgttctaacaaccttttatacaaccaaaaagtgaagtactgcatactgaatattcctttcataaggtagcatgcatcagtacatgctgataaaggacattagcactgattcttttcagtgctgctacactacatacatgctgcagaaaaaaactggaatgtggaatgagatcaggatctctgacattagaaaaaaattagactacctattttctcccatttgtacagtaaacaaggccccaacctctcaggtaaactacaactgctagacatgtaactaaaaaaagaactgtgcatatatatgttcttctatgcctgagggacggcagggttctcaacatcgctggtgacggtgtcgttctgtcccccggcggcaaccgaagactgcccggaaggttgatcagacgccggagcatgctgctgagctgcacgcgctctgcgatcacggcgtgcctgggtaggaggcgccctccgcctcatcctccaccgtagtatctcaacgatgatggagttcccggtcatccccacgccgaacccagcgaaggtcgccaggatgatggatatcacggcctgcaaatggaggtatctgtagaacagatgggtgaagaagacgacgaagaggaactggactgccgcgtagatccacacgtatcttcttgccaccatgcttgttgtggtcaatgaggagaagaggcccaggatacatgagaagggcagcgatatcgccagcgcagcaatgccgtcatggcccaccagtaattgttccaagaagcagaagtaggccaggatgctaatgattacgaggataggtgtcccatgccacaccctgtaccgatcgtatcttgatctgctgcctccgttgccgacgcggttcgcctcgcgctgcacgctctggacacgtagcagggtcaccgggaggttctgcacatcctgcttgcacacctcacaggtcctggtgcccttgatgctgaaccatttcatggcgcagtccttgtgcgctagagcaagctcacccttgcaggagcactccagcttcagggtgtcgttgccttcggacagctcaaccatgcagatccggcacacggcttcctcctccggaatgtcctcgccatcgtcttcgccgacccctgactctgaagggactatatcaggaatgacattgcttgcagctggggctctcggtgtcgaaggaacaacacggtacatgccgcctagcgagtccatcctcttgaagctcttggcgttgaatttcttcatgttcatggggagggactgcgagcggcatatgtgaagtgcaggttcagcggcggtacaacttgctgaggattttgttgtcaacggcatgttgtgagtgtgacagagca

SEQ ID NO: 4936 - DNA, 519 bp, Setaria italica
  misc_feature (98)..(98): n is a, c, g, or t
  Peptide Sequence Number=SeqID_70910
cctccttgttgatcttgtccacctgcatctgccggcggcggctgagcgtgtcgaacagctccattgcaaactgtcgagacttaaggagcaagccgaanagtatgcggccttgatcatggaggaacttgatcctgaagggcttggctacattgagctctggcaattggagacactgctactgcaaaaggatacctatgtgaactacagccaggcgctgagctacacaagccaagcactaagccagaacctagcaggcttaaggaaaaagagtccaattcgcaaaataagcaccacacttagttactacttggaggataattggaaacgcctgtgggtacttgcattgtggattgggataatggctggactgttcacttggaagttcatgcagtatcgcaacagtatgccgaaacaccattacatggttgagaaatacaagggctgcatgggcattaccatttgattgattaattattaaacttcctactaagtacttatttgttcttagttcggtactta

SEQ ID NO: 4937 - DNA, 650 bp, Setaria italica
  misc_feature (573)..(573): n is a, c, g, or t
  Peptide Sequence Number=SeqID_70911
tgcaaaaaacaaaaggagtttgaaagtctactctctttttttttggttttgctaatttcatgctcccaaaagaaattaaatctagtggttaaaaatacccatttctggatgaaccagtaatctcggtaccatcttctatgtctgatcactttaaagaaggtaacttttgttgttgtgtacaggagtgttctactgtggggctccagttttggcacaggaactaagcaaactttgttatgaattcaatggcaagtctacaacgaaatttgagttccgcaaggagcatttctgacataacaaggtaaatacataataggggaaccaaggggaagaagatgtgttgtatgtaagccatttttgtttaacacgttgccttcttcgcaatgagttggaagagcaggggattctgcacatggtgttgtgtcgccacggtgccgtctgcaccgtgatactcaccagttacaacagcgagatctattgcttgagaaactggtgagtatcacggtgcagacggcaccgtggatactcaccagttacaacagcgagatctattgcttgagaaactcaaaaacngtaagagcacatatagaaagggaactggggggtggtacaatacacatggcttccatcatagttgaacaatgaacagc

SEQ ID NO: 4938 - DNA, 432 bp, Setaria italica
  Peptide Sequence Number=SeqID_70912
aaaaggtaaaaggttaaaccgaaccgtaaaagaacctaaggtaagaaagacttaccaaaggaccaattttgaacaaaattaaactggcttcaatgcattctggtactctcatcatttgttcatcattgtgtacatagcacttgttattcatggagagtgcttataccttatccacgactggtacaaaaagcgacatggatgtatctctcagtgcctgttggtctgtatgttggggagaggacgctgaggttcttcaggtcgggcagttattctgtccggctattgaaggtggccatatatcctggtaatgtttttgacattgcagatgtctaagcctcccacattccgttacaagagcgggcagtatatgtttgttcaagtagaccctagactagtttacaaccctttagaaataggacaatacctttacta

SEQ ID NO: 4939 - DNA, 475 bp, Setaria italica
  Peptide Sequence Number=SeqID_70913
ttcgtctaattgtagtttggtaagtagtctaggggtatttcttatctaatggtgttgtgtcgccacggtgccgtctgcaccgtgatactcaccagttacaacagcgagatctattgcttgagaaactcaaaacagtaagagcacatatagaaagggaactgggggtggtacaatacacatggcttccatcatagttgaacaatgaacagcacatacgggaggtgcgacgaggaggcgagcgcagagggtggtggtggcgcggctgcacggcggcggaggctgaggaggccagcgacaccggcggcgccgccggagagggcgccgagcgccgacattgctagtcctttgctatggtggggtggggaggctgggaagtggtgggaaggagtggccttcttagagcagatgagacaaccaagaaagctttaccaaagcttctgattgatggaccttacggttctcctgctcaggatta

SEQ ID NO: 4940 - DNA, 1656 bp, Setaria italica
  Peptide Sequence Number=SeqID_70914
cgccgggcgcagctcgaccgcaccaagtccggcgcgcagcgggcgatccgcggcctccgcttcatcagcagccaacaaggccagcaacgcctggatggaggtgcaggccaacttcgaccgcctcgcctgcgacggctacctctcccgcgacgacttccccgaatgcatagggatgatggagtcgcaggagtttgcaatggagctgttcgacacgctcagccgccgccggcagatgcaggtggacaagatcaacaaggaggagctgcgcgagatctggcagcagatcaccgataacagcttcgactcgcgcctccagatcttcttcgacatggtggataagaatgcagatggccatatcacggaggcagaggtgaaagagattatcatgttaagcgcttctgctaataaactgtcgagacttaaggagcaagccgaagagtatgcggccttgatcatggaggaacttgatcctgaagggcttggctacattgagctctggcaattggagacactgctactgcaaaaggatacctatgtgaactacagccaggcgttgagctacacaagccaagcactaagccagaacctagcaggcttaaggaaaaggagtccaattcgcaaaataagcaccacacttagttactacttggaggataattggaaacgcctgtgggtacttgcattgtggattgggataatggctggactgttcacttggaagttcatgcagtatcgcaacaggtatgtctttaatgtgatgggctactgcgtgacaactgcaaaaggtgctgctgaaactctgaagctgaacatggcaattatcctcctgccagtatgccgaaacaccattacatggctgaggaatacaagggctgcatgggcattaccatttgatgataatataaacttccacaagactattgcagcggcaattgttgttggtataatccttcatgcagggaaccaccttgtatgtgattttccacggctcataagttcaccagaggcaaagtatgctcctctgcacgagtacttcggggaaataaagccaacatattttacattggtcaaaggagtggagggcatcaccggtctaattatggtgatctgcatggttatagctttcactttagcaacacggtggttccgccgtagcttggtgaagcttccaaggccattcgacaaactgactggcttcaatgcattctggtactctcatcatttgttcatcattgtgtacatagcacttgttattcatggagagtgcttataccttatccacgactggtacaaaaagacgacatggatgtatctctcagtgcctgttggtctgtatgttggggagaggacgctgaggttcttcaggtcgggcagttattctgtccggctattgaaggtggccatatatcctggtaatgttttgacattgcagatgtctaagcctcccacattccgttacaagagcgggcagtatatgtttgttcagtgccctgctgtttcaccctttgaatggcatcctttctcaataacttcggcacctggggatgattacctaagcattcatgttcggcaacttggtgattggacacgggagctcaagcggatattctcagcagcttgcgagccaccagtgggtgggaaaagcggccttcttca

SEQ ID NO: 4941 - DNA, 965 bp, Setaria italica
  Peptide Sequence Number=SeqID_70915
tcaaaggagtcatgaatgagatcgctgaattggaccaaaggaatatcattgagatgcacaactacctcactagtgtttatgaggaaggggatgctcggtcagcgctcatcaccatgcttcaaactctgaaccatgccaagaatggtgttgacattgtctctgggactaaagtacggacacactttgcaagaccaaattggaaaaaggtcctatctaaaattgcctctaagcatccgtatgccaagataggtgtattctactgtggagcaccagttcttgcacaagaactaaacaaactttgccatgaattcaatgggaaaagcacaacgaaattcgagttccacaaggagcatttctgattcaagtaaatacccggtggcgaacaaggataaattatgtatgtgtacagcatttttgtcttggtatattcatcgggactaaggacaggagagagcaaaggggagaagccaccatgaagtgattaacatctgacaccctatcttgtttctggtggctgctctcaaatgaataagagcacaaaaaagaggtgattttgtgtacagtcatagatgatacatgtgacgtccaatcatccatctacagattggaccctcaatgcccagtggaactgtgaggagttcccttccagttggtctccaatgtacagtgcacacatgaagaggttggggtccttaatttagttgggattgtcggtagcatggtataggacataggagggataccactagtcacaaggctatttaattgtatattttttttcatgcagctgagtgtctggctaaggccagaagcacgaatatcttttacatttgtacttacacacagaaaagcaaaacaaaaggaggtgaaaagggaagatggtatactcaatttgagtgtttcttgtagcccgtttaatatttctaggtttataatttttgctatacacctaaataaaaaaaaaa

SEQ ID NO: 4942 - DNA, 1442 bp, Setaria italica
  misc_feature (1400)..(1400): n is a, c, g, or t
  misc_feature (1412)..(1412): n is a, c, g, or t
  misc_feature (1419)..(1419): n is a, c, g, or t
  misc_feature (1423)..(1423): n is a, c, g, or t
  misc_feature (1425)..(1425): n is a, c, g, or t
  misc_feature (1438)..(1438): n is a, c, g, or t
  Peptide Sequence Number=SeqID_70916
ttgttattcttggtcggttgtccttgttttgtcactgagtaatataggggagaggacgctgaggttcttcaggtcgggcagttattctgtccggctattgaaggtggccatatatcctggtaatgttttgacattgcagatgtctaagcctcccacattccgttacaagagcgggcagtatatgtttgttcagtgccctgctgtttcaccctttgaatggcatcctttctcaataacttcggcacctggggatgattacctaagcattcatgttcggcaacttggtgattggacacgggagctcaagcggatattctcagcagcttgcgagccaccagtgggtgggaaaagcggccttcttcgagcagatgagacaactaagaaagccttaccaaagcttctgattgatggaccatatggatctcctgcacaagactacagcaagtatgatgttttactacttgttggattagggattggtgccacaccttttattagcatattgaaagatttgctcaataacatcatcaaagtggaggaagaggaagaagcttcaagcgatctttacccaccaattggtcgcagtaaggcacatgttgatcttgacacccttatgaggattacctcaaaaccaaagagggttttgaagacaacaaatgcttacttttattgggtgacacgcgaacaaggctcttttgattggtttaaaggagtcatgaatgagattgctgaactagatcaaaggaatataattgagatgcacaactatctcacaagtgtttttgaggaaggggatgctcgatcagcactcatcacgatgttgcaagctcttaaccatgccaagaatggcgttgatatagtttcgggtaccaaagtccggacacactttgcaaggccaaattttaagaaagtcctatctaagatagccaccaaacatccttatgctaaaataggagtgttctactgtggggctccagttttggcacaggaactaagcaaactttgttatgaattcaatggcaagtctacaacgaaatttgagttccgcaaggagcatttctgacataacaaggtaaatacataataggggaaccaagggggaagaagatgtgttgtatgtaagccatttttgtttaacacgttgccttcttcgcaatgagttggaagagcaggggattctgcacatggtgttgtgtcgccacggtgccgtctgcaccgtgatactcaccagttacaacagcgagatctattgcttgagaaactcaaaaacagtaagagcacatatagaaagggaactgggggtggtacaatacacatggcttccatcatagttgaacaatgaacagcacataccccaggtggacgtggaccggcaagggccaaagccggtaacttaaggnggggcctccganaatgagntcgngntccactgcgcggnggtc

SEQ ID NO: 4943 - DNA, 1982 bp, Setaria italica
  misc_feature (18)..(18): n is a, c, g, or t
  Peptide Sequence Number=SeqID_70917
gccgccgagtggagatcncccccgggccctgggcgcaggctggtgtcttccttccctggtacaattgatttgattaccttcgaaaatccgcacccctgttttcacgtgattagaaaggacagaaagtgcagcaattgtggactaaagggcttgtgcttttgagagtacttcaggaggaatacatgcgtaacgaaaccttgattcgggaatggtgtccactcgaaggaacagcgggattatcctacgggaagggccggttagggactggtccgagtttaatgacccctcaccgtccccaaaactgctgtattcacagtcctatgttgcaatgagggggttgctggcctcggtggtgtccttggactttttcctgttgtcaagcaagctaaaatctgcatgggcaggtatgacgtcccataggcatattcgatctcaggagagatcgaaaacaaggggattgagctgcaagagagccgcaattcatctgttgctgtgtttcatggttggcattttcattggcttcatgccattcttctcggttgatgtttataagaaaattgtctctgaaaatgaaaggcttccgttccacgagaatgtgattgaggcggagatgatggatactaaagttaaggagttggagacagttgtagtcgagaaagaggtcgaactgattgatgagccagaagttggagagagccctccagttcctgcaatgttggatgacgaggcagattttgctgaatcaacacgtgcattacctgctattaaagaatcagacatcgctgtgaagaagctgttgataatcgtgacaattacttctgttcggccacaacagccatattacttgaatcggttagcccatgtcttgaaagatgtacatgcacctcttttgtggttagtggtggaatggcctgaacagtcctatgaaacagcagagattctgaggtcttctggggttatgtacaggcatcttatatgtagaaagaatactacaagtgtacgaaagatcgctgtctgtcaaaggaataatgcaatctatcatgtcaaaaagcatcacctggatggtataatgcattttgcagatgaagagcggtcatactcagctgatgtatttgaagaaatgcagaaaatcaggcgctttggctcgtggcctgtagcaatccatgttggaactaagtatagggcagttttggaaggccctatttgtaaaggtagccgagtcactggatggcacacaatccagacagctctaaagaagagtatgattcgtcgattcccaattggtttctctgcatttgctttcaacagtacaatgttgtgggaccctcagagatggaaccgcccagctatggattctgttatagtccactcaggtggaagaggtggtttgcaggagtcgagatttatagagaagcttgttaaaaatgaacgccaaatagagggtcttccagacaattgcaacagggttatggtctggaatttcaacctggaacctcctcaactaaactaccccacaggctgggcactatataagtacctagaagccaacatgcctgtaatatagtttcttgctgctgcactatgtctgctccgagaggtgatttttctcagtcagccagaagctcaaaggacgtttccagtggcacgatggttcgaaatttcaacttccagactcccagttgggttgctggatgatgccatcctgaagaggttgcaccaaagattacatggatattacgtgcagagatctgccttcagcattgtcagatctgttgcagggccaatcaagacaggatctttttcttctctttcttttgtgtattccttttatgctctttatttttctctctccttatattcaccagctagatactgcatgtagagtgttttttaggttcttctgttttgcatatgtgttaccttacagatgtaaaagctcgcatacattgaaactgtttaagagcaaaggcaaataccgtctt

SEQ ID NO: 4944 - DNA, 444 bp, Setaria italica
  Peptide Sequence Number=SeqID_70918
cttgtacagatagtccctccgatccggtggcggcggaggcatccacggcaccgtcgtcgtcgtcgtcgtaccagcggcgcctgtacccagctccggccgccgccgcgaatcacatacgcgcggcaaagccaactctgtgaagcctccaaccttctacccgtcgaacacaactcacggttcccagcggaggcggcgccggttttggaagggcaagggcgtccagcccttcagaacacgcggagacggcgtgggcggggcagcagtccgtcgcccaccgcccgccggcgagcaagcggcggaaaaggcgatgcgaagcgccggagaggcgcgggcagacgctcccttacggcgctcaggggccggggcacgggggaggcgggctcgtccggggccgggcacgcgctgatctgcgcctgcgtggaggaagaggcggcggtggctggg

SEQ ID NO: 4945 - DNA, 742 bp, Setaria italica
  Peptide Sequence Number=SeqID_70919
ctgaagataaatcaactccggctagcagctgcacgattttcaaaagagagcaactctgatgaggacgatgatctcctttctgaactcagggataagtgggatgccatagagaacaagtcctctcttctcttgtatggtggtggagcagtccttgctgtctggatatccttggttgtggtcagagctctcgactctgtcccattgctcccgggcttattggagctagttgggctcagctactcgggatggtttgtataccggtacctgctctttcaggaaaaccggaaagaattggccgataacctcgatgatctaaagaaaaggatcactggtgatgaatagctgtattcttgctttgggaccttgtaggcttctattcttaatgccagtcaatttagatatgatccagaaatattcagagctattgaggtatggcatcccacgcctcccgtgcaatctacagttcagcatggtgttttgctgaatcttctgattcctgaagacgcatctctacattttcaagccgcgctgaaattcttgtgattccctcatgcaagctgtggttcctctcacgaattccccgtgctgcccggagtaggaaattagccgccggaacgtacaattgtattgtaaggtgtaaagtcatctgaattaaaccagaagcactctgttctcccacttggtcagagatgacgcaccttatattgctaatcgagtgattaatttacacgccccctattcg

SEQ ID NO: 4946 - DNA, 239 bp, Setaria italica
  Peptide Sequence Number=SeqID_70920
ttcaagataggcacccaaggagagtaaatgatgtaagaaggcatcatgatgcggaagaacgcaacctccgccgaaaagatgagttttctcgagatggcaaaccagatgtagaaagatcacatttgccctccttgggtgcctatcttgaagaacttcttcaccagattcaaggcgtttctgctgatctttgctgctaccagacctgcctttactattttcactagtccacaatagcagtg

SEQ ID NO: 4947 - DNA, 2553 bp, Setaria italica
  Peptide Sequence Number=SeqID_70921
gtgattcaatggatgatgagacagtggaccaaactgagaaggattctcaaggaggtaataaaaaaggatcccatgatgttgaggaggacaagccctatccatcagataagattaataattctagtcataactcaaatttggggataaagacagaacataagaggcagttaccagtttcatccgaaagtgacatgttgtccacgggtgtcaatgtcaatgctcactctcctcccagctacaaaacaagaggttctcctcgtggagcaaggtcattgaaaggaaggtcactgggtcagaactctattcgagaaattgaaagctccaatgaagtaatacctcgtcaatcatcctcaaagagacgccatgattcacggagagagaaccctgttgagggacaagaaactaaggttgattcagaaggatcacttgttgctgctgatgacgtggcagataagctgagtacagaagatcactttgatgacaacgacgatgatggtaggcttgcattggttgatagtgttgaagtggatggtgatgatgctacctcagaaccacctagtgatacaaatgaggatgatatcttggatcactctggtaaaaagcagaaacctatatctatggttgagcaacctgctgggcacaatagcagtgaacctgatgaattgaggactagtgaaaatagtaaaggcaggtctggtagcagcaaagatcagcagaaacgccttgaatctggtgaagaagttcttcaagataggcacccaaggagagtaaatgatgtaagaaggcatcatgatgcggaagaacgcaacctccgccgaaaagatgagttttctcgagatggcaaaccagatgtagaaagatcacatttgccctccagaggcagggaagatccccaccagacttatgcgaacagagatcgggttgacatacggagtagaagttatgatagggtaagagagactgaaatttggccgaggagagaagatagtgttcacggcagacgaggtaaagaggaagatttgaggctggagtacaatgctgaagttggtgcaaggcataatagaaataaggcgaggcccactgataggaatgatagagatgaagatcttcattcgcggaagcgtttggatgatggtgactggaggggctctcgacaaagagagcgtggtgatgttgttttgaatcgtcgtgaaagtttggacgattctcatatcaagagaaataaggacgatgagaacttgcggagaatgaagcccgaaaatgaagacatggtgcctggttatagagcaagggatgataataacagaagaaaaagagagagggatgatggagttgatcagaaaagaagagatgatagtggtagaatgcgggagaaggttgatgatcgtcatcatgccaaacacaaagatgacaactggcgacagagagaaagggaggacagacagagacccaagcatgaaaatgcattaacccttcagagggaagaaggaagaggaaccggtcggggtagggttatggatgataagttagtcagtggtggtaagaagaaggatgaacttcgatcttcggtattaagcaaagaaccccaagagcgtaccaggcaaaatgaaccttccaggagaggtcagggtgcggaagaaaatagcttgcagaataaagggcgttctgatgtacatccacgtgatgacaactcaaacagtgagaggagctccaggcaagaaaaacaaaacaataatcgtctctctggcagttctgatgctcgccacgcaggtagagataggcatagggagagcacaagaaagggcagaagttcggagcctggtgagcacgatctccacagatcaagcaaaaggagacgtgaagaccatgaaagccatcgcaccgggaaggttgaaacaaaagaggcgaatgagcaagagaacagtagaggtcatgcagcatcatccaagaagagccagaatcctcaaccagataattcattggtgaatcaagtggaagaagacgccatatcagatgatgaaaatcatgaggattcaagaaggggtcgctctaagttggagcgatggacgagcaacaaagagatagaatatagtaatatcgatgatgatagtacacagacatttccaaccatcaaaactgatgttcaagcccccattgccgatttgttaggtaaatctgaagtttctgctgcagttggtaattcagacatcaagagcagtgttgatactggacagacatctgataagatagctgaagagcgtgaccgacatctagacacagttgagaggctcaagagacgaagtgagcgtttcaaacttccaatgcctggtgagaaggatgcaccacaaagcaaaaaggttgataacgaagttcagcttccccaaaatgaacctgctgctgctgatatggaagtgaagccagagcggccagctcgcaagaggagatggacttctggaagttagttgcactggaacgacatgtccacttgaagaaatttcagcagatttcatgggcagatgcttgcacttgattcaccaattgcttcttacaatt

SEQ ID NO: 4948 - DNA, 286 bp, Setaria italica
  Peptide Sequence Number=SeqID_70922
cccaaccgacgagacatcgaggtcgagccccccttcccagaaccttccagaacgcccggatcgccggcgccggcatcgcatcgggccgccggcccatggacaagctccgcgtccaccgctgcggcggcggcgcggtcgagtggtcgccgtcccccgtcgtcgcacttgccacctctccctgcgcgtcccaggtcgccgccgcgcgcgaggacggatcgctcgagctctggctcgtctccccgggctccgtcggctggcaccaccagctcacgatacaggggaaccg

SEQ ID NO: 4949 - DNA, 232 bp, Setaria italica
  Peptide Sequence Number=SeqID_70923
ggcgcccaataatgtcagcccccaccttagattggttccagtagatttaattctattttgagaaagctgcaaacctgcatgttctgaaatgcttcgctcaacttttgcgtaaggtccggccccctgatctagacagacaatatacatcctacccttctcgtgtcatctaagggcctgtttgggaaggggtgttaaagtttaacaccctgttaaactttaacaccctcaaatg

SEQ ID NO: 4950 - DNA, 555 bp, Setaria italica
  Peptide Sequence Number=SeqID_70924
tggatgcagtgccattgttgctagcacctgcagccgcggccccatttgctgggacagctgaactaatgttgtacagcctgcaatcaacagcgcgcatcagaaaaaatggccatatgatcaatagtacttcaatacacatgtaaactttgtttacaaatccagtgtggcgcagcacgaaatttcaataaccacgaatctgcaactaaatgccagacaatacagcttacccaggagtaccaaaaccgaagttcccagcagataagtcctgattgttgctcacaccctgtcaaacagtaaagcaaataaagataacaaatataccatatatttattcagaaataatgtgaataaatatatgtaacaccttcgagtctttaccttagtggcaccattctgtgctgctggagtcaacccagggttttgataaccaagatttgtccagttttggaaaggtaaggttccccagcccacgtcaggaatagaagacttatttaaagacccgccagctgtgggctggggaaccttaccattctgtgctgctggagtcaacccagg

SEQ ID NO: 4951 - DNA, 408 bp, Setaria italica
  Peptide Sequence Number=SeqID_70925
gaaaaatccttgagttaatgggaaaaatcgtaatctttgccagattgtgacgggagagtagatgaggcagtggatgcagtgccattgttgctagcacctgcagccgcggccccatttgctgggacagctgaactaatgttgtacagcctgcaatcaacagcgcgcatcagaaaaaatggccatatgatcaatagtacttcaatacacatgtaaactttgtttacaaatccagtgtggcgcagcacgaaatttcaataaccacgaatctgcaactaaatgccagacaatacagcttacccaggagtaccaaaaccgaagttcccagcaagaattaaagttaccttagtaatttagtttaagttaactttaacttaaacttaaaccctttaagtttaacttaaaacttta

SEQ ID NO: 4952 - DNA, 1228 bp, Setaria italica
  Peptide Sequence Number=SeqID_70926
cagcagctcgtgctcgcccctcctctctcgttgcctgatgacctcgccgcctcaaaagggtagccgccgcctctcggagtcggagcaggcgacaggccgatggacagcatgtcatggtccctctggggagccttcgcacgcggtcaggcagctgtccaccgacccgtctccgacgccgccgaggtgctggtggtggaggtgctcgtgctgggcgcacttggtcgccgaggccctcgagatgagctccgacagctgctgcgtctcggcggcggcggctgcgccgaggacgccggcgtcgagatcgacgttctgcttggcaagcgcctcctgcgccttctccagcaccgactgcaggtacttgccctgcgcttcgatccggagctgcaggtgtctctgcacctctagttgctcatgcagccgtctctgaacttcgatctgcatttggaggggcttcgcttatgtgcatagacctgtttatctggggctctgtgttcaagtgactagctggcgatccattccgttcgcacggtttgtctgttcctgtcctgcagcccaacacattctttgcgttggtagcattagcttgggcctggagattcttactaagtctgtatttctggagatggctcttcagatggtacagggtgagtccagggatccccatgagcctcatgattgtttttggcgtagctttgtctggtcctcctagctgttgtactgcctccacaaatcgttcatgcagctcgggtgtccatttcagccgaggtttagcgtcggtggagaggacgaggcctgcatcccctccttgcaagagaaactgcttctccggaggtaagccaggccttgaggacaggtgttggttatggccgtggagctgttgctgatgatacatctgttcaattcctgttatgtactgaaatgtctgcttgcaggctgcacattcctgactgctgagatccttggcagctttatcagtatccagtctcagtgcctctatttctagtaaccaaggagttgttctgtggtcttccgggagtgagacaacctttggcttctcaaactaaactacctacctcttgtcctctcctcttgccgagatcttacgcgagtgccgtcttataaggcagagggagaatgtcgaatcatctgaacaagcactcaagcctggctgcccaatctttgcagcaactgaaaagagatattatccttattcccttggggtacccgt

SEQ ID NO: 4953 - DNA, 1065 bp, Setaria italica
  Peptide Sequence Number=SeqID_70927
ctcctttaacctcaacccgtgcagccagatcagcaaatgaacaactagaacaactcacttggctgactcacggatctctgtagaacaaactcgaagtggcgtacttaggcgtcttgaaacactgcagcgaatgccagaaaccccaacacgacggagactttgacttgctctttccctgtttctcctatgagctctctctctgtgcacaaaatctctatgataagatccttcgtcaccatccaaggacatgtcagagtcgaaggtatcatcggaataagggtcaccatccaaggacatgtcagagtcgaaggtatcattggaataagggttatcgctgtcactatttggatcaatgatgtagtcccccatgataatagatcctggattcaaggcactgacaatgcttattgcatcttgcctctccttttcattttcaaactcctcccactcagccaaacgcacagggtcgacttcacgtggctttgatgaacgatgtctggacttgacatgctttttgagtctcttatatgtcccaacaaatgagcaatcctcatgcatacaagttctccttttacggttcagaaaccgccgtgcaggtttgaccactgtccaccctttaacttccccacggcagatagggcatgcgagcagcattgcctttggcttctggttagttggtgccactgcagttaagacatcgcatgctggtttgtcccttgaataagcatttttgaacaggtcaagacagttggaatgtttataattggtaccacacatgtatggccggcaacctttgctatgagaagaacaaaggagcagcacagcatcatgtggacgctccaagcatatagagcaggtggcatttttccagtccttttcctctgaggttgattgcaattcatttttcttgtctgactctttcattttcttgtagtcgtaaggcacagcatgggaagctgagcttagatgctgaggtagcatcttacggtttcttggacttcttgccatgtcttcggaacactgggaaaatgagatggtagaataccataacaatacagttccatt

SEQ ID NO: 4954 - DNA, 643 bp, Setaria italica
  Peptide Sequence Number=SeqID_70928
ttatctgcatcaagtatgatcttatctacaccaactgatttcgcgaagagactcctcaatgtatggcttgtgagctccattgtagattgtggatctgaagtgacaacctcaaggacatcaagtgctaatacctctatctttgggcaagcagcaactagaaggcttagatccaatgctgaaatgctgacatgcctcagggaaagggatttcagacaagtgaacctctgatagcttggttcgacacctgtgattgtgttatggtccaaatctagcacttctagcttctgcctgccacacttttccagaatgtttacatgaggtgttgtcctgacattgtaagacaagctccgcagagtctccctggtatacatgagccacgcaatcactggtgctgcagagaactcatgggtgttatcgatatgaattgagaggcattgcagcccaatcgtctgaaatatagtctgtgtaatgacaatctccaactgacgtgtagtcatgtcccgcggaaagtcatcagagttgaaagacagcaagcgaaggtgcctcctgcaggcgtcccgccacttccggcataccgcagaggcaaccatgacatcacgtgcaacaccaagatgggaaagaatgttgccaatgacttcaacag

SEQ ID NO: 4955 - DNA, 1234 bp, Setaria italica
  Peptide Sequence Number=SeqID_70929
atggttgcaggagctcgatggattgcaaaacgagtcattccttgcctaagcaaagcagtcgagcaattcccagactacgaggttaagatcattggacattcaatgggagctgggattgcaacaatactgacatacatcctacgtgagaacgagaagttgtcatcatccacttgtattgcatttgggccagctgcttgcatgacgtgggacttggctgagtcgggtaaagactttgttaccaccattgttaacagaaatgacctagtgccatccttgggcctagtttctgctgccaagcttcgtacagaggttatggcatcatcttgggcacatgaccttcgcaaacaaattcagcagactaggttcttaggttttgtgaaccgttctgtgagtttcatcagatctcatgtgcccttcgtctctgatccaagatctaaggttgtagatgttgatatgctgcaatctcagagttctgaggctgggagcaagccttcagcagatacgcttgctatggtaaagaaacgccctgcgctggttttctggtcatgtgttgctgcacagaaacagactgttgaatcttttaaacaaactcaggacatggaaaatcaaactgacactaatgtcaaaactgtgaaagttactaacgaagctgctgctgagctagtcgcaattgatcttcgtgagctaaaccttgaagaatcagatgaggataatgctgacagggaggaaaagggatcagcactgaaagaaacatacgaagaagaggccagggagctcctagattccttgaccgacgagaagcaggagctattgccgtcaacctctgctcaagagcgacaccagctataccccccagggagaatattacacatggttggattgcaagaagcagaagtaaccacaggtgagcaaggagcccaggaggaggttctcacactgtacgagacaccacgacatttgtacagtaagattcgactagcggggtccatgataagcgaacattacatgcccaaatacattaagacaatggagcagttaatcgaaaagcttgcagaggaggacattgacaaccagctggactcattgtagcatcaaaagtgtgtacaggatagttattgtacagatcatggaaaggaaagccattgtttcaggttgctagtgcttcgctctgattggttaaaaggtttgtggtagcaatctagaagctgtacagcactaccaatttgactttggc

SEQ ID NO: 4956 - DNA, 997 bp, Setaria italica
  Peptide Sequence Number=SeqID_70930
ggacgcggtcggacggcgacggcatctcgctgttcggcgcccgggacgtgtgggtggaccactgcgcgctgtggcggtgcgcggacgggctggtggacgccatcgaggggtcgacggccatcaccgtgtccaacagctacttcgcgcaccacgacgaggtgatgctgctgggcgccagcgacgcgtacctcccggactcggggatgcaggtgaccatcgcgttcaaccgcttcggcccggggctggtgcagcggatgccgaggtgccggagggggtacttccacatcgtcaacaacgactacacgtcgtgggagatgtacgccatcggcggcagcgcaagccccaccatcaacagccaggggaaccgatacatcgcccccgccgacccgaacgccaaagaggtgacgaagcgggtggacacggcggaggggcagtggtcggggtggaactggcggacggagggcgacatgatggtgaacggcgccttcttcgtgccctccggcgaggggatggaggagatctacgagaaggcctccagcaccgaccccaagtcatcggcgctcgtcgacacgctcacgcagaacgccggcgtcctcggcgaccccaggaacgacgccgaggagaccgggtacacggggctcaactacgccggagttgggaacggccgcggcggcggcggcaacggatacggctacctcgggatggtctacgccaacgacgccgatcggggtcgcaggtcgcggtccatgctgtcgctgacctcgtcggttgtcaccctcgtggcgctcggatgcttgcgcttgttgtaacacacgatcgattcagaatttcagatgcttcattatgattcgattggaaaggtagtagggaaaggggaaggaaaaggtagcaccgtagcattagtagggagggggagggaggtagtcaggtaggcaacacagtgatgtccacagtcacaaccatgttaagttgcacatggctgggccgctggggaaca

SEQ ID NO: 4957 - DNA, 1138 bp, Setaria italica
  Peptide Sequence Number=SeqID_70931
acctactcaataaatgactgcccagtcaaccatcctagtcagcttgcaaatccattccttgggttgcccctcgaagctggaaaatgcgaagcttgtggtgcctcggaaaatgacaaatgcgaagggcattttgggtacattgagctacctgtacccatataccatccctgtcatatcagtgaactgaggcaactgctgagcttgatatgcttcaagtgccttcgaataaagaaagggaaggttaacaaacagaatggaaaggaaactgcctcagctacattatcctgctactattgccgggatattccagcactttctttgaaggaaaccaagacaactgatggtgcgattcgtttagagttgagagcgccgccaaggaaacatatgacagaacgttcatggaacttcctcgataaatatggattccactatggtggttctgcgcacagtaggctactgcttccagaagaggcattgaatatattgaagaaggttccagatgatactaggagaaagctagccgcacggggatacaccgtgcagtctgggtatgtgatgaagtacctgccagtacctccgaactgtctctatattcctgagttcactgatgggcagagcatcatgtcctatgatatttcaatagctttgttgaagaaggtgcttcagaagatagagcagatcaaaaggtcaagatctggttccccaaacttcgaatcacatgaagaggaatcgtgcgatatacaacttgctgttgggcaatacatccatttaagggggactacaaggggacctcaagacaatagcaagcgatttgcagttggcactgatacagctgcattgtcgacaaaacaatggctagaaaaaatgaggactttatttatcagcaaagggtcaggtttctcatcacgcagtgttcttactggagatccgtacattggcgtggatgtcatagggcttccgtctgaagtggcaaaaagggttacttttgaggaacaagtaactgacatcaacattaacaggctgcaagaggtggttgacaaaggcctttgtttgacctacagagatggtaaagatacctatgccatcactgtaggatcgaaagggcataccacactcaaagttggtcaaacgatcagca

SEQ ID NO: 4958 - DNA, 254 bp, Setaria italica
  Peptide Sequence Number=SeqID_70932
aacggttataacatcctttcttgatggatacttgatgatttcattgcccaagtttgaattgcacgaactcgtgcagcaacctgcaaggggacattggtaaaagcatatcaactccctgttcatcgccttcagataccacagagcctgagataacagtcttaggcccatcaccattagcttgaacacctttgaaacatgtttccttgaagcagaaaccatcacttgatgcaaggttccctgatagcattgcggct

SEQ ID NO: 4959 - DNA, 874 bp, Setaria italica
  Peptide Sequence Number=SeqID_70933
taacttaagttaaggtactagtagccggacttgcgctgagcatcctcatgttcattcctcatctttacaagtcttcagataatagagttgccgccttagatgaagtatctcccgtttaagaacatcaggtagattgtctgttgaaacaagagtctgaaattcagctttcagcctctcatttatgatgcccaaccatgtgctgggatgcaaagccagcaatagaacggttataacatccgcgcttgatggatacttgatgatttcattgcccaagtttgaattgcacgaactcgtgcagcaaccattagcttgaacacctttgaaacatgttccttgaagcagaaaccatcacttgatgcaaggttccctgatagcattgcggctccttggcagcacacagaggctgcaatcctggtaacggaatcttcacttgacgaggacaaacgattacaacattggatacgagcacattgcaggtcatggactatcataaatagcttggtgtcatgaacttgctgtaatacattttccttcaccaaaagcctttccttctcatctttgcttaagcatggcctgtcttcctcttttctcctaacttcaacaacccatttgatcaaagatccagcattggctggaagagaataaataaaactggacaaaagtgctggaacattgtcaagactctcagccttcaaaatatctggtaaatcttcggcacaatattttgccatgcatttccagctttcaaatctacaactctgcaggaaacccctgagaagtccagttgattcatcagccgtgttcatggcttcccaaagaagttgcagtggaacccaatggggagggtatttgaagcaggcgacatccaagatga

SEQ ID NO: 4960 - DNA, 412 bp, Setaria italica
  Peptide Sequence Number=SeqID_70934
ctttgtttatagaatgctttggttcctttgattctcaatctgtcaggaatacggcgtgcttgtgttggtggttgccggccacgcccagccgaggccagcagcgatggatgccatggccatgggatggaacttgcttgcattgccgtgctttggggcgattccaagcttgccgaaagaggaaaccgcgccgcgccgtcaggggaagggaatgccgccatgagtgagcttccttccttcaagtatcctctcggccttggttaattaactgtcacccgcgtgctaacagctggttaatactccatcaattcaatcggctggctagcagctggttattattagcatgcaccaaggaggaggaggcggcagccgcgcccgccgcgacccgggacagctgcgccgccgccctcgccaa

SEQ ID NO: 4961 - DNA, 293 bp, Setaria italica
  Peptide Sequence Number=SeqID_70935
tcgtcctccactcctcccgacgaacagttggcactgccaatggcggctcccgcccacgcccttccgatgcgcgccagcctcctcctctcctcgtgagatcgacgcgcctcctccgcttgctccattctcccgcctcgttcgttttcttcgcccccgagacatcgcccggtcgccccccgcatctcgtcgtgctccgggttcttgccctccgccgttcttggactggcgcgcgccccggttgcccgcgccgctgaatccgagtgacccgtgcggccgctctttgtgggcgggaa

SEQ ID NO: 4962 - DNA, 223 bp, Setaria italica
  Peptide Sequence Number=SeqID_70936
cagcaactcaaccgcagcagcagacgggaggcgctctctcaacaccattcggcgatgcagcacatgatcagcgcctgcaaggcgcatcacacgcaatcgccggccgcgctcctgccgccgaggccattgcccagacgagcagctgcgttcccccgccttcctgtcccagcagggtatgcatcgtcgccgcggttggtggtcaggaggagatgccaggaggagg

SEQ ID NO: 4963 - DNA, 900 bp, Setaria italica
  Peptide Sequence Number=SeqID_70937
ttttttttttttttttatttaagtatttatgattttaatatgccagacccagcaaaattctcaacataaacacatcaggaaaacctgccagttacttgaagcaaatctaggtttcgggcacgttccacagcttgtccaaaaaacaaaatttacatatgcaggtatgctaaatcaacataataaagaaccaaagactgacgctacctttcttcagcatgtctctctcccctatcctgttttccagtgtttaggctttactaaggcttggcagcatgaagctaaagcatccgatgcatcaagaattggtggaagcgtgaacgggggcagaacaccccctttctcattcccaattgtcaatgcagtcgcgccaagtgtgtgagccattgcagccttctgcttgttgagcccctccatgatgcaagagaacgctgcaaaggtggcgcagctctggagcaatgcttgcggtgctcctgggaagctcaaagcaaggccagtgcaacaaccagctataccagcattgacaatatcatctttcccacgcaaccttctcagcaagcatacaaccaaactctggacaccagatagaactgcaaaagtcttggcagaggaccccgcattgctgaatgagcccttgaaacccttcttagtgatcaagccttgtccatatccgaagacggatccgacgaaggcgccgccggcgaagtccccgacggaacggaggaggcagacgacgggggctgcggctaggggcggcggagtcgcgccaccgccggcagggttggagccctcgccgccgaactcttcgccgtcagactcgttctcgcgcttcgccgccatcttgtctgcgccctgatcctcctcccctcttcctgtctcgttatctcgtcccgttacgcctcc

SEQ ID NO: 4964 - DNA, 619 bp, Setaria italica
  Peptide Sequence Number=SeqID_70938
aggttccatgatgtttatgatgtacagactagcgctttggtactggaatctgcaaaggtaaggaagaaactccagctggtcctggagaatttccacactatccaaaggattttccaaagagttatcagcaaggatggcctgaacagaactgattctagaagtgatgaaaccctctgtgattttgggaacggtttcatcaagcagactcggtgtttcacctttcaagtaaggcacggatgtcaccagccttgaccatagacttagaagatagtagacactgttgctggcccactgccatgacagcaaggatctagttgtaaattcagctattagaccaatccattcaccataaaactcaacactcagcagctctgccagctggtaattcactttgaaacgtcccaaaagacggcagaactcatggtaattgtcatgatcagcaagaccttggccagtttgaagaatttcctttgtgcctgacatcagatgagaaagaaactgagaccttgcagggtcctcaacaaaaatactgcgcctgactagtaagtctaagttcgtctacctagtacttatttccttaaagttcctttcttttttgttaaacttacgtttgtttgtt

SEQ ID NO: 4965 - DNA, 471 bp, Setaria italica
  Peptide Sequence Number=SeqID_70939
tttttcctcaagcacatacaagttactagtagtatgcaaaattaagtgtagcaacaacccctatggttggattacagcgatttcacaagcaggagtgaagtgactagttgtttgcatctgggagtaaaagctaatcaaaagaagggaaggggggagaataaacagaaagggcatccatgattactaacttttaagttgcagggttccattcatccccagatctagtagcacagtaaggaaggaaggagctagtacatgaaaaccgtctgatgtgctgacactgcgatgtgatccgaggaatgggatggggatcaggcggatgcggccgcggcggtgcgggagcggtagagcttgccgaagacgtggagggcggtgacgaagccgatgaagcagagggacatgacgaggaccatggtgggggagaggcgcaggcccggggcctcgtcggtgtagaagcgcagcatgttgctg

SEQ ID NO: 4966 - DNA, 355 bp, Setaria italica
  Peptide Sequence Number=SeqID_70940
tcatctgggagtaaaagctaatcaaaagaaagtaattgggaagaataaacagaaagggcatccatgattaataacttgtaagttgcaaggttccataaaaagaagaggctacttaggcagtagtacatgaaaaccgtctgatgtgctgacactgcgatgtgatccgaggaatgggatggatcaggcggatgcagctgcggcggtgcgggagcggtagagcttgccgaagacgtggagggcggtgacgaacccgatgaagcagagggacatgacgaggaccatggtgggcgagaggcgcaggcccggggcctcgtcggtgtagaagcgcagcatgttgctgccgccgccgccggca

SEQ ID NO: 4967 - DNA, 377 bp, Setaria italica
  misc_feature (49)..(49): n is a, c, g, or t
  misc_feature (57)..(57): n is a, c, g, or t
  Peptide Sequence Number=SeqID_70941
cctcaagcacatacaagttactagtaggatgcaaattagctgtagcaanaaccctanggttggattacagcgatttcacaagcaggagtgaagtgactagtgtttgcatctgggagtaaaagctaatcaaaagaaggaaagggggaagaataaacagaaagggcatccatgattaataacttgtaagttgcaaggttccataaaaagaagaggctacttaggcagtagtacatgaaaaccgtctgatgtgctgacactgcgatgtgatccgaggaatgggatggatcaggcggatgcagctgcggcggtgcgggagcggtagagcttgaagacttagaccgaaagaacgtaggaagggacggtagaacgaaacccga

SEQ ID NO: 4968 - DNA, 1503 bp, Setaria italica
  misc_feature (1)..(41): n is a, c, g, or t
  misc_feature (1470)..(1470): n is a, c, g, or t
  Peptide Sequence Number=SeqID_70942
nnnnnnnnnnnnnnnnnnnnnnnnnnnnnnnnnnnnnnnnnggggttactagaattagtgactgtacggtctggttaagctaagcagcttcgttcaacgacacagactgacatacatatactacccaacaaaaggtgatccaagcatggtaagctggttacagcatggcactaacattgttcagttaaagacactaccgcctaatctgagaggcacacatctgctctcctttacaaaatacgccctgtttcgacaggacttagcgaccctgcaagatgatatagcttcccatcctgaatagagtcagctcgtcctcgcccacaacgaacagggcagataccctactgatcaccatgtcatactatcaacttgaattttcttctgcgacagtgcttgtgcccacaatctgtgcaatgtagtctttaagcttcccactgatggattcatccaatgccctctcagcaagctcatacatcacaacatgaccttctggtccagcaagtttctccttcagcaagtacctttgctgcgcaaggagttcaagcgcctgcttattgttaccaagagcagggtgcttctcgtcattatcattcttcaaacccaaccgcttcaactgatgccagaggtcctcttcagggattttgccaccagcaagatgaataaggctaatgatagtgaaagcaaagccagacagaggggcagcctccttatcctcaacatacttgctatatacctcatggtctagctggctgaccagaacatagctcttcgcctccgcattcggctgcggctgtgacggccggccagagcgcgtggacggggcgcgggtcctctggagctccctcatctcgtacccaaaggtggcggagagcctgtcccgggcctcgttgatgacgagcgcgggcagggcacgctggcggtagttcttggtgacgatccccgtgagctcctcccgcttgatggggcagccggaggtctggtgcgtcttgaagagcatgtaccgcatcacctccgccaccagcttgtccttctcctccttggagatgtcgatctgggcgagctcctcgctggtcgccatccgaggagcacggggaggtgaggacttgtcgcggagtgcccgctgacggctgatcggaggaggagaaacctagtctcctgggggaagaggagtcgccgttcggttcgcgcgagaatggctcgaggggaagggaaggggaatcgatggaagaggtggggtcgtggggattggatttgcgcgcgcacccgagcgatttggcgccaccgaattgggggaaggctggccgtgctgggccgagttcctagcaacactgaacaagaccaagacagttagccacggcgaggttggacacccagttcgccgtcgccgccgcgccgccgcacacgccccggtgccgcagcgggtagatctccgagttgacgatccacggcacggtgcccatcccggggganaagaagatgatgtagagtgcaagcccgacagcg

SEQ ID NO: 4969 - DNA, 1012 bp, Setaria italica
  misc_feature (1)..(27): n is a, c, g, or t
  Peptide Sequence Number=SeqID_70943
nnnnnnnnnnnnnnnnnnnnnnnnnnnccttatacggccattctgcgaaactcagttaaaatatcgtggagaattcttcacaataggtgacacaactagattacgtagaacgagaaatttgaaatagccagaatttgatcaacctcaaaccaccactaagaacatttttaactcagaagctcgcagagtttcacgcgccacatgatactacctacttccattaatctgcctatcgctctgaacagcctcagacgccggcacttttgccactgtccttgccgtgggcatcgccgtcgcggtcgcgcggcgcccagaacctgagcctgagctcccggcgctcgagcatcttctccacctcctcgatggggagccccttggtctccggcacgcagacgagcacgaacgccagcgcggcgaccgacaggcccccgaagatgaggaacgtccacgacgtcccgatggcctcggtcagcgacaggaacgactgcgccacggcgaggttggacacccagttcgccgtcgccgccgcgccgccgcacacgccccggtgccgcagcgggtagatctccgagttgacgatccacggcacggtgcccatcccgggggagaagaagatgatgtacagtgcaagcccgaccagcgccagccacccgaaccggctcgggcacccgcgcgtgtaccaccgccggccctcgccgccgcaagtgtcgcgcgccgtgctgttcgacaccaggcacgcgccggggaggagcccgccggcgcccgacgcgcagaagccgcactccgtcgatttggccttcaggcaccgggtgcagtcccagaagcttccaccgccggacgtcgtcggcgctgacagggtgtagtccgggcaggtgagcgaggcgtcgaagtggcgggtctcggcggcgccgacgggcggcgagtgggaggccgtctcgtggaacacggcggtgaggacgccgagcgagaggatgacgccgacgaggctgatgacgagcagcttcctccggcc

SEQ ID NO: 4970 - DNA, 730 bp, Setaria italica
  Peptide Sequence Number=SeqID_70944
ccacggcaagctcccactggaagcgcctcgtcctgccgcggcgcagctggcccgggcgttcaggatctcgccgtacctgcagatgcagatggaggcgacccgggacggaatcctcgccaacaagggatacgggccgtgtacgcccccggcggcgacctcctgaaggccggcgaggtgtgccgcaacgtccggctcgcgaggacgctgagggccgtggcggagcaggggccgggcgtgttctacgacggcaaggtggggaagcggctggtgaaggacgtgagggaggtcggagggatcctgacggcggaggacctgaagaggtaccaggtcaaggtgcggcggccgctgacggagaacgtgatggggctccaggtggtcaccatgccgccgccgtcggccggaggtgccgggatgctgcttattctgaacatccttgctcagtatggaattccttctggttttgctggctctcttggaatacatcgcctcatcgagtccttgaaacattacatggctgtaaagatgaaccttggcgacccggactttgtgaatgataatggggttgtatctgatatgatgtcccaaacattcgctgctgagctgaagaagaccatctacgacaatatgacatttgaccccaaacattacggtggaaggtgggacatccttcaggaccatggaaccagccacctgtccatcatcgacagcgagcgaaacgcggtttcgatga

SEQ ID NO: 4971 - DNA, 476 bp, Setaria italica
  misc_feature (463)..(463): n is a, c, g, or t
  Peptide Sequence Number=SeqID_70945
attcttatctaggtttttcttcattaggttggctttattctttggatatttcctttagtacaacgagataactgaatccatttctttttttctacaaacatgcctggcacgtgtttcattaagagggtaataaatgaatctatttcaaaggtcggtagctaaaactagttacagttaaatataagaacaaagttatatgtactttcaattatcagtcttcgtcattaataatttgaatggttcactataaaataactcattcatatgctatatgggttcaaaagcttggatttcagagaacaagtttatgatttccaaaagatattttgaactttgaaactcaaaagaacaaaacattatttcttgtctgaactccaaatgcgcatgtttggatttatttgttctgaaaaatcttgatataattttcatgaaaacggaacaataaaagcagaaaagcaaaacntattcccgcatga

SEQ ID NO: 4972 - DNA, 427 bp, Setaria italica
  Peptide Sequence Number=SeqID_70946
gggccccctccttttttttccctatgcacaagttgggttttaaattacaaattaggtgatagtctgatagagaacatgatagcctatgttagaaaatactttaagaattgcctatcactattttccatgcaattttgcatctctaagattaatttattatctgatggtcctaacctgtaaaaagatagtcatgaaaatcttaatgaagtgaatcttttttacagtttggtgcaaactttaataggccaacaattttctttccctcttacgaatcattcagtacctatctgggtaagtgggtaactaaaccaaatgttggacccaatatacaaagcaataatcttgaacatgtacagatgcatgccttacaaacaattcaagtatccaacctacctttgttagcagaaagagagctagtgggatccac

SEQ ID NO: 4973 - DNA, 299 bp, Setaria italica
  Peptide Sequence Number=SeqID_70947
gccgcaagttgggttactagtccatccccaacgttaggttcactaggcttgtaaaatgttcttttggacagcaccccactgaagttattcagggcaaggctcaagtacgtcaaattgctaagtgctccaatcccattaggcacatggccagccagcatattctgagtgagatcaagataacttaaaccagttagatttcctatccaaatcggtagttgcccagtcaaatttgctcgatgcaagttgagcttgcagaacttgctccacgaacactttggtaatctctccataaagtttgt

SEQ ID NO: 4974 - DNA, 385 bp, Setaria italica
  Peptide Sequence Number=SeqID_70948
ttacataatttgtttaccatcactgtgatgggcgggggactctttagtcgaaatataaacttgcacacgcacatgagtcttcaaaaacagctctgaacattttatagtacgggcagttaattaattatactgtccctcatattatattggaaaagtaggccatatacaccaacatcagcacgacacacaaccaagcatctgaaagcatgtagtagtataaattcgtccctggcgtcctttgatacattgttgtgattagtccccttgaccagggattggaggggcaattccgctgctcaaacggcctgaggttgcaagtgcttggtccgcctcgtgcgaggatgccgctgacaagaaccagtaaaacgaggaggacgaggagcag

SEQ ID NO: 4975 - DNA, 300 bp, Setaria italica
  Peptide Sequence Number=SeqID_70949
cttttgctatgcacttaaatttacattatatctagaatatacataaccaaaagtatgtactagacttaaaatttgaaacgcgggagtactagtaaacagtccttcaaatcctgctgcaaggaataggtacgtgaatttgtcgctggcgtccttctgatacactggttgagattagttcccttgaccagggattggagggcattcatgctgcacttgcgactcgcctgagcagcatgaatgccctccaatccctggtcaagggattggagggcattcatgctgcacttgcgactcgcctga

SEQ ID NO: 4976 - DNA, 652 bp, Setaria italica
  Peptide Sequence Number=SeqID_70950
aaacaaataaacaaaataaaattaaaataaattaaggaaaaaagtaaaggaaccaaataataacaaccaaacatcagcaggacatacaatcaaagtacttcgttgattgtaggttgttttcacttcttttagatacgtagcttttgctatgcacttaaatttacattatatctagaatatacataaccaaaagtatgtactagacttaaaatttgaaacggcgggagtactagtaaacagtccttcaaatcctgctgcaaggaataggtacgtgaatttgtcgctggcgtccttctgatacactggttgagattagttcccttgaccagggattggagggcattcatgctgctcaggcgctggatgccacaaaagatgaactttttagctcaaaattattaatgcggaagacgaagacaaatacttattgcattatgcccaagcaggtaacagtgctcgcttacagtcgcaagtgcttggtccgccttgtgcgaggatgccgctgacaacaaccagtaaaacgaggaggacgaggagcagctgaacggaggtcgaggagttcttcgccattgttactgacttgtatgcgctttctacggttgcggacgcgagttcggcacaggatggaatcggttaatttcggtttgggttt

SEQ ID NO: 4977 - DNA, 611 bp, Setaria italica
  misc_feature (1)..(38): n is a, c, g, or t
  Peptide Sequence Number=SeqID_70951
nnnnnnnnnnnnnnnnnnnnnnnnnnnnnnnnnnnnnnagtttttctctttagtttttttcataaacagctctgaacctttttattggacgggtagttatactgtccatcatattatattggaaaagtaggccatatacaccaacatcagcaggacatacaatcaaagtacttcgttgattgtaggttgttttcacttcttttagatacgtagcttttgctatgcacttaaatttacattatatctagaatatacataaccaaaagtatgtactagacttaaaatttgaaacggcgggagtactagtaaacagtccttcaaatcctgctgcaaggaataggtacgtgaatttgtcgctggcgtccttctgatacactggttgagattagttcccttgaccagggattggagggcattcatgctgctcaggcgagtcgcaagtgcttggtccgccttgtgcgaggatgccgctgacaacaaccagtaaaacgaggaggacgaggagcagctgaacggaggtcgaggagttcttcgccattgttactgacttgtatgcgctttctacggttgcggacgcgagttcggcacaggatggaatcggtgggtgctcg

SEQ ID NO: 4978 - DNA, 1884 bp, Setaria italica
  Peptide Sequence Number=SeqID_70952
aatgatgtgtttatgcacatccttgtgttcttcgtagaggtaagaaagatgatagagactctcatcttacttgcattagtacaaaaaatagtgctcacaatggcagctgggacgaagtacaacagagactacccttgtgtataaagctatagtataggaggccaaatgaattgaatgacaaaatggtgattttagcaggctcagcactgatcgtataggaaaacctctccacccaaaacttcacgatggcaacaccttctcatgttccctgataacctgttttctgcctatgaagatgcaacctcaatggcactgccaagaggccatgctgcttcaacgtatgctccgttgtaaggcaccttctttaccaaggtcatctcatggtttggatcaacgccaaatccatctacaagcaatgtgtactggtaaacgagatccaagcagatatatggaaggttatccttttggacaccagggtatgcagcttcggcatccttcacgctcaacttacaagcacgctttgcagcttgttcaaaatctgagggtttaaccttagccacagctgccttggggtttacaaatccaacctcagcagccctgtcaaagaaaaacgatgccacaaagagattcttctgtccagcaccaccgccaccattccaaatgccaccaaaagaacatttcatgtgggtgcatgcttcatccactttaagagctttcactgcatcatccttgcattttgaataacttgcaccagaaggtgaagctgaggcttcaaatgtttcagagccatacttatattgcccttgatatccttctaacatacagttgctgtaaccattgccattgccagcttttaagacctctgctctagcagccagcaacccatagtgcaaatagctgtgaacataaagattatatgtggttcctttcaggtagagtttcttcacatatgtgtcttccccgtcagatggtttaggaaccttttctgcatccttctctgcgatcgcatatgccatttggacagatccaccaccaagatcgaccactccaactgtgtctgcataagtctttcccaaatttcccaacagataattgatagtaacccactcgtatgcaccttcctgcgatccatcaagaaccgtaacccaatctgcttggtttttgaacgaactcttttcacgaagaagatccctaaccgcttgcaagatctcctcagacttctctgctcccaaatttctcagccccgcggtggccccgactctgacaggcgtttggtcgcgcaattccgcaggtaccactcgcttggcttcatcaaggagagagacgagcgactcggcagcctcccgcgggtcactggcatacgcgctaagtcccggttttttctggacgaagagctcgatctcgctgccaatgttgaccagatccaggttggcgtcgaagcagaagacgtggacgcggctccctgagctcccggcgtcgaagatgacggcgtacttcttacccccggcggcgccgtccaagggccccgacctcctggaggcggctgccgaggaggcgggcgatcgcggcatgagtaggagcacgagggagacgagcgcgagcggtgcgaggacaacgagcaggacgccgcggtatcggtggaggcggtcggcgagcgtgtcctggcgaccgttgggcagcgcggagtagcgcgggcgcatcttggcgtcggtggggaggaggaggtccggtgaggagggcgtgcggtagcggatgcggccggggggcgtgggcgacggcttgaccgcctcctgctccgcgggatccagggctccgcgcctcggtgcgcgccgcgcgcgtcggtggtggatctgctgttgctgcggcgactgcgtcgtggcgcga

SEQ ID NO: 4979 - DNA, 1134 bp, Setaria italica
  Peptide Sequence Number=SeqID_70953
ctctgaattcctgttatgaaggcttttagtcgcgattatagatgcacatcaatcacgatttggtcacaaatcacatgtttggcgccatccgcccagcaaatcgtaatcttagatctcctgcaattaagcaccgtgcattatttggcaagtcatgggacacaccagctcaccagctgtttgatttgatacgcttgaagagcatgaaagttatatcagtggtagctacgagagtcgtcgtctaatcagccaccgtagcggcttttgagcgattcaggaggttcctcttccatgatgccagctccagtactggccaaatattctcttattgtggttttccggtcgccaagataagtgtggtctaagaagttgctgtatgctggttctcccagatttttcgcagcgagaacacaatgtctaaggtataaacgacatggtaaaatatcatctctccatattttatcaatgttgtaacgtccatagcgctggttatatatttccttgcttccttggcatctctcctggaaatattcttcatcgctgtagcgtgcacagacaactgcccgatttgtaaaaggcactccatccaatccttcaggaacgaccgcaagaaatctaaactcatgttccctctcgataaatgctggcacctcctcctcattgatttcgaaaacagtgactactatcagttccccctcacatggctccacgcttaagcttgagaattccttggtggcctcgacggcgatgccgcgctcgaagaagatgggtgcggagtgggcgaagacccgccggaacccccgcagtgccgccacgcggaagccctccagttccgggaacgtgctcctcgcgctccgctcggagaggagggagccgaagcctacgacggagattcggccgccgggggcggcgacggcggcgaagtcagcggggcaagtgagctcggggaaggagccgccggcggcgccaccggctgcggccgcctcagtgggaggaggcatggcccggctccggcgagtggtcggcgacgaggactccggcgggcggcggaaacggaggcgggcagcggggaaggggagagcaggtgggagaagggtggagcgtcggggaccgtccgatgttgatcggacggctgcg

SEQ ID NO: 4980 - DNA, 469 bp, Setaria italica
  Peptide Sequence Number=SeqID_70954
accgacgccagtcgagcctgcgcgcgcccatggaacctggcaagaaggaggaggtggctgcggtgagggtggtgacgctgcgggcggtggaggccacgcccgagtccttcgcgccgtttggccaggtcgtctccgccggctccgaccgcgccaagttcggccccgacgacgcccagctcgacctcagccgcggcatcccaagattctacatcatgaaattggagaaccagccgctcaagttctcgtccatcacccaccacgcccaacgtccgccagtgccttggctccatcggtggccaagattgataccttgccgtcgccaagccgtcgctcgtggatggagcgtccgagctgagtggtcaggagactcaggatcaggatgggagctcccgaagaagcccgtgccattgggaggagcccgtgccgtctcgcgcaggtcactactacctgcctcccgatccggccgagg

SEQ ID NO: 4981 - DNA, 1091 bp, Setaria italica
  misc_feature (1027)..(1091): n is a, c, g, or t
  Peptide Sequence Number=SeqID_70955
gtggcatcgtggcaaatggagcactgaaattatcctcctcgcagtcgcagttgcaggcttgcagcgttcggctaacaaggggcagatccgcaggccgcagcgtgcaccgacgccagtcgagcctgcgcgcgcccatggaacctggcaagaaggaggaggtggctgcggtgagggtggtgacgctgcgggcggtggaggccacgcccgagtccttcgcgccgtttggccaggtcgtctccgccggctccgaccgcgccaagttcggccccgacgacgcccagctcgacctcagccgcggcatcccaaggcaaggctacctatatttccgcacgaaatccaccacggacccgtcaaatcgaaccataatactcgcagattctacatcatgaaattggagaaccagccgctcaagttctcgtccatcacccaccacgccaacgtgacccagtgccttggctccatcggtggccaagattgataccttgccgtcgccaagccgtcgctcgtggatggagcgtccgagctgagtggtcaggagactcaggatcaggatgggagctcccgaagaagcccgtgccattgggaggagcccgtgccgtctcgcgcaggtcactactacctgcctcccgatccggccgaggtctgcgccttccgggtttctggcctcaagttcctcaagctgcacaaggggacctggcacgccgggcccctgttcagggcggatgccatggatttctataacctggaactgagcaacaccaatattgttgatcaaaccatacaccgtttcaggaagctggacggggtaacttttgttgttgaggattgaaacacgtgttgtgacctatggctgatcctgctggtctctgtcttgaggtgttcaagggaaggaacaagaataaacactctgtacttgttgtgtacagctgcacacctgagctgcttgctcgagtttgtgccttctgtttctgtcagtaaaaaaaaaaggtgatgtgtgatgttcctggacaaaaaaaaaaaaaaaaannnnnnnnnnnnnnnnnnnnnnnnnnnnnnnnnnnnnnnnnnnnnnnnnnnnnnnnnnnnnnnnn

SEQ ID NO: 4982 - DNA, 538 bp, Setaria italica
  Peptide Sequence Number=SeqID_70956
tttttttttgggtttgaaatcttgggaggggataagagttatgctgtcgtaggggacctagttattgatggaaataaatgggtgagggtcaagtggttttctgaattatcccattcaagtagctgaaggaatgtcccttcttgaaactggggaatgaattgaattcttggtgttgtggaatttctctgtagactggtgagtttgggagaacgggtttcttgagattgggcgaggatgaggttgtgcggtgtctgtaattgcactgccacagccggtgcgttctggatgaactatgcatttgggtaatgctatggagtggcgacaagagagtgaactggacagccgttttcttttgcacttatcatttcttattagtgtgtcgattatggtacctgccattttcttcttgtcgaatgtatgctcttattaaagataggaagagcatgatcctgcaggtgtccatgaagagccattagaatgtcttgattggttgggtttgttatgattatagttgtctgaggtgagacttgaagggtct

SEQ ID NO: 4983 - DNA, 741 bp, Setaria italica
  Peptide Sequence Number=SeqID_70957
aaaacaaaagaaaacttaaacaaaaacaaaacaaaacaagtaacaaattacaagactacctttaatagaaatacttgcctctgcatcttgcttttatccttttatgatgcagcagttgattatttatccactacaagggttatgccaagacttgtagaggttgtcaaaggctctactaaagagaaggtggtcagagttgttgtcctgtcctttcgtaatttgctggccaagggtgcatttgctgcacaaatgatcgatcttggattgccgcagattgtacaaaacttgaaagctcaagcatggtctgatgaggatctattagatgctctgaatcaactagaggtgggactcaaagacaacctcaagaagttgagctcatttgataagtacaaacagcaagttcttcttggtcaccttgattggtctccaatgcacaaagatccaggttctggcgtgagaacatcaacaattttgaagaaaatgatttccagattctacgtgcctgatgacaatattgacacatcaagtgacaccactgctctcgcggtggcctgctacgacctctcacagttcctccagtaccacccatccggccgaatcgttgtggcagacctcaaggccaaggaccgagtcatgaagctcatgaatcacgagaacaccgaagtgaggaaaaacgacaactagactaactaagaacaaataaccaaagaaaggaactaaattccttggcgctaagtatgc

SEQ ID NO: 4984 - DNA, 542 bp, Setaria italica
  Peptide Sequence Number=SeqID_70958
taactaaagagaagtggtcagagttgttgtcctagttcctttcgtaatttgtctggccaagggtgcatttaaagaaactaaagaacaaacaaaaatagaatacgaatacttaggaattgccgcagattgtacaaaacttgaaagctcaagcatggtctgatgaggatctattagatgctctgaatcaactagaggtgggactcaaagacaacctcaagaagttgagctcatttgataagtacaaacagcaagttcttcttggtcaccttgattggtctccaatgcacaaagatccaggtttctggcgtgagaacatcaacaattttgaagaaaatgatttccagattctacgtgtcctgatgacaattattgacacatcaagtgacaccactgctctcgcggtggcctgctacgacctctcacagttcctccagtaccacccatccggccgaatcgttgtggcagacctcaaggccaaggaccgagtcatgaaagactacaatagaaatacaacgaagaaacaaccgtaaagttagtaagta

SEQ ID NO: 4985 - DNA, 1856 bp, Setaria italica
  Peptide Sequence Number=SeqID_70959
cccctgtctctctcagatctctctctccttctcctcccttctcctctcgcctcgtctttacccccaaatcgtcgccggggagcctccccgatccctcatccgcctcccatcgcgcgcgccaggtggtcccggggccggtgcttgtcctgccgccgcgatggatcgcgccgagctcaccaccgagcaggttctgaagcgggacattccatgggagcattacatgtcaactaagcttatttccgggacatgccttcagcttttacggcgctatgaccacaaaccagagagccagcgagctcctttgcttgaggaggatgggccagcatatgttcgagttttcctgaatatactggggagtatctctaaggaagagactgttgaatatgtgcttgccctcattgatgagatgcttgcaacaaatcctaaacgagcagcactgttctatgaccaatctctgtccggtgaagatatttacgagcctttcttaagattgctctggaaaggcaactggtttgtgcaagaaaaaagttgtaagatattgactgatataataagtgcacgacctaagcttcagaatggcatgcttccaaatggagactcttcgaattcgaagagcaagcttacttcaacacatgatgtgttgagaggtttggttgattggttctgttctcagctgaggaatcctacccacccaagctgttctattcctactactatccattgcctctcttctttgctaagagaaccatatgtcaggacattatttgttcaagctgatggcatcaagctgctcattcctttaatatccccagcttcaacacaacagtcaattcagctcctttatgaatcttgcctctgcatctggcttttatccttttatgatgcagcagttgattatttatccactacaagggttatgccaagacttgtagaggttgtcaaaggctctactaaagagaaggtggtcagagttgttgtcctgtcctttcgtaatttgctggccaagggtgcatttgctgcacaaatgatcgatcttggattgccgcagattgtacaaaacttgaaagctcaagcatggtctgatgaggatctattagatgctctgaatcaactagaggtgggactcaaagacaacctcaagaagttgagctcatttgataagtacaaacagcaagttcttcttggtcaccttgattggtctccaatgcacaaagatccaggtttctggcgtgagaacatcaacaattttgaagaaaatgatttccagattctacgtgtcctgatgacaattattgacacatcaagtgacaccactgctctcgcggtggcctgctacgacctctcacagttcctccagtaccacccatccggccgaatcgttgtggcagacctcaaggccaaggaccgagtcatgaagctcatgaatcacgagaacaccgaagtgaggaaaaacgcactgctctgcatccagaggctattccttggcgctaagtatgccagcttcctgcaggcttgagagagaccgagtttttgtatttagatccagagaacccccactggccatttttcagaatggccaaaccattattgagaaagaccaaattcttgtccagtatatcctattgttctttgatttccggaaccgatgtataataaataagccataccctgctcgatgtaataaagtgtccgtgggcttgttgattctttcgttcctcgaacagttttctacgaagtgaaaatacctgatttatgtaaattgttacctgtaattcagcaaatttgacttgtgtgcacatggtttgctgttacttctttgtaattattccaaagatatttattgtcctaaaaaaaaa

SEQ ID NO: 4986 - DNA, 359 bp, Setaria italica
  Peptide Sequence Number=SeqID_70960
catcaacctcctctccttctacctcgtcggcacccccgtcgccgtgtacctggcgttcggcgccggggccgggttcagcggcctttggtacggcctcctctcggcgcaggccacgtgcgtcgcgctcatcctcgccgccgtcgtctggcgcaccgactggcaggtcgaggccatgcgcgccaagaagctcgccggcctggagctcgcgccgaccacgacggcggcaaccacaacaaacgacgcggagagcaagcgcctcgtcgccgccaacggcgagccggcggaggacgtctagaagcgtagcgtaggccgtagcacactgtacgtcacctgcgcgagtcggtgaccacgacacgatc

SEQ ID NO: 4987 - DNA, 256 bp, Setaria italica
  Peptide Sequence Number=SeqID_70961
atgtggttttgatatcgtggagaagtacctagaaaatcaatcagcccatgaagcaacaactagagcataatctgcggctatcaacaccaacagtgagagaagtagccccttgatgttgtcttgcaaacagaggactttgggaaatgatttcgagctgattgttggttcaacttttttttatgtacatggaaacatgagaactcttttttatgtacatgcacacgttctgtgtatcttctttgcagaaaaactgtaa

SEQ ID NO: 4988 - DNA, 1227 bp, Setaria italica
  Peptide Sequence Number=SeqID_70962
gattaactgtacggtcacggttaaccaagaaaaccaagatccaaagcgacagcgtagttcgtgatacaggagaatcagggctttcgcgcactgaaccttcatttctgacaagcaaatccagagataaaaaatgaaccaacggaccctaacgtatccttcctaaagttcaccgtcccagagctcctcgtgggtcttgtaaacactctgcgggccaacaatgaagttgcctctgagcagcctagcctgcttaatctcagagaactttgcaagcaaatcatctggaatagaccaatcataaacatcaaggttttgttttatcctttcttcattcgtgctctttggtaatacactgtgacccatctgaatgttccagcgcagggccacttgtgcaggcgttttcccaagtttctcagctattgagatgattactggctctttaaggacattaccattcatccaagttgtaccaggtgaacctagtggcgagtaagcagtaagatgaacaccagtagtctgacaaaagttatggagcttagtttgctgccagccaggatgacactccacctgatcaacagctggaggtacacgagctacagcaagcaagtcacccaatttctttgatgagaagttactcacaccaatggcgtgagctttgccagcatcatataacttttccattgccgcccaagtagcagggatgtcaggtgtaatgaagttttcagggctgatgtttgttcccttcttcactctaaatggccaatggataagataaagatccaagtaatcaagctgcaaatcattcaggctttcatttagtgcctcaggcacatcttcgggagcatgatgatcattccatagcttagaggtgataaacagatcttcgcgcttcactacaccctcttcaaatagctttttcagcgccaaaccaatctccttttcattgccgtaaactctggcgcaatcgatgtgtcggtaccccgccttgacggcggcgtagacggcgttgccgacgacgccggggtcggactgccaggtgccgagcccgaccgaggggatcttggcgccggtgttgagcacgaagtgcctcgccatcgccgcctcactctctctctatcagtctgtctctgccaccacacgctctgtcacacccgcgcaacactgagtgattgggggaatgcagagggggggcgcagcacgggaagggaagcagcggtggtggcgggcgcg

SEQ ID NO: 4989 - DNA, 2588 bp, Setaria italica
  Peptide Sequence Number=SeqID_70963
ggcaaatagtaattctaggcacagttcctcatctggttccagtacaaaaaatacttctagcacgggactggatgctgctgaatttagaagtccaagcacatttggttcacggggtgcaatgtcctttgctgcagctgcaatggctggattaggtagtcgtggtattagaggtagtcgagataggagtcgtgcaactgagcattacaataaattgatatttacagctggtgggaagcagcttaacaaacatttgacagtatatcaagctgtacaacggcaagtagttcatgatgatgaagatgtagaccagttaggtggctctgatttacctgatgatggtaaccacttctggggtgatgtatttactgtaacatatcagaaggctgattacgcagtggagaaagggcctgtgggaggttcagcttcagcgccaaaattttcccagtcagattcttgcaaaccattatctagaaaacagtgtacttccctccttgatagtattttgcaaggagagcttccttgtgatttagagaaatcaaaccaaacctacaacatcttatcactcttacgtgtgttggagggcctgaatcagttatctcctcgtctgagactgcaggcaacctccgataattttgtggagggaaaagttgctacgctagatggactgtatggtgttggagctaaggtacccctggaggagtttgtcaacactaagatgaccccaaagcttgctcggcaaattcaggatgttcttgcactgtgtagtggcagtttaccatcttggtgttatcagctgacaaaagcttgtccttttctgtttccttttgaaacacgaagacaatacttctattccacagcttttgggttatctcgtgcactgcatcgtcttcagcaacatccgggtgataataacaacactgccattgaaagagaaattcgggttggtagattgcaacgccagaaagtccgtgtttctcgtaaccgtatcttggattcagcagctaaagttatggagatgttctccaatcagaaggctgttctagaagttgaatacttcggtgaagttggaactggacttggtccaacttcagagttttatactctcttaagccatgacctgcaaagggttgacttaggattatggagatctcactctacaggcaattctggcacgcaaattgatgggaatggatatcatttaataggtataaagcatgaatcagaatcactttttgagagcaggaatgtagtacaagcacaccttggtttgtttcctcagccctggccacctagtgctgctgcattggaaggtagcaaattcttcaaagtcgtcgagtatttccgattagttggtcgtgtgatggcaaaagcattgcaagatggaaggcttcttgacttgcctttgtcgacagcattttacaaactattacttggacaagaacttgaattgtatgatgtactatcatttgatactgagtttggaaagattttgcaagagctgcaaattcttgttgcacgtaagcgatttctggaatcctgctgcagtgatagccgaaaaatagaagaattatgcttccgtggtgctcctgttgaagacctgtgtttagacttcactcttccaggctatcctgattatgttctaaaggaaggtggagagaacgtggtggttgacatttataacttagaagaatatatttctttggttgtggatgctactgttaagactggaataatgcggcaagtagaggcaatgaaagcaggatttaatcaggtattcgacatatcatcactccaaatattttctcctcaagaacttgattatctgatttgtggtcgccgtgaactttgggagccggaaatactgcttgaacatataaaattcgaccacggttatacctctaagagtcctgcaattgtcaattttcttgagatcatggcagaatttactcctgagcagcaacattctttctgccaatttgtgactggtgctcctcggcttccacctggtggtttggctgccctaaatcctaaattaactattgttaggaagcactcttcatctgcagcaaatactacaaatgcaactggagcaatagagtctgcagatgacgatttgcccagtgtcatgacttgtgctaactatcttaaactgccaccttactcaaccaaggctatcatgttaaagaaactgctttatgcgatcaatgaaggccaagggtcatttgatctttcgtaaggctcaagactaacatagatattggtctcccttgacatttgcgacattgctagccagagttagtttcaacctgtcatgtaagacataggttaaagtcagctcacccccagagtccgctgaggtttcgagcccgcatctttgggtgtgcatgtctatattctctgatcacatctggttgtatattcctgtggatctttatagtgaataataataaattctttttgttataaccaaactccttggaatctgtttctaagctgtaatacttggatttgcgagctctcgtgagctcatagagtgcatgatagctggttgttacagcgaatgattatttggaaggtaccttctcaac

SEQ ID NO: 4990 - DNA, 1236 bp, Setaria italica
  Peptide Sequence Number=SeqID_70964
aaattaagtttcgttaactcaaaccatgtttacaccagatccactgttcaaactctcgagggtgacaaaacgcaacacaagtacagttaaaagtgaacttcggtcactgcattacaaaagaaaagacacgaccaacaaaacgcagcatgatctaccacaagaccatgctccatgacaccggtgaagagaattggggtcagatgaagaacatgttgtcctccaggtccttgtgcagcctcgggaagctccccgcttcaaaagttcccgacctcatgcccgcctcatagtagagcctgccgcggtaggccgcaaggtcggcgtaatagacaggcgtcgccagcgacaccggcttggtgcaccgggcgaacacaaagcacaggttgtatatcagcttctgcaggtcgtccgacccgaacccgtgctcgtccaccaggctgtagtagtgcgtcggccggctcgtccccagcagcccgttgtggctgcataggtagaagtcgtaagccgatgggtccaccacgcccgtgtccaccacagtgccgggcggcacgttgccgttcttcgtctgcggctggccctggtccttagggaatagccgcgtgtggtgccgcttcttggccacgatcacggtgatggtcggcgagtagccgttcaccttgatcgccttctccatgtccgccagctcctcgttcaggaccatgtcgaactgcccgtcgctcacgccatcacggaagtagatgatcctctctggcttgacgctgttctgcttctcaaagactccaatgagctccaggcagatctcaccaagctgctggatcacctcgcagcggtgtggctgggcgcggattcttgacacgtacttgttgacgccagagttgatagacgcgaccacagctgcaattgacgggctctccacgttcccgggtgacggatggttaacgtcagctccgatgaacatgaatggcgcaccgctgacacgtgggagcgagtcatacagctggacgttgctgcccccaagcttgctgttgatcttaagggcaaggttggtcatgtactggtcctggccctgctgcttgttcgcaattttgctcaggaaacactgggtgaggatccccagttgcgtgtcacaaatcagcttcagtgtcttgtaacctgggtgctgctcggacatcgggcagaacaggagttgcagcctctgcttcttgctcactgctgctttgttttgtctttgtttagtct

SEQ ID NO: 4991 - DNA, 1978 bp, Setaria italica
  misc_feature (1875)..(1875): n is a, c, g, or t
  Peptide Sequence Number=SeqID_70965
tttctttctttacgttttttcccgggtttttgttttacggttttattttggttttttaacgttttctttagtttctttccgttattccgactattgtgaatggcgcaccgctgacacgtgggagcgagtcatacagctggacgttgctgcccccaagcttgctgttgatcttaagggcaaggttggtcatgtactggtcctggccctgctgcttgttcgcaattttgctcaggaaacactgggtgaggatccccagttgcgtgtcacaaatcagcttcagtgtcttgtaacctgggtgctgctcggacatcgggcagaacaggagttgcagcctctgcttcttgctcactgctgcttgttttgctttgtttagctcctcgtgcagtcgatgtggatcagagagcactgccatttctgacttgtgcacgaagcatggatcagtgttcatccggatgccgagctcacagcacttcctgactatcttttccacaaacaatccatccattgagggactcctccctggggtgagaagtacgtgcactgaagtccacgatgccccagcactgaagatcccagccctctactagtttcttattcataaggttccactggcaactctcgtggttgatactgaatttgctggtctggccattgggggcgccaagttttaggttgggtgggggaaggatcctacccatgacttcagtcatttgcacatccaaggaaatcccaaattgcggtgctatttcaccactgcaaggcccatctgtagcattcaccaagtccagaatctccttcctccgcttaaatgcaggaattagggcctccgattttagtgttctatcagaattcctatccaaatttgcctttggatacctctgcccttcaagaagagtgcaaagctcaattggcacatgattggctttgtccttgctcttgctcaaatccaggcatggaagcatctgatactcaatcaccttgccatgtttctgagcataataatcaacaagcctattcgtttgcccggtttcagcatccacaaaggtcaactggccggcaggcaagggtgtcaaaccttgcacaatgtacttctgattagtcctgcggtgaatcacagtcacacgtcggcctttaagctcatactccaaattttccagttgccacttgttcagagttgtcctgtaatcaaggcgccccactatcttctcaacaagatccatcactggcccagctttgtaaaacggcataactgaatagtcaacacataggatcagcccttgctgagtatgtttaagggtctgtagtgctcctttcagagccacagcaccctgcccaatgtccagactgctatttggtgagtaaaatcctttaccaaccataatcttgcgccatctagaggcctcacgcacaatgacatcaagaccctgcaagacctctctaggcacaggtaactctgagagttgacttaatggcagctgtttcttcaaatctacagatacaatgtaggtcttggaccgaactctcacacgaaataaaccttctggaagttcagcagaagtgaatagatttcgtccgccatcataagcaacacatgacgaaagacgtcgaaagctggtgtccttgaagagctcatccttgacagaaagaaattctgccttggagagctccttgcccgaagccttaggggaagcttgatcaagcttgatgtctatgtcataatgaaaaattgttgtcgcctttcggtacttgacaatgaaatggttcaccaaaagtttgacatttgcttgagatgatgagcctccacgatcaggtctttgcattggcacacgtgctccagcgtaaggcgtggcaactagtgatgatgaaggttttccncttgccaattcactggagtcaatgcgttcgacggaccacgacgcgctcagcgcctccttgtccttggcgcgatccccattgatgcaggcgccggcgcggcgcc

SEQ ID NO: 4992 - DNA, 435 bp, Setaria italica
  Peptide Sequence Number=SeqID_70966
taaggaaaataaacccctaagaacctaacgaaagttaacaagacaaagaatacgggttacgtactatcgtgagaacagcacgtctccctgttactacgacgggcgctactggaccatgtggaagctgcccatgttcggctgcaccgaggccacccaggtgtacgctgagttcgaggagtgcaagaaggcctaccccgactgttacatccgtatcatcggcttcgacaacatcaagcaggtgcagtgcgtcatgttcatcgcctacaagcccccaggctccgagtaagaccggcggcgccaataagcttatcgcgcggaccgctcgctcgtgagcgaccgtggatgaagtgtctactcggtttggcacttaattattgacgctctgttaagtcgcctgcttgttaattcccttcttcgtgttccgtcctgtgtgta

SEQ ID NO: 4993 - DNA, 429 bp, Setaria italica
  Peptide Sequence Number=SeqID_70967
tgagaacagcacgtctccctgttactacgacgggcgctactggaccaatagtaggaaagactagaccccaatagttacggactagacaaccgaaggccacccaggtgtacgctgagttcgaggagtgcaagaaggcctaccccgactgttacatccgtatcatcggcttcgacaacatgaagcaggtgcagtgcgtcatgttcatcgcctacaagcccccgggcagcgagtagaccggcggcgccaaataaaaagcttaaatacctgtccgtctcagttcaacaccgcttgattatctccatttttccccatctgaacgcttctgtaactattgggcgagcatgcgtgcccatgagcaatgctaccattggcttgctaaacatgtgaatgcatggtacatagctccggctatacctttgcaacaaaaaa

SEQ ID NO: 4994 - DNA, 747 bp, Setaria italica
  misc_feature (736)..(736): n is a, c, g, or t
  Peptide Sequence Number=SeqID_70968
gagtagacacttcatccacggtcgctcacgagcgagcggtccgcgcgataagcttatttggcgccgccggtcttactcggagcctgggggcttgtaggcgatgaacatgacgcactgcacctgcttgatgttgtcgaagccgatgatacggatgtaacagtcggggtaggccttcttgctacttccttcgtaacttctagtcgtacacctgggtggcctcggtgcagccgaacatgggcagcttccacatggtccagtagcgcccatgttcggctgcaccgaggccacccaggtgtacgctgagttcgaggagtgcaagaaggcctaccccgactgttacatccgtatcatcggcttcgacaacatgaagcaggtgcagtgcgtcatgttcatcgcctacaagcccccgggcagcgagtagaccggcggcgccaaataaaaagacttaaatacctgtccgtctcagttcaacaccgcttgattatctccatttttcccctactctgaacgcttctgtaactattgggcgagcatgcgtgcccatgagcaatgctaccattggcttgctaaacatgtgaatgcatggtacatagctccggctatacctttgcacatagtgatatatttacacgaatgtatacacagcgatcatattcatacgacaatgtaccactagattgccaattcgttggaacattataacatggttgttttaacttaaaaaaaaaaaaaaaanaaaaaaaaaaa

SEQ ID NO: 4995 - DNA, 754 bp, Setaria italica
  Peptide Sequence Number=SeqID_70969
ggcaacaagaagttcgagaccctctcctacctgccacctctctccacggacgaggtcctaaagcagatcgactacctgatccggaagaactggatcccctgcctcgagttcagcaagatcgggttcgtctatcgtgagaacagcacgtctccctgttactacgacgggcgctactggaccatgtggaagctgcccatgttcggctgcaccgaggccacccaggtgtacgctgagttcgaggagtgcaagaaggcctaccccgactgttacatccgtatcatcggcttcgacaacatcaagcaggtgcagtgcgtcatgttcatcgcctacaagcccccacggctccgagtaagaccggcggcgccaaataagcttatcgcgcggaccgctcgctcgtgagcgaccgtggatgaagtgtctactcggttttggcaacttaattatttgacgctctgtttaaagtcgcctgcttgttaattccctttcttttcgtgtttccgtcctgtgtgtatgtacgaatgtacatgtatcaacgtaggctgaggagcatgcatatgtgaatgctagcgccggctaaacttatacgcatacacatcgtaatatattgtatacgcaattcctccactgcctcatctgtttcttgacgtataattatatatctatgtactatcggcttgtttggttggatgtaattggtgggtgggaaaaaagaagttttaagaattagacgaagtaagtaatttaaaaaaaaaaa

SEQ ID NO: 4996 - DNA, 469 bp, Setaria italica
  Peptide Sequence Number=SeqID_70970
atcgatggaaagagtcaaatgggaactgccttactctaggaagctgagatctagagatattgggcattacgtaagtatctaaagaaaactgaccaatccagtgttgtgttttagttttagtaagtgctggttctgtcgttttcccttaccaatgaagcagttgtttcagctatgtttgcatcatgcctacattcaagtggttttcaagatcttccctttcttttgtatgactctgctttcctgtgagttgagttattaccactttttatcatgcgtataaatctctttcatactgttttttcttgacagtgagattccattattggtttatttaccatgcattgtcattgttacattccactcttttcttgcattctctttatttcacccttgcttcctatttattgtttgtcttgctggcaaaaacaaactgagtagcattcattagaaaaaggcatctgggcgctag

SEQ ID NO: 4997 - DNA, 237 bp, Setaria italica
  Peptide Sequence Number=SeqID_70971
atttgcccggggttctggaattcctgtttatccactgcttgtggtctttttcggtcgggttgattgcagaagggtgaggaggaccatccaagctaatcactggatcagatcgatgctcgtgtgatggcgtggtgtgggtacagtgactacaactgatgctacatgcagatagaactactactactcgtactgtgtcgtgctgtgcactgtggagagaagcttgtctgaaactctgct

SEQ ID NO: 4998 - DNA, 546 bp, Setaria italica
  Peptide Sequence Number=SeqID_70972
cggcggcgcccgcgccctgcgggacgatgagcatcgggacgttgtaaccgtcgacgaggctgacgtcgaagaagtcgaggccgccggagccgtcgagcgtgaactcggccagcgtggcgggcggcgccgcgccgccgccgttgcactggacgctgccggacccgcagtcgcccgtggcgcaggtgaacttgcccgtggtggcatctgtggcgcagagcgtgcgcgcccacatgcggcccgaccagctcgccggggcgtccaccgtcgccgacgcgccgtgagccagcgcgaaccctgtcgtgggcagcggggccgtgccagcgccggagagcaagcccggccacaccgtgtagccgcagttgttggtcatcgtgaacgtcgccgaccacgcagctggaagcaggaggagcagagcaaatgagcagagagcgacatgagctgatctccgcgccatttcgatcttcacttgctgaatgtctggcgcgcacaagtctcagctccaagctctccggcgctcgctccttgccgcctctgctttcgtgtaat

SEQ ID NO: 4999 - DNA, 919 bp, Setaria italica
  Peptide Sequence Number=SeqID_70973
gtaattgttcgaaaaaagaaaacaaagtggagtactggaaattgatacatcacacgtatgcaatacgatccgtgaatacaagtatccaacgagcaggatggagtggaggtagagctactgctgctgcagcgctgccctgaccatggacgtgtacctctccttgttggcggcgaagaaggcgacgagctcctccctgtccggcaggaacctcttcactgtctcgtcggaggtgtactccttggcccaccggcggagagccgggtactcgccatccccgacgaggcgcaccccggccacctcctccagcacgtcgagccagtgcgccagtgtgcaggcggcgaggtcgacgaagccgagggcgtcgccgccgaagaacctcttgccatcgagccgcgcgtcaaggatcgccaggctctccttcgtctccctcgtgaaccgcgcctgcgcctcgccgtccgcccacatcgacagccacagcggcttcaagcacttgtcggcgatgaactgggcccagaagcgggcggtggcgcggtcgtaggggtcggtggggaggatccgcggagccgccccgccgtggaacgcctcgtcgacgtactcgacgatgacgagggactcgcagaccgcgcggccgccgtggatgaggacggggaccgagcggtggacggggttgtgcgcgagcagcagcgcgctcttgttggccaggtcctcaacgaccagctcgtacggcacgcccttgagcgcgagcgccacctccacgcggtgcgcgaacgggcttccgaacgccgtgatgagcttcaccggcgccgcctcctgtgctggcttctgcgacgacgacgacatctcctgatcagatgtcttatttgctgcctcgatagctcgtcgtggggttttgtgtcttaagcttggcgagagcgaaacc

SEQ ID NO: 5000 - DNA, 556 bp, Setaria italica
  Peptide Sequence Number=SeqID_70974
gttttttttttttttgttttgttcgctaaccaaagttttttttttccttcttccttccgacagtcaaggaaaccaagattccagagatacacgcgtcagggacagcaaattaaatcactgacgcattcctctcctgaagatccatctcccgctgccgctacggttcatgagcgacgacgacgacttctagagctaaaagctggatacacagacgctagagcacttgcccgggaaaactaacaagggacagactgatctcgatctggtgccgctgctccagggtgccaagcgggcaacatgcgccgcttgcaccaccacggccgccgttgcgccgggctaggcggcggcgacggtctccccgccgctgccggactggtcagagccgctggcgccggagacggacggggcctccttgatggaggttagggagcacgtctgctccatgcgctcgtcgtactcgatctgctgctcccggcactcctggctgcagaatgccacctcgcccctgtagatgaaggtgtcgtggccgggtccgaggcggcggttgcagaggccg

SEQ ID NO: 5001 - DNA, 870 bp, Setaria italica
  Peptide Sequence Number=SeqID_70975
ttagacttgcaataagaaggtattcatgcacgggagtgaacctgatgcctaggtccttcagaggctggtttgtgaacttgtaacccttctttggtggattcatgtcatccttgcacctcgtcggaatcgggtactccgggaagagctcagcgaggatccggcacagctcgccgcggtgcagagtccgctcggcgcagacgtagcgccgcccgccggcgccgggcgcctcgagcaccctgacgtgcacgtcaaggacgccgccgaggcgcacgtcagggtgcgactcgttgacgtactccttggcatttccggtgaggtacttgagtatgtgcagggtgctggtgttcatgctcggctgcatcagctcgccgagcaccaccaccgggatcaccaccgccaggtccagcccccgcgcccgcgccgcctcccacgcgttctgctccgcgatcgtcttcgcgtagcagtaccagttcttggtgctcttgcagtgctcgaggtcgctccagctcgattcgtcgagaggcgcgtcggggtcccggtgcgggttcatgtacatggtgccgatggtggaggagatgaccaagcgccgcacgccggcgtcggcggcggcctcgacgacgttccgcgtcccggcgatgattggctcgatgatctcctcaggtttgtcgtgcatcggcgaggcggtgtggatgacgccgtcgcagccgtcgaaggcggtgcggaggctggcccggtcgagcaggtccacctgcagcatcgtgaggcgctccgccgcgccgtcgagcgcccacaggtgctcgttcttggggtcatctgcgaggcgggaggtgccccggacggcgtacccgcgggcgaggaggagcttgacaa

SEQ ID NO: 5002 - DNA, 642 bp, Setaria italica
  misc_feature (1)..(56): n is a, c, g, or t
  Peptide Sequence Number=SeqID_70976
nnnnnnnnnnnnnnnnnnnnnnnnnnnnnnnnnnnnnnnnnnnnnnnnnnnnnnnntttttttttttaaagtagtagtattatatgaccttttactgacttgggtattatacctctcatcggaccatcaaatcgttagagtatctactcttaacaaattccatgaaatcattgaccccattctcatgctcggggataaatagttcacaaccgtgtatccaacgtctatccatctgtcaaatgctcattgtttagctttcgaatcaagcagtagcttggaagtgccttacatcgaaagaccttaatgcgaaatgaaattttggcgaattcaactcaaaattcctgaccagattgacgcgccacatttgtgctgccgtaggattgggctgccaccgggagcaacaaaattggtggtcatggccaaatgattgtacagcctaaagttgagctagggagctcgatccattttcaaagcgtcaaatgaagaaagtgaggggtcagcagctggagtaaccattgtactgtatgtaaaaggaagcccaaagaagtctccagaaatgcactcttacctgtgttggtaatggcagcagaagaagcttctttgtggttatcaaactgaagtcttttcatttgacaatctcga

SEQ ID NO: 5003 - DNA, 1185 bp, Setaria italica
  Peptide Sequence Number=SeqID_70977
ggtcggacagcaaacaatcttaggtcctgaaacggaaagaacaaggagagcttgaattgtaaaccctgatggtgaaaacaagaattcaaaaggtaaaaactgccgtcctcggtcctcacgaacggcttgctgccttcaggagacaaggcgaccgtgggcaggctaaaagagctgaacaccagacttcagtttgttctgcttccacttagggaggctgtagaaagctgctctggtcatcctgaacttctctctgaactcggctgacgataagtagaactgcatcccattgataacagtaactgaatgtcatcatctgatctgacagatggggatggaagaacggttgctcccctctcgcttggtcacgttgatgttggggacaggtcttcagctctcatcggaccatcaaatcgttagagtatctactcttaacaaattccatgaaatcattgaccccattctcatgctcggggataaatagttcacaaccgtgtatccaacgtctatccatcagattgacgcgccacatttgtgctgccgtaggattgggctgccaccgggagcaacaaaattggtggtcatggccaaatgattgtacagcctaaagttgagctagggagctcgatccattttcaaagcgtcaaatgaagaaagtgaggggtcagcagctggagtaaccattgtactgtatgtaaaaggaagcccaaagaagtctccagaaatgcactcttacctgtgttggtaatggcagcagaagaagcttctttgtggttatcaaactgaagtcttttcatttgacattctcggccatgaaaaccattcccatagacaggactccatagggaaaggctgcacctaagctgagaaggacagttccacatccgaattgtgccagcatttccaagtcaggtaactgccctggcatcgctgctattgtgatcgacccagtcataattgaagatagcaatagcttgaagaagggattccaaagggcttctacaacgacacagatgtgatcagatggaagcaggcccaacatgccagatatggtcctcttcattgcatctactgtttcaggagcaacatctttctgaatgacacttaggtcccagggctctgtatcctggatcaagtcccagggcatggatttcttatatcatctcaccaccgccagtgctaattgtg

SEQ ID NO: 5004 - DNA, 1620 bp, Setaria italica
  misc_feature (14)..(14): n is a, c, g, or t
  Peptide Sequence Number=SeqID_70978
tttttttttttttntttttttttttttttagtaaaagttcatctttattagaataaagatgagacacaaacaagggcactaaatggacaacaatcatagccaacaaatacatacaactacaatacaaggatgcctaccacgctaccacaggattaacagcaacgaacaaccgaattcctttttatacggcacaacatcaaaagaagaaaaagagagcagttcgcgtccatatataacactagctttacaccccgagtggctgttttctgaatttacaagaactacaacaagaactatatagctcagcagtgctccctgtattaggggccctccttaggacagggaacgcagtgtaaccaccagctccaccatttatcagccagggattgccattctctccggcggcggtggggaatgtcagtgaacgtggcattctcaaacaacatgatcatcaccattagcgaaagaacctacatcactggatattcgaagaagctgcgccagctctaaccggtactccagaccccggatgtagtgacccagcagcatgcaccagaagagcagacgtgcaagataatcacggggtacagatattagaggctgaaacgggagtgaagcattctcaacaagctccgcacagtcatcatcctcaccccctaggtttagggcacccccagaagtgttctctagtggcggaggggcctttgagtgtatcttgggggaaagagtagcaagtaaaccgtgaaccacagaatgaattgcttcttgcacgccgggacacgtagactctgatagttcagcaaccttctctggtgttagtgatctcaaatagtccagcaagtcatttttttcctctccaacaaactgttgcatctgtagggcagaattctttctcctgaggtcatgtaactcctttttcatggcatccaaacgagattgcatctgaataatgtattcttctgcttgaggtgttaagtcaccaagctcttctaccatattctcatatgatgattcttcatcactttttccagggtcctggggcatgtcctcttctgataatctaaaaatagtgacaggtttacccaaattgatgttatgatgattgtcttctgtgatatcagtttttggacattctgcatcttcttcagacagttcaaggtttctttcaaaagaaagcctgtattcagcattacgtagagtataccccgtcataattgaagataccaataacttgaagaagggattccaaagggcttctacaacgacacggaactgatcagatggaagcaggcccaacatgccagatatggtcctcttcattgcatctactgtttcaggagcaacatctttctgaatgacacttaggtccaagggttctatatcctggatcaagttccagagcatggatttcttggagggtccatgtacgggcctcccccgcgcgtggagctcgtcgaagggcgacgcggaggcggccggcgacccccatgtgggccgccgccggtcgcttccccttccccgcctctcgcttattccccccgaccccgaccccgaccctgcctctgcgggcgtggtgggcgattcctccctcctccctcgccttcccccctcggaccccgg

SEQ ID NO: 5005 - DNA, 311 bp, Setaria italica
  Peptide Sequence Number=SeqID_70979
accgtagtcccgaggtgcgtgcgcgcgcgtcgccccccaccctcttcccctcctcgccgctctccccttccgccgccgtggggaggcaggcaggtcggaagaggcggaggagatcggcggcgccgacgccacccgccgtccagcctcatcatccctccccgcgaactaggcgcaggctgaggcagggaggcggcggcgggaggttttccggcgagcggagggtggtcggggatggggctcaacggcgcggtgtcggggatggtgtcgaggaaggtgcttccggcgtgcggtgggctctgctacctctgccc

SEQ ID NO: 5006 - DNA, 733 bp, Setaria italica
  Peptide Sequence Number=SeqID_70980
ccgcgaccccgcacgagcgccggctcgggtggaacacctccaccccgacgtgcggctgggtcggggtaacgtgcgacagttcccagtccaccgtcgtcgagctgcgcctcccgggcatcggcatcgtcggcgccatcccgccgggcacgctcggccggctcaccaacctccgcgtgctctcgctccgctccaaccgcgtcgtcggctccatccccgacgacctgctgcagctgcccaacctcaaggcgctgttcctgcagcagaaccggctctccggcgccatcccgccggggatcgccaggctcgggggactcgagcgcctcgtgctcgcgcacaacgacctctcgggccccatccccttcgcgctcaacaacctcaccgcgctgcgcgtgctcaggctcgacggcaacaacctcaccgggagcatccccagcatcagcatcccgaggctcgacgtcttcaacgtctccgacaacaacctcaacggctcaatcccgaaatcgctatcgcggtttccgccggaatacttctccggcaacctcctgctatgcggcgacccgctcccaccctgcaagagcccgttcttcccaccggcgccggcgcccgggatgagcccggacggtggtagccccatgccgggctcctccaagaagcgcaagctctccggcgcggcaatcgcgggcatcgtcgtgggcgccgtggtggtggggctcctgctcctcatcgccatcgt

SEQ ID NO: 5007 - DNA, 421 bp, Setaria italica
  Peptide Sequence Number=SeqID_70981
tgcttttgacttcacactaccagcagtaatatcttgctaggtattattggatatttctgtgaaagaatacacggaagctacaataccgtgttgttaagaacaggagagtactggcattttcttctttcaagcagaagaaaagaacaagaagatatctctctaaacaaacacctatagaggctaatacattccattgccgcattagtagtgccctggtctagcatgtttgcaagccagatgaagcatgtagtggtgctagccagccaaactgtactaaataggtcgaggtgttcaaggacttgtacatgccctttgtgaggttccttaatagctaaccttttgaccaaaaaaaaaagaaaaactttaacaggtgccacgtgaatttttcttcaacctttcaattcagtaagagaaaggaaca

SEQ ID NO: 5008 - DNA, 1406 bp, Setaria italica
  Peptide Sequence Number=SeqID_70982
tccgccgccgcggcggggcacctcggcgccggcaggctcgcgtgggcccgaaacgcgccggcccgtgccacgtgcctcgccagcagcagcggcgacggcagcggtggctaccagtacggcgcgtacaagtggacggtgatgctggtggcgaacccgagccgggtggagcggatgctgctccccatcttctggggcctgatgacactcagcacgttcggcaatctggagagcacgacggagtggctggagatcgtgttcaacatcctgaccatcacgggcggtctgatcctcgtcaccatgctcatcggcaacatcaaggtgttcctgaacgcgaccacctccaagaagcaggcgatgcacacgcggctccgcgccgtggagtggtggatgcgtcgcaagggcctgccccgcgggttccggcaccgtgtgcgccagttcgagcggcagcgctgggctgccacccgcggcgtcgacgagtgccagatcgtgcgcgacctccccgagggcctccgccgggacatcaagtaccacctgtgcctcgacctcgtccggcaggtcccgctcttccagcacatggacgacctcgtcctggagaacatctgcgacagggtcaagtccctcatcttccccaagggggagacgatcgtgagggagggcgacgtggtgcggcggatgctgttcatcgtgcgtggccacctggcgtgcagccaggcgctgcggaacggcgcgacgagcagctgcacgctggggcccggcaacttcagcggcgacgagctgctgtcgtggtgcctgcgccggccgttccgggaccggctgccgacggcgtcggcgacgctggtgacgctggagagcacggaggcgttcgggctcgacgccgccgacgtcaagtacgtgacgcagcacttccggtacaccttcgccaacgaaaaggtgcggcgcagcgccaggtactactcgcccgggtggcgcacctgggctgccgtcgccgtgcagctggcgtggaggaggtacaagcaccgcaagacgctcgcgtcgctctccttcatccgcccgcggaggccgctgtcgaggtgctcctcgctcggggaggagaagctacggctctacaccgccatcctcacctcgcccaagcccaaccaagacgacgacttctaggcttctagcctctaggccggtcgaggctggatggctggctggctggcttcatcatgcaaattagtacacgacattgatgcccgatgccctctgctggtgggcggggttgtacagtaatatggttggacggtccaagcatgttccgatcatcacggaattcctcggcagagagaaatattggctagtaccccctcgaaacaatttttctaaatacatagtcttagacaataagtaaaaaaaaaaaaaaatta

SEQ ID NO: 5009 - DNA, 257 bp, Setaria italica
  Peptide Sequence Number=SeqID_70983
tcccgtaacgttcgtagtaccttgtccgcatgaagtcgagcaggctcccgtcggcgatggtcttgtcaccacagtcacacagggatttgtagcacagctcaaggggctccaggaactcttcaacattcttaaaggccgagtcctccggaatgtcagaaaatccactagttagcagatggcgcgagcgttcgcgtgtgctgtacaatttgtccctcacataaccaagcaccacgcgatacggttcatttgcaggtaag

SEQ ID NO: 5010 - DNA, 543 bp, Setaria italica
  Peptide Sequence Number=SeqID_70984
ccctcacataaaagtataatgtcgtcaaatagttccaatgtctcgggaggtggttgcagcaaggaaataaccattgtgagatccatcaaatgtgccatctgttgcagaaatttcatgatctcaaatgtggtggagctatctagacctgttgatatatcatccataaagaaacatcttgcaagaccaactagcatctccccaattgtggctcttttctttgccctcctgatattcctcttctcagctcgtctcctactagggtatcagcacactcagacaagccaagtatcttgataatgtagtttgttgtaaggttgcttccttctccaaaggtggtagccttaatgaatgaatcaaaatcttggtcgactttgttgatgacaccttttttcttcttattgcttctcctagcatctcaaattcattattggttcccagcatcttggaagagaagtcgatcgtctctcttactgtcatctccgcatggtgaagatcatactggctaacataagcacgcaggtactgcggtgttgaggaactcat

SEQ ID NO: 5011 - DNA, 469 bp, Setaria italica
  Peptide Sequence Number=SeqID_70985
agtctgtcttcaaaatgccaagaaagcctttgactatgtctgcagtttggtgaaagatgaaatgatggtgaggtccagcagctatacctttcttgatgggacggtgctgctttagaagatcgagtggccattgctctgcgaaggttgaactctggtgggtcgctggtgactgtcggatcttctgttggcgtgaaccactcgaccgtctcgctgataacatggaggttcattgaggctatggaggagcgagcaagccaccacttgcgctggccagacactggcgaaatggagaagatcaaatccaagtttgagaagatccacggtttgccaaactgctgtggcgtagtagacacgacacacatcacaatgtgcctttcttcagctgaaccgaactgcaaggtctggctcgaccaggagaagaactacagcatggtcttgcaactactcacacatgcggatatgaggttca

SEQ ID NO: 5012 - DNA, 788 bp, Setaria italica
  Peptide Sequence Number=SeqID_70986
ctcgatgagcatccccacattagcctttagccagttgctctcctgctagtccagcagcagagttgtttgcaaaagcccttctgctcaacactagtgtcttctggagaccttgcattgttctcactgcagttaccatcttatccatatttccaaagaaagtggcaatgtatgcatcactgttgattgaaacataatagtcaagagcagctttcgtatttccatgcatcctctcaaaatcttcattagtcaggagagatgactttgtgtatatatttttgtaaacggacgtgaagccctcaagttccattaacccatcgccagcagctaaataaatgtttgtgcttgtaggaatgcctaacgcttggaggataaatgctgtttcacttggtgtcagagggcacttgccgcggttcctccacaggcgggcagcatcacctgtcaataccatcctaccctccccacgagcagcttcaatggagtccagtgatttggaagaaagaccagtgtatgcacatcgactgtaggcgaccatatctggttcaaatctgaggtgaagggatacgaagggttttggtatagtttggagcagctcaatagccttggattccacttttttattcaacctgagtgcattgtagcaaccttggcagtaagaagtctttttcatatgaggggtatctatctcttctttgattcgcggaaggtgtcagcgagatgtattgatgctccaagagagccggaagtactgattcaacataatcaaaatgtcctttccgtttactgcagta

SEQ ID NO: 5013 - DNA, 478 bp, Setaria italica
  Peptide Sequence Number=SeqID_70987
atcctctccacgcgctcttaaacccgcggcagccatcgccagagactctccaagtccaagaatccatcccaagaccaccgaaatggagctgaggatggctccagcctcgccgccaacgccgccgcccgcgatggacttccggctcgacagcgcggccacgagcccgtacgccacggcgccgtccagcccaagggggcgtctcgtccgggacgagggaacggcgggcgggttgttcttgacggcgccgccgtcgccgaacccgttcgacctcctgccaccggccaccccgcgcctcaccggcgccaacccgttcgacctcttccagcacttcaccagcgcgcccgccagcccacggcgcgccgcggccatatacgcgcacttcgctgaggggaacggtggggatggcgaggaagacgacgacggcgacgaggagttccagccgcgcgggtcgtacgccacgggcggctcgtccgtgccg

SEQ ID NO: 5014 - DNA, 844 bp, Setaria italica
  misc_feature (23)..(23): n is a, c, g, or t
  misc_feature (51)..(51): n is a, c, g, or t
  misc_feature (835)..(835): n is a, c, g, or t
  misc_feature (840)..(840): n is a, c, g, or t
  Peptide Sequence Number=SeqID_70988
aaaattcttgatatcatcataanattgtacattactttacaagactgaacncaaaaattgtatgagaaaccacatgtgatcaaccaggcagatcagatctatgaaatacaaaataactagaggaaaaggattgcaatatgtggaaaccaactatcgttgaaagaattaactcatccatctattaactgggagtctggcctactttcatgcagatgctctccattgcaacatgcgtagctaactagctactcattatattcaatgattcatccagctggagattctaagagaaaaagaacaaatgggccgcattcaaggtagcaccagcaggctgtcagacttggcagtatctttctgatggatcagtcgtttgggttagcaatcaaaactcactaatgtaggcttcagtacttgatcacattatgccgcaaccacagttcgtacataaccatgtggaatgcatcatatgagagaggaggtgaatgccacacaaagtgtttctgcacctgtaatccaacttaagcagttagcacagcactaaacgagaatttagttaggtttctactttctagttgtctcaaattgactcggagctctcacacaaataaaccccagagtagctaattttctactgacaaataatttgctatcttgccacccaatagatcgtttttttttttacttaaaatttaataaagaaaatcccaaaatactcttttgtaggacagtgaatgcaaagaagaaagtaaggtagtgtttggttccttgtatgatccgatacatgtatgaattggtgcgggatctgagcacgatgaagtgtttggttgtgaatcgnaccgnttcg

SEQ ID NO: 5015 - DNA, 311 bp, Setaria italica
  Peptide Sequence Number=SeqID_70989
gttgtcggcccgacggctcccggctgcggcgcgtgtacgtggccgggcccgagggcagcgcggaggcggacaaggagcggatcaaccacgtgtgcttcagcccggactcgcggtggctgctgttcacggcgaacctcggcggcgtgatggcggagccggtgtcggggcccaaccagttccagccgtacggggacctgtacgtgtgccggctggacgggtcggggctccagcggctcacctgcaacgcctacgagaacgggacgccggcgtggggccctgagcgccgggcgtcggggtggaggcgatgtcgc

SEQ ID NO: 5016 - DNA, 550 bp, Setaria italica
  misc_feature (492)..(492): n is a, c, g, or t
  misc_feature (508)..(508): n is a, c, g, or t
  misc_feature (527)..(527): n is a, c, g, or t
  Peptide Sequence Number=SeqID_70990
aaaaaactaaaaaaaagaaaaaaaactaaaaaagttaaaaaacaaaaaaacggaaaacgaaaacctacggacggcgtgatggcggagccggtgtcggggcccaaccagttccagccgtacggggacctgtacgtgtgccggctggacgggtcggggctccagcggctcacctgcaacgcctacgagaacgggacgccggcgtggggccctcgagcgccgggctcggggtggaggcgatgtcgctgggcgcgcccgccggggagggacccgatgggccagttcgacgagccgctctggctcacttgcgacgtctgagttgatgaacgatggtgatggcggtcgctttttcacttttcagtgacttgtgattgtaataagcttgattggaataatgatgttgttggggacgcttttgtttcgttgctgagtgaataaaaggatgtgcttgcgtggactccattgtccattgactaaaaaaaaaaaaaaaaaaanaaaaaaaaaaaaaaanaaaaaaaaaaaaaacaaanagacaacgacaacaagggaaggt

SEQ ID NO: 5017 - DNA, 369 bp, Setaria italica
  Peptide Sequence Number=SeqID_70991
catctccagtgtcctactccttagaagcgttcctcagcgcaacacaatcaactcagggttagatccgaaaaaggatgagacttggattgaggtgcatatggtgggattttccagggggttttcggagtttcgccggagccgacgaagaaaggcgcggccgagggagttccggagtcgatctcgtgaaaccgagggcaccatggcgtagaggacgacgacgcgcatctcgtggtggtattggatttgccaggggacaccggagttcgccggaaaagctcgccggagttcgtcgggacctcaccggagttgcaaactttcattttcagatcttggagaattgagagccgtgggagagaatgaatttcagat

SEQ ID NO: 5018 - DNA, 1188 bp, Setaria italica
  Peptide Sequence Number=SeqID_70992
aaggaatagtttttggtggcatatgagttaacactgaccactgatgggcagacacgtttgtatagcttattcaaatcatcctgcccataagcaatctgcaaatagaaggaaaatagaaacaatagcccttttattcaacatcaggtttttttaaaaaaaaaagcaaacttaatcatgaagcgaccactgtttagaaccatgcaattcagtttcatatcaacttcctaataaaacatctaagaaattcactgataacaagtgtaactatgctagccatgtatgaatccacgtaccggaggcatcgttgctcttttggtctttctagacaagacgctccactggtgatgccaaacgaattacttagtctcggcggacggcttgacggaggtcggggtcaggctgcgccgtcgcctcctactcccagcagcgtcggtcgccgtcgacgccccctctgctgctacgtgcctcatctccagtgtcctactccttagaagcgttcctcagcgcaacacaatcaactcagggttagatccgaaaaaggacgagacacaatatgaggtgacaaagcaaaacaattttgaaaaacgcactataagctaacactggctaacacgaacgcgagagcgcataaaacaactagatcagagctacggatgataagatacgagcaactggaggtttcaagggcattctaggaaattgatcatgtgagaaagagaatttgaatattagcataaggctcgtgcaatctagtgctttatttgaacaatcttacttatgttgtattgcaataacatataattaatttaattatataaactctatgtcatcgctacatacataaacttgattgccaaataaatattatttacaagtaaaaatactaatattcaagataaatgtctgattggccatgaaagagtggtgaatagagcaaaataaactctagtatatggatatataacttaacatattattttaatagttagcattcgttaaccattataacaattaaactaaactttatcagaacaagaattattcgaattattaatacaagccatttgtaaattatcataccatttcaatattctaaactcatgttatgttgtgatagcatagatttcattttagtaaataaaatctaggtcatttccttatacacaggcttattttattgaaataatc

SEQ ID NO: 5019 - DNA, 1797 bp, Setaria italica
  Peptide Sequence Number=SeqID_70993
tttccagcatgaatgcaacacacaaaattgcaacacacaagaagatagcaagtgattctatagaattcatatgaagagatgattggagaccacaagtactcactaacaaatcatgcaacttgtaaaacagtgatgcattcattctgaacatcttatggctttcactaggagtattgagtttttccattgtccaaccaaatccactctgtggaggagttctcgcatcatttttatcatgataggtcatgaagtacttggaagcaaccagagcactagcaaacagactattctgagttgaccttatcaatgtcatagtatttatagcccactgatccttgtctgaaccactgtcatccattttagcatcagaagaatcagatcttggatcagtaatgccatatataccaaagaaacacccgaagaatacagggaatctgggatgcagggagcaaagacttctggacaggacaggccagtggtatacacagaaactctgggcaggccatgagttctagatgtttagcgagtcatacatagatgaccccttctcttcaaccgtatggatctgctcatcgtaatcctttagtttccttttctttgttccatttggccctttctttgttccacttggtccgggtctgcccttcctagccttttttgacaatgaaatcttctcatctttagccttcaattcagcttccagctcatcgacccagtggcacgcttgctgtgcgaactttaaatcataagtcagctcgtccaacgaggtgattgtaccaatcagtgagccttctagatcaaaaacagcagcaccgataatctgtcgcttggctacctccaattgttctttgattaccatttcaggacgtattacagctggacaagacagagcaaatttcctttcactttcagggacaagcttcaaccttaaaccttcagctttgcagcttggagaaattatagtgcctgtcatgaagttaaacccactatagcccccttctacttctgcaattgtgaaaatttcctcccttcttggttcacattgactgaaagaaacaccactgcgagcatgaccgcgtctagattctgtcactagcactgcatgccctgaagctgtcttctccaaaaaaacagtagccttttcggtactaccgtcactgaagtgaacatataatgtgctgtgtacctcaatgacagacttgtggacacaaataagtgaccgacttctatccgaataaactataaaccctgtaaagaagttgaaggaatagtttttggtggcatatgagttaacactgaccactgatgggcagacacgtttgtatagcttattcaaatcatcctgcccataagcaatcggaggcatcgttgctcttttggtctttctagacaagacgctccactggtgatgccaaacgaattacttagtctcggcggacggcttgacggaggtcggggtcaggctgcgccgtcgcctcctactcccagcagcgtcggtcgccgtcgacgccccctctgctgctacgtgcctgcgtgagccgtgaggggatgagccgctgaggcctgaggggagagggcaggccaccgattgcccgactcgatctggcggctccaagcctcccagccccggcggcctgtctggttggctggagggcggactcacggaggcgccgggcggcggccgtgctccagccttcaaaccctagactcggctgacgggcgagactggaactggagagccacggtgtgctcgtcggggtcagggagttgcgacggatgacccggacggggccaacg

SEQ ID NO: 5020 - DNA, 700 bp, Setaria italica
  misc_feature (496)..(496): n is a, c, g, or t
  Peptide Sequence Number=SeqID_70994
ttgaagaggaaaacaagcagggtggagatgatgacagatgcaaggggcgcgcatgctgaaacccagaaaagtcttggccatctcatgctcacatgcctcgccgtcagcaggaacgccaggaagcagacgcccatgagaatcgtctgccacgaccactccttggtgtggtggaagacggaggccatgacggggacgaggcccatctcggtggtgaagtggacgatacccagcagcgccttgagctgctgcagggacacgatgatggccgcgccggccatgaaacccaccagcgtcgccttcgacaggaagtcgatgatgaaccctagcctgaggatgccgagggaggcctggcacgaggccggcgaagaaggtggaggtgaaggccagctgcaggaacagcaggggctcgggcggtggggctcgacggcgtcgcgaagcatggaccccatcaccagcgacgcgatcgacaccgggcccaccgccaggtcccgcgagntccccagcaccgcgtacaccatcggcggcacgaagctcgaatctacacaggcgccatggacagagagttgaaattgcagagacaaaaaaaaaaatcaaggtagctgaccgattagcagagaaggcccggaaggggatgcgattttaattaggtatacgtacacaggccgattatgggaggcaagcttgccagcttcgcgtagct

SEQ ID NO: 5021 - DNA, 2390 bp, Setaria italica
  Peptide Sequence Number=SeqID_70995
ttttttttttttttttttttccttttgtactgttgaaatatcagtatttaaaataagcaatggggaaaggttctgtaagaactactattatatgcagacaaataacaacggatatccatgaatgtacatatccttaatacttcactttcaattgttgactttgcataagatagatctgaaggattgtgaagattaggtacaaacatagctgtgacgtgctcctttgttggaggaaccttctgtgacgaaaaatctgacactaaatgtttatcagtgcaattggatgaacactgacaatttggcaatccactctagggctttgtcatcttggcaagtgcagaaagtgaagcaactgcttccccagtggtcaaatacaggcaattcgacctgaactgatttagagcctcgtttgctcgctgtatcttctccatgacctctccggtaggattgacaagtacaagctcaagaccacgtttctctattgctttctttatgtcaatgaggagtgctatgccacttgtatcaattgcaggaacagctgacagatccaagattatgaaatggagttcagtttgtttattatgtgcggaactttcttcctctatccatcttttaatcctttcattcaggtagttggagttagcgaagtttattggtgcttcaattgccaagattaacattccaggaactctttgagcctccttgtactgatgtaggtcccggtaaatatcagttcccttaatgttcccttgaattatcatctttggtctcgtgatttgcatcaataccctaaataccgataggccaaccgctattgcaaggccttcttggactgagatgaagataacgcccgcaaatgcacaaacacaaacgagaaaatccatcttgtccatcttccagatttggtatacagcaggggcatcaatcaggccgataaccgcagcgatgatgattgctccaaggacaacattcggtgtgtacacgaacagtggcatcaggaatagcagtgtgaccatcacagtcagtgccatgaccacattcgacatggcagtcttgcagccggcattgtggtttacagcagagcgggagaatgctcctgttgttacatagcaggatgtacatgatcccacaacgttcatcaaccctatagccatcatctctttgtttccatctacttggtagtccttcagtgaagcaaatgttctaccaacggcaattccttccgtaagggagaggatcccggtgataagtccagtcttcatggtgaggcctaaatatgtggtgtcgaagatcagtttgtcccatgaggggcggttcagaccacacttgagctgcccaataatgctgatgccatgattctgagctttgaagaggaaaacaagcagggtggagatgatgacagatgcaaggggcgcgcatgctgaaacccagaaaagtcttggccatctcatgctcacatgcctcgccgtcagcaggaacgccaggaagcagacgcccatgagaatcgtctgccacgaccactccttggtaacgccgcatggagacaacagaaacacgatgagcacacgttgattggctagctactgcctcgggtgtgtgtggttgaagacggaggccatgacggggacgaggcccatctcggtggtgaagtggacgatacccagcagcgccttgagctgctgcagggacacgatgatggccgcgccggccatgaaacccaccagcgtcgccttcgacaggaagtcgatgatgaaccctagcctgaggatgccgagggaggcctgcacgaggccggcgaagaaggtggaggtgaaggccagctgcaggaacagcaggggctcggcggtggggctcacggcgtcgcgaagcatggaccccatcaccagcgacgcgatcgacaccgggcccaccgccaggtcccgcgagctccccagcaccgcgtacaccatcggcggcacgaagctcgaatacaggccgattatgggaggcaagcttgccagcttcgcgtagctgatgccctgagggatggcgaggctggcaatggtgaggccggagacgaggtcggacttgaagagcgagaaggagtagccgggcacccagtcgaggatggggaacaggtacttgaccgccatgagccactgcgtccccagcggctgccccttgaacgcccggaacgggtcgtcggggaagaaggtctccttcaccctcgccttcatcttgctcgccgtgctctgcggcggcggcgtcgccaccttgtgcaccgccatccccgcaatctccgccgacgtcgtcgtcattggagccgccgccgccgccgctcctccaagcggccggctctcattgccattgctgtaaccaccaccaccaccgtaggcacctctcatgcccac

SEQ ID NO: 5022 - DNA, 376 bp, Setaria italica
  Peptide Sequence Number=SeqID_70996
tctattttcgttattgttgcatatacaagaacttctaattctacacagtccagtagaatggtagttaatatgcacacattggtaatgtttgattatcatttgttgtttccctttgttaaatatgtgcaggcacttactatcctttggcaaagctacgccgacaccatcagggttgtgcttgcagtggatgactcacaatttccagattgtcatcaccttctagatgacttcgctgagtccctgaaactaattagagaagcagcatcagcgcactaccaggaagcaggaaactcctgacggccaaaatccgtcagggaacaccccaaaaccgtcagaccgacaggagcccatagtcaggaaaggtccatttctcctg

SEQ ID NO: 5023 - DNA, 361 bp, Setaria italica
  Peptide Sequence Number=SeqID_70997
gtagataggaaaaaacattcactagaggtaatcgtcacgcatggaattaaaaaagggcacctgacctttttggcaccaaggtttcaggtgctatcttccatcgtatgatatctaataccacagtgccgttctccaacatgattggtccagttgaaccagtagagttttatgggcaccgggttgtctacattgcacctagcgtatatgggcacccgtcggcacttactatcctttggcaaagctacgccgacaccatcagggttgtgcttgcagtggatgactcacaatttccagattgtcatcaccttctagatgacttcgctgagtccctgaaaactaattagagaagcagcatcagcgc

SEQ ID NO: 5024 - DNA, 302 bp, Setaria italica
  misc_feature (291)..(291): n is a, c, g, or t
  Peptide Sequence Number=SeqID_70998
aacccgcctgaactgctcaaatagtcctttaggtaagaaagtcaggatactgtactttgtagtcgacacagaatttcccttgtacccgacgggcgcgttggcctcgcggtcgttgcagtagacggtgcgcacggtgggcgccatcggctgcggctgcctccggaagctggtgcccgcgccgccgagccgcgccgtggactccctgcgcccgaggcccgaggaggaggccccgccaccacccggctgctcgccgcccagacgcgccgtggccacccgcaccatctcctttanccgcgcgttca

SEQ ID NO: 5025 - DNA, 428 bp, Setaria italica
  Peptide Sequence Number=SeqID_70999
agtatacggagtatgatgaatctgtacggtgatgggttgattgtacacgaggcatgattgggatggcagtaggcgctggtggtagagtggtaggtaattaagggcatgctaatcagtagtgatgctcttgagggggtaatcgcattcacatgatggtgcaggcgtaggaggggtcgtcctcgcagcagacccggtagccgtagggcgggttgcaggggtacggctgcggcacgtactgcggcatcgggatgtactgcggcgggggcgccggcggggcctcgggggccttgccgcaggagcagcagtggcacccgccgtgcccgtggtggcagcagcagtcggacggccacgccgggaacgggtacgggtacggccacgggtaggggacctccaccaccttgggcggcggcggggcgggctcctgcttg

SEQ ID NO: 5026 - DNA, 958 bp, Setaria italica
  misc_feature (1)..(76): n is a, c, g, or t
  Peptide Sequence Number=SeqID_71000
nnnnnnnnnnnnnnnnnnnnnnnnnnnnnnnnnnnnnnnnnnnnnnnnnnnnnnnnnnnnnnnnnnnnnnnnnnnnagaagaactaaacatgaattaattataaaactaattgcagaagccctggctaaaatttagcccttgtcacgtcaaatgtttggacgctaattagaagaactaaatatgaactaattataaaactaattgcagaagccctagactaattcgcgagacgaatgtattaaatctaattaatccaccattagcaaatgggtactgtagcatcatattgttaaatcatgaaccaatccatctcgcgaattagcctccatctgtacaattaagattcatctcgcgaattagcctccatctgtacaattagttttgtaattagactatatttaatacttctaattagtatccaacatccgatataaactttctccgatatgaactaaagtttagtctgggagagccaaacaaaagtttagtcctgggagccaaacaagcccttaacctctttcccaccttgtcttcttttctacacggaaaatcaacagcattgcttatttttattctctcactcacttgccctaataaacatgtaacgaagcagaataaagtatagtgtatatgctaagtagatgacaagaaggatacggtgtacatgatgctagtatagtatacggagtatgatgaatctgtacggtgatgggttgattgtacacgaggcatgattgggatggcagtaggcgctggtggtagagtggtaggtaattaagggcatgctaatcagtagtgatgctcttgagggggtaatcgcattcacatgatggtgcaggcgtaggaggggtcgtcctcgcaggagaccgggtacaggaaccgccagaacgcgtcggcgcgcgccttgcgctccttccccgccgccccctcgtcgccgatgtccgccgcgccgctgaa

SEQ ID NO: 5027 - DNA, 657 bp, Setaria italica
  misc_feature (1)..(1): n is a, c, g, or t
  Peptide Sequence Number=SeqID_71001
nattttttttcagatctcaataattgcgatgagagtcaccgactgggggctacccataatgttttcgagagacaatggaagcatgagagtacacgagcaccaggctcaaacacggccgcctcccgggcagtaaaattattccatctcacatgcgtgcgcgtggttgtctgctcacacgggcgcgcagtcacttgcgtaggaaactcaggacgcgctcctgcatctccctcgccttgtcgcacctcggtttgatgcagtagaagacgtggccctcgcccgtggactcgagcagctccacctcccccgggtatccgctggccttgaggttctcgtagtaccagacgcccctgtcgcgcagatcgtcctcctcggcgacgcagacgaggacgcgctccgccgcgacccgcgccgcgctcccgccggcggcctccgagaacgggttggacagcgggtcgtcgagcccgggggagcccgggtacaggaaccgccagaacgcgtcggcgcgcgccttgcgctccttccccgccgccccctcgtcgccgatgtccgccgcgccgctgaagtaggggtgcacgatcaggaggcccctgacgcgcatcccgagcccgccggcgccgtgcccgccagcgcgcgccgccacgacgtgcgcgatggtcg

SEQ ID NO: 5028 - DNA, 1406 bp, Setaria italica
  Peptide Sequence Number=SeqID_71002
gcgaaaactaaaagaatatattacaaataagggagaaacttcatcccatgcatggatctgagcagctcatccatcaatagctggtacattattactgctatgactattattactatgcattggccacactaaactcgatgaatcctgtacagaaaaagaaagctgcagtcctacccataccgtcatgcagaatacagcatgaaataactttccccaattcgccaacaaaacttggcactgatcttggcttcacctccaatgtacgcaaaatcacaacacaactgaacaactgtccagcaaaactggcaccaccccagttgataagtaacctcaatcttttgtgctctcgttcacaactgaagtaggctttggcaaaattggcacagtgacagacccagagacggcatcaagaacagaccactcttcgtccgctaccaatgcagtaacaaggtttgcaggaaccgcagtgcttgatttaacagttaatgagtgcatactgctgctcacttctatgttcgtcgaatctttggttccagaactggaggatgcacttgctgcttctgtattcaggaagagacagacagcagcacagtcatcggtttttgatgtggggtaccgcgtcctccatgctctctgagctgattcaacaagaaaccgggctgctgagacccgtgaaggagcattgctgatgatgctaacaacttcatcattggaaagtacatcccataccccatcagtcgccaacacaacaaattcatccttctcagtgatgcagtggtatgaaacatcaggcattgaaataataccataattctttagacagaagtctccaaatgatcttgccatggccaatcctggcgagttgaatgtcggaagccacacacgtgcaacattgggctcatctggaagagaaaataccctaccccttcgttgcttgattctttctgcttcacttggaatgctaggtttgaggtccaccgtcaactgaacagcaactagttgattatcttcgtctctagtacccaagacagctctagaatcccccaagttacaaattataagattttgtccctgcttgaatactgtaactgctgttgttccactgaacgcacaatcaatatttctgtgtaatttcagatccctgtccataacatagaatgcccgcaagaatgaagctctcaatgctgggaaaaattctgggtgctcgccattctcctcattttcaagggaagcgtcagtgtcttcaaccctgtgtggagtagtacctcctgtagtagtcccattccttcctaaatttgcactcaactttacagggagaaggtctctgaccctcttggcaaccaaatgcccatttggtccatggccgtcaaaaacaccacaaaacacggtgtcatgttttgaaccaa

SEQ ID NO: 5029 - DNA, 262 bp, Setaria italica
  misc_feature (261)..(261): n is a, c, g, or t
  Peptide Sequence Number=SeqID_71003
acggaagccgaaacccgagccacgccgccgacgacatggctgggccgtggtgatctccggcggttggggggtagcggtggcttgcggggatggatttcgcggggatgaagcggcgggagctgcaggcgctctgcaagcggcacggcctccccgccggcggcaccaacgccgccctcgtcgcccgcctcgacgccgccctctcggggccgctggtgcggaagaggaggaggatgtggtcggagtagcagcgaagaaggggtnt

SEQ ID NO: 5030 - DNA, 405 bp, Setaria italica
  Peptide Sequence Number=SeqID_71004
tcagagcatcagattcctctgcaggatgcatggcaagagcagaatcccaaaacttctgcatcatactatttgccacatcatttgctccagaggctccctcaaccatcgagattgttgcatgggttaattgtagagcatccaaacaggcaataatatgtccatttttgtcaatgacaggaatatgcagaaatttcccatcttgcatcgaatgtaaagcatcaaggattgatgtgtccaatgtagcacattcaggatttgcagtcatagccttttctacaagagttgtctctgggggtaaattctgtgccactactcgcaaagccagatccttggaagtgaaaattacctaagtaacatgttccctgtcatgacaaccaccgagttaactcgatgttccctcattcg

SEQ ID NO: 5031 - DNA, 322 bp, Setaria italica
  Peptide Sequence Number=SeqID_71005
ccggcatctatcctccgcagatctgctgtttccatctccaccctctcgaagctctgcacaacgtccacctccggtccgtgccctccgattgatttgccaaccccagcctctatagcatccccaaagatccatccgtcggcgtgaggatggaggtcgtcgccgtcagtgcggcgcgttgggtgctgggcaaggcattggggtctgtcgccgacggcttgctggaggcatgggcggccagcgtggggctcggccccaatatcgacgccctcaagatggagctcctgtacgcgcaggggattgcttcgactaacgtcgtctaggt

SEQ ID NO: 5032 - DNA, 278 bp, Setaria italica
  Peptide Sequence Number=SeqID_71006
cgcgaagctcgagggggaggctacgacgccggcgaggcgacgctggcgctcaagctcgggctcctgtgctcgcacccgctgccgggggcggaggccgagcatgcggcaggtgatgcagtacctcgacggcgacatgccgttccccgagctcacgccggcgcacctcagcttcagtatgctggccctcatgcggagcgaagggttcgactcctttgtcatgtcggcgtcgcatgcgtcgtcgacggcgatgagcatcgggaccatgacgggactctctg

SEQ ID NO: 5033 - DNA, 1092 bp, Setaria italica
  misc_feature (13)..(13): n is a, c, g, or t
  Peptide Sequence Number=SeqID_71007
actattgcagttntcatcatagcaatgctaaacagaaagatgaagctgtaagtaaatatcgtaccaagcatcctccgcaggaatagacaggcaaaattggagccaacaccaattgtaagacggctcctcgtttcctgtggcaagtgggtcttaaacgctcctttccaacccaatcgccgctttatcggcatgaacaagaaccatagctgccaactagatgggttgcgaagcaatagggtcatgaaggtagacacgcagaccacaatggcgatccgctcgctgaccgggctcaaaacaacataggcacccaatgcgaatcctataaccatacttctcgtcgcctgctccatcgaaattacagagaggaacatgtagattgcacgaagcagcggatggacatgttctgaccctgcatacgtgagccaaatggtggacagcgtggagccaacaaatgcaagagtgtttgccatcacgaatgccttgaaggtatatctgtgtgacaaaattggtgcgccggcatgtggatgtccatccgatatgtagccaccgggcagagtgaaaactgctgcaaatgtgactgttgagacaagcacggagccaacaattaaattctgtgcaatgttggtaaatttctttagctcgttcccagaagttttcccaatgccaaattcatctatgaaatgatcaaggcgacgaggactaagaacagctccagtccatgccaaacagcggagaatgatgacctgtggattcagtgtataacttatgcctttgtcagttgccagtactgcaagatctaaggcagtgaggccctggttgttcactatatttggcagtacaccttttgttgccattagaagactcactatcatctggtctgcattctttacagcaagatgcaggggcgtgttgccttcagaatccatgacatttgccattcttacaagctctgcagtaccagagaaacgccaaacaactttccatttcttattctcaatagcaatatgtaggaaatttcttcctctgctgtcaagcaattcgtcacaatctgggcagaatctacagagttcatagatgagttgaccatatccc

SEQ ID NO: 5034 - DNA, 820 bp, Setaria italica
  Peptide Sequence Number=SeqID_71008
caagatccagctcaagagcgccgatatgaaggaggagatgcggcaggaggccttcgaaatcgcccgcatcgcgttcgagaagcacaccatggagaaggacatcgcggagtacatcaagaaggagttcgacaagaaccacggcccaacctggcactgcatcgtcggccgcaacttcggttcgtatgtaacgcatgagacaaactactttgtatacttctacatcgattccaaagccgtcttgctattcaagtctgggtgattggcacagccaatgcgatcacccttgcatgcctacatccggttactctcctgtatgtcccccttttctctgagtcgtctgcagccaagctggaagccggtaaggcgataatcttatgagtcttcatgttgatgtatcagcgacggattgtcctccgtgttccagcagtgtgagatcagattgtgtatctgttttgcgtctgatatatctaggtgttgtgaggacgttgtcttattgcaatatgattgcccaaaaaattggacgaaccctccgatctgtttgagatttgctttggaagcagctcttgctcacgcccaatgcttgtggttcttactgtgggtgttaatgggtagtttgtggcccatgtgtggtgatctgtatctgtatgggctgtgtatgtttgcattccttcagatttctgtggtccagatgataatctgtttgcacatattgagcgggcttaagacagtactaaaggttatggcgtagtaagaaaatcgcactacgcatgtgttgaagaaaattgacactccctttcagctgtgttaacaaaaaaaaaaa

SEQ ID NO: 5035 - DNA, 400 bp, Setaria italica
  Peptide Sequence Number=SeqID_71009
ggaggaggacgatggggaaggaagcggctgcaaaggcttttgatgctgagaaagcaaaagtcatgaaagaattggaggatcttaagaagaaggtggaggaaatccaaaccaagaaggatttggttgagggtgaaaaggataagcttcggttggagattttaatagcagagcagaaacatagcatgtcccaattagaggttaaaaggctcaaaatggaattgggtgcattagcagaggagaaggagacaattgtgaagtcatttgatcccgagaaggcaaaattcatgaaggaagtggaggacctcaaaagggagatagaaggaatccaagttagcaaggaagcggctgagaaagcatggcgtgacaacaatgctgaggtcgataggcagagggctgaatt

SEQ ID NO: 5036 - DNA, 398 bp, Setaria italica
  Peptide Sequence Number=SeqID_71010
cttcgtcgcggcgcccgccgcgccgggcgggtgggtggcgtgggggctcaacccgtcgggcgacggcatgccgggcgcgcaggccctcgtcgcgggtcccttctccgacgacggcacgtcgtgggccgtccgcacgtacaacgtgtcggggtacgcgctcgggaaccccgggcccatcgcgttcccggcgtccgacctggccgccgagctcggcgccgacggccgcgccagggtctacgggaggctcgcgctcggcccctcatacggcgggggcgtgctgttgaaccaggtgtggcaggtcggcgccgcggtcgccggcgggagccccgcgccgcacgccatgggggcggacaatctcgccgccaaagccaagctggacctgctcaggtccaccaccg

SEQ ID NO: 5037 - DNA, 818 bp, Setaria italica
  Peptide Sequence Number=SeqID_71011
tgttgtttgtctgaaaggatgaggatgtgatcatcgacaccgcaaaagagcaataccgtgtgttgaagaccgaaaatgagtttagatatggctacaaagttgtggagaatgggaacgttaggtctgcgcttacgacaagtaatgtgatcgaagtatgtttctgaaattttgtcaagttctatcacaatggcataaacaatatcctagttcggacttcagacccctaatcgttattacttttcaattatggtcttactttagtactgaactatttatgagatattttacttaattattatttgcatgctggatagctcaaaatagtgtcttggaaaagttctcctaagcagaagttgcatccaaatgaggatggaaattgaatctttgataacaaatgttcaaattttcagtaaacatgttttgagcattctggcatgtcattaacaataggactccttttttttgcgaaacattaacaataagactcctgatctcagcttccaaagaaagacgagctcaaaaccgttgttgacaaggtgaaagacttctttggcgacgtaactgctggcgccaaagaatcctttgcacagatcacaggatctgctgtgaccaaagaggacgaggaagcacaaggcaaagagaagttccgctcaaagagacgaaagaagcagcggaagtcgaagcagggactcagtaagtacattgagactgcttcaacaattcagcatcacttgtgtaaacctcattgccatcctttatttagccatcagacagagtctaagcacgtgattttccgttactatcttgcagaaacggag

SEQ ID NO: 5038 - DNA, 236 bp, Setaria italica
  Peptide Sequence Number=SeqID_71012
cctcaacatcatcaccggcggcacgacggcgaagatcatgctcgccgccaaggacaacttcctcggcaagtacatctacaaggacacgctcgccaggaacctcgctgccgtcatttacaaagtaatcatcgacatcagcagatctttgcttcacagttcacacgctctctaaatcttattaatgatgatctagttttactacttgcacagactacataggtatatccgcacgaccg

SEQ ID NO: 5039 - DNA, 946 bp, Setaria italica
  misc_feature (924)..(946): n is a, c, g, or t
  Peptide Sequence Number=SeqID_71013
gcgggcgcttcgtgcgcagggcggcgccgcggaggcaaccggcgaggcgcgcgctggtggtggaggcccgggggaggagctggtcggagcggcagatggagcagcagcggcgcatgccgcagcttcccaagatcgaggacgacggcaacccgcgcttcgtcatcttcattcgcaccgccaatgtctacttctggtacccgctcaacatcatcaccggcggcacgacggcgaagatcatgctcgccgccaaggacaacttcctcggcaagtacatctacaaggacacgctcgccaggaacctcgctgccgtcatttacaaagatgaggatgtgatcatcgacaccgcaaaagagcaataccgtgtgttgaagaccgaaaatgagtttagatatggctacaaagttgtggagaatgggaacgttaggtctgcgcttacgacaagtaatgtgatcgaacttccaaagaaagacgagctcaaaaccgttgttgacaaggtgaaagacttctttggcgacgtaactgctggcgccaaagaatcctttgcacagatcacaggatctgctgtgaccaaagaggacgaggaagcacaaggcaaagagaagttccgctcaaagagacgaaagaagcagcggaagtcgaagcagggactcaaaacggagaaatgattgtgtcattcagcacgtcaggggtcgttagacaagtgaagcaccggccgaagttttgttatctatgtccagagttgctctgtaatttctccagatttaaatttttgcaaagagacattgtgtaacctccttgcgactaacgtgtgtgatgactttctcgctaaatcttgcaaaattcggtgaaggttacagctgtatattaatttcatttcttggaagtttgaaagtgagtgtggcaaaaaaaaacaaaaaaaaaaannnnnnnnnnnnnnnnnnnnnnn

SEQ ID NO: 5040 - DNA, 415 bp, Setaria italica
  Peptide Sequence Number=SeqID_71014
cggccgccggagtcgacgaagccggcgtagacgcgccccgccaggacgagcgccgtctcggtggcgcgcgggtgatagtgcggcgggttgacgccgcccgccgcggagaggtcggcgcgggcaaaggacacgcccagggtgtgcagcgccgggaactgcgcgggcgtgacggagacacccgcgaagcccgtgtccgcggagaagttgcccgcggcgcgcacgccggcgaaggcgaagtcggacgccgtcaggttgacggggctccggcacgggtaggtccggagcagcgacagctccaggggccgcccgcgcccgccggcgtccggcacgcagtagtcctgcacggcgtcggggtccgccgtggccgccgccgggagcagcacggcgagcaggaggaggaggaggtgatgcgccg

SEQ ID NO: 5041 - DNA, 796 bp, Setaria italica
  Peptide Sequence Number=SeqID_71015
tgatgtggagaaaggtgaaactgctccagctcagcagcaacaggaggtacttgacagctctgttcctgccagtaaggatgatgaggaacaagcaggcactgctgaagaaccaagagaaaagaagcaacgtgtggaagaccctccagtttctgaacagacagaacaaaaggaggctgctgatgaaacaaaggagtccactgatgaaccaaaggagtccactgatgaaccaaaggagcccactgatgaaccaaaagagcccactgataaaccaaaagagtccagtgaaagaaacattgatgatttaattgatgaggacttgaaagaactaggagacaggaaaaagattcttacggctcatttatcatcgtcatctcattcatcatcgtcatctgcttccgatgaagagtggctgaaaagaaggaagagggctcatttatcatcgtcatctgattccgatgaagagtgggaagagtggctgaaaaggaggaggaggaggagggcacttgctattgtttgtgcagctgtcggtatgatgtattattacgacacatacctagacaaagctaagtaaagggttgcaaaccaaactggttatgaatgggttattaaaacactacgaaataggacatcttgctacaacatgttcaggatgagcagggatgtgtttgataggctacacaatatcctagtccaatcttatgggttaaagtcaacaaggaggatgacatcagtagagtctttagctatgtttgcgtggatttgtggtgcccctcaaagcatgaggcaagctgaggat

SEQ ID NO: 5042 - DNA, 1576 bp, Setaria italica
  Peptide Sequence Number=SeqID_71016
ccttgttatttcaagttctgttaccacacctcctgctgagagaaatgacagcctttctagtcactttgattggtacaatcaaccttgctactatgcttttgtctcattatgctgctgactccattgttgttactgcagttctatgaagacctggtggatgggaaaggatcggatgaaacccaaaggcattcatgataagccaatgaacaaaagataaagtttgaggactctgattcctcagatgacgaggataaagaccattctgctgaggaagctgacaacgggaatgggaatgatgtggagaaaggtgaaactgctccagctcagcagcaacaggaggtactcgacagctctgttcctgccagtaaggatgatgaggaacaagcaggcactgctgaagaaccaagagaaaagaagcaacgtgtggaagaccctccagtttctgaacagacagaacaaaaggaggctgctgatgaaacaaaggagtccactgatgaaccaaaggagtccactgatgaaccaaaagagcccactgatgaaccaaaagagcccactgataaaccaaaagataccactggtaaaccaaaagagtccagtgaaagaaacattgatgatttaattgatgaggacttgaaagaactaggagacaggaaaaagaggctctttgcaagccttgagtcaggctgcaacggttgcatattcattcaaatgcataaaagagctggagaccctggtccagttgagattgtacaaaacatgatgtcatcggctgcttcaactcgtaaacatatgtcaagatttattctgcgagttttgcctgttgaggtggcatgctatgcatccgaagaggaaataacaaaagcaatcagtccccttgttgaaaagtatttcccaacagaatgcccaggtcataagtttgcagtgttatatgaagcaaggtcaaatacaggaattgatagaatgaaaattataaatgcagtagcgaaatctgtaccacaacctcacaaagttgacctgaaaaaccctgacaaaactattattgtccagattgcaaagaccatatgcatgatcggagttgtcgaaagatacaaggagctcgcaaagttcaacctaaggcagctgacctcaccggagtcggagaagtagctattgggtgacaagatcttctgagtcggagaagtagctattgggtgacaagatcttccaggcaaacacctggacccgcagcatcaggtggttgggcgttagctaattaaattatgagtgaccgaacgtcgccctcgatagatttgttgaagcccataaggccgttgaaaagacaccctggaatctttaatgcttcatagcgcgagaaccttggtcagtagggatctagggatgtagtactgtgatgggtttgcgaccatgggtggttagtagttgctggttaattcatatttatgcttcccacattttgatgtcagatttttaaggcaatagagagagttgacgtcttcgtgtgtgcaagtaatctacacaggctcctgaacactctctctaacgaataaattttactatacacaatacctatacttta

SEQ ID NO: 5043 - DNA, 852 bp, Setaria italica
  Peptide Sequence Number=SeqID_71017
tttttttttttttttgcaccacataataagatcgttaattttttttaaaggagcaaaaaactcagatcatacacatatatacattaaactttgggatagttaagtgagtattttctaagattgcaaggaatcgtgtcatctcctctttggctgcccgtacggaggagcacgtaaataaaaagaaaaggacaccatttcagaatttgatttccgtggaacaaagcacatatatatttagccttcaattgccctgtgtcttcgatctttttgaggagaaccacttccccagctttggacgtgcatttttcttctcacaagatggtggcacagtgtcttctgcatgcgtcctcctgttactcctcaatttagagtaagagaaccagccgcggaataaacttcccttcttgcggctttcttcttccatgcgctcctcattgtactcataaatacaaagatcttctaagacacttgtagaacacctgctgtcagtaaacttctcaccctcatcttcattgagatcatccaacaaactccttggcctgatatcatccgacgaagtcattgatcttctgtgagatgctgtcttctggtttttgggaagactcttgcatgggctgtagtcaacagagagatgctgggcaaaatgaagctcatcaccatccctaataccaaatgcacgcaatgttgccttgtcatccgtcagtttctcgtccttgaagcataagcagaagtgactccacacgtgctgccaagggatggtcttctcggtgtcgtcgaagagggcgaagaaaagctcctcgatggccgcctttagctcccacaccgcggcggacctcgcaatctccacgtcga

SEQ ID NO: 5044 - DNA, 227 bp, Setaria italica
  misc_feature (222)..(222): n is a, c, g, or t
  Peptide Sequence Number=SeqID_71018
agggtttgaaagggctgggaaccaaggtcatcgacgaagcggattaagctctcacatcctctacatctttagaacaagtttgtagttttgtgtctggcaacagcaaaccttttgtgtcccaaagaagttttgaactctggtactgtgatacaatatcacaattgtctatttccttaatcgaattcaatggttagttacaaaaaaaaaaaaaaaaaaactagngacac

SEQ ID NO: 5045 - DNA, 819 bp, Setaria italica
  misc_feature (767)..(819): n is a, c, g, or t
  Peptide Sequence Number=SeqID_71019
gcccggaacggaacaccaccgagccgaatcgcccccccggagcagagtagaggagaggagatggcggggaagaagggagcagcggcgaggaaggaggacgtggtcaccagggagtacaccatcaacctccacaagcgcctccacggctgcacattcaagaagaaggcgcccaatgccatcaaggagatcaggaagttcgcgcagaaggctatgggcaccactgatgtccgggttgacgtgaagctcaacaagcacatctggagcagcggtatcagaagcgttccacggagggttcgtgtgaggattgcccgcaggaggaacgacgaggaggatgccaaggaggaactctactccctcgtcaccgtcactgagatccctgctgagggtttgaaagggctgggaaccaaggtcatcgacgaagcggattaagctctcacatcctctacatctttagaacaagtttgtagttttgtgtctggcaacagcaaaccttttgtgtcccaaagaagttttgaactctggtactgtgatacaatatcacaattgtctatttccttaatcgaattcaatggttagttctgtgttcgtttcttctttattgccctatgatttacagtcgaagctgctactaggctagtttggaaatgtcgtttgtggtatttacattctcagttatgttccttgggtgattgtaactgtgagcatgattttgcctgaacttgtgtcgtgtgatggcctggaatcttgcatttaagattaaaaaaaannnnnnnnnnnnnnnnnnnnnnnnnnnnnnnnnnnnnnnnnnnnnnnnnnnnn

SEQ ID NO: 5046 - DNA, 556 bp, Setaria italica
  Peptide Sequence Number=SeqID_71020
attcaaccaacaagatgaagatctggatggtgaccttcttcctcagcaatagcagcaacaagctgaaagaactcaagtcctttagcaaagttcttcaccttccaggctctatgcagtttcagaataccaccttcagttgtcagttcccaaccattcacctgttcaagcaattttttagcagaatcttctgacatgggatgtaaatccttagagttgcatggaacacaacttttctttgccagttcttgactctcaggggaagtatggcaacctcttgaagtcgacactttattttcatcttgccctcttgtgtccatctgatagaaaggacgcccacatccaaggagcgaaggcttcctggagacgagaggccagcgggaagccaccttcgcctggcttacgtaggagcgcgataggaggagtcgcgcgtgcaccgttgctgttcggatcatcgggggagggtggctcctgcggcttcaccggatccggagaagaaagcggagtcggtgtgcgtggcgcccggccgcccgcgcagaggccggaacgagatcctcta

SEQ ID NO: 5047 - DNA, 321 bp, Setaria italica
  Peptide Sequence Number=SeqID_71021
caccacacattcttcttggctcgtgttggatttgtagcggtggcggagaaggattggaacttggagttatcttctttctttgttttttctaaaaggaagcgactgaacttcacatgccagcgtctgtgaaaagtacctgagagctcgcctattcttgcggcttaatgactgactgaagctgcaggacccacgcgtcagtggctgcgaacagtacctgaggccagcaagtttaatatagtagagtagttgatgtcgatgcaagcatcgatcgagttggcttctcaggctgacaactcaaagtgaaagaagataggaagagag

SEQ ID NO: 5048 - DNA, 114 bp, Setaria italica
  Peptide Sequence Number=SeqID_71022
cacatatttctttttcggactgttagctgatatgaagagaaacaaatgtacagatttatttcattacacccgtacatttgtttctcttcatatcagctaacagtccgaaaaaga

SEQ ID NO: 5049 - DNA, 486 bp, Setaria italica
  Peptide Sequence Number=SeqID_71023
atggggagagagcgcgcgctgaaacgggccgaggccgacggacgaacgcagcccagttcagttatgcgggccaaatgcaatccaatcatgactgactggcccagtcgagcagcgatgcatgtgcgtgtacagtttgccatcaatgaaacgaggacgacctgtcgtcgtcatgcatccacatccccatcccggccgatcctcattttatcagtccacttccactggcacactagctccgccatggcgtcgccgaagcacaatccgacgacttgcaagcagatcaaaaagaagcagcggccgctggtgctgcggcgcgcgatgctgcattcctgcgcgtgcttcctggtgggcctggtgaccggcctcgccccttccgactgggccgacgccgcctcccgcgccgccgccgacgccaacacgaacctactctcgagggcggcccgcgccatgaaccacacggaggcgctgctcacgacgcactaccag

SEQ ID NO: 5050 - DNA, 498 bp, Setaria italica
  misc_feature (470)..(470): n is a, c, g, or t
  Peptide Sequence Number=SeqID_71024
atgtgttgccgatagatgtacactgagtcatatgatggacaaaatttaccttctgagcatagacaatacagtctctaaaccatcattgctcctcagatctaactgaaagcttagttatgtgattgtatctaaaatatgttgcccatttgggtcaacaaaaaatgttgcccaaatatgttaagatcaaccttgtccttgcatagaagacaagtatgattaaaaaaatataagccatccaccagcaaattacatgtgccattctgtaggtatgaagctggactgaatctagtgttttcataagaaacaggatagagccactagtactgacagaacttaaaaaaaggtggagcatctagtgtgctccccttgctttctgattagaatgtaaaggctgcctcctatgtatctaggcatctagtacatgattagcaatatctagtgtgctcgccttggtggcttggccccttggnggacgggatcgtcgggagagggaacata

SEQ ID NO: 5051 - DNA, 1512 bp, Setaria italica
  misc_feature (1)..(86): n is a, c, g, or t
  Peptide Sequence Number=SeqID_71025
nnnnnnnnnnnnnnnnnnnnnnnnnnnnnnnnnnnnnnnnnnnnnnnnnnnnnnnnnnnnnnnnnnnnnnnnnnnnnnnnnnnnnngtacactaaggtacgctatatatattaacactcagtgtgagtagtggtacatctgtgacacccttctctaaccctcttcttagacaaaagtactgaaaaaggagcaccgcatctcggagagaacgttcagggagagcgctaccacaagcctaccacgacgcctcaacactcggcacacaggggactcgtctcatctcatgtatggtacgaccaccacgacatatactccaaccaactaaggtattcaacaaaagcaactcatgggacctatcctacaacctgtctgatatacgcaaaagatttctttcttcttttttttgtttatccttcctcccggccatccttcaatctgccatgctcaatcagcttctgcatcctttgccggacaccccctggtctatgccgatttctgaggctgctgctggtgctgttgctggtgctggtgctgctgctgctgctgctgcggagcctgctgctgctgctgctgctgtatttgcagctgctggagctggagcatctgggagttcatctgctgctgtaggctctttggcatgcggccatcgcttatctcaccagtggcgagcttcagacgctggacctcgccggttaacgcttcattcagggcatctctcagctgtgcttgttgttccattgcttgcagcctgattttcaactcattgttctgagtggccagtccagctgagtccctctgcagcattgtcaactgtgctgagagtgtcgtagcctccgtctgcaatacctgcaccttgtgctcaagctcctgaatgtacctcattttgcgctcttttgaccttgctgctgactgtcgattcgccagaatcctcttgaccctcttaggatcagtcaaagctatctcagcaagcctctcatttgccatgatcttcttcttctcagactcagtgaactctccattggcaaactccatatcaaacagtgccacggcaccaccttccagggagccgctcccactcctggtgaggctgccgccgggagaaggcagtggcagcttgggagactcatccccagcagcaaagttgagcttccccatgaagctgtccatggacaggctgcgacaatgccgggacttgcccccatccttcctgtccacagacgtggactggctctccgcctcgttctcgctgctctcggccgcgctccccgcgcgcgtgccgctggcgcggctgtcgcggtcgtcgtggcggtcctcggaggagttgagcgggtccaagccgtccaggtccatgtatgcgttgacgaggtcgtagagggcggcgtcgtccccgccgtccgatctgcacccctccgccgcgatggtgacctcgcgcttgaccggcgccggcgggggcagcggcgggctgagctgcgcgaagccgccgaaggggatgtcgctgtgcgagcgccggtg

SEQ ID NO: 5052 - DNA, 822 bp, Setaria italica
  Peptide Sequence Number=SeqID_71026
gtagggtcctgcttttctaaaagaaatcaagtatacgacagggcaacatattgttacgaacttatgatctctctcaattgtcttatttttggactattaggcgagtacctggctttaactggtgctagactgaatgcaaaggaaatgatttctgctggtcttgctactcatttcgtcagttctgaaaaattggaagaacttgaaaaacgtttactgaatttggactcttgtgacgagtctgcagtccgagctgttattgaagaattttctacagatgttcaaccagatgaagatagtcttttgaacaagctttcaactatcaacaaatgtttctccgccgagactgttgaggacatcataaaagcatttgaatcagaagcgagcatagatggaaaccaatggatagctccagtcataaagggtctgagaagatcatctccaactgcactgaagatcaccctgagatcgatcagagagggtcggaaacagagcttgcctgaatgtttgaccaaggaattcagacttacaatgaacattctgcgacaggttgttaatggggatgtttatgagggcattagagctcttagcatcgataaagacaatgccctaaggtctgtctcccctctatctcctcaatattcttgttgcttgtgcacttgctttaacttgtctatgacgacgcagtggaatcctgctacccttgaggaggtgaagaacgaggacattgaccgtgtgttccagccgttcagtccagagcacgagctccaggtcccatctgacgattccgacaggtggagcggtaaatatgagaacacggtctat

SEQ ID NO: 5053 - DNA, 1497 bp, Setaria italica
  Peptide Sequence Number=SeqID_71027
atctccagcgactcgcgagctcaccatccgcactcgcttttagctttgcctgcccacctaccccaactgctgcagctcgacaccttcgcttcgctccccggtacccctctcctttctcgcacacccaccattccttcaccgacccttctcgcctcgcgtcccattaccaaaccacacgcaggagggagccgggagctcaatccctgatggctcagcagcaaacgagccccgacgaggtggtcctcgggcaggagaccgacggcgcgagggtggtcaccctgaaccgcccgcggcagctcaacggcatctccgacagggtggtctacctcctcgctcagttcctggagaaatgggagaaagacgatgacgccaaattggtcatctttaagggagctgggcgtgcattttctgctggtggggacctgaagatgttttatgaaggcaaatcagatgattcctgccttgaggttgtgtataggatgtactggctctgctaccacatccacacctataagaaaaccacggtggctcttgttaacgggcttgtcatgggtggtggtgctgctatggttgctccactgaagtttgcggttgttacagagaaaacaatttttgctactcctgaggctagtgttgggctgcacacagattgtagcttttcctacatccattctcggctccctggatatttgggcgagtacctggctttaactggtgctagactgaatgcaaaggaaatgatttctgctggtcttgctactcatttcgtcagttctgaaaaattggaagaacttgaaaaacgtttactgaatttggactcttgtgacgagtctgcagtccgagctgttattgaagaattttctacagatgttcaaccagatgaagatagtcttttgaacaagctttcaactatcaacaaatgtttctccgccgagactgttgaggacatcataaaagcatttgaatcagaagcgagcatagatggaaaccaatggatagctccagtcataaagggtctgagaagatcatctccaactgcactgaagatcaccctgagatcgatcagagagggtcggaaacagagcttgcctgaatgtttgaccaaggaattcagacttacaatgaacattctgcgacaggttgttaatggggatgtttatgagggcattagagctcttagcatcgataaagacaatgcccctaagtggaatcctgctacccttgaggaggtgaagaacgaggacattgaccgtgtgttccagccgttcagtccagagcacgagctccaggtcccatctgacgattccgacaggtggagcggtaaatatgagaacacggtctatgccaaagcttctcagtaactgcatacaagatttagattccaacctatgcttgtccagtgcttgtgttctatcggtgtaacaatatatgaacagttgaaaagattacaccgcgacaggaagcaataaagcatatattttttttggataaaaaatt

SEQ ID NO: 5054 - DNA, 639 bp, Setaria italica
  Peptide Sequence Number=SeqID_71028
gtacaaaagccggcgcctttggcttccccatctcacaccgttcctcgcccacctctccgagctcccaaacgcgaagcagcggcgccggcgagcgggcgggaggcgagggggtcttttccctttctcttgcgcgcaccccgtcccgacagcacgcgtcgtccctcttcgtcccaatcgcgggcgtcggcggcgccggcattcttctccattgcgctgctatcattgttccaagaaaatggttgcagcagcctttacagtggatttggacaagcctcttgtattccaggttggtcatctagaggagcagtatcaggaatgggttcaccagccgattgttagcaaggaaggcccacgatttttccaaaatgatgtactggagttcctcttatctggttgcctgttgtctgttggtgcctgagtacttctatccagatgggccatacaataacagaagtagctatgatggttgtgtttgggatatgtctttggacactgattgaatatgtgttgcaccgattcttgttccacataaaaaccaaaagttactgggggaacacagcgcattatcttcttcatggatgccatcacaagcatcctatggatggacttcgacttgtctttccacctgctgcagcagct

SEQ ID NO: 5055 - DNA, 1314 bp, Setaria italica
  Peptide Sequence Number=SeqID_71029
ccttgattatgtatgtcatatcttgagatgcttgatttcacttttctctctctgtgaattgatgcagggatcgcttacgtcccatttttagtctaaagtggtcatcctagctgttttaacagttgatacagggatcacttatgtcccatgtttagtctaaagtggtcagtggtcacccatcagtggtttaagccccaggcagcacacagcttttcttggattccggtgggatgccctacagctatcattgttccaagaaaatggttgcagcagcctttacagtggatttggacaagcctcttgtattccaggttggtcatctagaggagcagtatcaggaatgggttcaccagccgattgttagcaaggaaggcccacgatttttccaaaatgatgtactggagttcttaacacgcacaaaatggtgggcagttcctcttatctggttgcctgttgtctgttggtgcctgagtacttctatccagatgggccatacaataacagaagtagctatgatggttgtgtttgggatatgtctttggacactgattgaatatgtgttgcaccgattcttgttccacataaaaaccaaaagttactgggggaacacagcgcattatcttcttcatggatgccatcacaagcatcctatggatggacttcgacttgtctttccacctgctgcagcagctattttgtgctttccgttctggaacctgatcaagctattttcgactccctctaccactcctggcatttttggaggcggccttttgggttatgtgatctatgattgcacacattactacttgcatcatggccagccatcatcagatcctgcaaaacatctcaagaaataccatctgaaccatcacttcagaattcaaaccaagggatttggaattacttcgaccctgtgggatcatgtatttggcacattgccatcaacaaaaagtgttgacaagagcacttgatttcaactgaatcttctgccttgcaaagcatattgagagtcgtcatgattggcagtggagtgttggaggagcaactattattcagttattgattcttctaggctgaatcaccagttgcaggctcacagacgtcactgaagaacaatttcatttctagtccagtccatcagcgatcattgagattatgtctgtaatatctgttgttagattaccatgtatgtacagagttttctagtatagcctctgcaatcccttttggtagccacagttatatatctacataattttgagacaagtaatttattaaatatcgaacttttatcagcgcaatagaaaaaaa

SEQ ID NO: 5056 - DNA, 268 bp, Setaria italica
  Peptide Sequence Number=SeqID_71030
ggagaggcttatctcttcctcgccgctcctccgccgcgcgcccgtcgcggccgccgacggcgtcaccaagccccggacacacaggccacccttcgtcgcgttccctccatgcaacggaggagggctcgggccctcgctcatcaggccgcccctcgcgtcgctcctctcccggcaccgcccgacgcctcctccggcccccgccgcctccggcggcgccggcactgctcccacaactgcggcggatggtgagggtgatgccgcgtccaac

SEQ ID NO: 5057 - DNA, 1418 bp, Setaria italica
  Peptide Sequence Number=SeqID_71031
tttttcacgtctaatgtactttcaattgccaaaacaaagtccatcagaatagtaactataatttcacattaacacagttctcctgtttttatactgtaccgaagcacttcagtttttgcatctctagtatacatacatacatacacgaacctcaacgtaattgagtcgaccatgccccacgtaacaaccccatgacctctctttcaatgaatcttttatgacctaatgtacaaaccagcatgaagacaattcttcaccggattctccagctcaggccttggaaggagcagttttcttgtggaatattttataggcatcactgtacacagctactacatttgatacaaccgcaagaacaatcatgaagaccgccagaatcttgtcccacttctttgcaatgccttgcggatctctcagagtgattgcagctgggaaaataaaggcgatacagacagcagcagttgccccagtaaactgaaaggcatcccaaatactaggaatgaagtttgcacatccaaaaatcactaggaggagcactgctgtcattataccaaatcttctgttgtcagaagagagaggccttgcagaagcgaagagaagcccatccaaattaagccgcaatgcatggaatatcatagggaacacgagcataaggtgaacagcatagctcattctgacagcatcatttagcactgaactgtatggaatcccaagatttgaatcaaagtttgctagcacatcagacagcgtagattcaccaaagaggagatatccaaagaaacttgttgtgatgtagatagttgagcatagtgtcaatgatgtgtgcactattggcttgatctgcgaggaatcctttagctcattatgaattgggtgaacgttgtaatggcaaacataagcagtgacaagaattggcactgctgtaaaaagttcccaaacagatgccaaatcaggaacagcgggaaacaacttgggcattggaatttgtccacctatcaacttgacaatggcaattcctgcagtaataataacgaatacaacggccaaagcaacagatattgtggaggtatagctcagcgaatcaatacgcttcaagcatgctagcggagtaaaaacacaaagggtcgtgaccaggagaacaaagaaacgcccattccaccagtgcatgccaaaccacccttctaacacaccgtagtggtgctcaccactggaagtggttccagaaagcacatcaccaataatgatcatgtagacgatcatgacgccgacgttgttgatgacgacgcagacctggagcagcctcctgccccaccatccgaaggcgtcgcccatggcggcgccgtaggagcgcgcccccacggcgcggctgaaccgcacgagcagctcgatggaggcgtcggtgaggagcgcggcgagca

SEQ ID NO: 5058 - DNA, 610 bp, Setaria italica
  Peptide Sequence Number=SeqID_71032
tcaatgaagctgtgtagcaactttgacaaattatcccaggggtagtatttataaaagaagtcacataatcacattctatagaccttagagggtagtaggcggttgtgccaaccttgttcagttcatatttaatacaggtagtagttatttttttcgcctctcatctctactggattgtgtttgatattgaatctaaagcatgaaacaaggaaattgggtgttttggtaccatgaatgatgcatctaaggttatgtgatagttgatgcgtaagttgttttggcaaatgagtatccgctctgttctctgttctctagttctactaaaataacactttccctgtatctatctcaggttgagatcgtgatgggccttgaggaggagttcgacatcagcgtcgaggaatcaagcgcgcagtcaattgcgacagttgaggatgctgccgagctcattgacaagcttgttgctgagaaatcactctgaagtcacaaggcatgatgttgggatctcgcaaactagttctaccttgttcctgccctgcccactctcccctcatctcggtattattacagacacagtggagaacaatgctgagaagatcgccaatccttc

SEQ ID NO: 5059 - DNA, 539 bp, Setaria italica
  misc_feature (15)..(15): n is a, c, g, or t
  misc_feature (21)..(21): n is a, c, g, or t
  Peptide Sequence Number=SeqID_71033
taaaaaataaaaaanaaaaanaaaagaacaagactacgactagttaccaagaagggacaactagaagtttgtggtgcctctaagttctctgatcttggtgcagattcacttgatacggttgagatcgtgatgggccttgaggaggagttcgacatcagcgtcgaggaatcaagcgcgcagtcaattgcgacagttgaggatgctgccgagctcattgacaagcttgttgctgagaaatcactctgaagtcacaaggcatgatgttgggatctcgcaaactagttctaccttgttcctgccctgcccactctccccttatctaggtttctatgctctgaaggattggcgatcttctcagcattgttctccactgtgtctgtaataataccgagatgattttaagctgttgaacattacggtggtgcgcattctgtcagttcattgttgtatgaatggttcttcctcgaagaaaatgggatcttgggagcaatagtaaagaaacaaaaaaggttaaaagaaaaaccaaaaaaattaaaaaa

SEQ ID NO: 5060 - DNA, 1025 bp, Setaria italica
  Peptide Sequence Number=SeqID_71034
ctttttgatggctgcccttttccttccatggggaaagctacctttgtgtgcgcttgctggccgctttactgagacgttttcaaagtggatttggacagatctgctctcatgcaaagttgataaattcttatcaagccttctgtggtgtaaatactgaatatgttttctgcaagtaaccaggaattaggacttaccgttaagcgcgtctcactttagttaccttgccaagtaattttgtatgcggtaataagatgtgaactgacagggatggtcttaatattctagcaatctagcgctggaatgaagtcagccgagctgtgcaaatataaattctcatcatgtgtgcttgctttattcgttttttgttactggaatttgtttctgttgagtagatagcatgaatgcctatgccagttgtctcttcctacctctacagttcaaccttactgatgtacaagtacaacattaggacaatagcacaatcagtgtggtaaccgattatcattgtggcgtaaatttacaactgcctttctttgtttgtttatatgtgtggtagtcttcaaataacaaattttgttatctcaagatgcttgttccttgaattgcaggcagtcaacacgagctcgctctctttctctgctgcgaggaagggcaatgcattcctccgcctgcattcagtgcccaagagatttgctgtttgctatgcagctaagaaggatacagtggacaaggtttgtgaaattgtgaagaagcagctcgctgttccagagggcactgaagtttgtggtgcctctaagttctctgatcttggtgcagattcacttgatacggttgagatcgtgatgggccttgaggaggagttcgacatcagcgtcgaggaatcaagcgcgcagtcaattgcgacagttgaggatgctgccgagctcattgacaagcttgttgctgagaaatcactctgaagtcacaaggcgagagtgggcagggcaggaacaaggtagaactagtttgcgagatcccaacatcat

SEQ ID NO: 5061 - DNA, 1103 bp, Setaria italica
  Peptide Sequence Number=SeqID_71035
ttagtactaagtacttaaagtaaaggtaattaactaagttaggtaacaaaggtttagtagacctacccagcagcagcagcctgccgtgcccgtgccgtccagcgcccccacctcccccggtcgctctcacgcgcttcgtgcccgccgcctccccccgttcccgcatcgcgtgcgtcgcgccccgatggcctccatcgccggatccgccctctccttcgccaggcccgtcaaggcagtcaacacgagctcgctctctttctctgctgcgaggaagggcaatgcattcctccgcctgcattcagtgcccaagagatttgctgtttgctatgcagctaagaaggatacagtggacaaggtttgtgaaattgtgaagaagcagctcgctgttccagagggcactgaagtttgtggtgcctctaagttctctgatcttggtgcagattcacttgatacggttgagatcgtgatgggccttgaggaggagttcgacatcagcgtcgaggaatcaagcgcgcagtcaattgcgacagttgaggatgctgccgagctcattgacaagcttgttgctgagaaatcactctgaagtcacaaggcatgatgttgggatctcgcaaactagttctaccttgttcctgccctgcccactctccccttatctaggtttctatgctctgaaggattggcgatcttctcagcattgttctccactgtgtctgtaataataccgagatgattttaagctgttgaacattacggtggtgcgcattctgtcagttcattgttgtatgaatggttcttcctcgaagaaaatgggatcttgggagcatgtagcaaaggttgccaaattgatgatgttcgcggtgttataactagcaatgcggaatagcagttattagtttatatgttccattgcagcgttctgtgaacaccgtggccatctaaggccgagctgtatactcattttcagacggctaagagcatatcatatactctttagtatgcttttttagctaaatagcttgtcaagtcatatatttactggctgatgtagtagggacgtgtatgtaggactgtgataaaaactttcctttttaaaacaaaaa

SEQ ID NO: 5062 - DNA, 269 bp, Setaria italica
  Peptide Sequence Number=SeqID_71036
ccgacttcgccaaggagcgggactgggaccagttccacagccccaggaacctcctcctcgccatggtgggtgaggtcggggagctctcggagatcttccagtggaggggcgaggtgccccggggcctgccggggtgggaggcccgggagacggagcacctgggcgaggagctcgccgacgtgctcctctacctcgtccgcctctccgacatgtgcggcgtcgacctcggcaaggccgcgctgcgcaagattgggctcaacgccatcaag

SEQ ID NO: 5063 - DNA, 341 bp, Setaria italica
  Peptide Sequence Number=SeqID_71037
actctgaagcttcaccaataaattaggcattgcaaatgctctgcctcctgagttgtcttcatctgtagtgcatttccaaagttcccttgcagagagattatgaacctgttgatttgatgtatcatcattttctgtcactttagcaaccaaggaaaggcagtgtccaagcccaccaaggacactgttaagtttgttcctatcatgtaggttgattctatcattgctcagtaccacaacaaagttgttgaacacctgttcagcataactaggaaaggaggatgggaaattaagaaccacaagctccaaaattctgaaagccattaactggatatcaatggata

SEQ ID NO: 5064 - DNA, 991 bp, Setaria italica
  Peptide Sequence Number=SeqID_71038
aatcattttcaggaagccatatgcctgttttctcaggaagcagcatttctccaactgcatccaaatatggcaagattagcttgcaatccaccttgcaatctctaaatgcgtctgtaaatgcctccaataaatatccttttgagtcatctggggagttgaatattagatctggtatggaagttataagggggctcaaatacatttccaagatatccttattgcgaagtttgtttttgcctttgtgaatagagaagatacaaaatggcaaaattcttcagctggaaacattgtgctatctatccatgcactcaagtaaagaaagatttcagcaatcttcaaattgaaaatgaaaaatttgtcttctcccttttcatgaaacaatcgcttcactccccataaattctttagatgtatcaatagggagctcctcaaccagtcaggcccaaactgagttttggatatggaaaattttaattgaggtttcttcacctcatgaataaatatcctacatattatatccagacaatggaggccgataacaatgcttcacttgactgagcatcaatagctgacttcgcacagagctctgaggctgaaacctctacagagttaatgaggatttggacaaggctctgaagcttcaccaataaattaggcattgcaaatgctctgcctcctgagttgtcttcatctgtagtgcatttccaaagttcccttgcagagagattatgaacctgtaggtgatgcgcaaagatctgttgatttgatgtatcatcattttctgtcactttagcaaccaaggaaaggcagtgtccaagcccaccaaggacactgttaagtttgttcctatcatgtaggttgattctatcattgctcagtaccacaacaaagttgttgaacacctgttcagcataactaggaaaggaggatgggaaattaagaaccacaagctccaaaattctgaaagccattaactcctaatttaaactta

SEQ ID NO: 5065 - DNA, 290 bp, Setaria italica
  Peptide Sequence Number=SeqID_71039
ttctcgttctcgaagccggcgagcggtggaggcgcggcggcccggcgccgtcggttcagctggaggcggctgggaaggtgcagtacgccgtcgtcggaggcggaggcgccgtgggagtgcgcggtgtgcctggaggagctccgtgctggggacgtggtggcgcacctgccctgcgcgcaccgcttccactggtcctgcgccgtgccctgggtccgcgccgcctcgcgctgccccgtctgccgcgcccaagtccacctcgccccctcctccccaggctgagctgagctgac

SEQ ID NO: 5066 - DNA, 1720 bp, Setaria italica
  Peptide Sequence Number=SeqID_71040
cgcttcacatacacaatccagcatgagtccatcaccaattcacaagttcctcaaaatcgtctacacaaagacaatagacaacttcctcctagcagcctctgtgtcgctcacaattgcagctatcgtcgtgacggcaagaagcaagcctcatgatttcactgatagaattcaagaccttggtccttcatacatcttgtcgattggattgatcttggccaccgcagtgactgtgtacatcatgcagcgtccacgcatggtgtacctcgtcgactatgcttgcttccgtgccccccataactaccgtataccctccgcagcttttgttgagcatgcccgccaagtgacccatttcagcgagcgtagtgtccgtttcatgacacgccttctcgagagatcgggccttggtgaagagacaagcttgcctcaaatggccagctacctcgaagcttacaagtactgcacattggagacagctcgtgaggaggctgagcttgtcgtcttctcggccatcgatgatctatttgccaagacaagcatcgatccaatcaccattgacatggttgtcgtaaactgcagcggatttagcccaacaccatctatgccagatatgattgtaaacaagtacaagatgcgcagcgacatccggagcatccatctatctggaatggggtgtagtgcagggttaatctcagtagagctcgccaagaacctactgcagaccatgccccaaggtgcacgagcattagtcgtatctacagaaaccctgacacccaactactatcttgggaacgagagagctatgctgcttccatattgcttgttccgcatgggtggagctgccgtgctgttatcgacatcacctgcaaaggcccgatttagactcaagtgcatcgtacggacactcagcgcagccgatgataaatcatacagatgcattcatcaagaagaggatgacaagggaaacacgggggccaatctcaccatggacatcatagacgtttctgctaacacactcaaaaccaacatcaccaccattgcgccgctcatccttccggcctctgagaaactgcggtttgcactgtccttcgtatcacaaaagcttctcaagatgaggacaaagttatacatgcctaacttgctcactgcattcgagcacatttgcgtccatgcaggtggacgtgcagtgattgatgggatccaacgcagcctaagcctatcagatgagcatgttgagccatccaggatgacacttcatcgattcggtaacacatccagcagctccttgtggtatgaattggcatacatcgaggccaagcgccgcatgcacaaggggaaccgggtgtggatgattggatttgggtctgggttcaagtgcaatagtgcagtttgggagtgcatcgttcccgcccacaatgaagatggaccttgggctgggtgcatccatcgctacccagtacgtattattccttaaaattcgtaaacatgctgtagcaaatatatcactttaagattaccaataatcgtttaataaattgcggttggaaaggaccgtctctcaaactatttaagaagacaactctgtttttaagaaccgtcaggagttttgctcggcatatattaatagagaaaagattgtaaaaatgttggtctaaataccactcgtattgtaaccacaaatatgaattctttatcaaattcatttaaaaaaaaaaaaaaaaca

SEQ ID NO: 5067 - DNA, 688 bp, Setaria italica
  Peptide Sequence Number=SeqID_71041
gctgcaagaacattgatgtgggaatttatattttcacataacactgagttactgaaaataaaaaacaagaccccaattttaattctggtccgctatataatgccatgacaccacacctatgtacacctaatggtctgcacctgcattatccaaatgtactcagattgctttctactctgtttatctctcatgtcagtaactcctagcctttaatttaatcaaaaaaagaaggaactggcaatcaacacgatatgacaatgatcacacattgtcaagactgctgacgacttgttcaattgacggccgctgtcgaggagtctgggctaatgcacttgcacgcaatctcaaggaccaacagcagttgcttctcatgcgctttgctccatatcagtctgtcgaaaatctgatcttccttcttttcagacttcatctgaagaacccaagagatcaagtccctggatcccttggacttggacacatccacagggcgtttgccagtgagcagttcaagcaagactacaccaaagctgaagacatctcctttaggcgtggcgatcaccgattgactgtactccggtggtatgtaccccaaggtacctactagatcggtagtcacatgtgtgtcatagggctgtatagccttgcaaagcccgaaaatcagctaggcatgcttcgaaattttcattca

SEQ ID NO: 5068 - DNA, 383 bp, Setaria italica
  Peptide Sequence Number=SeqID_71042
ctaacatatgtgggcctggcaccacggaacctagccctggtgcctcttactttagtccaccacctgtgcaatcaccaggaagttgttcttgtattggtgcgattgctactggagtgtctgccagtgccaccttgctattggctattcctgcaatatgttgtgcattgtgtcgatgtaggaaatcaaaagagcatttatttgatgtacaatcagaggacaataaattacttgtggcagccaagcttggccagcttaagagattttcgttttgggaactaagagctgcaacagatgtcttcagctataggaaccttcttggaagaggtggatttggcaacgtctataagggaagactggcagatggttcgttagtagctgttagg

SEQ ID NO: 5069 - DNA, 671 bp, Setaria italica
  Peptide Sequence Number=SeqID_71043
aatcatttgctgaagctgagataaatgatatgattttgatttcgaccgagactacaaagatattggcattgcgcagttgacaaccaagttgtttgtcctcaaaaatggacttgctaatgcaaaatcagatactgttctggcaccgtggaacccaccttctgaatggggcaagaatgcgatgcttcgggttaatgcccggcagggtgctccaactggtggaaattcagttattgagagtttcctagtagacatctatccactgaaaatttatttgactgaagcaatgtacagaatgatgtggggatatttcttccctggagacgaacagcaaccgcaaaagcgacaggagcttttcaaggtctccactacagcaggaacaagacgaaagaaaagtacttctgttgcggagacaaacagtcccaataaccagtcatcaaaagaaaccacatttacacagaagcctgaacttcgaaggacatcttcatttgacagatcatgggaggaaacagttgctgagtctgtagctaatgaacttgtttcacaaatccaggttcagtcaaatgcgcaatctgaatctcaagacgctgctaaggattcaaagttattacgtcctgttcgctctactcgtgaggataagaaaattgtggagcctaatgaggtgaagcaaacca

SEQ ID NO: 5070 - DNA, 442 bp, Setaria italica
  Peptide Sequence Number=SeqID_71044
ggcccagcagtgttgcaagcagcagcagtagttggaccacctttttgtcacaagctggtcaatgaagcgataatgacttgaaaagtgttaggagccctaatagttagcaaaagctatccattgacttgcatgaccaaacatacatgccctatttaacaaattgtggttggagaacatggaaaaaattacttatattgttctgtacatctagggaaactgttggtaagttccccacatcatgatttttataaaagaaaaaaggtaaactagagggaaaactaactaacttacctagggaaaaaacaacagaaataaatcagaaatgtcgctctggcaaaggaaagtatattcaaagatggagtttcaaggcagagcaacttaagaaactgtgctaaatttcatacaaaggcaacagcaaaggaaaacaatcagtaacaacaag

SEQ ID NO: 5071 - DNA, 818 bp, Setaria italica
  Peptide Sequence Number=SeqID_71045
tcaggttgttaggatctccagctgcaagtaagtcagcagccgtgtggcggtaccctgtctcgtcaaagatggtgccacccacttttgtcccagaaacatggtcgtaggtatacccattgaaaggggctacacctgcttgtagcagcccatcccgtaatgcagcttgccaaggcgcgattttaggccattggacaatcttctcctcaacccaagggaaggacttgttcaccaggtcttcatcccagccgacctcttggatgaagcttgagctggcccggctgtagaagccggcattgatgcaggtgccaccgcccaacaccctcgcccgggcattgatgacgccgtcggtggagatgaaggcctgcgacgatgagtccggcgccatattcatcagcccgatgtggaagttctccatgtacgagacgttgcggttgccgtacggggagcctcccctctccagcagcagcaccctgtacttgagcgacagcgtggcggccagcgggcagccggcggtgcccccgccgacgacgatgtagtcgtacgtcgtcgggcatcccgtggggtagctgctggccttccggagaggaggcaggttgttcaacgtgaactgctgcttgccttgcgacagctcgaagaagcagaggaggcacgccaggagcttgatgaagacgctgaacgccattggactgaactcgagaagcccccgtgcgccaagcaaatggccaagagctcttctcctctccagcaacaggccagctgctcgagctgtcccctcctccctcaaccctctgctccccacctctcaacctcgctagccg

SEQ ID NO: 5072 - DNA, 1674 bp, Setaria italica
  misc_feature (1)..(5): n is a, c, g, or t
  Peptide Sequence Number=SeqID_71046
nnnnnctcgaaatccatttaaacaagaagaaagaagaggtttttcaatcaaccattcagtctgcaatatcatattagacaaatgattactgggtacagatgaaattcgtagcttgcttttcttctgcgattcattctggatcccacaaaaaattagtaattctgtcctaggccacacgtaataaaaagctaatgtccaggactcgactacactccagcagcgcgtcccagcctttcccttaggatcttcacacccatgtatctgcccatcatcatgacagtagcttgagggttggtccctggtgatttagaaaatgttgagccatcaactacacggatacctgagactccaagcacccggtaatgctgatcaaccaccttccctacatggcatccaccatgatagtgccagatggtgatcactgtgtccttgcaaaactgccccagggattctgtgtcgtttgtatgcttgggtatcagattcacattagcctgcacactcatattgaggaccctttccattgaaaatccagtgccatcggcagccagttcagagaaacggtttgtcttcagtatcctttcaatggtcttgataccatagacacaacgatcgagatcctgtggatgactgaagtagttgaaggtaactgctgggttgttccggacatcagtgtctgtgaggactagatggcccgtggacagaggaccatcaatcttctcgaggataaaaccgccatggaatacctctttgggtaggtttagtttgttatgagcatatttctgggctgcttccagggttctttgctttggaggaattgtagacagctgtccaatctcagcagacatgattccgtggtggcagtggacgctctctgatgactgaccaaaaccactgctagcctcaataaacacaccttcttcagttattccaacagtttcaatgagagactgccgtggagggcttcttgtgggtatgaagatggagttcattgggttgtcagccatccctttacccacatatttgttatggagaaccacaggaatgttatgactcttgaggtgattcttgggtccaattccactgagcaaaagcaactggggggtaccaatcgcaccagcagatacaattatttcactgtttttgttgttgtttagaaatgcctggtggtgtctcccattttcatcagtgaattggactccaattgcccttggtttcaggcgtccttgtcgcgagtcaaacactatcttgtgcacactagcatggagcagcactctcaggttgttaggatctccagctgcaagtaagtcagcagccgtgtggcggtaccctgtctcgtcaaagatggtgccacccacttttgtcccagaaacatggtcgtaggtatacccattgaaaggggctacacctgcttgtagcagcccatcccgtaatgcagcttgccaaggcgcgattttaggccattggacaatcttctcctcaacccaagggaaggacttgttcaccaggtcttcatcccagccgacctcttggatgaagcttgagctggcccggctgtagaagccggcattgatgcaggtgccaccgcccaacaccctcgcccgggccttgatgacgccgtcggtcgagttgaagagaacgaccttacggtaggaagaatagaaaggaccttagaca

SEQ ID NO: 5073 - DNA, 568 bp, Setaria italica
  Peptide Sequence Number=SeqID_71047
cttcggtggatatgccgccgcatggacgccgccgcgctctggcgtttcatggctgcgcgccgccgggagctcaccgcgctgcggagggaggccggccccgccgttgcctccgcggtcgacccgccccgtctcgtcctcgacgtggttagcgatttcttagccgctggagagggcaccggcgaggaccaattctgggtgctcggcatgctgctgcgctcattgttcgattccgatagccggaagccaccggagataggagacacgttggttgagagggcggttgcagtcaccaaggagtggcaagagcgttttgggatcaatatggacaaattgatatccgagaaccaggaggtggagatggctgaagcggatggggtggggaattcaggagcagaggagaagaaagaagagcgtggagatgcagaagaagaggaggaagaggaggacccggaggaggtggttcttgggtcaggggatgaaggggaggaggacccagaggaagcagaggagcatgaggaactagagaaggaagcaaaggaggtgaagggagaagaggcagagggaaagg

SEQ ID NO: 5074 - DNA, 896 bp, Setaria italica
  Peptide Sequence Number=SeqID_71048
ctgcaaacacagcagagtctgacagttcctgcgtcttgacatttcccatcagtggtgcttcctgcactctatggcttgaagtctccaggttagcctgctgacgaaacgacttccttcgcgaaaatgtgcgtgaaagatgaccctgcatgccattcacatgccttcgtgcaaactgttttgccgccttccatccctcttgcgccttcatctgctgccgagccagctgaatggcattctcccttgattttgccttcctccgttcacggatactgaggaatttgtctgagcagttgtatatgatcagaagcagcaggcacaatgcacccactatgcaagcaccaagaatgacgatgttttccttatctgcgttttcatcacagttgcgctttattatgcatttattttcagcggtggaacccaatctgcaaaagtgcccactggtacaagaatctttttttgttgtggttggacaatagtaaccagctgggcagaagatttcttcagtgctctggatatcagcccacatgtcagcacctccacaactctctgttgagtttggagttatctgatacttgtatggatcgcaaagaccagttgtttcattcgccgtggcacgtggacagtatgagcctagtggacaagggagcatgcaagtaagaccacgagggcagaagaagccctcgcagcacgcctggcagttccttcttctcagcggaatgttgctcctatcacggtttctgggatcagggactggatcggaggcgcaagcccatcctggatcacaccccttcccccaagaagatatgttgcagtttatgttagtcttcaggttgatgttcttatcaccgtcacggtcatacaaacttgagaagtagaatttgacttcatcaggtgtg

SEQ ID NO: 5075 - DNA, 410 bp, Setaria italica
  Peptide Sequence Number=SeqID_71049
actactacgactgcgccgcctggcgcctggtagaacgctagaagtaacttggagctagccagattggcaaagcttcggcgagccgcgacagcgagcggagacgtgtgggcgtctcctcgatcgatcggccgagaggacggcatggagcgcgactgccagttcatggtggtgccgccacggcacccgtacgaggatggcggcggccatttcatgcaccaccagctgatggtggccggggaccacgaccccgccggcgcggggcgcggcggcggcggggagaggaagcggcggttcacggaggagcaggtgtggtcgctggagacgacgttccacgcgcggcgggcaaagctggagcccccgggagaaggcggagctggcgcgggagctgggcctgcagccgcgtcaggtgg

SEQ ID NO: 5076 - DNA, 569 bp, Setaria italica
  Peptide Sequence Number=SeqID_71050
ccgtgtatggcgagcaggtagaagagctgcgtcgccgacaggatgatggtgaaggactccatgcagatcagcctggcattcctgccgtgcagctcaatctccttgacggccaatcccatggcgagcagtgtgagcgtccaggcgatgaacccggatgatgccgccgccggcaggctctcggagctccaggcgcggacgtggtggaaccccgcgagcgcggcggccgcgccgacgaccccggcgatcaccgcgaagatgacgaagaacccggtcgcggcgttgccgatggggaagtagatcggggagaagtgcgcagggagctgcaggccggaaccgatgaagaagccgtagttgatggcgtggttgatggcccagccgccgaccgccgccacgatcacgtacatgcagaagttgagcaccagcagcagccccgccaccggcttcagacccgcgttcgccatgggaccgacctagcttgctgatcgactcgacgtccaacgagctcgatcgccctgtacctagcgcttctaacaatctagctcgctctctagtctccacgtactgtatct

SEQ ID NO: 5077 - DNA, 403 bp, Setaria italica
  Peptide Sequence Number=SeqID_71051
ctccttggtactcactcttgcttgctctgctcccctggtcacctccccccggccctgggctgccccccctctcctcctcctccgtgttctatcctttcgctctcctccttctcctaccttctcttatcccgataatggcaacctgcagcaacaccgaataactcgccgctgtactacctttcgcttcggcaccggtactcgcataagaattgttacccttttggataagccttgaggcaggtcgtcgagcacaggggtgtgtgctctgagaggaaaacctccggcagctgggcgccagcgcccattgttggggctgtctgagctgagcttgctcgccgttgggcgtgtgcatggcgcccaagagcaagcgtgggaaggccaagggtgagaagaagaagaaaga

SEQ ID NO: 5078 - DNA, 512 bp, Setaria italica
  Peptide Sequence Number=SeqID_71052
tgtgggatcatgagaaggttgggaagaagaaaacagatgccctgtcaggtgaccactggacacaaagaacagcagctttatgaccctcaaatttgtgaatcggagaaccagctcctccagaacccagattgcgacgatcccacatacggacagagttatcagcagaaccagttaagatatagttaacatcaagcggattccaatcaacacaatgaacatccccactgtgagctttctcaaccttaacagccgggctagtaccagtccgggcatcccagagaataagacaagcatcatcacccacactgcagaattcctgtgcactggaaggagagtcctaaagttgatcctcggggtatctccaagggcagatatgtgatcttggatgctccacaagacaacagatttgtcctttcctcctgacagtacatatggttccgctggacacatggcaagcgcgaattcagcattttcctgatgtcctgttaatatcagatcagggcgagattcag

SEQ ID NO: 5079 - DNA, 459 bp, Setaria italica
  Peptide Sequence Number=SeqID_71053
agaagtcacaggtctagagcatcacagtacaataccaatgtcaactggagccacagttactggctaggaaactagaacacctacacggagctttcaacggattggattccacagataatcacatgactcagttcctcggagtgcagctggccaagtgagacttgaaattctccaactctgtgagaacttcctcctctgggcggtagatcaagtcactcatgcgccatatctgtagtgttccacctccaccagtgctctcaccatcatctgacacactgacgatcgtccaaggatccgatgaattccagtggaagtctacaatcttatccctgccaagatatgtgcaatatgaaatgcacgatatataatggaccatttaagaaaaaagaaaagccgtgtttttagcattttgaatcacacgtattaaaaggattaagtttcatatagagaggaatgctt

SEQ ID NO: 5080 - DNA, 394 bp, Setaria italica
  Peptide Sequence Number=SeqID_71054
ttcagcttcaggcccaaggagttgggatccgcggtctgggacatgatcaggggcagggggacagggtacaccatcaagggcaagattgatgtcgacactccctgggggaacatgaagctgcccataagcaaagagggtggaaccactcgcatcaagaaggaggaggacgacgacgacgatgacaactgagtcccttgttgcaggactcgagtgcttctgttaccaaacacagatgagcagatgacactgaagcagggaggatgctataacggtggttgttgtcgtccacgggatgcccttaacgctcgttgagttctgaattggtagcttgtggtgtcagttgatctgcattatctgaacatatcctctgtgtcgtatgcttcagttagtttgg

SEQ ID NO: 5081 - DNA, 534 bp, Setaria italica
  Peptide Sequence Number=SeqID_71055
cttggaaggaggaggtggaggttgggtgggcttctggttctggaggagtgacgaggcgggggaatttatggactgcttcgctgcggagaccccctccttctttttagggaggcaaaggcacccgctcatcttctcctcttcctatggccggccggcttggatgctactactcctcgcctctctctcgtctgactttttgatgagcttctcgttcgtcggcttactttttttttccaccggttcaatacgtagcaaagttctttcccccctcccagatactgatgaaaaggaagatttttttttcttttgtgaagttgcaaggaatctcttggtgggtagttcgttgctctgtcacgacggcggtggcggcggcgaagacgggcgcgttcctgatgagcctggggcgtgcggaggcggaggacggcttgggggtgccgaggcttgcgacgatgctcaacccagcgaagcaagtagacattcgtctgtgctgtgaatttcttctccaaactttgtggttggaacatgaagaataag

SEQ ID NO: 5082 - DNA, 1577 bp, Setaria italica
  Peptide Sequence Number=SeqID_71056
ggagttgggatccgcggtctgggacatgatcaggggcagggggacagggtacaccatcaagggcaagattgatgtcgacactccctgggggaacatgaagctgcccataagcaaagagggtggaaccactcgcatcaagaaggaggaggacgacgacgacgatgacaactgaggtaccatctgcttgcttgcttgcttctggtgctgctgttgattgattcatcatcatctttgcttcaccagtccaatactagtcagtactctttgacttgctacaaagctcatggaaaagagatagcttcagcataagcatggatctttttaatttaattctagggatgtcttgacaagctaagttttcttgtacatgatgcaatatacgacgaacttgctaggccgtcaatttccgtcaatcctgaattctggtcgaagatagatacgtactagaaattattgagcaggttgacttgtagtccctccatggacctcttatgtactgaaaagtgcagtcattttttccttcattagtcagattttgcaagtacttgtctagcttgttatgctataacttatagtatgcctacagcagatattccgtacatgctcatataccagttcttgtactctgatcaaaatgttcagactatgcagtttgattcaaatcaatatctgcttttgatgaacttagaatgtgtcattctactcggagaccaaatcataacgcaactcaaggtaatgcaggcagttgctatgtctatcaataagtagggatattgtgttgctggtgtagatttgcacacatcattgctgtagtttcctgtacagagccacactctttgcaaaatcgttcatacttgtgccctggaaccttgctaacatctgtattgacaagggcagtcagttctgccctcattagtcagagattttgcaagtacttgtctgaacctgttgactgttgtactagaacttatagtatgtctacggcagatactcagtacatgttcacataccagtttttatactctgatcaaaatgtttagactatgcagtttggttcaagtaaagatctgcttttgattaacttagaatgtcattctattccagagtccaaattggaacgcaaatcaatgtaaaaaaggcagttgctatgtctatcaatttaagtatggatattgggttgcttgctggtgtagatttgtacatatcgttactgtcgtttcctgtacagagccgcactctttgcaaaatcgttcatagttgtgccctggaaccttgctaacctctgtttctgaaccaccctagtcccttgttgcaggactcgagtgcttctgttaccaaacacagatgagcagatgacactgaagcagggaggatgctataacggtggttgttgtcgtccacgggatgcccttaacgctcgttgagttctgaattggtagcttgtggtgtcagttgatctgcattatctgaacatatcctctgtgtcgtatgcttcagttagtttgggctcgtctgtgctgtgaatttcttctccaaactttgtggttggaaacaatagaaagaaataaagaatacca

SEQ ID NO: 5083 - DNA, 568 bp, Setaria italica
  Peptide Sequence Number=SeqID_71057
agatcgacaagcaggggatcaccaggatgcagattcccttcagcttcaggcccaaggagttgggatccgcggtctgggacatgatcaggggcagggggacagggtacaccatcaagggcaagattgatgtcgacactccctgggggaacatgaagctgcccataagcaaagagggtggaaccactcgcatcaagaaggaggaggacgacgacgacgatgacaactgaggactcgagtgcttctgttaccaaacacagatgagcagatgacactgaagcagggaggatgctataacggtggttgttgtcgtccacgggatgcccttaacgctcgttgagttctgaattggtagcttgtggtgtcagttgatctgcattatctgaacatatcctctgtgtcgtatgcttcagttagtttgggctcgtctgtgctgtgaatttcttctccaaactttgtggttggaacatgaagaataagatcccatcacccctggttctttgtggggttggttgggagtgttctttagatcctgaaacgttgtgctgctgtaattgtcgtgccatatgat

SEQ ID NO: 5084 - DNA, 745 bp, Setaria italica
  Peptide Sequence Number=SeqID_71058
cgccttcaactagcctcaagcccggcacgctcaacaagctgtcgcaggcaggagcaggtgtcgctggtgcagtaccacatcctcccgcagttctactccctcgactccttcgagaccgccagcaaccctcgcacacgtgcttccagcttcctgcctctccccctcccttgctctcgagcttccccgccgaccaccaacgcacccacatccccgcaggccgcaggcaaggcccgcacgcggtttccactcgcttcgtccactgcagatctcctcgacgccctcaccctcagagaccatgtcttcgtcggagaaccccacggtgaccgaccgcggcagcaagcacaaggaaggcggcgacaaggagggcggcggcggattcatcgacaaggtcaaggacttcatccacgacatcggcgagaagatagaggaggccgtggggttcggcaagcccagcgccgacgtctccggcatccacatcccgcacatcagcctcaaccgcgccgacctcgtcgtcgacgtgctcatcaagaaccccaaccccgtccccatcccgctcgtcgacatcgactacctcatcgacagcgacggccgcaagctcgtctccggcctcatccccgacgccggcaccatccacgcccacggccaggagaccgtcaagatccccatctccctcgtcttcgacgacatcaagagcacctacaaggacatccagcccggcagcatcactcccctacctcgtccgcgt

SEQ ID NO: 5085 - DNA, 314 bp, Setaria italica
  Peptide Sequence Number=SeqID_71059
gttgggtgggcttctggttctggaggagtgacgaggcgggggaatttatggactgcttcgctgcggagaccccctcccttctttttagggaggcaaaggcacccgctcatcttctcctcttcctatggccggccggcttggatgctactactcctcgcctctctctcgtctgactttttgatgagcttctcgttcgtcggcttacacgacggcggtggcggcggcgaagacgggcgcgttcctgatgagcctggggcgtgcggaggcggaggacggcttgggggtgccgaggcttgcgacgatgctcaacccag

SEQ ID NO: 5086 - DNA, 662 bp, Setaria italica
  Peptide Sequence Number=SeqID_71060
gttaacagtagcggagtagccagtgagctgtgagcagcgccacctcgcatcgtcatcaatggcggcaagaatcctccttgcggcggcgctcgtggcgctggcggtgccggcggtgctgtgccaggctcccggcccggcggcgcccaagggcccgccgaacgtgacggcgatcctggagaagggcgggcagtacgcgaccttcatccggctgatgaagtcgacgcagcaggacacgcagctcaacagccagctcaacaactccttcggcagcggctacacggtgttcgcccccaccgacaacgccttcactagcctcaagcccggcacgctcaacaagctgtcgcagcaggagcaggtgtcgctggtgcagtaccacatcctcccgcagttctactccctcgactccttcgagaccgccagcaaccccgtccgcacccaggcctccggctccgacgggccctacaccctcaacatcaccgccgacagcaacaaccaggtcaacgtctccgacggggctcgtcgccaccagggtcggcaccgcgctgcgcgacacgcagccgctagccgtctactccgtcgacaaggtgctcctgcccaacgacctgttcggcgtcaagccgccgtcgtcggcgccgcccgcccccaacaagaagccgtccaag

SEQ ID NO: 5087 - DNA, 1656 bp, Setaria italica
  Peptide Sequence Number=SeqID_71061
ccgccgaccaccaacgcacccacatccccgcaggccgcaggcaaggcccgcacgcggtttccactcgcttcgtccactgcagatctcctcgacgccctcaccctcaggtcaaccaccccactcccctctgctcctcttcgcattccacactcgcctcgcgtttccgatctcgccccgcggtctccgatctcactctcagcgttctttcttggtttttgtttcctgcctcgagcagagaccatgtcttcgtcggagaaccccacggtgaccgaccgcggcagcaagcacaaggaaggcggcgacaaggagggcggcggcggattcatcgacaaggtcaaggacttcatccacgacatcggcgagaagatagaggaggccgtggggttcggcaagcccagcgccgacgtctccggcatccacatcccgcacatcagcctcaaccgcgccgacctcgtcgtcgacgtgctcatcaagaaccccaaccccgtccccatcccgctcgtcgacatcgactacctcatcgacagcgacggccgcaagctcgtctccggcctcatccccgacgccggcaccatccacgcccacggccaggagaccgtcaagatccccatctccctcgtcttcgacgacatcaagagcacctacaaggacatccagcccggcagcatcatcccctacctcgtccgcgtcgtcctcctcgtcgacgtccccatcatcggacgcatcaagatcccgctcgagaagtccggcgagatccccgtcccatacaagcccgacgtcgacgtcgagaagatcaagttccaccacttctccttcgaggagaccaccgccacgctgcacctcaagctcgagaacaagaacgacttcgacctggggctcaacctgctcgagtacgagatgtggctcggcgacgacagcatcgcatccgcggagctcacgcagaacaccaagatcgacaagcaggggatcaccaggatgcagattcccttcagcttcaggcccaaggagttgggatccgcggtctgggacatgatcaggggcagggggacagggtacaccatcaagggcaagattgatgtcgacactccctgggggaacatgaagctgcccataagcaaagagggtggaaccactcgcatcaagaaggaggaggacgacgacgacgatgacaactgagtttgattcaaatcaatatctgcttttgatgaacttagaatgtgtcattctactcggagaccaaatcataacgcaactcaaggactcgagtgcttctgttaccaaacacagatgagcagatgacactgaagcagggaggatgctataacggtggttgttgtcgtccacgggatgcccttaacgctcgttgagttctgaattggtagcttgtggtgtcagttgatctgcattatctgaacatatcctctgtgtcgtatgcttcagttagtttgggctcgtctgtgctgtgaatttcttctccaaactttgtggttggaacatgaagaataagatcccatcacccctggttctttgtggggttggttgggagtgttctttagatcctgaaacgttgtgctgctgtaattgtcgtgccatatgatcctctttttttccgaacaatgtcggggggcatagccccataactaaaaaaaaaaaaaa

SEQ ID NO: 5088 - DNA, 1442 bp, Setaria italica
  Peptide Sequence Number=SeqID_71062
ccaaggagctgttgagctggctgttgagctgcgtgtcctgctgcgtctccttcatcagccgcatgaacgtcgtgtactgcccgcccttctccaggatcgccgtcacggcggcgttcctggcgctggcggtggttcccgcggcgctggcgcaggcgccgggccccgcggcggcgccgagcgggccccccaaccgtgacggcgatcctggagaagggcgggcagtacacgacgttcatgcggctgatgaaggagacgcagcaggacacgcagctcaacagccagctcaacagctccttcggcaacggcggcagcggctacacggtgttcgcgcccaccgacaacgccttcaacaacctcaagcccggcacgctcaactccctcacccagcagcagcaggtgtcgctggtgcagggccacgtcctgccccagttctacagcatggactccttccagaccgccagcaaccccgtccgcacccaggcctccgggccgggacgggccctacacgctcaacatcacctccgacaccaacaaccaggtcaacgtctcctccggcgtcgtcgacgtccgcatcagcaacgcgctctactccaacaagccgctcgccgtctactccgtcgacaaggtgctcctgcccatggagctcttcggggccaaggcccctgccgccgcgcccaccgcgtccgagggcaagcccaagaagggcgggtcctccgacgccgcctctgggcccgccggctcggacgactccgcgcccacgggcgccgccagcgccagggccgtcggctggagcgtcgcgggcctcgccgccgttctgggctacctgctgtgagtctgagatgagaatgccaagtcctccaattccattgcaagtggacttgttgggattctttgcctgagactgtcggtgttggtgttcccttccccttctttctctcttctcggtttaaatttctttgatcttgctagtttcttctttgtaattcttgttcttggcggtctgtacgattgggttacaaagaagaaactagcaagatcaaagaaatttaaaccgagaagagagaaagaaggggaagggaacaccaacaccgacagtctcaggcaaagaatcccaacaagtccacttgcaatggaattggaggacttggcattctcaacaccgacagtaactctgtccgtatgtgggatcgtcgcaatctgggttctggaggagctggttctccgattcacaaatttgagggtcataaagctgctgttctttgtgtccagtggtcacctgacagggcatctgttttcggaagttctgccgaagatggtttcttaaatgtgtgggatcatgagaaggttgggaagaagaaaaaactctaacgtaccagctgggcttttctttcaacatgctggtcacagggataagattgtagacttccactggaattcatcgg

SEQ ID NO: 5089 - DNA, 363 bp, Setaria italica
  Peptide Sequence Number=SeqID_71063
tttgatcacaagttaccagaacagtgagcaggaaatcagtgtaacgtaggcttagtaatagtttaaataccattagtccagtagcagaaagggaatgaactggatgccccttgtcacatgttgaagaatttccaacggattctaaacatgtcgacaatgggcggattctaaacatgtcgacaatgggacgatgcaacatatgtaaataggttggtttgagttgagaacacgagatagttatgtcgacccatcattgtaccatctccaatctgaacagatgcatgttgagcacgtgtggtgatcagttctgtcttcgatcatgtgtaaaagagatgcagtttgatggagccgtgctcataaaaa

SEQ ID NO: 5090 - DNA, 516 bp, Setaria italica
  Peptide Sequence Number=SeqID_71064
tataatgttggtgccaaaccatcggcaatacctgctgttgctttaaagactgaagcccttccagcccaatctcttgtggtagaagagttgtagtagtctataagatccgttgtcttgctgacatctgtgatgagaattccagggatgctgactggcacaggatcaaattttgttccaggataactattctccacagcaacaataaagccagtcgcaccaagactcttggcagtctgagacactttctttattgaagctgtcccagaaatgtaattgaacgaatagccgcacaaaagaatctttccttgcaccttcctcttattcaagagttctggcctctgacagtctaatgcactatacttcgttgcagatgaacccagcagagcatcggccgcagaaatcagactgaatgacttgttcccatgtgttgcaggtgatactccaagtccagaaagaagtttcccatttccgagtgttaaaattgtatttttgttattcttacggttctattctaaa

SEQ ID NO: 5091 - DNA, 417 bp, Setaria italica
  Peptide Sequence Number=SeqID_71065
ctcgcgccgccgcttctcttcgcctaccgccgcgcagggtttagggttcagcggcggcggcaccagctcccaccacccgaagccaacgccaacgctaacgagacaagttgccggcgatggcgtcgatcgcgtcgcagctgcaggccatcaagtcggcgcttggcgctgcgcccgagccggcgcgacggcccatcacccggccgtcggtgctcttcgatgcgaaggaggccgccgacatcgacctccgcgccatcctgcccatcgccctctctgggttggagcaccttgccagtgtggacgagaggtttgctaggtacagcaacactctgttcagggagactagcctagaggtgaaccgcgaacagcaaacacccaaggagaatgacaaactcaacaagtccatctccacctaccttc

SEQ ID NO: 5092 - DNA, 984 bp, Setaria italica
  Peptide Sequence Number=SeqID_71066
aaagattccaaaaggtcttgcaaggtcaagaagtgtttcgtcctttccgtggaggagctttggctgatgtccatataaggactgttggcatgtatcaacctgacggtacccatgcatctagtgcagcttataaatggcctacaccgcaagggtgtgatattcgacatccaaccaaaccagttctgttgcaagcatcctccccatcatctgtgctgatgtttccacaaactagttctaagatacctcacttggaatatgagtacagctgcctggatgaggatgaggatggtagacgtgatagggctgtccctactcaagacatgggaagaagcaaccaagcactatctctttggcctcatcttgtttcaggcgaagccatagatgaatgtactgtaactgagaagatgcactcccctgtcagtggtgccgagcacgaatcgaacaatgagagcactgttgttaatagaattggtcttgtctgtatctcattggctgagcaggttcgatcatgcgatgaagcagactcttgcaatgcaaattgtaattctcggctccagccttcacagtcacaaatgcaatcactaggcacctgttgggccactgttcatgaggaaaggcctgttgttggcaatgtggttgatgtctcactggtggatatgatgatctgatccatccggcttaccaactgcaactttcatggtctgcaaccacacgctggatggcagatgactgaagggcgaccggatgattcataaatcaaggccgcttatcaaatttgtaattcacttttaagctttgaatatcttattattacctctatttcaatctacctttgtagtaatcagtagtgctgcgcaagctacttgtatctctttaagctgtacggttatgtcaagcccatttagagggcttgtttggatgaactcgtttcttttttattagttggtctcttgttcttgtattagtaaaaaaaaattaaaaaaa

SEQ ID NO: 5093 - DNA, 571 bp, Setaria italica
  Peptide Sequence Number=SeqID_71067
ctcatcacgctctcatgcgatactacaggttgttgtagaatatagatccatggatggagttgacgtagtaacacgagttggaaaactctctcttatcgatcttgctggatccgaaagagctctggcaactgaccaacgtacacagaggtcgatcgaaggagcaaacattaatcgctctcttcttgcactcagcagctgcatcaatgcccttgtggaggggaagaaacacataccatatcgcaattccaagctgacacaactcctgaaggactcacttggaggatcctacaacaccgtcatgattgccaacattagcccctccaatctttctttcggagagacacagaacacgcttcattgggctgatcgtgccaaggagataaaaacaaaggcacttaccactgcaaatgaagaggttctgaatgtaccagattctgatactgatcaagctaagctgttactggagctgcagaaggaaaatagtgtcctgagggagcaactggtaaagcagcaacagaagctacttacagtccaggctcagtcacttgcctcaaacacatcgcccaacaac

SEQ ID NO: 5094 - DNA, 473 bp, Setaria italica
  Peptide Sequence Number=SeqID_71068
ggtacaggagttcaatttcattttttaattgagggggctggtacatgtatttggtgtttcaaacctgaaggagcataacaagtaaaaatatatgaaagaagagtaaagaattagtggtacaaaaaattttcctacggcagaaagagagaaggtatcatgtactaccactgcgcttaaaaccactctatgcccaggacccacgtggagctgacatgcatgtgtaagcatccagcttacactttcttcctctacttcaagtagaagcattaacactttcttcctctgtattgggaatgtttgggttcatgtatggtgcaaccagtcgcaactcttcatgcatgactaatgccacaacgttaatatacctagacatctactaatcggtgttgctgaatagtgaatacttcaatcaaaataaacgagtggggcctggaaataattgcaattctaaatattagtatatgatatagtgc

SEQ ID NO: 5095 - DNA, 504 bp, Setaria italica
  Peptide Sequence Number=SeqID_71069
tgaggccaagattattatggaggatgggattgaaactacaactggaagaggtttaccaactgtaccttcttttcggataccatgcaatggattagacagtgccatgacaaactcagtcatgccataacgttccaaaagacgatggcctgtcacttcctcccaccgcttcataagtggggaaggaagagctgatgatccacacatcattaacctcagctgctttgcagaataagaagaggcagattgttgatcaggatccatactatcgtacccttgcagtagccgcgtatacatggttggaacctaccacagcataagtatcgaaataactaacttatcaaacagtatgaagacatattggcatatggcaatttgacaagaatctgaaggtagactactattgtctgacaggaatcatactccagtaaatactgtgatggcctcatcattcaatgctggcatctttttaaagtaacttaaaggtaaactaaaattaaacttaaa

SEQ ID NO: 5096 - DNA, 2488 bp, Setaria italica
  Peptide Sequence Number=SeqID_71070
ttataatgaatgattttttggaacttgaatgtgcgatatgtggcacaaacttttctgacagagtaagaaatgtgtggagtacagctcaggccgttgcgaatttcatatgttcggtgtttcttttttccccctcgacagataatctacggctatatcctgaaggaaaaatacaataatatactatgaacggaggaaagttttggaaaattattgttctatgataaggaaaaggatatctataaactctgagtctaagctcctaataatttcttcagctccttcttgttaacctttcccatggcattccgagggagagaatcccacaagtacaatcttgttggaatcttgtatggagcaagcttatctttcgaccaacttgtcaatgcttccaaggttagtgctggcttcgagtcttgctccgccattttctttgcatcctccttaggcacaattattgcacatacaacctccccataggcttcgtcaggcaagccaaggaccgcacattccaatacagtgtcatgctctagcagtactgcctcaatttctagtgctgacaacttataaccaccaactttcataatgtcagcatttgtgcgtcctaaaattatgaagtatccttcctcatcaaaagttactgtatcacctgtcttgaagaatccaccatcaatgaaggattctgccgtaacctctggtcttttccagtactccttgaaaagggatggacttctaatgcagagctcaccaactccagttgtagtttcaatcccatcctccataataatcttggcctcaacacgtggaagaggtttaccaactgtaccttcttttcggataccatgcaatggattagacagtgccatgacaaactcagtcatgccataacgttccaaaagacgatggcctgtcacttcctcccaccgcttcataagtggggaaggaagagctgatgatccacacatcattaacctcagctgctttgcagaataagaagaggcagattgttgatcaggatccatactatcgtacccttgcagtagccgcgtatacatggttggaactccagtaaatactgtgatggcctcatcatttttgctggcatctttgggatatgattcccgccatctctgccatatcccgcttacgctgaatttcggaataaactcaaccacagatcctgaatagaggggtgcaaatagggcattgaaaaggccatgcacatgatgcagcgggagacagtgcagaaattggtcttcactttgatatccccacgcttctgatagaatttggacctgagaaaggatgcccttgtgggtgtgaacaactccttttggtttaccagttgtgccacttgtgtaaagaataagagcaggatcatctcctttgattttctttgaactgttgatctcagttattaaactagagactgatgaagtcacctcattgcttgaaggttcttgggggtttatttccgaaggtatactagtgatagatggaaggagagaacaataagcagaacacttgatggaaagattcttcatattttcatgatgctccttggtgcttaaaaccattgaaatatccgagtcattcatgacgtgaagaagctcagcttctggatagctaagtgcaaggggaacagctactccaccagaaagccaggttccaaataccccagcaacaaattcaggagagggcttagccacaatgccaacacgagctccatgaaggaatcctgttccaatttttcctttggaagaatcttgaattccattttgtgtcatatttttgctgcacaaaatgttgtggacatccagggaagctgcaatgagctggagaaggctgtaactctttttgtcagctcttatagctgtgcggacaccatttgctgagccatgcttgaggacttcttgaaccacctccatgaacgtatgggtgttctgtctggtgtggtatgctgggagggaggaggaagccactgcgcttaaaaccactctatgcccaggacccacgtggagctgacatgcatgtgtaagcatccagcttacactttcttcctctacttcaagtagaagcattaacactttcttcctctgtattgggaatgtttgggttcatgtatggttcaaccagtcgcaactcttcatgcatgactaatgccacaacgttaatatacctagacatctactaatcggtgttgctgaatagtgaatacttcaatcaaaataaacgaagtggggcctggaaataattgcaattctaaatattagtatatgatatagtgctaaatatttaaatagcaatagcatttggtgtggatatgatgcagcgggagacagtgcagaaattggtcttcactttgatatccccacgcttctgatagaatttggacctgagaaaggatgcccttgtgggtgtgaacaactccttttggtttaccagttgtgccacttgtgtaaagaataagagcaggatcatctcctgtaca

SEQ ID NO: 5097 - DNA, 555 bp, Setaria italica
  Peptide Sequence Number=SeqID_71071
caacccgtatcttcaaggtggatgccaagacgttgatgagtgtagtagccgcccatgcccttcagacggtgtttgccacaacacggaaggaggctaccggtgttcttgtcgagcaggaaggaagtttaacaggcaaagaaccacatgcgaccctgatactggcttaataataggagttacagtcggctctcttgttctcgtgattttctcctccttcggatacatgattcttcaaaagagaaagctgaaccaagttaggcaagaacattttcgagaacatgggggcatgattctgtttgagaggatgagatcagaaaaaggtcttgctttcacggtgtttagcgaagctgaactgatacaagccacgaacaactacgacaagagcagaataattggaaaaggaggccatggaacagtctacaaagggatagttaagggcaacatgcctgttgcgattaagcgatgtgcacttattgatgaaagacaaaagaaggaatttggacaagaaatgctaatactctcccagatcaacaacccactagtttgacaatgttc

SEQ ID NO: 5098 - DNA, 318 bp, Setaria italica
  Peptide Sequence Number=SeqID_71072
aaatcttttgaaaggaataactgcagatgaaaacacggctgcccatgatgttgacagtttgggcatcatcaaccttagatattgtgggtatgttgcagtagcaaaggttaacaacatcgacaaaaccaaagtgacctcttctattaagccaataaatatcgcagatcaacctgaaggtggtgcacatgcattgaacattaacagtttgaggatgctccttaatgaagccaattcaactggagagaaaaagatatcaagcctttcacaaaatcataggcatgaagaactaactacagcacaaaattttgttgagaaatt

SEQ ID NO: 5099 - DNA, 2368 bp, Setaria italica
  misc_feature (1057)..(1057): n is a, c, g, or t
  Peptide Sequence Number=SeqID_71073
cagcctaggcaggaggagcagccttcggatgaccatctgttctttctcgaggcaaagctttgcagtgggaaattcattgttgttgaagctcgaagaaagggattcttcagtttagggaagcagcgagtcttgtgccataaccttgtcgaccttctgaggcatcttagtagagcgtttgataatgcttatgaagatcttatgaaggcatttttggaacgaaacaagtttggaaattttccttatggatttcgtgcaaacacatggcttgttcctccaattgctgcccagtcaccatcaacgtttcctccacttcctgccgaggatgaaacttggggaggcagtggaggtggttggggaagggatggcaaaagcgacatgttgccatgggcagatgaattcctttatctgacatcgatgccttgcaaaactgctgaggagagggaaatccgtgacaggagagcattcctacttcacagcctcttcgtagatgttgccatctttcgggccattgcagcagtaaggcatgtaatggagagtacagagatatcagcatcaaccaaggtagacgaagttttgtattctgagacagtgggaaattttagcatcactgtcacaagagattcttcagatgcaagctgcaagttggatactaagatagatggaagccaagccacgggaatggactctaagaatcttgcagaaaggaatcttttgaaaggaataactgcagatgaaaacacggctgcccatgatgttgacagtttgggcatcatcaaccttagatattgtgggtatgttgcagtagcaaaggttaacaacatcgacaaaaccaaagtgacctcttctattaagccaataaatatcgcagatcaacctgaaggtggtgcacatgcattgaacattaacaggttaataacaagagtaacaatgcttctatgttctctagatttaatttgtatagcttcacccttactatcttttgttgatgaacttatgatcatttgtttagtttgaggatgctccttaatgaagccaattcaactggagagaaaaaagntatcaagcctttcacaaaatcataggcatgaagaactaactacagcacaaaaatttttgttgagaaattgttgaaggaaagtcttcaaaaagcttgaggaagaggaaaaatgggaaacaatcatttatgagatgggaacttggagcctgcttggttcagcatttgcaggatcaaaaaaattctgataaggataaaaagcagggtggtgagaaggacaagaagaaaacagtggacaaatctctgaaagagacaaagattgaagggctagggaagcctctcaaagcccttaagaactcgaaaattgttgatactgccgacatgggatcctcattaggggccaaaagctctgcagaaggtcagaaagacaagccatctgatactgaattacctcaaggagagtccaatgcctcagagaatgaaaatctgctgaaggatttattaccagaatctgcctttacaaggttgaaagaatcagaaactgggctccaccagaagtcaccacctgagttgattgagatggctctaaagtactatgatgaagttgcgcttcctaagctggttgctgattttggttccctggaactttcacctgttgacggtaggactttgacagatttcatgcatactagaggcctacagatgcgttctctaggacgagttgtcaagctttcggataagctttcgcatgttcagtccctatgtgtgcatgaaatgatagtgcgagcattcaagcacatcgttcgatctgtgattgctgctatttcagacacacggcaattagcactaacaatagccgcagcgctgaacttactgcttggtgttcctgaatctgatgtctctggaagttctcctagtgtgcatccgctagtatggagatggctggtgaccttcttgaaaaagagatatgaatttgagctcacagagaagcattaccatgatatgaggaaatatgctatcctgagaggactatgccataaggtgggcattgaattggcaccccgagatttcgttatggattccgctttcgcattccataagcaggacattattagcctggtacctgtacacaagcaagttgcatgttcatctgcagatggaaggcaactgctagaatcctctaaaactgcccttgacaagggaaaacttgaagatgctgtcaattatgggaccaaggctctttctaagctcataactgtgtgcggtccgtaccaccgaatgacagctggagcttatagccttctagccggtgttttataccatactggtgtattttaatcaggctacttatttatcagacaaaaggcactagac

SEQ ID NO: 5100 - DNA, 432 bp, Setaria italica
  Peptide Sequence Number=SeqID_71074
atggctgggagtggatgctttgaggccgtataagtggaaggagggcatgctgcacttcctcatcacactatagatccgatcttagctgcctctaatgttattgtgagccttcagcaacttatttcgcgggaagctgatccattggactcacaggtacggtcccatctttgtccgacttaatttgttgttgtatgacataagtttccaagcaaggaagcatgttcttggttcaccttttctatttctgttctcagttgccataatatgatttacgtgtctgcctttctactgaagttctctgctatactgttctgttggtctgtattacagaacaagaatagaaatttcataaaatgattttgtcatgtgttaggaaattcattcaagatctggttgaagtttttcctgatactttgtcatggaaagttggga

SEQ ID NO: 5101 - DNA, 601 bp, Setaria italica
  Peptide Sequence Number=SeqID_71075
tcttcctcaccaaggaccgccctttctttccccaaaccatcaacagccctgagctccatgatttcttcgtgaatgtggccagcgagatggttggctccaagaatgtgagggacaggcaaccgctgatgggtgctgaagacttcgccttctacgccgaggcgatcccctccacctactactattttgtgggaatgtacaacgagacccgcggaccacaggcgccccatcattcaccctacttcaccatcaacgaggatgccctcccctacggggcggctgcacaagcagcaatggctgctcgctatcttcacgagcaccagcagcctgcttctaccctggataaggcaaaaacccatgatgagctgtagatagttactgtctgcttcattgacttctgatgaaatgcaaatgatagcataagttggtgcaaatagattgagccatcgaagctgaattttcagctggtcaccttacctttcgccaagttattcatcagatgtacatatactctgatatttgcgcacttttcataataatcgcttgctcaataattgtgcactctggtattatttagcgcgatgctgaagtcagcaaataatgt

SEQ ID NO: 5102 - DNA, 1600 bp, Setaria italica
  Peptide Sequence Number=SeqID_71076
ctctcacctgatcggtttgacccccggcctcatcactcagcactcatcagtgaaccaaccgaaacaagctgagaatcatggccgccgcggcgccacctccactgctcgcgtgcttcgccctcgccgtcctcgccgccgcggtatggccgtcgctaggggcgggagcgtcgctgctggatgaccccgcggggctcctgcgacgggccaaggagccggcgttcgcggactggatggtcgcggttcggcggcgcatccacgagaacccagagctggggtacgaggagttcgagaccagcgagctcgtgcgccgggagctcgacgccatggggatcccctacaggcacccgttcgccgtcaccggggtggtggcgacgatcggcaccggcggcccgcccttcgtcgctctccgggcggacatggacgcgctacctatgcaggaaagtgtggaatgggaacacaagagcaaagttcctgggaagatgcatggatgtggacatgatgctcatgttgctatgctcttgggatctgccaagatccttcaggagcatcgtgatgagttgaagggcactgtagtccttgttttccaaccagccgaggaaggtggtggtggggctcagaaaatgatagaagctggagcagtggaaaatattgatgccatttttgggattcacatagctgactctattcctattggtgtgctggcatccaggccagggcctattatggctgggagtggattctttgaggctgtaataagtggaaagggagggcatgctgcacttcctcatcacactatagatccgatattggctgcctcaaatgttattgtgagccttcagcaacttgtttcccgggaagctgatcccttggactcacaggttgtaacaattggaaaatttcaaggaggtggggccttcaatgttatccctgattcagtaacaataggtggcaccttccgggcctttttgaaagagagttttaatcaattgaagcagcgaattgaagaggtaattgtctctcaagcatctgtgcagcggtgcactgctactgtggacttcctcaccaaggaccgccctttctttcccccaaccatcaacagccctgagctccatgatttcttcgtgaatgtggccagcgagatggttggctccaagaatgtgagggacaggcaaccgctgatgggtgctgaagacttcgccttctacgccgaggcgatcccctccacctactactattttgtgggaatgtacaacgagacccgcggaccacaggcgccccatcattcaccctacttcaccatcaacgaggatgccctcccctacggggcggctgcacaagcagcaatggctgctcgctatcttcacgagcaccagcagcctgcttctacccctgataaggcgaaagcccatgaggagctgtagatagatatcttccccttcagcacacagttgtgcgtatctttgcattaaaacactagtgaacgtgcacgtgcggcacacacgtgatacaaaaaggattgcatacaagaccatgtataatgtaataagtccttgttgggtaattgtactaacgtagtattacccggtaggtactaggtcgt

SEQ ID NO: 5103 - DNA, 745 bp, Setaria italica
  Peptide Sequence Number=SeqID_71077
atagaaggaacacatagcagcgcagctccaacccgggtactaaccggccaaagaacgaggatgctggacgctatatcatgcactgtttggaaacaaaagtctttgcacatgttgacaacctaataaaccgactgctcctactggataaatagtcgagatcctcctacttgaatggttcaagactttttgtttccaaaacagtgcatgatatagcgtccagcatcctcgttctttggccggttagtacccgggttggagctgcgctgctatgtgttccttctataccatctaagcctgcttcagagacatagcccttgcgcgaaggttgagaaatatccccctgcacaaggaatagaaagggatgaccagataacaagtgagatttgcccagtcatgcatcgggaaacaagtcttgcagaatgttcaggacaagagaacattaccaacagcatgcgacaaagctgtggaagatcacacggaattgcaaaggcatgtactggtggttgatccaactgacaattggccaaaacatccaagcgctcaattgcacagaaggatattgtttcttcaccctgatcgtcacatccttcaaaggcctccctaaattgcaagatgggataagtacccttggactgacgaggtatagtagaagattttatggaagcaacaatggtattatattaaatagacggccatgtcattcaagatgcactactgtgatatcatatttctgcttatgctatag

SEQ ID NO: 5104 - DNA, 604 bp, Setaria italica
  Peptide Sequence Number=SeqID_71078
tcttctaactaactattattccgttaattagtaactaagtaactaacaaatttgttccagggagaagatgtcacttgctccagcaacaccttcttagctatagttttggtatccttcttccctttgaagatataatccaaaattttgtgcaagaaatgtccaaatgggccaccatatgcaaaaccaaagagcatcttgaggaacagccggcgcttctcaatcttctggtacccggagagcttctgcgccacggagtcgctgacgccggcgaggcaccccgccgtgaccatctttgtgcgaagagggtgctgctggagctggagcaggtactgcctccacgccctgtacgccagcgacccctcccccttccctcctccccgtcctgctcctcccgctgctgccatggcgaccgaccaccaaccccaccgcctgaaccccttcgatcgatctgcccacctactcctcctccgacaaccgagcactgcgcacgctgcctctgtgcgctcgcttgtattttttttggaggggcggattctgcgatgctcttgtgtgggtgagtccatactccagcagccaatccagctgcatatgcagctccgaaggg

SEQ ID NO: 5105 - DNA, 570 bp, Setaria italica
  Peptide Sequence Number=SeqID_71079
tgacagttaacacacttactctcaacaacatatccgtaatagaacaagaacaacaaattgttccagggagaagatgtcacttgctccagcaacacctgaaaagagtatcgtacatgaaacactacatactaagttactgacatgatatcgattaaatgttgttaacaggtattagcttcaattgaacccagggttccaaatccaactagtaaaaaagagggtagtttataatttggtaacagtttgaacaagttaaccaatctagaactatttcagtgtgaagctagcaatatgaattcagaaaatgaaaaaaagagaaaacacacgttgctggaatccatcagtaaatcagcctgttacctcactggttacaggtgtcccaattatgtccaatatttttactggaacccgccaaaaaaaagttgctccaatcaagactttggacaattagcaagcattagttctagattgctgcagtccaattctttgtcgcttatcaattattagttggctactgaagtcaaaaacatctattcgatgttaaatcatttttcttttagtgtgcagggg

SEQ ID NO: 5106 - DNA, 820 bp, Setaria italica
  Peptide Sequence Number=SeqID_71080
aaggcagccaattcaacatactagtgttcaatctcaattcacgaaagctcaatttgtctttgcacatgttgacaacctaataaaccgactgctcctactggataaatagtcgagatcctcctacttgaatggtttcaagactttttgtttccaaaacagtgcatgatatagcgtccagcatcctcgttctttggccggttagtacccgggttggagctgcgctgctatgtgttccttctataccatctaagcctgcttcagagacatagcccttgcgcgaaggttgagaaatatcccccaacagcatgcgacaaagctgtggaagatcacacggaattgcaaaggcatgtactggtggttgatccaactgacaattggccaaaacatccaagcgctcaattgcacagaaggatattgtttcttcaccctgatcgtcacatccttcaaaggcctcctctcaacaacatatccgtaatagaacaagaacaacaaattgttccagggagaagatgtcacttgctccagcaacaccttcttagctatagttttggtatccttcttccctttgaagatataatccaaaattttgtgcaagaaatgtccaaatgggccaccatatgcaaaaccaaagagcatcttgaggaacagccggcgcttctcaatcttctggtacccggagagcttctgcgccacggagtcgctgacgccggcgaggcaccccgccgtgaccatctttgtgcgaagagggtgcttgtcttggtagtcttggtagtctaggttacttgttcctttccttacgttccctttgtttacgttctta

SEQ ID NO: 5107 - DNA, 407 bp, Setaria italica
  Peptide Sequence Number=SeqID_71081
tgctagcatatgtgtacttattttctatatcccattcagagagcaaagaaaagggagcacaacaaggatcagcaagaacagatgtagatcgatggatagatcgcgcggcacgatcatctcgaggtgagcatggaggcggtggaggagccgccgccggaccggaagggtagcgccgggcggccgccgtagtgacagccgagcaagtagagcgccaggcgcttcttggccctccggagcagcagcagcttgccctccccccactccaccacgacctccagcacctgcctcttccaccccctgccgccgccgccgcagcgctcgtcgccgtcgtccccgaccttggcggcctcggtagcgccggccagtgcgtgcttctcgtcgtcgtccggcgccggcgaccagtccca

SEQ ID NO: 5108 - DNA, 1306 bp, Setaria italica
  Peptide Sequence Number=SeqID_71082
tttttagcacttcatatggttgggacagattcaaatgtcgagagatttcagcagatcgtactcacatttcattagctgaagaaaaaaggattaatttattgatgcctatccaacaataaagaatcactaagcataacccaatccccactcctctaacatgcccttcccaaaaatttctgcttttgttacagatagcgtacactcttgtcatgtccaaaagttcgaatctgtcacgataaccaccgcaatgctcagcagcaaccgaaggaagagcaagaaccctttctcccttcctgttcttagcctccatatcgcagatccctcggcatcacttgtcgatgttgtagtgttgtttgcgctgccagatttggtgtcgttgctcagcagcttacttccaggaaataagcagttgtcatgactgggatcggtggtggtgaccatgccggcgccctggaagtagcaggacccggcggcgcggccctgggactggtagtaggcgtcgaaggcgtacgacgcgtggctgcgcacgtcgttgggcaggtagcacccctgcccgggctggatcgccgtgcagtcggcgcgccccggaccgcacgcccagtccatggccgcctgcaccgccttctcgtccgcgtcgtccgccgccacgcagaagctccggtccgtcgtgtcgttccccaggaaccccccagcccccgacacgtgcagcaggtacaccggcgtgccgttgccgtagaacaggccccagttcgcctccgacacggggccggggcggaggtcctcgttgaagagctcgtagatgtaggcgctcgactgcgccgccgcgccgggggccatgggcgtcccaggcttgtcctccagcacgtgcttgatcaggttcgagttgtacgcgtccgcgttgtccctcgtcgcgtacggctccgcccgccggtcaccgtacgacggccaccccgtctccgtcaccaggatcgggaccccgccgccggcggtgacgttgaggttccgcacggccacgcgcacggcgtcgagcatcgcgtcgaacacgttggtgtagtggagcagcgtgttggggtccaccatctcctgcgacggcgggagcggccggaacagcgcgttgtccagcgggatcacgccgccgctctgcatcagcgagtagtaggggtacaggttcagcatcagcggcgccgaggtgttggcgaggtggccgagtagcggcgcgatgaaggacttggccagggactggttgaagaaggcctgcgacggcgggaacgggtccagcaccacggagaagggcagcggcgtcgac

SEQ ID NO: 5109 - DNA, 271 bp, Setaria italica
  Peptide Sequence Number=SeqID_71083
ttttttttttttgtgcgcgatcaatcatttctcttcctgctataatctcatctccaattgtgcctaatcctagcaaattatttacagaaattacacttcaagcaaagcatgaaaattctatgaaaatcctcgcaaaaaagagagaatcctaagaaaaactcaatcacacgagaaccagaatggtaaggaacgaaaaaggagaaattgcaaccaagaaccgcaagcccggtgtcgccgctggagtcagggccggaagagcgccccgatgaag

SEQ ID NO: 5110 - DNA, 612 bp, Setaria italica
  Peptide Sequence Number=SeqID_71084
aattatattagtactccatgacaataaattaatgttagttgaaattcaatggtatacttctataagaaaaaaaataaccattacactcataattctttgatagtgcaaatccaacatcttaagcgttgtggtgcaggctgagatgcctgtttatgctatcacagtaacaaagagtgagtctaggacctagaatccatattcttagtaaaatatataaagaattttttaacaagaggtatagtaagcactagagtttcaacttaattaacatgcgaagaaaaaaagaatatgaatgggaagataatgaaccgagtaattggtagccaaagcttatcataaccggatagagattacaaagtatctatatgggtattgtgttaaaataaataaaaagagcacaaggataaacaaatttggttaactgtgagtctaaatttatatatgaacttctaatactaacgtggcctaagtttacagttattagtttgtgcaggagcatgtgttaatgggctagctatcctgataataaagaacaatgaatggtaagtaacagaaaaataaatacacaaccttttataacatagatgaagaattcattgctggcactaacag

SEQ ID NO: 5111 - DNA, 393 bp, Setaria italica
  Peptide Sequence Number=SeqID_71085
cacttcaatggaagcctccctgatgatatttcctccttatctggcctccgagttcttgatatatcgacaaacaatttcactggtccattacctgctgctgtcagtaagcttggggctcttactgatcttgacatgtcaacgaatcagttcactgggcctttacctgaggatcttccagataacctcctatccttcaatgcgtcctataatgacctttctggtgtcgtgccagagaacttgaggaagtttccagaatcttctttccatcctgggaactcaaaattagagtatcctgctagctcatctggatctgggaactccccatctggttcaggaggtggcaaatcactcagtacaggtgctaaaaataggaattgtagcagctagcatttg

SEQ ID NO: 5112 - DNA, 1519 bp, Setaria italica
  Peptide Sequence Number=SeqID_71086
tttttttttttttttggttttcatgtacaattattcttatatatatttgattatgaactgcatggtcaggtttagtggcttggatgtacaaaatgttggttgcctgatcactgtaaagaatgttgcaattctcgggtcgaaatatcagctctcttcaggcgctgcggatggcagcacaaggcgttctctgccttgaacaagcttcgcagaacgaattttgtctccggtcttaatctgcgtcagaacatctcttccatcagtggtatacccgaaaactgaaaattgtccttcatcaaacgatattcctcctaaaccagagtttctcttgtcataaagatagaagaagaactgcgttggtgaggagtattcatctgaatccacactatgtgccatggcaacagcaccatataccgacatcggcaggactggcaattctccatcctgaatgcttaatggagttctgtacaatggttcgaattgtcctgcaggcatgacctctagtggaacagtgtaccctttttttccggtctcattatctgcactaattgcctgactcgcacatttcagtgttaccccatcatatgccccatccaagaccaattttgcaaagtttccagcagtcagtggggcagagtagccatcaatgacgacctgaattgtagcagtactttttggttcaccaccaccagtaggaaagaatgttgaaccgtcacctttttcaacagtgaattcaacaactcctctccctgttagccttggatattctaaatactgttggggcaggagaaaggacagaccaggagcctgcaacagctccaattcagcaatagtatcaagtgacgaagcaagtgctatggaaagtttgtcagggttattctccttaatatacttcaagagagtcagcaaaccacccttctcttccagcagagaagtatatagcttggcaccatcttccttgcgctctgcaggtatgcttcccaggattgcctccttgttgtccattgcaattttcatggctttcttcacatcgccctccatggtaccgtacggcttcctctgcggtatcctcagcaaatacgagatgtcctctagcgattcctgtatgatcttcatgtttgggttcgcggggatggccttcctcagggccagctccccggtcctcggaatcttcgtgtccggcgagtagaggaccgcgtccgccggcagcgacacggaaatctgggcggcgatggccagcgccgcggccgcgctcctcagccactggataaccccctcagcagcgcagggggggcggtgggaggcgcgggcgatcaggccgggagtgccgcggccgcggcggttgaggctaagccgcgtcctccacgcgcggcgctcggtgtcggccgcggacgagggagcatgggccgtggggcgggcaccagcgagcgccatcgcggccacgcgcgacgccatggtgtgcgagggattggaagggaatggtggccgttactgccgtccctgccgtcgccgtcgtggcggt

SEQ ID NO: 5113 - DNA, 790 bp, Setaria italica
  Peptide Sequence Number=SeqID_71087
ccaaggcggtcccggaccacgacggcgagtcgtactgcggctacccgggcctggccgtcacctgcgacggcggcaacagggccgtcctgaagctcggcgggtataactacacggtctcgcgcatccactacgcgaacctgatcgtctcgctcgccgacgccgacgccgcggccgcgggcaacggctgccccattgtggaccacaacgtgaccttcccggcgggcgcccggctgttcctccccattcttccgtccttatcgactacctcttcttcttcatcaactgctccttcgggcacccggacgcccctgctcctaccaagcccaaaccgccgaagccgccgaccatcaagcccatcacctgcggagacttcgacgaaccggactccatgacgttcgtgctcccgagccgtgaggtgcctcccgccgactggtccggggcatgcaagagcgtcttcggagcacccgtgctcagagacgccgtcccccgcgacgcgcaggaccccaagtggaggagcgacgggtactccaaggccctccgctcggggttccagctgggctgggaacggagctccggggagtgcagccggtgcgagcagtccggtggcaagtgcgggttcagcggcgccggcgagttcctgggctgcctctgcgccgacggccgcatgggcgacggcggctgcagtaagacacttgctgactcttcttcactcggatcaaaaaagactcctctcaaagttattgcaggtgcctcggctgctgctgctggtcttgccgtgcttggtgctggc

SEQ ID NO: 5114 - DNA, 439 bp, Setaria italica
  Peptide Sequence Number=SeqID_71088
attggcattgacattgaagagaagaaacggaagacaaaaagaactttttatctcttgctcgccgttatttcaccccatctgaagttgattatctagataaaattccggatcctgatgctcagcaaaaggagttcataaaactatggactcttaaagaggcatatgttaaagctcttggaagggggttttcaggcgctcctttcaataagttctcaattgtattggcagcaaaaaatggaatccaaatttctgtggcaccaaaagtattcaatgattctgactcttgtgactgtttgtccgagaattggcaatttgcacttgcagagctaaataattctcattacatggcagtttgtgtagaagatgactcaagaagttcagattctgggaatggtcgtcggctacctctagcattgaaaatatggaagactgttccatt

SEQ ID NO: 5115 - DNA, 967 bp, Setaria italica
  Peptide Sequence Number=SeqID_71089
gtttcagaaaggtgcagtgctgtcccgtgcactggtgcgcaccacactctcgagatattgcaaagttgatccaagatcatttgagtttaagtaaaaacaaaatttaggcaaacctgagatactgtggcaacctgatgacaacaggatgggatggcctttgcatttcaatatttcacacacatcttctttaattgcctgtggcgtaaccatggatactcctattggcattgacattgaagagaagaaacggaagacaaaaaagaactttttatctcttgctcgccgttatttcaccccatctgaagttgattatctagactaaaattccggatcctgataatcagaataatagaatagttaacaaacgaacaagtggttgcttgcattgactgtctttattgatgtcttaattttgtaggaggcatatgttaaagctcttggaagggggttttcaggcgctcctttcaataagttctcaattgtattggcagcaaaaaatggaatccaaatttctgtggcaccaaaagtattcaatgattctgactcttgtgactgtttgtccgagaattggcaatttgcacttgcagagctaaataattctcattacatggcagtttgtgtagaagatgactcaagaagttcagattctgggaatggtcgtcggctacctctagcattgaaaatatggaagactgttccattcctagaggatacacttgtttctggaacagaagctgtaacacttatcagttagtatgtgagagtctgctattgccttatgatttcaccagattacaatgtgatgcaacgaattcatattttggagaagtatgcagggaaactctgaacattcttctagcattgattaacttattgctgacattgtgccttagtatggacttgggaaatgcaacagcatatattttcagagttccaggtattcatattaagactgttattagctgta

SEQ ID NO: 5116 - DNA, 356 bp, Setaria italica
  Peptide Sequence Number=SeqID_71090
ggtgcatgtttggtaccttctgcctgatgagctgaatgatgcctcccaactgaagatgtacatggacctcctttcgccttctgaaaggaaggctgctttggctatgaatggagaaaagtttcagaaaggtgcagtgctgtcccgtgcactggtgcgcaccacactctcgagatgtatgaaacaatcagctacttgtgaaatttaatgttgcatttcatttaagtttcatgcatgttattgtcatttagataaattcttgtactgatcatgaatgggttcatgtctctattaacagtctaggacatactatcacattcccaatttgtcgatacatagtactaaaatgcaaatgccat

SEQ ID NO: 5117 - DNA, 548 bp, Setaria italica
  Peptide Sequence Number=SeqID_71091
ttgctcgtgcccgtaatcaggtagatggttctgtcctcagcttcctacattgtgtacattttagctgttaatatcttgctttagtaattgatgtttgttgaaggcaaaagtgcatgggtggcactttggtcaatagctagtagagaaaagaggtgattttcagaatgtgggctattaggagcctgcatgggctcctaatgatacactggtatggtgaaactaaataccaataagtatatacatttatatttcagagatatacgaataactatagattaaatcacgagtgtaaatatctgaacaaaaactattcaatatgcccttttcatttgtctcatctgaactctactagaggaaggtattcatccctagattgcatcaaaaattcagttgatcggacctaaattgtgtaaaaataagcccccaatcacattaaaatcagcccccaatcatgtgttcagcaatcaccaccagtctccaggggccagggatgctgtgtgagctcctctaaatgtgggctagttaggagcctgcagtgggctcaaggc

SEQ ID NO: 5118 - DNA, 479 bp, Setaria italica
  Peptide Sequence Number=SeqID_71092
cgaccccgcgccggacgcgaagggcgaggtggcggcgttggcggggtcccacagcctggagcagaggtggagcacgtcgcggtcgtgcggcgcgaggcgggccgggtcgagccccccggcgacgcgggcggagacgctgcggtacttgttcttgaggcggcggagcttctcggagagctgggcgcgggtgtagggctggggcatggactcggagaagcggtcgtagaagacgttgaggtcgcgcgggaagacgaggccctgcgcgccgcagccgaggaggccctgcaggaagcggagctcgtcggactcggaccagatgcgctggaacttgaagggcggctgctgctggtcggatccgccgccgccgccggccgtgggggcgcggagcgggtcggaggaggctgggggaggaggaggagggggggcgaggaggacggccgcggggagcggcgcttgatggggagcttgcgcgccccggg

SEQ ID NO: 5119 - DNA, 2314 bp, Setaria italica
  misc_feature (1)..(51): n is a, c, g, or t
  Peptide Sequence Number=SeqID_71093
nnnnnnnnnnnnnnnnnnnnnnnnnnnnnnnnnnnnnnnnnnnnnnnnnnnagttcacgggcaaaaaagcagtaacccagttctgatatttacaggggaatagagtacaattccggggaagaaagcacaacagagcagctcagtatacatcctcccaggattagatagcagtactgctagctcactacaagcgacacaacggcaacttattgcactacacctctacactactagtagagtttattacggcacacagggggctaacagtatagactggtacaatacaacaaccatactcacggcttgacgtatttacagtcacgcgggatgcaacgtaactagccactgagggcagtccggcctccttccagcaagggagtagtatgcaagaacctgagcttggttaccaacacaaggctgctgtccatctgccatcatccgatatacgctctcggggctgagaggtgcgaactcgatgttccagaagggcctggccatgagcaggaggtcctggcctgttggagaggccctgtacccctccacccatatgtacctcagcgacggcatctggagaacggcgaccgccagagctcgctcgctgaagcagcagctcctcagctccagcttccgcaggttggtgcaccccattgcaaattggatcaaaccattgtccgattcgccgacgttgccaagcagcatgtattgtatgttcccactgaattgtccaatgtagccaaggcctacatccgaaagccctcccggtctcaggtagaaggcaaacctccggagtttggtgcaatttctcaatagagcacggacaccattgtcaagcggcaggtctgttacttccttctgttggtcaagaagaacaagccggaagtcatagagattcttgcagaaagtcccaatggattccagggctccgttggtgatatcagacacataggcagcaatgtactccagttcacggcaaccaacagctacagctgtcaagcctaactgagagactcctccttgctcttcttgacctgggtcatcctccccccgctcaattcggagtcttcgtagcttcttgcacgtatcagcaacaacttctagtcctcggtccccaatcacattcctcacctcaagaaccagtaggttggggcatttagcaataagttggcaatgatcttcagttgtgagcaaagtgtactgcaagtccagtttcttcagtgttgcagaaaatggaaagataataggcatctcatttttacccatgaaggtaagacttcccaagaagcatagtctgggtgggaattgaaccttttcatacttggtgcactctcctacttcagaaaatgctcctccagcaaattcttgtaatgctttggaggtttggagaaaaccaatcagatctgaaagatcacaatcactcatcttcaaagaaataagtgatttacagttctttgcaagaagctccagatctgatggctccactttgagatcagtcatgtagaagttcagtgtcacaagaacagaattgttgacagctagttcatggagccattcactgcccttatctccaattttgcattcttccagaaataaagttctcagagatctgcaagagcgcgcgaccaggcggagggcgtccgtggagaagtcggagcacttgtcgagcttgagcacctgcagcatgtggcctcgcgcgcggacgagcacggcgatgtcctcgtcagtgacggtcatgcggcgcaggtggaccgccttgaggcactcgagcgtcgcggcgagctgggcgacccagggcgcggcgtaggcgccccagtcctcgggtatgaggccgtacatggaggcgcggggcttccccttgagcgcgagcgactcgagccgcgggaacctggccagcagccgcgccggctcgacggcgtagcagaagccgacggtgacgtgcttgcgcgagagcgcgtcgatgcggtgccagcggcggcacacgagcgaggcggcctcccggtcgcgcgggtcgtccacgtagccgaacacgaggtgcagcgcctcctcggggacgccgccgctgccgccgaagctgagcgcgcggctcagccggcggggctccggcacctcgccacccatcggcgggagcggatcggctaccccgcggggccggatcgccggagatctaggccgagcgcgggcatggagatttttgctgccccttctctgctgtgatttccgcgggtgggcttgtgagaggacgggactatgggaggaggagaagcggagggaattattggagggagaagagaagcaaagcaaggctgcaagagtgagg

SEQ ID NO: 5120 - DNA, 291 bp, Setaria italica
  Peptide Sequence Number=SeqID_71094
cgcaatgcgttcgctcctcctccgcacgcgcgccttcgcttcgcggcgcctcctctcctcgcttgccggcgccggcggaggggacgggaccccgcgcactggctcggtatacgggttcggggacaacagtcacggcgcggtaggccagcctgccggctgccgacgcctacgtccccacgcccgtacccttcctcccgtcgtccgtgagcgccgtcgccgccggtcactaccactccctcgccgtatctgccgacgaggaggtatgggcgtgggggcgcaacgacgagggcc

SEQ ID NO: 5121 - DNA, 1882 bp, Setaria italica
  misc_feature (1)..(22): n is a, c, g, or t
  Peptide Sequence Number=SeqID_71095
nnnnnnnnnnnnnnnnnnnnnnacagcacagcaaagtcaagatttgcaccataatcatttgcatatgctcagtttacattcttgttccctagtccttgctaactgcacgtcattaaaaaaacaaaaaagctttaccagaaacctatataaaccaaaggaagtcggtacataaaccttttgtaataacccatcttacatgaacaagaatcatgctattttcaaaatataatgtgctaaaatagaatgcaccgaactagtcaaaactcagtgttccaaatacctttacttgttgcattctgtattgccagtagacagatttgctatcgacagttaagtcaacacacttgcactcgcttctagctccagcacaagccttggtgaaaagaatatatatacacaatgctgctggtatttttcccaccacactgtttccataaaagatcagcaatacaccatggccttctgagtacctattgaaagatttcttctgtatatgtgttctaaaccaaaatgaagattcttggctggaacttcagattgtgcaactataaaacatcaaggcaatggagacagtaacggttaaggatcttctcaacaagactgttggactcaggcaccagcgtagatgtaatgccgttccaaaaatggaaagtggtggagtcattcacaatcctagaaaagattgcatcatggtgtgctttctcgaccatgttatctggctctgaaaaatatctcataatattggtagaacttatagggtaaaatgtagcagagggttccaattttgtgtcaaggtgccccatattttcatctgccttgctagacagattgcttattactcttgtcataagttcagcaccattccattgcaagagggtatcatcatatgtcgaatagaactctttaaggcactcctccaataaagggctatgcttttcaaatgctagcacagcgccactataactggaatttccaggtacatggtttgcggcaccaatagtattccggagcgatgttaaaggtttaagtacaataacatcagagtcaaggtatattccaccatatttgtaaagagcagcaaggcgtactagctcactgtagtgcaacgggtaatattttgtctgccgccattcataccacactgatgcaaactcatgagttggagtgctttccaaaagttcgtcaagatccggcactgcaacagcaactttatatccttccttcacaaattcccggaaggattctagctccagcgtctccgatagcatgactacacaggcttccaggtgctgcttgagcaggctctcgagtccacgctggtgtcggacaccatacgcccactgtgggctgttccagaccatgaacaccctcatggagcacttcccaagctcgaagaatctctccatgaactccgagaaccccaaatgtggatcaatgccagggaaatatccccacctcctccccttctgttgcttctccttcacagttgctctcatgccctgcttgttctcgtaagattggagcctacgccgctcaaaattcttggacgcgggcttgtcgagctcagctagtagcatccgctgcaccatgcggtccccacgggtgagggaggtgaggccggggctgtcggggtcctggagcagcgggtgattgcgcggattgagggactccaggttggagcggagcatgcgatcgcgccggaggtagtcggccttaccctcgagccaccgcgcccacccagcccggagcctcgtctcggcgcttttggcggaagcgggcttcaggagtagggcgtcctcgatgccggcgatggacgagatctccacccgcaattccagatccaccagctcgtcgtccgatccgaaggcggcggcgcgcctcg

SEQ ID NO: 5122 - DNA, 763 bp, Setaria italica
  Peptide Sequence Number=SeqID_71096
agacctacaagtacaacgtacaacctgtcgtagtgtcatgttcaggttccccttaccctcctctgtttctcgttgcttcgaattgaccctccgctatgttcttctctggcagttcctttctttgactccctttatggacgacgaagaagaaatatcattctgaaggatgaatctctaaccagactcatctgataattcatatcctttttagacgacaggtacattggcgaatagtgagctgtgagcgcagcaaagagagcatgcattgaagtggataatgtacagcagatccgtcaaaacctgttgctcacagaggtcccgtatacaattaggttggggactgactgtacgacggtgtcgatggggatggcaaagttcaccccggatgagatcccagatcctttacgtgtgaatgtagctgtattaacaccaattacatggccatatgagtcaataagtggacctcctgagttaccagcatttatagcggcatctgtctgtatagcaccacgaatcgctctcccattgggtgatggtatctccctccctaatccgctaaccaccccagtagttagagtgtgttcatatccataagggttcccaatggcaaagcaactttgcccaactcgcaacccccgtgatgtgccaatcagagcaggcctcagcttgtcaccatcaacatctacctgcggcacttcagtacagcaagatcatatgctggatcacagcctattagcctcccttcctttgagtaacttttgcc

SEQ ID NO: 5123 - DNA, 394 bp, Setaria italica
  Peptide Sequence Number=SeqID_71097
cgccgccttcaggaagcgcaaggcgaggctcgcgcaagcggacggcgccgccgtgccgctgcacgaagaggaagaagacgccgccgccaacggcgggcagcgtctgtcgcgcaccaaggggctccggtgcctggacaaggccgccgtgatcgtgaaggagcaggacagggagcaggagggcgagtggtcgctgtgcacggtgagcgaggtggagggcgtgaagatcctggtccggatgctgcccatctggttgacgtgcgtgctgtacgcggcgtcgctggggcagatgaccaccaccttcatccagcaggggatggtcatggacgcgcgcctcgggggccgcttcaaggtgcccgcggcgtcgctggtgtccgtggaggtggtgttcatgctg

SEQ ID NO: 5124 - DNA, 777 bp, Setaria italica
  Peptide Sequence Number=SeqID_71098
tccgccatctgcgtccagaagccgctcctcgagttccagcgcgccaagctcaagttcgaggaggaactcgccgccgaggccgcgcgggacccctccttcacctacagcatcgtgcgccccacggcgttcttcaagagcctcggcggccaggtcgacatcgtcaagaacgggcagccgtacgtcatgttcggcgacggcaagctctgcgcctgcaagcccatcagcgaggaggacctcgccgcgttcatcgccgactgcatctacgacgaggacaatatcaacaaggtgctgcccattggcgggccggggaaggcgctcacgccgctggagcagggggagatgctgttccggctggtcgggcgcgagcccaagttcatcaaggtgccgatccagattatggacgccgtcatctgggtgctcgatggattggccaagctgttcccggggctggaggacgccgccgagttcggcaagattggcaggtactatgcctcggagagcatgctgttgctggacccggagaccggggagtacagcgacgagaagacgccgagctatggcaaggacacgctcgagcaattcttcgaaagagtgttacgggaagggatggcagggcaggagctcggcgagcaaacaatcttctaggccttctccattgccggtttccggggaaggagcttgtaaattctggttcgacaatgtagagaggtgaggtttttgacttgctgatgatgcaaacacagcctactatttgattgtaccatagtcaatgcattg

SEQ ID NO: 5125 - DNA, 349 bp, Setaria italica
  Peptide Sequence Number=SeqID_71099
ccgatgtactcgacgagcttgtcgatgcgcttctggagctccggatcagcagggggagcggccggcggcggaggagcggattcgaacggcggcgggtgcatgtagtggtggtgcggcggcggggagtgcgtcgacatgacgtgcggcggcgggtgccccccgtaagggggaggcggctgctggtgcggcgctaggtgcgagtaggccggcggcatgggacgcgcgtagggcgcaggcgggtactgcgggagcggagcgccgtaagggtggggtgggtactgaggcggcggcgcctgcggatggtagccgccgtactgcggcggcggtggctgctgcgcctgcgcgtacg

SEQ ID NO: 5126 - DNA, 248 bp, Setaria italica
  Peptide Sequence Number=SeqID_71100
ggactcttctcaagtactgcagacacaaggttaggttagagggttccgaccttccatctacaagaagccatcggcgctgctctgttctgtttctcctggctcttgccatcgtctggtagctctggttcaaaggtggttgccgagaatactgtcggttggacagtggaatagtaaaatgttggacaaaacattgcacggatgcctgcttcttctcgtcgtcctcctcgctaacgcatcaggcagccatg

SEQ ID NO: 5127 - DNA, 1735 bp, Setaria italica
  misc_feature (42)..(42): n is a, c, g, or t
  Peptide Sequence Number=SeqID_71101
ccctgaaaaacataggatgtgcgcttgtgcagccaaggatangttttccatgtagctagatgtttcagctttaccaaccgttgctgagattaagaagcacacacgcaaaaaagatggtggtattagttcatccccaacaaaatagtgtcatttgatcctgacctcctgagtcaggagtcgggagtgggattagaaaattcgcgtctgactgtgacgcacgcgtatcactatcctcgccttccaagagtcgtctcttgttcggcttctgttgcatcatgccatcatggtgggtatgttatgtaattcgttccagaaggctgcagggctaaagaaagtagtagaatttgacgatcgcaaacaaaaccaaccatgaaacgcatggtgctcctccctattgtcacattgtctatacctttcaaaaattttgtgcactgcaatccgaaaataaaaaccaggacgttgagggtgtttttttaacaggagcacattattggatttacatctctcctgcatatctttggaaaaaaagaagaagaagtaatattgtgtgcaaaccaaaaaaaatcaatgtgatcatgctaaactctgtttgctatgattccttgagcaacttgtttgctgaattacttgccctagctttctctccaatactcatttgactcatctgatgtcttttatgtgcctcaattagtctatctgatgtatgcattggcattgtcatcgtagcaggtggttgccgagaatactgtcggttggacagtggaatagtaaaatgttggacaaaacattgcacggatgcctgcttcttctcgtcgtcctcctcgctaacgcatcaggcagccatgctgaaaccaccgtggattcagagcaagcgttggcgccggccttgccagattcagatgaaggcaagaggcgatccctggccacggggggcggcatgttctgcgtggcgagtcagggcgcggacccggcggcgctgcaggcggggctgaactgggcgtgcgggccggggcacgcggactgcacggccatccagccgggcgggccgtgctacaagcagaacaacctgcaggcgctggcgtcctacgcctacaacgactactaccagcggagcgccaagaccagcaccgcctgcgacttcaacggcaccgccaccgccaccaccacggatcccagctcgggacagtgcgtcttcacaggaagctccatggcaggaggtggcactccgacggcgagcgcccccagcggcctgtccccgttcacgccgggcacgggtggcttcggcaacggatcgtcgtccttcggcagcccgaccggcggcctggtccctttcgatggcgcggagagcctcttgtccggcgcccggtgggcggtctgcgtcctgctgctggctctgccgctcttcttcttcttcctctgaccagctgcggatgtggattcaactacttgctagagcgtttacagctacaacgttttgttcttgggtagattcgcttgtgtggtgggtgtacatgctgtcaggatcgcgtttggatgtgttgggagattacataagctgctgcacagatggatcgtctgtggactggactggactggaccccgtcatgttcccatgtattttggtcttggattcgttcatggtagaaccccagatgtaaatgaatcatgtattcatgttgcacacagagatgatgactctacatgtacaagggaggaaggcacaccaggctaggat

SEQ ID NO: 5128 - DNA, 255 bp, Setaria italica
  Peptide Sequence Number=SeqID_71102
ctcctctgatctctccggctctccccccgctcactgccatggatatcctgggcgctctcaagctcgcggcgtccccacccgccctcgccggcgccgcgctactggcggcgacccccgcgcgctcctccgtgcacttccacctcgccaatgccggcgccgccgctctcgtcgccgcctcgctcctcgtcgccgacccgtccctcgcgttcatagtcagccttttgctggttcaattcgatctcgcaaagattttgg

SEQ ID NO: 5129 - DNA, 828 bp, Setaria italica
  Peptide Sequence Number=SeqID_71103
aggaaacagaaacaagcagctccgaaactcctctgatctctccggctctcccccccgctcactgccatggatatcctgggcgctctcaagctcgcggcgtccccacccgccctcgccggcgccgcgctactggcggcgacccccgcgcgctcctccgtgcacttccacctcgccaatgccggcgccgccgctctcgtcgccgcctcgctcctcgtcgccgacccgtccctcgcgttcataggaggaggcccgtacgggaagcaggtgacgcgggggcaggacctcaccggcaaggacttcagcggccagacgctcgtcaagcaggacttcaagacgtccatactgaggcaggccaacttcaaaggcgcgaacctgctcggcgcgagcttcttcgacgcagacctcacaagtgctgatctctctgatgctgatcttagaggcgccgacttctcgctggcgaatttaacaaaggtcaatttaacaaatgccaacttggaaggggcgcttaccacaggaaacactactttcaaaggtgctaacataactggggcagatttcaccgatgtcccactgcgagacgatcaacgggaatacctctgcaaaatcgctgatggagtgaactcaaccactgggaacgccacgaaggagactctgttctgcaactgatcaacgagactactgatttagcgagtgagatctatttccgcaagcacgtgaggattgtaaattgagttatagagaagagaggatgctgtaaagtatctgctggtaattacgtgtaaatccacggcaaataataaagtacgcgttaacgtttaaaaaaaaaaa

SEQ ID NO: 5130 - DNA, 704 bp, Setaria italica
  Peptide Sequence Number=SeqID_71104
tacatttttgttgataagatcagatgcttgcaaaagacgcatgaaaccttcgaagtttctatgctcgacgcatgaagttgaccttacattcctgtacccgatttttcagtcttgtgcatggtttggtgatccttgaatcttctcttgctgcagtccatactgaggcaggccaacttcaaaggcgcgaacctgctcggcgcgagcttcttcgacgcagacctcacaagtagtgcatttgcttgctaacgtcgatggttccagttcctcctcgttggaaattttatgatttggttttggttgtgtgacttactggatatgtttgctgacggattcaggtgctgatctctctgatgctgatcttagaggcgccgacttctcgctggcgaatttaacaaaggtcaatttaacaaatgccaacttggaaggggcgcttaccacaggaaacactactttcaaaggtgctaacataactggggcagatttcaccgatgtcccactgcgagacgatcaacgggaatacctctgcaaaatcgctgatggagtgaactcaaccacattgacagttgacatgcacagaccgtttctttttttttgaaaaattagacatgcatggactaatggtcatttctgccaattaatgtgcctactaatgtgaaatcaaatcacttgtgcatcagagtgaactcaaccactgggaacgccac

SEQ ID NO: 5131 - DNA, 1268 bp, Setaria italica
  Peptide Sequence Number=SeqID_71105
ctcgcagcgaatttccgtagccgcctccgaaaccctaatccccaaatcaaccagcccgaagccgcggaatccgcccgcacatcgtctgtcggcatggcgatcgcccgcaccggcgtgtacgtcgacgactacctggagtactcaagcaccttggccggcgacctgcagaggatcctttccactatgcgcgagctcgacgacagggcacacggcattatgggtcagaccaaagagcagatcaagtatctcctgggagtatcgtcccatgggtatgacaggccaaacatggatgatgatgaatcagagaggatgaagaaggatattgaagctagtcaggacaatgctctgagtctctgcaccgagaaagtgttgctggcacgtcaagcttatgacctgatagagagccatatcaaacgtcttgatgaagacctgggccagtttgcagaagatttaaagcatgaagggaagatacctccagacgaaccgccagtccttcctccaattccggtggttagcagggatgagaaaaggaggcttggttttagtacacctcaagcatcaaagaaatttagagagagggagtgggacagggaaaggggtatggactttgatttaatgccccctccaggtagcagcaagaaagcaggtacacctatggatgtagatcaaatgattgatccaaatgaaccgacgtattgtatatgccaccaggtttcttatggcgatatgattgcctgtgacaatgagaattgtgaaggaggcgaatggtttcattacacatgtgtgggtttgactccagaaacgagattcaaggggaaatggttttgcccgacatgcaggaatcttcaatgagggttttcctaagttgtatgtttgctcaacagcggcaaggatgcaaatggttccttatgtgttggcctgggacctgaattgggactgaaggagtggtgatggtttggcccaacatgcaggatcttctacccgaggttgtccaaagttggtagggtgcaaaacttgtcacaacttggagctgttgcttaaagtgagcttgacatggcccatgggaggcttcttcatctttttagtaatgtacatgcttggcagggacggggatttttccttgttcagaataacatatgggatctagaaatgtttgtagttgtgataagaaacgctgtgttgttccttggtgctgctgaccacattgcatcttagcatcatcgcattcgacatctgttggaaacttacaaggttaatgttaaaaaacg

SEQ ID NO: 5132 - DNA, 2119 bp, Setaria italica
  Peptide Sequence Number=SeqID_71106
cttttgtaactcaaagaaattaaatgatacttcatgaagcccatcatgtaagcaacgtatcaaacaaaataggcactactgcagatctttttgaaaatatatttttgaataaaggtagtcaaaattaaagaagtttgacttagcacagctaaagtaatcagtaagttggaacgaatggagtacaacatatggtaagaaaagatctagctaccaactactaattacaaaatgtcacctcagaagagaacggaaacgctcgctcttgcatatacgcaaaccaataagtgcctcaagaccactcccgtcctgtccacgccagtaggtttacactttggttccttcgagcaggcagattgtaaataccaaattgagcatatgaatggcatgcaaaatatggaagcgagcaaactcaattgcctagcagtggtatcatagccggatttgccaagtacgactagatttcaggatcctcatattcattttctactttaaccagccttccacgtacccatctcatcttatacttttcctcagatgaaggtgtgtcttcttccagtgtccccggaggacaatcttctcttgtttcggcattttctgcagacctgggagcatcttctcccagtgtccctggatgatctgttgattcagctgcaatgcaatcatgatttgccatatcattgaccattgattgcctaacttgaaaatctattattccaaaatctccattcacacctttaatctttgatgaagctgaaggaagaagaaaagctctttccatggaattctctatcctttgataaagttgttttattccggtgaatgcagattcatcgaaatggaaaccgatgccattaacattggttggcggaaattttatcccatttacaggtttattctcttgctccaacacattgctttcattctgtgtctccagtctgtggtcgtagtccaataaagctgagtcctctgacgtatcatcagaagcattttctggaggcccttcaagatcaacacattcaagtgatactcttgcctctgtaacaagctttctagcttctataagtgatgcttgagcaaaagggctcatcgctgcagcagtttccagagcatcagcagccttttctgcttctgcaatcagtgacctggcccttttaatagcttctttcttttctatttccagtgctgccctttgagctcgaatctttgataacatctccaatttttcacctgccatcggatctttgtagggagttgcacttttctttctcttaacagttgccccttttccgagagaatcctctaagattacagctctggcttgcaaatatttcttttttgtagtctctctctttacacctggttcttcagcaggtcttggttttcttggtgttttagtgccagtagatgatccatggtagctagcaattccactacaaacacgttcacgatattcttgatccaaccactttgcagcaatggcttctgcaatttttctcctctgctcaggagtttttggtgctcgtctgttacctcctcttggcctcggcattgatctccttttctggtgattctccaaccactcttgccgcatttgctcagtgatgattttatatgaattacattggaggccaactccaccagcaaagccctttctagccgcatcagctaccatgtccctccactccacaaagcagccatcctgcaccattaatctctgtagacgcaaactccaacctcgcctcactcccgctgatatctttactcgtgtctcctcactctgtgcatgtcccagattcatcagctttttcttaaccttggggtcctgcatcgcaatcctggttctctcccgaatccgctgcagcgtctctgggctgtgcttccttcccttgttccacggcgtgttacccttgttcgcctgtgatattcgcatccgcctgagcctctccctctcgtccacgtcctcctgctgctcctccgtcaggagctcgatccccaccgcatccgcgccgccgtccagcgccagcgccagcgccgggcccgcgtccgcgaccactcggaccgcgccgttgcaggggcgtcgcgtagggacgaggcgcaggagccgcggccgcgatgaatc

SEQ ID NO: 5133 - DNA, 2307 bp, Setaria italica
  Peptide Sequence Number=SeqID_71107
aaaactaatgtcaaaactcataagtagatggttacaactaatagttttctttttacaccttccattgctaactatgcttccgaggaacaaatgataattggattcttgtcttgcttactttcttctacatttttgcagttaatgtaaatgaaatatgtatgagttgttcaaaaagataagcaatgtcatggttgatgatggcttgattaataaggtatgtagcttctgctattttctttgaatggagtggctatggatggaaattttgttatccgcgaagtcatgatgcctaatttcaatagtttttaacacactcaaacattttcttcaagtcatgtgttgcacaacatttatttaagttatccaacatctttttaaatgcaccaacatttcttgatatcgatcagcatttgtttgacatgcacgaacattttttctatggtattcaaacaatttttatactctaaccaacatttttcttgagaatgaccaacatttctttacatacacaaacattttccttttacttatttctggacacacaccaacacttatagatattgaccaacattatttttacataaatcaacatcttttatgcttgcagaacatttttccacactccccaacaatttattttacatacaccaacatttttcttgatacaccaacatttcctttaaataattcaacatttattgatggctgccaacattttttgaccatgtaccaatatattcttaaagctgttttgaactcttaccaacattttagaatctattcaatttattttgaacacatctccaacatttcctttatatttctcaacatttgtttcctaaatcaacatttattgatgattgcccaacatttttcctcaatctccaacattttcttgaccattatcaacaattttttcatgcgcagttttttcttgaactttattttttttaatattatccaacatttcattgacatacactaacattttcctttaacttattcgggacacatagcaccatgtcatgatgttgaccaacaatttatctggcattcaccaacattttgcttgatagaccaacattttctttacataattcaacatttttttagcatataccaatatattcttaaattgtttgcccaacattttttacatactccaacatttttccaataatagccaacttttttttgacatgcacccaacattaatcaggaacctcactttgtaagttagggtagggtgatcatgatgcatagtcattttcgtaacagaagctcaaaaggtctattatgacatattcacttttgatattccataaggatagtagttgttcatcttattttgttccaactcctcttttacaagtacaacaaattttatgaaaagttcatcgacatgctactttaattcaaatgttgtcctctaccatttgctttccaggtttgtcacaagtttcctatcaataattatctatgttttatattttaattgctatgataaaaaactgcatctttctaacattttgtaaatttctaacatttacaactgcatgtccaccttttacgatgttcaccttttatgatgaatgtttccaacatttctagtttccataattttttagttcaacaattttttagtttctaacgttttttagtttccaacatttctagtttctaacatattctagtttccaacattttttattcaaaaaatttacacgaaaaggttcaacagatctgatttcaccctcgaattttctccataatgttcaacatttttttagaaatttaacatattgctgttcaacaattatcttgtcaaagtcattacgatattcaatggcgttccttttccacaacccaatatttctaaaacttactataattctacgtttattactaacaggtgctccagatcttcatgaggagatgattcattttagtgtggttgatgtttctaagttgaggatcaagtacacctaaagttacttagttaattattactgatttgttagttctcaaatttgtgtaataacaattttattctcacttctgtcacttctgttttttagttggacgtattagtatattaaacttcaaatttaagttgcaagggtccacccattagtatcctacttcaaaccacttcccagcaaaaaaagtaaaaaaatgcagcagtcagataggaactggtgtcacgctggaaaaaaaacgccctaaaaaagtaaaaaaaactcgaaggcgcgctcaaatataatagcgcgctgaacataaatcaaagggacgcggcgctgctatatg

SEQ ID NO: 5134 - DNA, 531 bp, Setaria italica
  Peptide Sequence Number=SeqID_71108
agtgacatgactcatgaggcagtagccttcattgtcgaggattgtggattctctgaagacaaactcatggctctactaggatgttcatgaggacccttgaggcttgtcttgctatcttgcccacatgaggagtcttacaggctctgtctcattcgttttgtatctttcaatgctaagctcaagtaaagcgtctggcttctctgtgagaagcgagcgaataatacatgaagcaatacatcattttttatactatattaatgtaaatgaaatatgtatgagttgttcaaaaagataagcaatgtcatggttgatgatggcttgattaataaggtgctccagatcttcatgaggagatgattcattttagtgtggttgatgtttctaagttgaggatcaagtacacctaaagttacttagttaattattactgatttgttagttctcaaatttgtgtaataacaattttattctcacttctgtcacttctgttttttagttgacgtattagtatattaaacttcaaattttaag

SEQ ID NO: 5135 - DNA, 474 bp, Setaria italica
  misc_feature (9)..(9): n is a, c, g, or t
  Peptide Sequence Number=SeqID_71109
atgcaagcngctttttcatcacgttgaagatcagatcgatccggctcaagtggtgcctcagtctacaagtgaattttttttttggtatggtaataatggcattcttctagatcagttaatgtaaatgaaatatgtatgagttgttcaaaaagataagcagtgaagtggttgatgatggcttgattaataaggtgctccagttcttcatgaggagatgattcattttagggtgcttaatgtttcttagttgaagatcgaatagaccgggagtttacttagttatttattactgatttgttagttctcaaatttctttaataacaaattccttcctacttgtgtttttttgttgggcctatcttgccaatcagatgtaaaaattatatattagtatattaaacttgaaaaactttaaaaaaaaaaaaacaaaaaaaaaacaaaaaaaaaaactaaagaagaactagaccaaggaca

SEQ ID NO: 5136 - DNA, 1421 bp, Setaria italica
  misc_feature (76)..(76): n is a, c, g, or t
  misc_feature (1350)..(1421): n is a, c, g, or t
  Peptide Sequence Number=SeqID_71110
ggatctgcaaattacagtatccagcatccatgcatctgtacccatcaagccgtctcatgaaaaggtaccgtgttcngtttttagctgggaattgaccgaattcggaaatgaagatgccttgttatgctctaacaacgtcgcagaactgaagcagttatcttataacagactcagtctctactatcttcagctttttcagactctctaagccactcctgaagtttcagttcttgttcttctttgaacttattgtaagtctccacggttttggcaatatcagtttcctcacattagtttgtgctatctcttgatgctatttgcgggctgagccctttgcaagtacaagataagggataatggatttgtatcttaatgtttttcagttctagttatttggtgattgttattgtcagaagctcatcttatttttattctttagtgacatgactcatgaggcagtagccttcattgtcgaggattgtggattctctgaagacaaactcatggctctactaggatgttcatgaggacccttgaggcttgtcttgctatcttgcccacatgaggagtcttgcaggctctgtctcattcgttttgtatctttcaatgctaagctcaagtaaagcgtctggcttctctgtgagaagcgagcgaataatacatgaagcaatacatcattttttatactatagtaagccatctaggctctctacatgtctagcactacctcgagtacttactaaattcattaatttttcggtctactaatttttgtgaccttgataaacactttatctatgaatcaaccatgtgacatcttcctaccggattgggttacaactaatagtttaatacctttacccttctagatcatcatgcccctagccatgtcaaattatttaagagcacatatcttgtgagaactagctaaacttgaaaactatgtcaaaactcataagtagatggttacaactaatagtttttctttttacaccttccattgctaactatgcttccgaggaacaaatgataattggattcttgtcttgcttactttcttctacatttttgcagttaatgtaaatgaaatatgtatgagttgttcaaaaagataagcaatgtcatggttgatgatggcttgattaataaggtgctccagatcttcatgaggagatgattcattttagtgtggttgatgtttctaagttgaggatcaagtacacctaaagttacttagttaattattactgatttgttagttctcaaatttgtgtaataacaattttattctcacttctgtcacttctgttttttaagtggacgtattagtatattaaacttcaaattttnnnnnnnnnnnnnnnnnnnnnnnnnnnnnnnnnnnnnnnnnnnnnnnnnnnnnnnnnnnnnnnnnnnnnnnn

SEQ ID NO: 5137 - DNA, 1463 bp, Setaria italica
  Peptide Sequence Number=SeqID_71111
ccgcaccggcactggcggggacagggagacgctggcggcggtgatggcgaggagggcgccgacgccgtcgacgatccagtgggacgcgatgcgcgcggcggaggcggcggcgtgcgaggtggtgctgcgcgtccaccgccaccaaggaggcagagcgccaccgccaggacgtcatcggctacctcaagcgcatcggctcctccgtcggctgtgaggtacgtgctcccgtccggctctccctccctcccccacggaacctcactcagatagtcagatgcattagtttgtgctatatcttgatgttatctgagcttgcaatgagatctgacaaatatagacgccccttttcttgatgcaagtatattcaggctgtttcagaagcatatctcactcgacactagcagtacaggtgtaatcgtgttaggtaaaaatgcaatgttcttcaggctgtttcagagtacactgatgaccattagatttcacgatcaatatgacaaaaaggatctcgcaaattacagtattccagcatctgtactcatcaagctgtctcatgaaaagtaccatgttctctgtttttactgggagtttactgaattcggaaatggagacgccttgttatgctcaaacaatgtcgcagaactgaaggagttgtcttataacagactcagtctctattatcttcagctttttcagactctctaagccactcctgaagtttcagttcttgttcttctttgaacttattgtaagtctccaccgtttcggcaatatcagtagcaggcaagcccttgttcgtagtggatgtaccatctgacagtcgacttgaaatggggacctcatccctttctgtatctggcattgatgcaccttgtccatcagcttgggatgattctggggcagcagatgatgctgaattctcactactgtcatcttttgttgtaaaatcaggctgtggccacctgagactggacgccttctgcttggcggtgttgaacattgaagagaggtagttccggctgctacttccattggtagcacccaactcctcccatgttcctgagcttttccctgattggaaaccccaactggggttctggatcaaccctctctttggttgggtctttgacattatttgcagcgatctatttatgtccttgatcatatcatcagcaagtggaagtccaaaatcagccatggatctcacggcacaaattgaatcctccatgtcttctgtgtgcagtgttacctcatgagtcttttccacaagtttacccttgacatcgaggaggatgggcatggacgcccgggagtgttgctggacgaagtagagcccgacggagggctcgttggcgacgtacttgatcatcccgtccacgccgtccttcacgcagaggaagccgtcggcgggggagaggggcagcgacgactcggcggcgacggcggaggaagcggggcgatggtgc

SEQ ID NO: 5138 - DNA, 1077 bp, Setaria italica
  misc_feature (1058)..(1058): n is a, c, g, or t
  Peptide Sequence Number=SeqID_71112
cgtagaataggtggtgacggttttcagggaccataaccagctgcataatgcataactgattcatatcacatcctagatcgcacaaagcaaaagcacaattgtaaattatgccatccttctcaaagatgcaccccccatctttctcaagtttagagtccttgtgcactgctctcttaccagcaagtttaacctctgcagctaaggtctctatggcctcctcacttggatcaagctggcccagaggtagtcctcggccttccggaacaacatcagaagcaatatcataagcagctaaaggttgaacttccttcttctcgatactatccattatccagttctcgctaacaacaggagtcccacgctccagcgcttcagcaaatcctccagagccacctttatctctctcagcaggagaagcaaccacacaggtaacaccaagcacagaattgttgaccttccctccatgtttcgttatctgctccttgaagtaaccatgtgagcgtgacatccgtccagacaaggcaatcatcatgccagagaagatgtgggcctcttcatcaacatcacgtttaggaaactcctttccctcttgttgcttcagccacttgtggacaaaatcatcttttatgtcctcaggaacttctatagggccactcttccttggaggatcattagtactgaaagtgcagtgggcccactcgctgtaattcccggtgcacttgtatttccaccccttaaactcaagctgaccaccacatattgggcacttcttgaggggtccatagaacatcatatcctcacatcgtgcaacaactgcatcctctgatccagaagcatcttgttcattggcttgaaggatcttgcgcatgtcctcaacagagaggtgttctcctatggccttgcagaactctgtaaactctcttgcagcagttcccttcccattaggctcagattcttcagctttgagcttcctgttcttcattggtgcctctgattctccatcttgccctttattctcagcagacttcttgttcttggaggttacatgttggcccctntcctggtctttgctctctg

SEQ ID NO: 5139 - DNA, 351 bp, Setaria italica
  Peptide Sequence Number=SeqID_71113
gggtcggagaaggagaggaaggacgagggtggggtctcggatccggcggaggtgggggagagcggggagatgcgctggtcggggtcgctccagcgcgggacctggtcgagcgtcacggccggctccaccccgccgacgcccggcgccatggggacgccgccgccgacgaagccgtcggggaggcggaggccgacgccgccgacggcgagcggtgctgcatggctgtggccggatcagaaacgcgaggtcatggggattactgagcgcgagagggagatgcgttcgcgcgcgaagcgggaggaggcggaggtgactggtgtgggagaagctttgggggatcgaatcgacgag

SEQ ID NO: 5140 - DNA, 565 bp, Setaria italica
  Peptide Sequence Number=SeqID_71114
acccgtcacgccactcggaccattgcttccggatgacgtggagggacagcttgtgccatgtgagggtgaagaccaccgaactagcctccatcgggtctttagatgatgacagctgacacctgtactattgtcatggtgtctcacatttctgctgtgtgcaagtcaaacatcagagagaagaaattgttggagggagggagttttgtagcacagaggggaatccgtggtcttacaggttggcctcggtgtagaataccacatcctcaccctggtttttctgtctagggcctgcggcggagcgactcgactgtgtacataatggagaccacattgatccattactggaagcatggccctgagaagacatccatttggggggcctttgtgtagcttatcagaattaggtagttatatgcagtagatcttaggcaaaatgtcatgtttgtttttcttgtttgagatgtaatgtagtggatgggctcaaacagtatattcttttgatctcaatcattgctaattctttggctgttgaggttggaccttggaatgtaagacaaagttggtt

SEQ ID NO: 5141 - DNA, 1850 bp, Setaria italica
  Peptide Sequence Number=SeqID_71115
cccatccactacattacatctcaaacaagaaaacaaacatgacattttgcctaagatctactgcatataactacctaattctgataagctacacaaaggcccccaaatggatgtcttctcagggccatgcttccagtaatggatcaatgtggtctccattatgtacacagtcgagtcgctccgccgcaggccctagacagaaaaaccagggtgaggatgtggtattctacaccgaggccaacctgtaagaccacggattcccctctgtgctacaaaactccctccctccaacaatttcttctctctgatgtttgacttgcacacagcagaaatgtgagacaccatgacaatagtacaggtgtcagctgtcatcatctaaagacccgatgtaggtcagttctgtcctcctcaccctcacagcacccttgagccagctgcacgctttcagattagcaaggtcacccgtcacgccactcggaccattgcttccggatgacgtggagggacagcttgtgccatcttcgagcaaagtccatggatctacctccatctccggatcatgagaaggcaataccgccttgcttctgctcgagacattagtaggcacccaactcacagaactgcttttctgctgaggacctgcacccaatatacagctctggagtggtgttaatgcagccaacgacaactgaggaggctggcattgtatagaagggtgccgacatggtggcagaataggcatggctgcttggatcctccgcctgatagtttcaggcaactccatgtgatccaatgcagactgcaagccctcagctgcttcattatcaaatgcggagaagtctctttgagtcctaatggtcgacttagaggctggccttgacttcagccaacttggtttgcagctgccaagcagtgcatggagaacacataaaagcctctcaaagagactttcaccagggcgatcaagcaggacatccaggggaggctccagcaaggaatccacttcccgccttaaagcaattgcattggtaggaggaaggggcaaatcagcatcttcataaatcatgcgtgtcgcaagcaggcccagaattgcagaagcaagtgtatgcctcatgctcctgtctgccatgattactggaagcaacctaataatgaattggagtcgtaaccacaacgcagcccgcagagcagatgctgaaggaggacttggatcattaccaactggagctcttctgccaatatttggacttccaccacgaattcctttacgaccactggatttgcttgatggcatttcatttcctgaaggaactgaaccagcttgtttagcaccatttcgtgttactgctttgatatgatcactaatagtccccatctgtttgatcaaatcacctgaaagtataccacggatatcggcagaacttctgtcgatgcatggcaatactaattcagcaagggctttctcagttaaatatttatttatagatctaatcccttcaaaacttctatcaacactatgggatggagtcttgacaggccttttagcatcaacagtgtcatccacaacttcaccttcctcaattgatgtgacctccaacttcctttttgcagttttactagcaatgacatcactaagcaagctggaccaaccccatggtttccaaacttgtgcctttgttgaaagcccttttcgttgggcaatatgaacaagctgctgtctagttgacctgcgcccaagaatagcatcttgcccttgtaagatccattttacatccatgacaagtgactcctgaagctttccaagaaggtggacaacttctgagtagagaggagcagcgatcaggtctagc

SEQ ID NO: 5142 - DNA, 868 bp, Setaria italica
  Peptide Sequence Number=SeqID_71116
tagccattattaacattccgccgcctctttgaatgccgtcctcgccctgatggatactcattgctacttgaaaaataattgtatatgtagttctcatgttttcttttcgatttttctaaggcctgtgtactgtaaccatttgcaccagcagcacctgttgtcctggggtattgattgaactggaaactttggttattgtacgactcataagtgttctcttgttggtatgctccatgtcctgtgcctggaatgcttgaggttctgcttgctgactgatacgaatgatcaacagtagtgtgattcttttgctgctgcgccttggtcgtccaggtgaatgacgaactggttccattgcagggaaatccagtttctacagccatgaatgcatggtgacagtttgggcacagaaggttgtggttcagataaattctcaagtactcgtactgcatcctgcagcggttgcatgatgtccagaatgtgtcagcccctgaaggacaagtagtagcctcgactgctgctgaggcagcggctgcagcatttttccgtgctcgcttattggccttcatatcacaagcatacaaaccattggtcccattgatggctgaatgatctctcctcttctgatcatagagcatcttcctgctcttgtcagacaacacactccatgcctctgagataagtttgaaggcagcctctgcgccaaccgacttgttcttgtctgggtgcaactggagagctagctttctgtactgtttcttcacctcctcctcatcagcccaggcagtaagagacagtatcctgtaccaatcactctccccatcaatcttcgactcagacgcaaggtgaacgtcaagcgtcgagatcatct

SEQ ID NO: 5143 - DNA, 165 bp, Setaria italica
  Peptide Sequence Number=SeqID_71117
gcgtgtgaagtgggagaaagtagatggaagatttcaactcaaggagatccaaggatcagaagaaatcatcgaggcagatctcgtcctcctagctatgggattcctgggctttgaagtttgatcggttgtccttctccagacccagtttttcagcgatagtcgctt

SEQ ID NO: 5144 - DNA, 258 bp, Setaria italica
  Peptide Sequence Number=SeqID_71118
agatggtccactgccaacaatggccaccttctttctgcaataggaacattacattgtaaatgatcgtaacttggatactacatagcaatgcaactaaaagtaacagaaatttagagaaattaatcaaagtcatcaaaagcgtaaaagtaaatacccagttctttgaagtggaggccgtggtaccatccatccctcttcaaaacctttgtctatgattgcacattctatgcttttgatagacactggattttcgatgat

SEQ ID NO: 5145 - DNA, 281 bp, Setaria italica
  Peptide Sequence Number=SeqID_71119
tttacaagggccagcttaagccgtgccaacttaaggggtactactatgcagacctaggtcatgaaaacttcacgagttatatggctctggtaaatacaaaaccttgatactattacgcaaaaatgtcatgatcatagtcggcggatgggaatcaataatagcaaggccattgtaagatcaagacacgctcctgtgcaggcatcaaactttgaattgtcttaccgtcactgctctactcatatgctatttcagtcctggttgttgatgccttaaagtgaagt

SEQ ID NO: 5146 - DNA, 4992 bp, Setaria italica
  Peptide Sequence Number=SeqID_71120
ctagcccggaggagaggtcaaggaaggcgagcgacgctcgggaggaagggcatcccgcgacagaggcggcgcccccgctcccaccaactcacacaaccgatccccctccccgccgcgccgtcgccggggacgcgcggggggcgagccgccaaaatctaagggaccgatccccgggcgtgagccgcgaagctatcggcggagaagagatcgggggcacgcgctcgccggcccgcatcctccggttccggccccaggtggagggaggctagacgagagagagaggtaccagagcgaggcgtgcggttcagccatgtcgacgacgcaagggacagcgttgaagtcggcgccgatgggcgcaggccgtcgggcccggcgaggccggcccgtggcggcgccgtaccgttccgggtggcaagcctacggtggcgtctccctcgagggcagcgggttcctcggcggcgggcagcgcaccgaggaacgcgtagtgccgcggggcgccccgcgcggtgacacgcgacgctgaggtcgtcaggccgctgtcgaagctccctgacagcagcattgggctctacgacccctcgttcgagcgtgacgcgtgcggcgttgggtttgtcgctgagctttctggagattacaaacgcgagactgtcaatgatgctattgagatgcttgagagaatggcgcaccgtggtgcttgtggctgcgagaagaacactggagatggtgcaggcatcctggttgctctgccacatgacttcttcaaagaggtcacaaaggatgttggatttgagttaccgccaccaggtgagtatgctgttggaatgttcttcatgccaactgatgaaaagcgtcgcgagaaaggcaaagctgagtttaagaaggtcgcagaatcactgggacatgttatactcgggtggcggccagttccgactgacaactcagacttgggtgaatctgcgcttgagaccgagccagccattgagcaggttttcatcaccaagagttcaagatcagaggctgagtttgagcaacagctatatattcttaggagattctccatcaggtctatccgagctgctctggatattcggcgtggaggagagagggatttctacatgtgctctctatcttcaaggactattgtttacaagggccagcttaagccgtgccaacgttaaggggtactactatgcagacctaggtcatgaaaacttcacgagttatatggctctggttcactcaaggttctccacgaacacctttcccagctgggaccgtgcgcagccaatgcgtgttttaggccataatggagagatcaatacccttagaggaaacaagaactggatgacagcacgtgagggtctcttagaggctgagaagcttggcttatcaaaggagcagttgtcgataattctaccaattgtggatgctacctcttcagactcaggtgcatttgataatgttcttgagcttcttgtccgaggtgggcgaagcctgccagaagctgtgatgatgatgatccctgaggcatggcagaatgatgcaaatatggatcctgaaaagaaagctctctatgaatttctgtcagcacttatggagccttgggatggacctgctctaatatcttttactgatggccgctaccttggagctaccctggaccgcaatggtttgaggcctggtcgattttatgtgacccacagtggacgcgtgatcatgggtagtgaagttggcgttgttgatgttcctcctgaagatgtactgagaaagggcaggctaaaccctggaatgatgctattggttgattttgagaatcacacagtagtggatgatgaagctctgaaatcacagtattctaaagctcacccatatggtgaatggctcaagaaacaaaaactatgccttaaagacattgtagaatctgtgcctgaagtggatagagttgctccaagcatttctagctctttttcacaaaagaatgtggccaaggagagtgttggtgtcaatggaattatgaccccactgaaggcctttgggtacacggtagaagccctggaaatgttgttgctgccaatggcaaaggatggaacggaagctcttggctccatgggaaacgatacgccccttgcagtgatgtcaaacagggagaagctgacttttgagtacttcaagcagatgtttgcacaagttacaaacccaccaattgatcccattagagagaaaatcgtaacatctatggagtgtatgattggcccagaaggtgacttgctggaaacaactgaaaaacaatgcaaccgccttgcccttaaaggtcctttggtttctattgatgaaatggaagctataaaaaagatgaattaccgtggttggcgaagcaaggtgcttgacataacttatccgaagaagtctggaaggaagggcctggaagagactttggacagaatttgcgctgaagctcgtgaagccttacgccaaggctacactattttggttctctcagatagaggattttcctcagaccgtgttgctgccagttctctcttagcagttggagcagtacatcagcaccttgttgcgaatcttgagaggacacgcataggattgttggttgagtccgctgaacctcgtgaagtgcaccatttctgcaccctggttggatttggtgctgatgcaatatgcccgtatctggctattgaagcaatttggtgcttgcagaaggatgggaagattcctcctaacagtgatgagcaaccctactcaaaggaagagctggtgaagaagtatttctatgcttcaaactatggaatgatgaaagttcttgcaaagatgggaatatccacccttgcgtcctacaaaggtgctcagatttttgaagctcttggtctttcttctgaagtaattggcaagtgttttgaaggtacacctagcagaattgagggtgcaacatttgaaatgcttgcacgagatgctctccgtcttcatgagttagctttcccatcaagaacccctccacctggcagtgcagatgcaaaggcacttcccaacccaggggattaccactggaggaaaaatggtgaagtccacctcaacgacccacttgcaattggaaaattacaagaagcagctcgggttaacagccgggcagcatacaaagaatattcaaagcgaattcaggagctcaacaagacctgcaatctccgtggcatgctgaaatttaaagatatcactggcaagatatctttggacgaggttgaacctgcaagtgaaatagtgaaacgtttttgtactggtgcaatgagttatgggtcaatttcattggaagcacatactgcccttgctatggccatgaacaaacttggaggaaaatctaatacaggtgagggaggggaacagccctctcgtatggaaccgcttcctgatggttcaatgaacccaagacgaagtgccatcaagcaagttgctagtggacggtttggagtttccagctattacctgactaatgcagatgagctgcagattaaaatggctcagggtgccaagcctggtgaaggtggtgagcttccaggtcacaaggttattggtgacattgctgtcacaagacattctacagctggtgtaggactcattagccctcctcctcatcacgatatatattcaattgaggatcttgcacagcttatacatgatcttaagaattcaaaccctggagcccgtatcagtgtcaaactagtctctgaggctggagtgggagttgttgcaagtggtgttgtaaaaggacacgcagatcatgttcttatttctggacatgatggaggcacaggagcttcaagatggacaggtatcaagaatgctggacttccatgggaacttggattggctgagacgcatcaaactctagtagcaaatgggcttcgtggtcgagctgttctgcaaacagatggacagttaaagactggtagagatgttgctgttgcttgcttgcttggtgcagaggaatttggttttagcactgccccactgatcacacttggctgtattatgatgcgaaaatgccacatgaacacttgtcctgttggtatagctactcaagacccagtgcttcgagaaaagtttgctggagaaccagaacatgtaattaactttttctttatgctcgccgaggagctaagagaaatcatggcaaaccttgggttccgcaccattactgaaatggttggacgatctgatatgcttgaggttgatccagaagtagtgaagagcaacgagaaacttgagaacattgacctctcactgatcttgaagccagctgcagagattcgtccaggtgctgctcagtactgtgttgagaagcaagatcatggccttgacatggcattagataacaaactaatagatttgtcaagaactgctattgaaaagcaagttcgtgtgttcattgagactccaattcagaacacgaatcgagcagttggaaccatgctcagtcatgaagtcactaaacgttatcacatgaatggattgcctgctggtacaattcatgtgaagttcactggaagtgctggccaaagttttggcgcttttctctgtcctggaatcactcttgaattagaaggagacagcaatgattatgttggtaaaggattgtctggtggaaaaattgttgtgtacccaccaaggaacagttcatttagtccagaggacaatattgtcattggtaatgtagctctatatggtgctaccaagggagaggcatacttcaatggtatggcagcagaaaggttttgtgttcgcaactcaggtgctcaagcagtagttgaaggaattggagatcatggatgcgagtacatgactggaggtactgtggttatccttggaaaaactggacgtaactttgctgctggaatgagtagaggcattgcttatgtttacgatgttgatgggaaattcagtgcccgctgcaacaatgagttagttgatctatatcatgtggag

SEQ ID NO: 5147 - DNA, 448 bp, Setaria italica
  Peptide Sequence Number=SeqID_71121
ggcagccatgggacgccgcagttgccggagtccgggcacggagaccgaacgcgagcagcagtagcaggagcgcgagagaccatggacggtgatgacttcaccttcgccgccgtcccgccgcctcttctggcagcaggcggcggcggcggcggtcgcatgggcccactgtacccagtcttcggccggccgaggtccccgcctcggcctgcgccggagccggtgacagccaccgcgcgggtgccgttagggcggcttctgctggtggacagggaaccgacgccggcggaggacggcgacctcgactcggtgccggcggagatgtactgcccgtggtcccccgggtgggcggcggcggcggcgtccccggcgcggtgcaagaagagcggctccacggggtcggtcctccggtggcggccgcggctcgtcgggcggagccagagcgacggca

SEQ ID NO: 5148 - DNA, 773 bp, Setaria italica
  Peptide Sequence Number=SeqID_71122
tttttttttgttgacaatctcggctgattttctcctcatgttaggaaccaaaatttaccaccatcaattacagatttgttaataaaatggagaagaaaaaaagggactgggatttgtatgggaactacaaggataagttatctctcccctctgaaccctacagcatctagggtcacaaaacatgtatgatatatcagccaacaacagccttcctgcggtgcaattccgcctcattctggatgctggacatagtaagccccaaacctccacttctaactctgtttctatctcctcttcctttgcaccagaactgtccccccaaccaatgaactatacactgtccgggactgggctcaaaattcgccgccaccgcctcctcaagttgcaatatcagaatctatgtctgtacctgtatctaagctatcctcctgtatccgccggtaaaaaagaacataagctgccgatgtctttatgctgtcctcagttataggacccacatgacggtcatcaaagtcgtaccacccttttttcacttcatcataaacataagctgtatagtgaccgcctcccatgcttccatagtggttgctgatagcatacagtcgataattgtggggaatctgctggcgcctgtgaccgatatactttgacaggtcaagatcatgaatcgggaagtccacacatgtctccagtcttgtttttggtgtatcggctgtacgaaaaccttttaaggtgtattataaggatttccggtaacctccaaaggtctagct

SEQ ID NO: 5149 - DNA, 335 bp, Setaria italica
  Peptide Sequence Number=SeqID_71123
gaggtgaacaagaagtaccgttgtctggagattgatcttgatggcatatacaaaagaatgttacttcttaaaaagaagaagtatgctgctattaaagtggcactggatggcagcttacgcgagaacattgaacgcaaggggctcgatatggtcagacgtgattggagtttgctttcaaaagaaatcggagattttgcctaaatcaaattttgtctggagggacatgcgatgatgttatcgagtcaattcatagttctcttgtccaggtgctagagcaaatgagaagtggtcaaatagagcttgaaaattatgttatcacaaaaagtttgacaaaa

SEQ ID NO: 5150 - DNA, 762 bp, Setaria italica
  misc_feature (686)..(686): n is a, c, g, or t
  Peptide Sequence Number=SeqID_71124
tcgcggtctccttcgaggtgagggacaagccggcttcgctcaagtcggatgattgggggcgggtggtggccgtgtttgtgctcggcaaggagtggcagttcaaggactggcccttcaaggaccatgtggagatcttcaacagagttattggtttctatgtgcgctttgaagatgatagtgtggaggcagccaaggtggttaaacagtggaatgtgaaaatcatatctataagcaaaaataaaagacatcaagatcggacagctgctcttgaggtatgggagcgcttggaggagtttatgcgggcgcgcacataattgaagtaacatgtgtaccataactgtgatcattggactattaaggacccaattgttttgttgagctggaggctttatgcttgctgaatactaaggataaaagcataccattgtccagactcagctccatatcttggtgacagtagatgatggcagagcgtcgtgtgtgtggaagctacacccaccaagattacaacttttgtacactagattaggctgccacgtgctctgtttacttgtaacattgtactgtagctgctaacttacaattttcttggcaagtatacgagattgcttgcaagttgcgcataaattccttgaaacaagtcttgctgcttctctatcttagagtcactgaagagaatgttttanggccatgttatttctgagcaagtgtgcgagaaacgtttacattggatcttgtaagaattatctgcttcagttgcta

SEQ ID NO: 5151 - DNA, 297 bp, Setaria italica
  Peptide Sequence Number=SeqID_71125
ggccactcgtgcgacgagtgctgcaaggccgggaagtcctacccgacgtaccggtgctcgccgccggtcgtctccgggagcactaaggccatcatgacgctcaacgacttcgacgcgggcggtgacggcggcgacccgtcgaagtgcgacgagaagttccacaagaacacggagcgcgtcgtggcgctgtccacgggctggtacgccggcggcaagcgatgtggcaagaacgtaaggatcaacgccaagggcaagtccgtgctcgccaaggtcgtggacgagtgcgactccctccat

SEQ ID NO: 5152 - DNA, 739 bp, Setaria italica
  Peptide Sequence Number=SeqID_71126
cccccattcagttaacttgaagcgcaaaatggaaccactaaccaacttcatttatatacatagtaacttttaattttaacatccttgggttctcttccatcttcatactatattacatttgaaccacaaacgccggttagaatctgatcctatggaaatttcaaaagttcagttactagccatgccagtcaccgaaagagccgggatgtgggtatggatactgctgccgagaggtgaagttcaaaggatctggtgtcaattcgcttctattgccaggaacaccgtacaggcctgttgcatggtttgtttcatgaaggcggggagtatatctgtccatggtggacctccctgctgaacccaaagacgaaactccatgggaggaagttaaagtagactgtgtgtctgcatatccagggtatccacttgtatgtgtgctctgtcgtccgtacattcttatttgtgctcgaatatcagtggtaggagggtaaatgggtgtctggggatgatcattccctgtgtgtgctcgaatatcagtggtataaatagtctggggatggatcagttccctgtgtgacattcttatctgtgctctcctcaaagccaaacaccaacgttatcagcagaaaaggcaaggtgcttttctacagatgcaactccatactcagcaacatctctaatgtagtcctcatagggtactctctcatggggagatgtgcagggctcatgaacaggattactg

SEQ ID NO: 5153 - DNA, 1195 bp, Setaria italica
  Peptide Sequence Number=SeqID_71127
agtgaagacaaactctccaactcttgctcctcttccttcagatgttttagactacttacaagagcagcacgcttgaccacaggttcttcaggctgtatcattcctttgaggtttttagctttttcttctcaggttcaaaaccagattggtcaaatgaacccttcataccaacccttcttgaagatttctgcataggttcattaacatacaagtagtcagaagtcctctttttcttctcagctagttccttaactttcttctttacagaatccagtggctttgaaatacgaggaaattttaagtgatctctggatggtgttccaatatcaatgtccatatcatggtccaggcagtagataagaattctctttgaaagttcccaagctcgcgttatgatgccctcagcatcattgtcttcaaatgaaatttccattggcaaacattttctgtggtaagatcttgggcaacgtctgcaaacagcaaactgcagcgactcttgagtcctatcctctaggcctttacactgaaagcaccaatgcacagggcatgtgaatgaaatcccagccacaatacttttctccaactccaaggcttcattcttgttgttaggatgaagtagttgcgcaacacacttggggtggtaaaagtgcccacatgttgcgttattgcaaagaaacaccttcgcatttgttccatctgaaggctccaactctccacagacaaaacactggtgctgcttatactcgcaattcttgcacaggaaattttttatagccttaacttctgcctttgtgtaccccaatgttgcacagtaagaatcttcaccatctcctaattttgcatggaaggatctcatgcatgaaccttcacagcataagagctcccctccattgtcacagatagcacaaactgaatcaaacaaatctccatcatcctcatcctcttcatcatcatcgttactaggctcatgcttattgttatcttcaactacctcctccctttctttatcatcaacaacaaatggttgtttattgtccagatcatttgagccagcctcgtcaatcttctccatagattcctctttaatgaatagttgcaaagtctgtgattttgctatagcagggtctctctcagaaaacagttttattagccgtacatgatccctaatgtcatcatctgagggcttaacctcata

SEQ ID NO: 5154 - DNA, 1035 bp, Setaria italica
  misc_feature (3)..(3): n is a, c, g, or t
  Peptide Sequence Number=SeqID_71128
ttnttttttttttttttttagtcctgaagtatcatgaaatgcattgagctgttgaagtcatacacaagatacatccggttacaacttgcaacgttcaaccagtatgtttgaaacaggacagtcagcacctaattaacaaaaacatcatgcttctgccaaaatagaaaagggcttaccataagagctcccctccattgtcacagatagcacaaactgaatcaaacaaatctccatcatcctcatcctcttcatcatcatcgttactaggctcatgcttattgttatcttcaactacctcctccctttctttatcatcaacaacaaatggttgtttattgtccagatcatttgagccagcctcgtcaatcttctccatagattcctctttaatgaatagttgcaaagtctgtgattttgctatagcagggtctctctcagaaaacagttttattagccgtacatgatccctaatgtcatcatctgagggcttaacctcatatttatcaaaaactcggcggaggtaaccccaaatattctcctcagaggctgtggggctcctccgaacaaagtgaagcatctccacagtgaccagcacggagcggacagtctcctcgtagctcggcctcggcttgagcagggcaatccagctgccctccgtgcagagcacggtgatctcgggcgagtcgccgtcgaggccgagcttccacgccaccacctgcttgtagacgttctggaggccgccgtccgccaggccgcgcaggtacacgtccttcttgaaggaggggacctcctcggcggcgtcgaactggaacggcagcacgtcgaaggagacgagcgcgtcgtcgtcgtcgacgaagtagtagccctgcaccgctctcagccggggctccgcgtcgtcatcgtccgaggacatcatggcgccgccgcggccgtggcctacccaatcctagagaggccgaggcggaggagcgcttcctgccgtggttcggcacggctcgccgccgtcgcagtcgcgggaagaggtgattagtgaga

SEQ ID NO: 5155 - DNA, 2241 bp, Setaria italica
  Peptide Sequence Number=SeqID_71129
gaagaagaagaaataagacctcaatacaccagaggataagggaattggagagtacagtatatgctacaaaaccagactcagtgtgagtagtgaaactccatgggaggaagttaaagtagactgtgtgtctgcatatccagggtatccacttgtatgtgtgctctgtcgtccgtacattcttatttgtgctcgaatatcagtggtaggagggtaaatgggtgtctggggatgatcattccctgtgtgtgctcgaatatcagtggtaggagggtaaatgggtgtctggggatgatcattccctgtgtgcccaccatacattcttatctgtgctcgaatatcagtggcagtggacactgataggttatggttgtccctgatgcgtccatcatacattcttgcatcctccacgtctacaccagtaacagcattcctttgagcaaagacagtattctccatgctgtaatccattgggtagttttctaagttctggttcctgtaaaagctgccaccagttccaccagacgctggaccgtataaattactatttggaccaccagcattaaccccattcagttctttgagatcaggactgtgcatcctcaagccaacaccaacgttatcagcagaaaaggcaaggtgcttttctacagatgcaactccatactcagcaacatctctaatgtagtcctcatagggtactctctcatggggagatgtgcagggctcatgaacaggattactgaaataattgtcctgatgtgccattctatcagaggggtattcactatgaattggagaatcactcctcgatttgtactgagaattcctagtctcagagggtgagatgctcatgtccgaatctggttttgtagcatatactgtactctccaattcccttatcctcctggtggtatttgaggctatttcttctcttctttcacaatgagcaccattttgattttcttgacattcatcacttcttttcaaagcaaacttcatttcctcacatgcaatttctacatgtttttctgcagggagtccatttactcgttcttgtttctcaaagatgaagtttgtgttctcacccatgtaggtttcattcctagtcccagatctgccattcttcaatgtagagtgaccatgctcctcagctattctcctgtgcttctgtgtccaatcaggacggctccacaaatagattgggggtggggttacattccattggtccatttgtttgtcagtcacatccaatgaaccgggtaaatagaatgactttccagaaagacttccagtatcctcccacaccaaatcataaggctggcgcttttcatccaacctttcagtttccttaggaacaattagtataatgagctttggcttgaaagtaagcgccttgtcaatgaatttgtttgcaaggattgcttttgatccaaaaggaggattaaggcccatgattagtttagaaccatgtggtagttcttttggacgcacagtcatccagtccctcttttcaaaacagaaagaattctttggtcgaataacatcataattcctgaagttgcattttttgccaactttatcaagcttttctttcataaactgactgaagtcatttagaccacaagagaaatccacaatcgtgtcgccaggttgaacataccaatgaagtttatcaacaatctcattgagtttctccttctttgtgaaatgccgaccaaacgaagtgtagcgcataccatgaatgaaaggtgcaaggtacactctgagcttattcttgttaactgcctcaagacttcagcttcacatactgctttagcatcatcaatggtacctccgtgttccagtttttgtaaagcagcttgtacagcctgaatagaacgctcaagcttgccccgtgcaatgattttgtcaatctgcctgccggaggttttataagttgaagggatggcacaccgtcgagagatatcgtccaatgtcaaggaacagacctccttttctaccaaagctagcaccctcttctcagtatcaccatcaataacaggaaatgagctctggggtgttttccctgttgccagtgaagacaaactctccaactcttgctcctcttccttcagatgttttagactacttacaagagtctaacgcacgaccacaggttcttcaggctgtatcattcctttgaggttttagcatccttattttcttttattttctttagtttaggggttttatttttcttta

SEQ ID NO: 5156 - DNA, 220 bp, Setaria italica
  Peptide Sequence Number=SeqID_71130
gagcatgttgcaacgtcatgagaaagacctttgctggaggttgactagaaaatggagaagaagtttacagattcttttaagagtatgattgccacttgtctaataaaagatccaacaaagaggccatcagcaaaaaagctattaaagcacccatttttcagaaaagcaaaggcagaacataatgctgtgaaatgcatactaaataaattgccatcgctgg

SEQ ID NO: 5157 - DNA, 605 bp, Setaria italica
  Peptide Sequence Number=SeqID_71131
gatgaagtcttcgtacccgaaagggttcgaggacgagaacttcatagcgtttgttctgcgtgaaacactgaagggtttagaataccttcatgaaaatggccacatacatcgggatgtaaaggctgggaacatactacttgatcaagaacaaggagtgaaactgtcagattttggagttactgctagcctttatgattcaattattaatagacatggaaaaaggaagacacttgttgggacgccttgctggatggcccctgaagttatggagcaaaaggattacgacttcaaggcagatatttggtcatttggtataactgcacttgaacttgctattggtcatgctccattttctagtcaacctccagcaaaggtctttctcatgacgttgcaacatgctccaccatcacttcataacacaaaggagaagaagtttacagattcttttaagagtatgattgccacttgtctaataaaagatccaacaaagaggccatcagcaaaaaagctattaaagcacccatttttcagaaaagcaaaggcagaacataatgctgtgaaatgcatactaaataaattgccatcgctggctgagcggatgcaga

SEQ ID NO: 5158 - DNA, 275 bp, Setaria italica
  Peptide Sequence Number=SeqID_71132
cccttcacaaagttttccatccataagtaaaagaaatgatgtggcagccactcatccacctccgcctcccccaatttgccgtgcccatgttacttctgcaccaccagggccacctgcacccccattacctcctcctaagctagctgtggccaacaatgcttcacagaagtcatcaacaatcagaccaccaccaccttcacgtgggggccaccctaaggttcgtcaaattctttacctagcaagggaagtgttgtcagttctaaccctcccccaac

SEQ ID NO: 5159 - DNA, 596 bp, Setaria italica
  Peptide Sequence Number=SeqID_71133
gcctcttcttgctacaagtgcaatcagaggatcgccatttttttttccttgctacggaacaacatgtatccaacaatatgtattgcacatccacaagtactatccaagaaccggatggatcgctactagttaatcaagccaccaaaagctctgcacgcttcatcaccttacatatgctctccaggacatccgccgggctaacgtctccgacgacggtcaccttcttgctctccagctccaccttgaaggacacaactccttgcatcttggagacctgcttctcgaccttcctcgcgcagccatggcagtgcatggacaccttcagagcgacggtcttcggctccacacgcacagctagagccttggatgtgtcactggaatccgtgaccggcacgatctgatgttgcaggtggctcctcagcaagccgctcctctcgctgctgtcctcgtcttcttcctgcaaaccgcccgatgcagaggaacgagggaaccagcgcaaaattctcttgaaagtgaaaccccttgaagccatttgggtggctctctcccccgggctgaaactgcaagcagggggatcaaggcacacaggggatagg

SEQ ID NO: 5160 - DNA, 961 bp, Setaria italica
  Peptide Sequence Number=SeqID_71134
gaactcaaacatggtcttgagattctcctgaagtcaaaagcagctattgtacttgttagaaatggctcagactctgatgctgagtttctgagtttgctcagttctctttgtgagttaatgaaggttattggaaatcatgtaccaccccctttcattattgtttcaccacctggtcatgtggagtcagttaggacctgcctaatagagaatgactattttaatctggatataaagaaggtgtgggttctagaagagctggagcttccaattgtcagtatgtcctccgaggccagcagaaaaaaggttctgatgaagtctccctgggagataattaaaaagacagcaggatctgggggtatttttagcttactgtcatcaaacaaaattttggattccctcaatcaaatgggcgtacagtatacacagatatgcagctcatccagtaggccagtcatcgggcatcctctgctctttggcgctgtcgcttccagcggtgctgatgttggcgtcaagctctccacgagcggtgaaaccgaagacgatttcgacttgatcatttccatcgatctgctgaacaagatgtgccgagatgtcactcagctcaggttctctgcccgccctgatcaaaacgcgcacgtcgagcatgtcgacggccagtgggtcgccgtccagccggaggcgacgaattcccatcgcctgcacgccgacgttacgagtatattgaactcttgcgctcctgataaggtgtgtgttatggagatcattgagcaataaaagtttcttcttgacagtgcactgtacataatcgcaattacttcttgatgtgtgcgacactttttctattgtttttttacgacgcttttctactgctgtattgcacctgctgtagcctgtatgagtttcgagcagctgcgcagcggaatactagccagtagccactgccgattctttctagtcccct

SEQ ID NO: 5161 - DNA, 1616 bp, Setaria italica
  Peptide Sequence Number=SeqID_71135
taaaaaatagaagtgagattctacacctgtaataagaactcaaatgtattgccgttcaaattaccaggcatccacagccaaaacaaatcacagcatcaacccagtactaccagcagaaaacgaactagcctctcatgttaaatctgcaaataaattgcatctaatccctactctacataggtaacgcacatatggtcactgctcgattgggataggatcaacaagggcagatgatgctgggcaggaagaaggaacaccattgcaattgttgttttcctcacccgtatgctccaccatcgtgccgtcatgctcagctgtgttaaggttttcctgatcctcagcctctcctacttcaaggctctgttgtaccgtacatgattcagtaccttgaggagccaagtggccctgttcctcggctggattagctgagtcgtcctgttcctccagcatcagttctggaggactcgatgggagcacaaagttcgaaccatcatcttcctcacattttggttccaccataaatatagtttgatccatttcagggtgatcctctagatgttcatcctgctgaagatcctcactgggctgtaccaattcagttgcagcagtggctgtatcatagttcccagtggctggggcggctgaatcgcagttttcctccactcccagtgaatgatgttcagtgagcacattgttggataagttgttttcctcatccataggctcgagggacaacgaagcatgctccactgtgtcaagttcttcatcttcctgctcttgctcttcttggttggtatctatgttttgttctgcttcatgcaaaagctcagctgcgtcaacatgtggactagtatcaatctcactaagatcttgcaatacatcttgaaacccatgcagaaactcagcaaccaaggcttgggtggtcgtatcagctgtagatgtcatggctctcttggccttcttaaccataccttccagtttatcaaccgctttgcggatcaacggagacttggcttgattctgaagatctaaggaatcaccaggtggaggcaaaggtcctgcttcagcatcatcactggttgctgggacaaggtaccgccgtgtagctcctgagtaccagttcaggtactcctcataagaagatggatcatattgctctgtatctcgaaatatgcgctgtcgccgggcttcccattcctggatatactcatggtgtgtttcttcccagttttcacgttctctgccacgtcgactaatacgatgcaatgactgtagcgtaggtcgaaaaggcggtggaacgcactgtcgaaggctgaattgccgcatcactcgctcaggcaaatacatctcaactatagggaagtttatcagtggagcttgtgtgagccacaggtccgaatctcttgtacaaagtgggggtagggatgaggattctacaaacaggtagggctcccacttcacctgatctactcgctgcaggttcagttcatctctgtactgcttaagggagcgagtagcattgtcactttgtgtgcgagccccacccaacggaagccaattgggggtaagtcctgttcgatgcctgtctctgtgcatggagaccgaaccagtggtct

SEQ ID NO: 5162 - DNA, 2008 bp, Setaria italica
  misc_feature (1986)..(2008): n is a, c, g, or t
  Peptide Sequence Number=SeqID_71136
actagtagaagacaatggtggaggtgcccgcggcgatggagcccctgcggtgggagcaggtcgtgaaggtgatgccgtcgatggacgccgtggtgaaggtgttctgcgtccacacggagcccaatttctcgctgccgtggcagaggaagcggcagtacagctccagcagtagcgggttcatcattgggggccgcagggtgctcaccaacgcccactcggttgagcatcatacccaggtcaagctcaagaagcgcggctccgacactaaatacctcgctactgtccttgccataggaaccgagtgtgacattgcaatgttaactgttgaggatgatgaattctgggaaggggtttcgcctgtggagttcgggtcactgccagcactccaggatgctgtaactgttgttggttacccaattggaggcgatactatctcggtgactagtggtgtagtatctaggattgaaattctgtcatatgttcatggttctacagagcttcttgggttacagatagatgcagctataaattcaggaaattcaggtgggcctgcttttaatgacaagggtaaatgcgttggtatagcttttcaatctcttaagcatgaagatgcagagaacattggctatgtcatacccacccctgttatcaagcacttcattgaagactacgaaaaatccggagaatacacaggtttccctatacttggtatagaatggcagaaaatggaaaatcctgatctccgcaaggcaatgggaatgaaatctgaccaaaagggtgttcgtgtacgaagggttgagccaactgctcctgaatctggatgcctccatccttctgatattatccttagctttgacggtattgatattgccaatgatggtacagttccttttaggcatggtgagcgcattggattcagctaccttgtttctcagaagtacactggtgagaaggcacgtgtgaaactactgcgcaactcaaaaattcatgaatttaacataaagctagcaacccacaaaagactcattccagctcatatcaagggaaggcctccgtcatattacattgttgctggctttgtttttacggtcgtgtctgttccatatcttcgatctgagtatggaaaagactatgaatatgatgccccagtcaagttgttggacaagcactcgcatgcaatggcgcagtctcctgatgagcagcttgtggtggtctcacaggtgcttgtgtcagatataaatattggttatgaagatattgtcaatattcaggttcttgccttcaatggcacacctgttaaaaacttgaagcacctagcgacaatggtggaagagtgcaacgaggcattcttgaaatttgatctggactatgatcagctcgttgttctggagacgaaaactgcaaaggctgcaactcaggatattctgacaacacattgtataccttcggctatgtcagaagacctgaagagctaaggaaagagatgctggctggtacaaccagatgatcctacaatcctttctgggactggaacatgcttcacattgttgatcggtgcagctccggtttcacgagacgcactgaacgaaatccattgcaggtgaggttctgcatgtggaagagtggaaactcgaatgtatcttgtcggcaccaaagaaagcatagcaagcataacatactctcaaaagtcagatcgatgagactgaatggcgcatgagtcattcaggagcggtagtaggatagatgaagaaaacaaagttttgctcgtattccatttattaagtccacatccggaaagtcatcatgaggaatgtagcgtatccccatttgccatggttggtctgatgatactttcactttagacgtgtgtggtccggttgtcaagagcatacttttctgtatcatcatttctttgttgtgcggagtactcaaagttcttcccggcaaaatcgtatcttcggtggctttaatctgcttgcgaaaccnnnnnnnnnnnnnnnnnnnnnnn

SEQ ID NO: 5163 - DNA, 259 bp, Setaria italica
  Peptide Sequence Number=SeqID_71137
gcaacgattgcagaagcaagcgagatgtctccaagtgcacggccacagctcatggccgaaatgaatggtgtgttcttggattttgatcgtgtccgctgtatctcacgagcaggacttgatgaggccgaggttgtagaggttcctcttgacgaggttgccgaggtagaccagcccaaggccgccgccgacgccgtggtcccggtcggccggcgcgggcttccggtagagctgcggccggggctcctcccccacgacgagg

SEQ ID NO: 5164 - DNA, 222 bp, Setaria italica
  Peptide Sequence Number=SeqID_71138
ttggaggctcatctggaaggaggtgacaagaagagagaagcaatggctagttcgtccatggacactgaagctgcaggacaggagctcaagggcagtgactacaccgtctcagctactgctcatgcagtagattcagactcgtggcagcaggtggggctgctgctggtgatcggcttcaattgcgcctacgtgctgagcttctccaacctcatgatggccgcg

SEQ ID NO: 5165 - DNA, 255 bp, Setaria italica
  Peptide Sequence Number=SeqID_71139
tataccacagcgagtgcgtcaactcagccaatggtgggtacgtctgcaactgcaccaaaggctacgaggggaacccctacgtcaggggtggatgcaccaatatagatgagtgtacacgattggaagagtttccttgtcatggtgtttgcaaggacaccgagggatcttatcaatgcatgtgtggtctaggttacgagagtgatggcgatccaaaggaaaactcctgccatccaagactttcaggttcagcaaagg

SEQ ID NO: 5166 - DNA, 280 bp, Setaria italica
  Peptide Sequence Number=SeqID_71140
aaagtattctccatgtccctggcagcatcttttggtggttgttcctgttattggcatactgtcagatatacaagcgtttatacctgttcttaatgtagctgaggtggacgaaatatttgatgtacccctggagatgttcctcaaggtttgtaaccttatcttctaacaatgctaagatttacgatggtggctgaacctgaaccgccttctgcaatttaccagaaaaaattccatggtaacagcatgtgctacctgctggattttgtgtatgtatatcaaa

SEQ ID NO: 5167 - DNA, 737 bp, Setaria italica
  misc_feature (710)..(737): n is a, c, g, or t
  Peptide Sequence Number=SeqID_71141
aggcattcctatgacacatgctcaggtgcttgggatgttttctggaatgaatggtaaagccaacggctatatccatggccaccaactaactgctgatagtcttaaagcagcacagaatggagatgttggaaaggcgacagtcaaccctgtgcaaggtgcaagtcatgatccaaagattgtgaatgataatagttctgctcacccaagcttgaacgctggtgtccagtcatcaggttccctgcctaaggggaagttagtgaatccaaagcatcctgatctggctttgcagctatgagcacagcagtagtcattgacatagtttgccctagtactgtgatctgtgacacaggcatgagttgaatactgcttctccgggcccaatgctgaatcatcagatagccaacagacattcgtaactcaacaagtggagcacaggagcgaggaagaatcagtcagagaataacacgagcggtggttgtgggaagcggagcagctaggccctccatttaatcatttgaccccaagtgaattgttgtaaaagggtagggtagtttgtacagattctaatcctattggagatgataatgtttgggatgaggcggtgcctgttgtccaatttgtaacattatagtagaagaggaagtatacaagcaaaaaaggcagtgaataattgtgccttttccccttgagaggatccattccatttaccnnnnnnnnnnnnnnnnnnnnnnnnnnnn

SEQ ID NO: 5168 - DNA, 1831 bp, Setaria italica
  Peptide Sequence Number=SeqID_71142
caaaccggtcgcccgcagctctcggcactcgccactacccccgcgcgccgcgctcctcgccgccacgccacggaggaggggggggggggggagtggcgacggcgagcggcgtctccgccggccccgtgctgcagctcccctcccttgcgggtgccggccagtagattgcggcctccgagagcagccactggagctccggcaggtaattttcttgtgaagagagatgttgcatataacagaagaagctaccaccattttttaccattgaaccaaagaggaggtttgcaagcagcagtgctgcctgttgctacaccaatattagatgatgaggaaaaaaggaagcaaatggctgaagattttgggttcacacaaattggagaagaactaccagatagcgtcacccttaaagatgtcatggatactctacctaaagaggtatttgaaatcaatgatataaaggcttggacatcggttttaatatcagtcacttcttacgcgttgggcctatttttcattgcaaaatctccatggtatcttcttcccttggcttgggcttggactggcacagcagtgaccgggttttttgtcataggtcatgattgtgcccacaaatcattttcaaggaataagttggtggaagatatcgttggaaccttagcattcatgcctttgatatatccttatgaaccgtggagatttaagcatgaccgacatcatgccaagacaaatatgttgatagaagatactgcatggcaacctgtttggcaaaaggaaattgaatcatcaccttttctgaggaaggcaattatttttggctacggccctatcaggccatggatgtctattgctcactggttgctttggcactttgatctaaaaaaattcagaccaaatgaagttccaagggttaagataagcttagcatgtgtgtttgcattcatgtcgattggatggcctttgatcattctcaaatcaggactggctggatggtttaagttctggtttatgccatggatggtttatcatttttggatgagcacttttacaatggtacatcacacggctccccatataccattcaaatcctcggaagagtggaatgctgcacaagctcaattaaatggcacagttcattgtacctaccctaaatggatagagatcctgtgccatgacataaatgtacatgtcccacaccatatttctccaagaattccaagttataaccttcgtgctgcctatgactccatcagacagaactggggcaagtatgtcaatgaagccaactggaactggcgattgatgaagacgatactgactagatgccatgtgtacgacaaggagagatactacgttccattcgacgagctcgctcctgaggaatcccagccaatcaaattccttcggaagttcatgccggattatgcatgatgccatgactactgttggctagttgagaggatcgttggaggggcgaacgatacagtgacttagaagacacttcctaacagcatcgatgcacatcccaaattttgactgaattactatgccacatgccaattgtgttttagaaaggttgcagaaaaggggaaaaacaattgcttctgaaaggttaccgaaaaataatgccaatttttctgtactttatggtcatgttagaggagtatttactttttgtttaatcacgaaaacgcaggagagttgcccttcattttatttagtgttagaggaatatttctagttagatttgcaagcgtaaaatttttgtacggttctctaatacatttgtatatcatgatataaatacaccagcgtgtttcatggagaaaaaaaa

SEQ ID NO: 5169 - DNA, 469 bp, Setaria italica
  Peptide Sequence Number=SeqID_71143
agcatcccaacgggccatccgagctcgccgtcaaggaggccgcaacgacccgagtaacctacgccgccatctcgcaggacaacggacttgtgccgatcgtagagccggagatcctgctggacggcgagcacggcatcgagcggaccttcgaggtggcgcagaaggtgtgggccgagaccttctacgccatggcggagaacaacgtcatgttcgagggcatcctgctcaagccatccatggtgacgccgggcgccgaggctaaggaccgggccacgccggagcaggtcgccgagtacaccctgaagctcctccaccgccgcatcccgccctccgtccccggcatcatgttcctctccggcgggcagtcggaggtggaggcgacgcagaacctcaacgccatgaaccaggggcccaacccgtggcacgtgtccttctcctacgcgcgggcgctgcagaacacctgcctcaa

SEQ ID NO: 5170 - DNA, 267 bp, Setaria italica
  Peptide Sequence Number=SeqID_71144
cagactcggagtcagtcaggcagcagtcagccatgatagaggcagctgccatggccgcttgctcctctatccccacgcccttcaccacaaaggcaagtccccaccagcgcagccgcgtctccagccctcgtcggcttcgcctccctgccaccccgaccccatttcgtcagtcccgctcccctttttctgccttctcgccggcgactcgcctccgcccccgagcctccgtgtccgcgtcggccgcaccgtccaaggactacgagttca

SEQ ID NO: 5171 - DNA, 256 bp, Setaria italica
  Peptide Sequence Number=SeqID_71145
tcggcaagtcggcatgacggcattgaacattccaagtcaaaaggcaggtaaggacaggtaaggacatctggacatacttcaactttgaataaagcaacacatcgcaatcaaactggcggttacaaaaaaaaaagaatcgtactagattatggctatctttttcttctccagctttgctcgcaagttgcaaatctgcggttgattcatttgattcggtgcgcggccatgcgtcagcgtggggcccttgctccaacgg

SEQ ID NO: 5172 - DNA, 327 bp, Setaria italica
  Peptide Sequence Number=SeqID_71146
ctgggcggtgctgagcatgcactgcaccagcgtcgacagcagcttgttggggtactccttcagcagggaggcctgcaggacgatccagagggaccacgttgtgttggacagcagcatcaggaacgtgcccttgatccacgtccccttgctgctgctggtggtcgcatggtgctcggcggcgccgctgccggcgaaggcgcggtggtggttcaccgggctcatggacgggcccgtgtacagggcgatggtcaggacgccggcaaggcacagcgccacgccggcggccttggccatgcccgacgggctcctcagcctcaccacctccag

SEQ ID NO: 5173 - DNA, 276 bp, Setaria italica
  Peptide Sequence Number=SeqID_71147
cggcttccactcctccatcctcctcccccgccaccaatcctaaccctaatccacgctcaccaaaccctagctctaagatccatccgcatcctccgcatgccgcgcttcccccggtggctgcaccggccgagctgagccagacagccggtcccatctctccgccgcggccgccgttgcagttgcagccgccgccatgggctgcgtctgcggccgcccctcctccgccttcgacgacggccagtgccgcacaacgcctccgccggctgcgaagctctc

SEQ ID NO: 5174 - DNA, 249 bp, Setaria italica
  Peptide Sequence Number=SeqID_71148
tttcttggttacaacaacaagttctagctgcttgcggagctgaggcgatcgcccatacttaccggcaggaatgggaggaaaaatcaggaagagagaagatggtaatcgtcctaccaagtccccatctacctatctatggctagtcatcagtctttagacaggaaagagagcatttgggcacagagacggcttaatactgcagtgccattgctagatcgaggtgccatcaagtacaagtagacgaatttg

SEQ ID NO: 5175 - DNA, 826 bp, Setaria italica
  Peptide Sequence Number=SeqID_71149
tttaggggttttacttaatttaaagtttaactttttgtactaaactaaaaaagtcttagccgtccaattatgtgaacttgtgcagcctcacatgtttctcaaggggattttaggattggtcagtggcacgtaacatcacaagtgacaaggccttccacttatttgatcgatcaacatcgttttttaccatcctgggtcttgtaaaacttttcatttcgttagttttgtgcggtataattcagaagtacagctttaggcagatctgaagcagagcgcatgtgaactcatggtgcactcaggaaagcgaatctgaattctgaacagaagccatgggctcagcacatgctgctgcgatggatgcaatccccaacttgctatgtcacgtaggaatatttttaatcatgtttagccaagaaagtgtcagcatcgcatcatgtctggcatccctgccacctttgtggatggagacgccctcgtgccttgttttctttttaatgtgtctgtgtggttgatgctcctcccgtgcactcttagaatctaagcgactaagggaacaagagccaggttgctagatatttttcgttcatggcagttttggttcggttgatgtcattacaaaattgttcttgattcacacttccctgggcataatttaatctcaagttgtcgtctgatcatctgtgttttgttgtctgcagcaaaatgggtgctggtggcaggatgacggagaaggagcgggagaagcaggagctgctcggccgtgctgccggtggtgctgcaatgcagcgctcaccagtggacaagccaccattcacgctgggtcaga

SEQ ID NO: 5176 - DNA, 1218 bp, Setaria italica
  misc_feature (1180)..(1180): n is a, c, g, or t
  Peptide Sequence Number=SeqID_71150
aggcggcaaagtggagagggctcgggagcgctgggatgaagaccagcgcgaagtacaggagcgcagcgacgatgacgaggtcatagaccacgtaggagaaggacttgatcaccgagcgctcgaagcagtgaggtgggatggccttcttgatctgacccagcgtgaatggtggcttgtccactggtgagcgctgcattgcacaccacaactcgttttcctctcgaggagaggaggggagggacgagggccgcggcgtccgcctgatctgctccgacccgaagcggctgcgtgtgccgtcctcctcagtctcagcaaaatgggtggctggtggcaggatgacggagaaggagcgggagaagcaggagctgctcggccgtgctgccggtggtgctgcaatgcagcgctcaccagtggacaagccaccattcacgctgggtcagatcaagaaggccatcccacctcactgcttcgagcgctcggtgatcaagtccttctcctacgtggtctatgacctcgtcatcgtcgctgcgctcctgtacttcgcgctggtcttcatcccagcgctcccgagccctctccactttgccgcctggccgctctactggatcatgcagggctgcgtgtgcaccggcgtgtgggtcatcgcgcacgagtgcggccaccatgccttctccgactaccagctcctcgacgacatcgtcggcctggtgctgcactcgtcgctgatggtgccgtacttctcatggaagtacagccaccggcgccaccactcgaacacgggctccctggagcgtgacgaggtgttcgtccccaagaagaaggaagctatgccgtggtacacccccgtaccgtgtacaacaaccccgtcggccggctgctgcacatcgtcgtgcagctcaccctcgggtggccgctgtacctgacgaccaacgcgtcggggcgcccctacccgcgcttcgcctgccactacgacccctacggcccgatctacaacgaccgggagcgcatgcagatcttcatctctgacgccggcgtcatggccgtgtcgttcgggctgtacaagctggcggcgacgttcggattctggtgggtggtgcgcatctacgccgtgccgctgctgatcgtgaacgcgtggctggtgctcatcacctacctgcagcacacccaccggcgctcccgnactacgactcgagcgagtgggactggctgcgcggggcg

SEQ ID NO: 5177 - DNA, 1403 bp, Setaria italica
  Peptide Sequence Number=SeqID_71151
gcaacctggaggcgtccgtgccctcctccgcggctctactccaccgccgagatgagccagcagcttcctccgaacttggtggggatcatggagcagagaatgaagttgatcgagcagaagagcgcatacctccaggagcaaatcagccagacagccagccacctcgcccgaagagtattcgagggctaacaaggagctccgcaagctagagagcaccatggagttgatcaaggagctgagatcgaaacaggaggaaattgagggtttgaaatctttggtaacaaatgcttgtgaagagaaagacatgcgtgagatggcagctgaggagctacttgagactgttgaggaggagaaacgattgcaacatgaactgtttagatcgttgcttccaaaagatgaagcagatgagagggactgtatattggaggtgcgggcaggaactggaggagaagaggcatctttgtttgcaatggatatattcagaatgtacgagaaatatgcccagaagaatgggtggaaatttgatgtcattggcataatggagtctgctgtgaaaggatacaaggaagctagtggaactatatcaggtccaggggcatttggcaaactgaagtttgagagtggcattcatagagttcagcgagtgccagtgactgaaaaatctggacggctgcacactagcgctgtatcggttgccgttcttcctcaagctgatgaggttgatgtccaactgcggaatgaggacctgagaattgatacctacaggtcaggtggctctggaggtcagtctgttaatacaactgatagtgctgttagggtaactcatattccaaccggaacagtggttgcaatccaagatgagagatcacagcacatgaacaaggctaaagctctcaaaattctccgagcgcgactgtatgaaattgaaaggcaaagactccatatgaaccgatcaaagcttcgatcagagcagattggaagtggtgataggtctgagcgaatcagaacatacaactttccacagggccgtgtcacagatcatcgtgttggaatcactcaccactccatagcagatgtcatggaaggggagaacctggatgtattcattgatgcactcctgcttcaagaagagatggacgcaattgcttcttttgcagcataaccactaaagttatgaagcctaacactgaaccggcaaagacaagatggacctctggatttgcttttggcctgttttcctgcttcaaaatctgtaactttacatgatgcagaattttggtgtaggcagtagcacattgatgtgtcactcgtattattttataaaattgaaatgggttctctggcttcgaagtctttggatgaagtggagcaagacatgccaagctgatgttgttggcaggttc

SEQ ID NO: 5178 - DNA, 459 bp, Setaria italica
  Peptide Sequence Number=SeqID_71152
ggggaagggagggagcagcgcgagtttctggaacgggagaggaggcggagattttgggggaggcggcgagggaagggaagtggaagggaaggggagcccgagccacccaagccggaggaaaagaaggagccaccggtgatcgccgtggtgctgaaggtgcacatgcactgtgaggcctgcgctgaggggatcaggaagaggatcctcaagatgaaaggagtgcaatctgcagagccagacctgaaggcatccgaggtgacagtgaagggtgtgttcgaggaggccaaactggccgagtacgtgtacaagcgcaccggcaagcacgccgccataatcaagtgcgagcctgtccctccgccggagagcgctggcggcgacgacaaggccaaggaggagaagaaggcagaaggtgccgtcatccttcttctcctcgccgccaccttctgccttcttctcctc

SEQ ID NO: 5179 - DNA, 1047 bp, Setaria italica
  misc_feature (996)..(1047): n is a, c, g, or t
  Peptide Sequence Number=SeqID_71153
acgaactacaagtcgcaactagtagaaggaagaggagaaaaagcttaacctgagggttcgaaacctcaggagaagaaagaggagcccacggtgcttgctgtggtgcttaaggtgcatatgcattgcgaggcctgtgcgcaagtgatcaagaagaggatcctcaagatgaaaggagtgcaatctgtagaggcagacctgaaggcttctcaagtcactgtgaagggtgtgttcgaggaggccaagctagctgattatgtgcataggcgcactggcaagcacgccgctattgtcaagtctgagcccgttgcagctgagaatggtggtgatggcaacgccaaagatgacaagaaggcagctgaaggcggtgaggagaagaaggatgatggcaaggaggaaaagaaggatggtggagatgctggtggagacgggaaagaagcggataaacagaaggatgatggcagtggtggtgatggcgaagagaaagataaggaccctgcagccatggctaacctgtatatgcactacccaagattcaaccacccgagtggatacggctacggctaccagtacccacctcagctcttcagcgacgagaacccaaatgcctgctctgtgatgtgagaaggccagggtcatgtgatcttaggtgcgaaaaaataaggggattgagttatcccctgattttggaggcgtcatgcaggtacaaacccttgagggtgactgatattggcagcttgcttcaggaaattagagagccgagctattttggctactagtctaaaacttttctcttctctccttggttgaactttttgtctggtacaaagtaaactctgggcttgtttatggacaccatgttaatcatgtaagttaatggctagtaggggttttgcgttgtaccttttcacccttgcctctttcctttttgtaaataaatgtactatatatgctagttttgataataacttaaagctactctgtaatctgtcgtcgggnnnnnnnnnnnnnnnnnnnnnnnnnnnnnnnnnnnnnnnnnnnnnnnnnnnn

SEQ ID NO: 5180 - DNA, 1331 bp, Setaria italica
  Peptide Sequence Number=SeqID_71154
acgaactgaccgaagtgcgttgctgagagcagagcagagcgggcggagcagaggaaggagagccatgggcgaggagaaggcgaaggaggcggtggcggcggcccccggccgacaagggcaaggaggcggaggagaagaaggacgaggggggaggaggggaggagaagaaggaggacgccccgcctcctcctccgccgccgccggaggaggtggtgatgcgggtgttcatgcactgcgaggggtgtgcgcgcaaggtcaagaagagcctcaagggatttgatggtgtggaagatgttagtgcagactcgaaggcacacaaggttgttgtgaaggggaagaaggcagctgctgacccgatgaaggtggtggagcgtgtgcagaagaagacaggtcgcaaggttgagcttctctcgccaatgccaccgccaaaggaggagaagaaggaagaggagaagaaggaggagcccgagccacccaagccggaggaaaagaaggagccaccggtgatcgccgtggtgctgaaggtgcacatgcactgtgaggcctgcgctgaggggatcaggaagaggatcctcaagatgaaaggagtgcaatctgcagagccagacctgaaggcatccgaggtgacagtgaagggtgtgttcgaggaggccaaactggccgagtacgtgtacaagcgcaccggcaagcacgccgccataatcaagtgcgagcctgtccctccgccggagagcgctggcggcgacgacaaggccaaggaggagaagaaggcagaaggtggcggcgaggagaagaaggatgacggcaaggaggagaagaaggaaggcaaagaaggtggcggtgaggagaagaaggacgagaaggagaaggagaaggaaagcggtgaaactgctgccggcgacgagaaggacaaggctgacaaagagaaggatgccgctgccatcgccgcggctagcctgtacatgcactacccacggttcccattccccgctgggtactacccgccacccccactaccgccgcccgggtatgtctaccagccagcctacccgccgccgtcatacgccgcgcaccaccagacgatggctccgcagatcttcagcgacgagaacccgaatgcctgctccgtcatgtaaaaaaggtagaaccgtgggggtctagagcaaaaaaaataagaagcgggggatggaaaggaagagctgcataatttggaggttgtctttgcaaaaaatgcccttgagcaaagcaaatggcaacttgaagaaaagtaccaggctttttgaggggttagatttccatttctttttctctcttctttcttttcttttttg

SEQ ID NO: 5181 - DNA, 217 bp, Setaria italica
  Peptide Sequence Number=SeqID_71155
tcgaccagccaccgcacaccaccaccggcgcgctgcccgcccgcccgcctgctactgttcccccgtctccgcgctatcggagcaccgggtccgtgtgggtgtggcgcctacctggaacagcctcggccgccgtccccgcagcggccgctttctagctgcttcccgttggctcgcgggcggccgcggtcgtgagcgcctgggcgagtggcgaccctgc

SEQ ID NO: 5182 - DNA, 477 bp, Setaria italica
  Peptide Sequence Number=SeqID_71156
atccggatccggacgacgcgggtagcaggaggaatactaacggattcttcgtggaagaggaggaggagagcggtggtgctgaggcggcatccccgccgccaccgccgtggacataaccgcacccacccaacccattcaccccggcgtcgcccccggccgtgcccgccaggtcttcctcttcctcatccatcctccaccgccggcgacccctatatattcgcgcccaacctccccgccccaccttccaagcccacccacacccactctccctctcctcaactccgagttctcgacgccgcgcagcaccccgccgctcagctagtagcctcgcccatcacccttgctacctcgccgcgccacgccgccaggcaccatgagcgccgcccagcaagcagaaccgaccacctctcccgcctcccccaccccgccggcgccggcagcaccacggtaatcaagacgcccggcaccgcccgagcg

SEQ ID NO: 5183 - DNA, 1293 bp, Setaria italica
  misc_feature (1200)..(1200): n is a, c, g, or t
  misc_feature (1262)..(1293): n is a, c, g, or t
  Peptide Sequence Number=SeqID_71157
cctttcccttcccctcccatccctctccctctctctctcgctctcgcccgcccgctcgctcgctcgcgcaccgagatttcttgtcctgtaccaccagcctggttccgcgcggcttcgcttcctcctgtctgttgccgatcgatccgggccgctggagtccgagattcgccggagcctttgcggcgggccggctgctgtgtcggctggttggttgattgagtgattctgttggtttggttggttggttgcggttatgtccacggcggtggcggcggggatgccgccggcgcacggcggattccgcgggtcggagaaagtgaatccggatccggacgacgcgggtagcaggaggaatactaacggattcttcgtggaagaggaggaggagagcggtggtgctgaggcggcggtgaggagggagttggaagaggaggaggaggaggcgctgtcggagaactcgtcgatcggggtggcgtcgtcggacagctcgtccatcggggagaactcggcgtcggacaaggaggacggcgacgaggaggaggtggagagcaaggtggaggggctcgggctcatggggctcggaacgctcgagtccttggaggatgccctgcccatcaagcggggcatctccaacttctacgccggcaagtccaagtcgttcacgagcctggcggaggccgcggcgacggcggccgccaaggagatcgccaagccggagaacccgttcaacaagcgccgccgcgtgctggcggcgtggaaccggcggcgcgcgtcctgcagcgcgctggccacggcgtacctcccgccgctcctcgcccccgaccacgccgtcctggaggaggacgacgaggagggcgcggacgacgaggacgaggaccaccagccgggtggcgggctgaggagcaggaggccgcccacgttcccgtccccgcggctgagcgtgcacaccaccggcggccagatggggaggaacccgcacgcgagctcgtttaggtccccgaggtccttctccatgaccgacctccagaacgcggggtacaactagcagctaagattggagcttcttcttcctcctcctctcttgatctttaggtgtgagagatgctgttactgctactggtgccactgccactactactatataatcaagatatatataagaagaaactccattaacctaaaaaaaaaaaaaaaaaaaanaaaaaaaaaaaaaaaaaactaaaaacgtgaacgaaccgaaccgaaccggggaaacgggtaannnnnnnnnnnnnnnnnnnnnnnnnnnnnnnn

SEQ ID NO: 5184 - DNA, 400 bp, Setaria italica
  misc_feature (394)..(394): n is a, c, g, or t
  Peptide Sequence Number=SeqID_71158
aggaagatccgcgtcatcgctagacctgaattgggaatcaacctgcgccggtgagggcaccgggcaagctgaagcataggaaggagggccatgccaacggaaggcgaaggttgctgcactggaggtgctcgagaaatggtccgtcgatcgctcccagctgctcattgggcacaggtttgcgtccggggctcacagccggttatttcacggaatctacaaggagcagcctgttgccgtcaagttcatcagacagcctgatgatgaggaagatgcagagctggctgctcagcttgagaagcagttcaacaccgaagtttccactttgtcacgcctccatcatcctaatgtcattaagctggttaggaagacaatgacagcagtccaccggtattcngcgtca

SEQ ID NO: 5185 - DNA, 387 bp, Setaria italica
  Peptide Sequence Number=SeqID_71159
cctaagatagtagctaagtaggcccaaatcactcatgcggaacatcgccgtcatctccctcttgagcgcgtcaatgtcttcttgctccgggccggtgatgataagaccatcgacatagacgccgacgatcaaagccttgcacgccgcccgccggatgtagagcacatgctcggtggcgcacttggtgaagcggagggatgtcaagctctcatcgagcttggtgttctaggcgcacggggcctgccgcaagccgtagagcgccttgcgcaggcggagcaccttgtgttcttctccggcgacggcgaaccccggcggctgttgcacaaagacttcctcttggagctcgccgttcaggaaggcggatttgacatccatgtgatgtactca

SEQ ID NO: 5186 - DNA, 586 bp, Setaria italica
  Peptide Sequence Number=SeqID_71160
ccaccccatggtattgataaccattcctgctgccctagattcagcattgccagagaattgtctctccaatgtttttagctagctctttcataaaaactttgtagacatccggattgatacttggagttgggtggccatagaagtaaactagtggcatctccaagggaatcccatcaactatatcgataggtttctcaattggggtagcagaaatacatccagggatcgttatagacccctggccgatatctaaatccacatatgtaggcttccagcccaattttgcagcccagctaaggagcattctgcagagggtactttttccagaatctgttggtcccacaacaatcactctaggtccctgcgaggcctccaaatcacccccctgtgctgcagcagcccttgcccttgcccgtcgcgcatcaagaatggcgtgtgtgttgacgtaaatcaccattggtgtctccacggaaggatactcgctctcggtgggcccgtccagctccaacgtcgcgccgtgccaactgaagatggcgatcttggagcggggaggaatagagacccagcccgtcgggggggcagctcg

SEQ ID NO: 5187 - DNA, 1169 bp, Setaria italica
  Peptide Sequence Number=SeqID_71161
gcccttgcaccgtttcttgttggttagcagttcaacacagtacactcagttccagcgttaaaacaatgtcctggctacaatagacgcggcaatgccactctactcgtctgggcatactgcccatctaagctacaatcttcagccttgaacgatcaggcctcataccatgtcagcgagcttgcaatcaacagcctgcttggcaagtcccccgggcaaggtgcaatgtacgtcagcttcttcctttggatgtccacatctgtgacatggatgaatccggcaacattgctagaaattatttcatcaggttccttagcataagaaatagcaagcactgtatggatcatatccgtgctgatgttgacagcaacaagccgagtaggatctgccacaggctctgcaccaataggcaatgctgaacgaggagcttgatggccaccaccaattctgtacactgagacatcactgaaattgacaatgtttgaatgtggcgccagatcatttgcaatcccataaaagtattccttgattcggaagcttcttgttttttggcgatattttgaatttctgaggacaacaccctctgatttctgaagttttacaacatcaatgttgggcttgctttgaactgcatcctttaacatcttccagagtttctcctgtcccagtaccagcactacattggccttgaaagtttcaattgcatttagaagtaactcgtacccaaggccttcaacccaccccatggtattgataaccattcctgctgccctagattcagcattgccagagaattgtctctccaatgttttagctagctctttcataaaaactttgtagacatccggattgatacttggagttgggtggccatagaagtaaactagtggcatctccaagggaatcccatcaactatatcgataggtttctcaattggggtagcagaaatacatccagggatcgttatagacccctggccgatatctaaatccacatatgtaggcttccagcccaattttgcagcccagctaaggagcattctgcagagggtactttttccagaatctgttggtcccacaacaatcactctaggtccctgcgaggcctccaaatcacccccctgtgctagtagactagacaagacaagaccctttagaccctttagacccga

SEQ ID NO: 5188 - DNA, 310 bp, Setaria italica
  Peptide Sequence Number=SeqID_71162
aaaaccaatccgtaaaccaattggaagagactagaggcctaatcctaatcctaatcctaatccacgtcctctatcctaatggtccaccggctcctctctctccggctcctgctgctgctgcgcctcctcccgctggcctccgaccaccaggtagctcaccaggaccgcggtcctcggcctgcgcctctcctcgccgccctccgccgccggtcgccgtcgttcgccgaggccatgggaggaggaggcgatcgagcacgagagagagaggtggagcctcgaaagaaatgaaagaatctgactactttatatt

SEQ ID NO: 5189 - DNA, 704 bp, Setaria italica
  Peptide Sequence Number=SeqID_71163
cgagtaacattgataccaggaaattgaacccccgttgtacatcgtctcaggaataacgaactattcacaatttcccatatctccccatggccacaccactcagatctaccagtatgtacaaaaccacctccacctcaaaaccaatccgtaaaccaattggaagagactagaggcctaatcctaatcctaatcctaatccacgtcctctatcctaatggtccacggctcctctctctccggctcctgctgctgctgcgcctcctcccgctggcctccgaccaccaggtagctcaccaggaccgcggtcctcggcctgcgcctctcctcgccgccctccgccgccgcgttgtccacctccttcgccggcggcagctcgtggcggcaggtggggcagttgccgtgcacgcccagccagcgctccaggcactccccgtggaagcggtgcccgcacggcatctccttcccggcgtcctccacgccgtccaggcagatcgcgcagtcgcccagcgggcccccgccctcgacctccccggccttcacctccttcagcgcggcgatcgcggccttcgacgccggcggcacgccgccgccgaccccgcccgagaacaggtccccgtcgccgtccaggatgaagtgctgcaccaccagcaccccgggcccgccgccgccgccgcgctgcactgccgaggggaccggcgcccccg

SEQ ID NO: 5190 - DNA, 509 bp, Setaria italica
  Peptide Sequence Number=SeqID_71164
tcctcaagctttcggttcaagtcatcagtttggaactccttgccctcaacttcttccttcagtgtcccaatctcaagatccttcttgccattacagacctcaagctccccaatagtcaacctaagtttctctgcttcagctttctgctgctcaagtgctttcagaactaaatctctctcaccttccaggcaggaattcttcccctcaagatcatcgcagagggcacggagatcagccatggaaccatggagtttctccaattcatccctcaagttccccaccttagcatctttatcatgaaccatgctcaatgaagcatccttctcagcctgaatctggtcaaccttccctttcagtacctccaattcagcctccatccttttcctctcagcatcatgttccgcagcagcagccttattcgcctgctccactgtgtcaatctcactctggagcctagacacttcagtgaccacagcgctgtgcttcttacccacctccaccaccttggc

SEQ ID NO: 5191 - DNA, 378 bp, Setaria italica
  Peptide Sequence Number=SeqID_71165
gcccgccgggaggcactgcagcttgtcgcaacacaacaagctgagtcgctgtagggaggtgaggagctgaagggcctcgtcctgctcctttgtgacgcgctccatgtccctcatcgtaatggataaactggtgagggaggaagagaagagtctgcagatgggtgcggcaaggacactcgcgacgtcatccgtctgcagcgactgcagttgaagcatctccaaatccacgcctccaaaacccccgcatctcgcaatcgacaactccgtgagagaggcgaggtttgagaggggcgccagcgtctccatgccatcgaggttgagggattgcagggaggttgggaaggggaaacaagaagaagagggccaaggtaaatagcg

SEQ ID NO: 5192 - DNA, 437 bp, Setaria italica
  misc_feature (416)..(437): n is a, c, g, or t
  Peptide Sequence Number=SeqID_71166
taagtcttctaactaagtctactattcttggtagtctagttggttattccagtagtagaccaaaggaagaagtaccgtagtacaagaaaattgcccgcaagaggaacgatgaggaagatgccaaggaggaactctactctctggtcacagttgctgagatccctgcagagggtctcaaaggcttgggtactaaggttgttgaggatgaggattaagtcccaccgtggattcaatcagctagcacttggtgcgtatcatgagagcaaatttgataatgttgctttagcttattgttatctgctgttgatgacttatgtaatagaagattggagacttcgctcatttctttcaagtgcttgaaatttttgactactttgcctaagttagtggaatccttatagtgtgctagtaaaagnnnnnnnnnnnnnnnnnnnnnn

SEQ ID NO: 5193 - DNA, 684 bp, Setaria italica
  Peptide Sequence Number=SeqID_71167
ctagggtttctcacgccgccgccgccgcctgagggagcgaggtagagccgcgatggcggagaagaagcagcgccccggcggcgctaggaaggatgaggtggtcacccgcgagtacaccataaacctccacaagcgcctccacggatgcaccttcaagaagaaggcccccaacgccatcaaggagatcaggaagtttgcgcagaaggcaatgggcaccacggacgtcagggttgatgtgaagctcaacaagcacatctggagcagcggtatccggagtgtgccaaggcgcgtccgtgtcagggattgcccgcaagaggaacgatgaggaagatgccaaggaggagctctactctctggtcactgtcgccgagatccccccgggaggggctcaagggcctgggtaccaagcttgttgaggaagacgagtagacctgcaagtgttccaatcttcctccatcaaagcaatttttggtgtttttgagtttgttaccactaggttcgttatccttgtgaggaaacatggggagccctttgatctcactgttgctacctcggctggtactgtggtacactcttcaggacacatgggcttttggtttatggatccaaatcgtttgtgcggccatgcaaagtttctgaatatcatgaatcttgtttcatttacataaaaaaaaaaacctaaaa

SEQ ID NO: 5194 - DNA, 695 bp, Setaria italica
  Peptide Sequence Number=SeqID_71168
ggaatttggtgggtgggtgcgaggtgaggatgctgctgaagcttggaggatcaagatgctctatgatggtgattgcccgctctgtatgcgtgaggtaaacatgctgagagaaagaaacaaatcctatggagcaataaagttcgttgacataagctcgaaagattactctccagatgacaatcagggacttgattatgaaactgtcatgggaaggatacatgccattctttcagatggaactattgtcacagatgttgaggcatttagaagattatatgaggaagtaggacttggatgggtctatgctgttactaagtatgaacctgtagctaccatggcaaatgcagtatatggtgtgtgggcgaaataccgtatgcaaattacaggtcgacctccgctagaagagattatggcatcccgaaaagctgcaggcgaatgtaaagatgacaaagtatgcaagatgtgagcctgaaaatgttggtctgctctgctgcattcctcacctctagctatgcttagataggcacatacagagacttaacactaaaaataatcgtagtggtatgaaaagaatggagaatagattttataacagtttgttgaagtaaataatgatgcaattgtacactgtaccggtttgttgaaaagagtgaagatattttatgtgaaaacttccaacaaaaaaaaaaaaaaac

SEQ ID NO: 5195 - DNA, 1401 bp, Setaria italica
  Peptide Sequence Number=SeqID_71169
atagagtgctttgccgacaactcgaccaagaaactcaatcatatcaatgccgttatccaaaagcctagcagaattgctaggaattaagctggtatcagatgctgatgtttgtgaaaacagcccatactccggactaaaagcagtcttagaaagatccgttaggaactcctttgagagaccaccatagtccaaaccagcttcaggaaggccgcattcacttacaaatgacacatgaatgcaagatttcaactttgaccttaggcagttcaactgcctgtatccatcttcaattatatggcctcgacgtataactatcgcaatagatcccggacctggtccagatatttcaccagtaactcttcttgatgctttgtctgactcaataaattctctaaacatctgcactctctcctcaaacggatatacatgtggtaatgtggtaagcacagagctccgggtaggaattcctgaagaattatttcctggaaaattaccaaatgctgcctcgtgggccctggcagcagcagcaattggaattcgaccttttctagcaggtgccaaccacaaagaaattggacagaacttatgcctactatccctttcatatagtagattaagacatctgacagatacatccagaagcggtttgctgtagcttccaccattctgaacaaaagaattgtatacaaatgtattaagtgctgatgcgatcttccgctgctgctctaaggtaaaaggaacctgcttctcataaaactcaatatcatctagcacaagtaataggtgcccatatatagcacaaaaaagatacatcatgcacattaagtcctttccaataccttcagatgcatgtctcatagcttcaatatcccataaagttaatgcatcatcattagactgctgagaaattaaaatattatctggcattgtgccctcctctgaatcattggattttcctgtaatcttctggagcacatttgcccacttggttgctgtgtccttggcattccttctttgcctcgtggaggatacttgctcacctgaactacttgtagccaactgtttatcatgtcctgtttcttgtaaattctggattgcttggccaaaaatggatatttctagtgccccccataaatcaacaagaaatccaggagagaatgcaagcatattgagaataggcagcgcgccgatagaagggttgaatgatgagaaaattctgagcaagtgatagtagaagcatacaacatctgacaactttaggctccgaattggatcataattagttcccctgctgcacgaaacatcctccttttgccaatgtcagaagcttcctcaggtgccactgctggtaaattggcttcagaaggtccataaataatgttctcatgctgctgccatttg

SEQ ID NO: 5196 - DNA, 286 bp, Setaria italica
  Peptide Sequence Number=SeqID_71170
ccgcgactggcgggcaggtgagcggcgccgggggccaggccgcgagcggccgcagcgattgggcaggtgagcggccgcaggggccaggccggcgagcagcttcggcggccggggcgacgagcaggaggagggaggcagaagagcgacgccggtggcgagcaaagcatttgcgtgtcagcgtgagggcagaatcgtcatttcgccatccatctccatccactatctaacgggcctaaataagtgcatagcgccccctccccaaccgcccattgcgcgagtctgctct

SEQ ID NO: 5197 - DNA, 377 bp, Setaria italica
  Peptide Sequence Number=SeqID_71171
gaaaaaacaagacccaatccagtctagcgagaagcgctacgcggccgccgggagctcgaggcaagcgccacccatgctgcgcagcgtcgcctccacccttcccggcctccgcccgcttctccggcgccggcctctgctaaaccctaaagctctcctccgctcgcgcctgccgccgcggccgttttgcgccctctcgtcctctgcgcctccagccgccgccgcggcgcccagcgtcgagggggcgggaggggctgttgcggtggaggagcaccttacgcggtgcgcggcggcggacagggcaccgttgcgggtggctgtgctggtgagcggtggggtggacagcagcgtcgctctccgcctactccacgccgccggtc

SEQ ID NO: 5198 - DNA, 237 bp, Setaria italica
  Peptide Sequence Number=SeqID_71172
ctggcctcgccaacctcagggtggctcaccatctgcagcattgctctccagagagtttatgcgttggatcgttttggatcagctacttgtttgaccaagttgagttatctgccgagcttaagagagttgcagctcgtaatgcttgaaatggactacaccaatttagcacatatgtatgcattcttccggtgctgccagtgtccccagctggagaggctctttgtgcagctcccatca

SEQ ID NO: 5199 - DNA, 755 bp, Setaria italica
  Peptide Sequence Number=SeqID_71173
cccccccccaacgaatagcagttccagcattatccaaatcagcattgcgccagaatctattcaaccaagaaaggcgcaagtgctagctgatctgaaacgaaatcaaatagttctttccattttcccaactatacaaggtactctttcttctctcttgctcctctttaacagtagcaatgccaacaattaactagcagaaaggatgtgtcgggctaaataaaggatgaactttggaaataccactaccagccaactaggtagaacttacaggctttccggatactacatgtttcaccctatctttggtaaaagagcttcacatgcttaaataccaatcacataatacccttatccatgtgttctttcctgcaaatcctacacatttatcaatataatcacgccaccatacactaatcttcagggacaggtaaactgcgctgagcaaggtttcggacatattggtgacagtgaaatcttcacggccatctttcgtctactgtaaacgcaagcaaacagccatgctaaacggccactttgttgctacagacaagtaaataattggttgctaatggtggcagctacaagatcgacctgagcgtgaaggcagccaacgatggggctggttcccaagagattaccagagaagctccctgccaaactaggacttaggtacttgtaatttacatatgagcatagtactcccacttttcccttctaattttcttcaaaactaagtaattaattgttagttacta

SEQ ID NO: 5200 - DNA, 1155 bp, Setaria italica
  Peptide Sequence Number=SeqID_71174
tggaaacagatgtaacttaatgagtgcgaactgacagtaacacgcatcaagtttaaacatttgttcacctacaaataattgcaaaatcagaagtacatatgatcaaatcttttacaggatactgtgtttctgagatataatctatgtaactggtacttaaaaccaaactatgtggattttggacaatccaaggtcactatgattttacaaatataggctacctgcgtcaatatttacaggatgttacacatctttcacccaatcaatttttcacactacaaaacctcacaaatgaacactctgagctctttatcgcttccctatgcgttgaatgcatttgttcttaaaattacagcaaagaatcaagaacaaaaccaatgtcgcgctgggatgaagagtattccaggtcagatcatttctcttcatgatccctgcacttctatctagctgcattgtcatcgaacgatgattcagatgcagaatcgtctgaagttgtggtcgagcttgtctcacatgaactcccgttttcagagtccaatgaatgtgatgttggtcttttcaaataccagtacatgatgcttgctgtcagagttagcatcatcttctggttcacctccaatatatcttctggcaacaagaaaatggagcaaccaagcttcctagccacggaaatgatgtatgaagcattcatttgcttctcttcatctttttctcctttagtcacaaggctccaattcacaactcgaggctccacagcacttagtaaatcaaggaaaaaggtgccgctggaaaggcttctatccttgaaactttccatacgagaatggtgctttccagaatcttttacttttttattggcccatgccaatatgtcattatctgtgatctcttttccatttgagtgaaatctaagattcttcagcagttgaagaatattgtaccgcatcaattgccatagaaaagctaatatcagtttcttattcccttgcacaatatcatttccagcaatattcaccaaggaaaactttagttcttttccgatcttcaaaacttgattgcaattttcaactttcttgaatggtagttttattggcggacgatttgccatcttccaattaactgagccaggagcaaccttgtcaagcacctcaagga

SEQ ID NO: 5201 - DNA, 482 bp, Setaria italica
  Peptide Sequence Number=SeqID_71175
ttgaagaatattgtaccgcatcaattgccatagaaaagctgggataaatgcaccatctaattatatggtccaatcataagttgcaagagatactatgtgtagtgcagaattaactaaatcaggtgcatggcatataaaaaaaatgcatgaacaaaagattcattgtattccatgctttccgatgacaggaactgtataatttcaactgtgaatatcatcataaaacagttctgtagtttggcatgctctaaaaacttgacagatcaacaaactgatatattgtaaatcctgtcttaatatggcatccttgcatcaaatgtatgagcagcagatcagtggaaacagatgtaacttaatgagtgcgaactgacagtaacacgcatcaagtttaaacatttgttcacctaatatcagtttcttattcccttgcacaatatcatttccagcaatattcaccaaggaaaactttagttcttttccga

SEQ ID NO: 5202 - DNA, 384 bp, Setaria italica
  Peptide Sequence Number=SeqID_71176
cttggggaggctcatgcaggaggggctgcatgagtataatcaaggaaggcgtgctgcgaatattgagaagaagaggaggagaggggagattgaggttaagaaagaggaagagaaggtggaagatgaggaaacagctcagctagatagtgcagagaagagggaggagaggagacggttttacaaggtgttgttcgatgatggcaatcggtgattgttagaggaaggtgaagatcatcagcgtatgatttgcttattggaccttgcgctgttgagcactttgctattttgcaatgtatgaaatcattcattcatggatgcaattagtttgacaaactatctacatctaaaaatgtcccccctgtgcaggaatagtattttgttgta

SEQ ID NO: 5203 - DNA, 899 bp, Setaria italica
  misc_feature (1)..(27): n is a, c, g, or t
  Peptide Sequence Number=SeqID_71177
nnnnnnnnnnnnnnnnnnnnnnnnnnntttttggttatggacggaaaactttggtacccatctgattgacatgtaccaaaaacaatacgcgtgagagccacccaatataccactggaacaaatagcacatattaccacgattatcatcagaacacaacatcatcatcaacacacagcctgcacggattactgtttagcacaggccatccggcaatccatccacacacactcacacacacagaattactctaagagtccctgcttaatttgcctgcaggttagcttacaacaatcagcgtagtctactaggattttgtggcagatcgacacacatagcacgtcacgttattacaggaggtgatgtgcactgccaagttaattagcacgtagtagtgcacaacacagtggtagggtagagacacgcacggggattaatttgcgcttagctgcatgacagaagagagagagcatgcttagataggtttatctgatctggaagtggttcggcggcgggttcccctggtggccccggccgtcctggtcggcgtggcggcacccatcgccgccgccgctgttgctgccgccactgccgccgccgtgcgtgtccgccgagctcttccggcggcgctcgttgtgccccgccaggcgcaggcggcagctgcgcctggtctcgtcgaactccgacagctcgtggaaccggctgcattgctggcagaagcgctggcggaggccggcgacgagcacgacgggggccttggagtgcgtctggcacaccttgtgcctccggttgtacgtcgccgcgtcgctcaggtcggcgttgcaccgctccgcctggcacctcggcccgccgccgccgccagccgcagcgcccctcctcgccggcaccggggacgagctgg

SEQ ID NO: 5204 - DNA, 402 bp, Setaria italica
  Peptide Sequence Number=SeqID_71178
acataagatcatacaagtccaatatcaaaaagtgatgtatggaactgttctcaagcaaacaagcatttaagttgtccttcagagcaagatagattacccttggatttgaggctgaggatgcttgtgatgccgcctgagatgccatttgcctctgaatctccaaatgcagttcaggtgcctgataattgaaagcaaatgttacaataacaatcttatacaagtgattatcactcgtacaagcatgatacgaatatgcggctaaaatgaaacatcataattgaagttctcaacattctgtttttatcactgcaagttgtaacaagcacaacagttgaatgtaataagttaaaaggaaaagaaacgtgatttctgacacaaaactaaaatccagtaagattatct

SEQ ID NO: 5205 - DNA, 1197 bp, Setaria italica
  misc_feature (1)..(46): n is a, c, g, or t
  Peptide Sequence Number=SeqID_71179
nnnnnnnnnnnnnnnnnnnnnnnnnnnnnnnnnnnnnnnnnnnnnnaaaaaaaactttaaaccatagatttatttatgcattgctaaaataggataccgcgtgatgtgtggtaccttttgataacatccagtgtatcaaagtgaacaaagcaaatatcgcagcatgtaatggttttttgcctctgcaagtacaaaattatccagcaccgtatgtcgatgataaagaggaaacctcatcaagggtagaaaggaaaactggcatgaaaatttgaccaaaccgtaacatggaaacaccatcccctcggctctccatacacaaactaactcctagcaagattcatgtccgaggcacttaacataggcatgccatgtgcaaggttgtctgcgatgcatccagttcaccttcacctggctgggggcggtggtggaggggggatgtttgatctggccatcccaacccaagcaaaaatgccgacaccaaggatcacccatccacacacatcgtaccagaagtcagtatccttcttcttcttccttgattgccttggatttgaggctgaggatgcttgtgatgccgcctgagatgccatttgcctctgaatctccaaatgcagttcaggtgccttagatgacaagtccaaagactttctgtatagctcatttgcaggttccacatcaacagccttctggaaacactcggttgcctttacaaagtactcatttgccttctcgttatctgcactgaagaatccatgagaggtctgagcatttcccaagcaccagagtgcatcagccttgatgggatcaactttcagtgcctcctccagcttggattccgcatcttcaaggcacttgaggctctcgggcccggctttcacctgcgacagttccagcagcgcgcctccccatcgcgtcaggttgtcggcgtcgagggggttctgggcgtacgcggcctcggcgttcctgcaggcggcctcgaagaacaacatccgctccctgtcgctcaacgctcccagctccatggcggcggcggcgggttccgctctccggcggcgggttccgctctccggcggcgggatccgattcggggggttagggttttaggctcgcctctctgtttctctcgctatttctcgctgagatttggggagggccggagctgcggtgggcggtggggacgtgggcgtgtactagtcg

SEQ ID NO: 5206 - DNA, 355 bp, Setaria italica
  Peptide Sequence Number=SeqID_71180
gccatcgctaggccgcggcaccgcggccactgcatgccaggccatggccgacagccaggttagtccaatccacgttcaacggcagggcacaaccaggcaacggttggcagcgtcaggccgcaggcagctggctcacggccatggccacagctagttcatcgtccacgccagccaagctcgtccacggccccaggccctggctggcagccaagctcgtccacggccagcgagcgcgtagtaggtacgtacagttcttcttctttataactggcatgacaccacacctctgttggaaaggtaataaaaaacagaattaatcaattgcttctattatttcaatagacttgtgcaatcc

SEQ ID NO: 5207 - DNA, 434 bp, Setaria italica
  Peptide Sequence Number=SeqID_71181
aagctgaaaaggtaaatcgaggaaatgaagcttaaggttgtttacacattacctagtggaggctcagacgactctagtgtttcatctttaggaagcaggagcttcaaaggagcgtctgatgatctgacgatgctgaagaacgcaagcttagaagagatccagacaattcagcgcctgaaggatgaacgagataacatgcttcagcaaaatcagcaaatgcaacgtgaattggatgtgctccggaggcgtcggagccgcaaaggcgacacgggtttctccttgacgtttgctgcattcgctggcctaataggtgttctggtcggactcctgatgagcctcatcttctcgtccccaccggccactgcttgagatgcagaggttgcaacctagagaatcaatgttcagatccacgtcacgatgaactctagaaaaga

SEQ ID NO: 5208 - DNA, 252 bp, Setaria italica
  Peptide Sequence Number=SeqID_71182
ccctgcggcggcgcgtcgaccggcgaggcgacgagccgagcaggtgcgtcagggagctccctgcggaccacaccacgaggcaatggagcctagccgcgaagtaaaggatgaagcggaggagcggctaaggtccgacgaggaggaggaagaggaggaaggagaggaggggtgggatgactggtgctccgacggcgacgatgccggcggcgggctgctgtgcttgttctgcagctcgcggttcgacgccgatag

SEQ ID NO: 5209 - DNA, 362 bp, Setaria italica
  Peptide Sequence Number=SeqID_71183
tggaggagggggagtgccccgacttcctggtgcactgctgctgcgagcacctggcgctgtgccaggagtaccgcgagctcaagaaccgcggcttcgacctggggatcggacgaacggagtagttagcttcaaccagcgccaccaattttttgggtgtggtgtgtggatgatgtgctcaactgctcatacgtactgaacactgacgcgtcgtgtctgtgcgcgagaaggttgggatgccaacgtggatcggcagaggcgaggcgtcgccggaggcgcggtgatgggggcgccggccatgccgctcggcatgattagataggtgatggatgtgaaggggcggtgtttagcttccaactttccgg

SEQ ID NO: 5210 - DNA, 414 bp, Setaria italica
  Peptide Sequence Number=SeqID_71184
gagggccgagtacgacctggaggagggggaggtgccccgacttcctggtgcactgctgctgcgagcacctggcgctgtgccaggagtaccgcgagctcaagaaccgcggcttcgacctggggatcggtaagcgctcgctttgccttgctttgcttcgcttcaatctcaagttctcaggttctggcctagtgtttagctacatttagaacttttttaaagttaaatatttttcaactttaactacgaatagagaaataattatagagatataaaaataatgccagtaaatttatcgtgaaaccaactattataatattaacttttttatttgaagtaaattattttagaggtattgttggttaaagttaaaaagatttgaatttaaaaaaagctaaacgtaccttaaaatttttt

SEQ ID NO: 5211 - DNA, 909 bp, Setaria italica
  Peptide Sequence Number=SeqID_71185
gcataaacaacagatcgcactcccaagcaatgtatccctcggcccctccggacgcgtataacaagttcaccaccggagctccgccaacggcgccgccgccggcagcgtaccagcagcacggggcgaacatgaacccttcgcgccccggcggcgcgctgaggacgtggtccaccggccttttccactgcatggacgacccggggaactgtctcatcacttgcctgtgcccgtgcatcacgttcggccagatcgctgacatcgtggacaaaggaacctgctcgtgtattgcgagtgggctgctctatgggctcatctgcgcctcgacggggatggggtgcctctactcgtgcctctatcgatccaggctgagggccgagtacgacctggaggagggggagtgccccgacttcctggtgcactgctgctgcgagcacctggcgctgtgccaggagtaccgcgagctcaagaaccgcggcttcgacctggggatcggaagttgggatgccaacgtggatcggcagaggcgaggcgtcgccggaggcgcggtgatgggggcgccggccatgccgctcggcatgattagataggtgatggatgtgaaggggcggtgcttagcttccaacttccgtggtccttgtgttgcactgtcgttcatctttttctcgtcttgcgagtggagatcagaatgcatgtactttctttccttttccccatcgcagagtgcctgtgtttaagttggttgtgcatttgtgtattgcctactgtagctacttagcatctgcaattgtactcttaagtgccgtgggctttggttgtgtgtacatacattccattcatgcttgttgtaatccgtaatccgtatgtactaaaaggtatggatttgacaattcggttcagagatctcaaggt

SEQ ID NO: 5212 - DNA, 145 bp, Setaria italica
  Peptide Sequence Number=SeqID_71186
tgagtctctggcctctgtttcaaagatgctctgcttgtacggaagttgatcccgcatcttttttttgttcaaaaagctccgttatgtacctgtacgttcaggtttataattgatggctcagatcaaaaatgcaactgcaattttg

SEQ ID NO: 5213 - DNA, 423 bp, Setaria italica
  Peptide Sequence Number=SeqID_71187
tcttgtactaggtattaaattctttgtactattctaagtagtagttggtttggattacagacaatggtgcaacaaattatggaatgccatccgttttgcgatgggcaaactgggtgatcattacattccaccttcaactgttgatgtatcttcgatgccaccaatctgcaagtggatactctcagtgcttaacaaggccattggcaaaactgttagctctttagaagcatacaaattatctgatgctacatctactatatactcttggtggcagtaccagctatgtgatgtatttatagaagctatcaaaccttacttcttcagcgattctcaagagtttgaatcagcaagagctgcctccagagaataaccctagtaggaataatagacctaggaagaactaggtactagacaacctagaca

SEQ ID NO: 5214 - DNA, 765 bp, Setaria italica
  Peptide Sequence Number=SeqID_71188
cttctacaatggatgagcaaaggtcaaatgcagtaactgaagcttttgtaaggttacacaaagaaggcttgatatatagagattatcgccttgtgaattgggactgcacacttttaacttcaatttctgacatagaggttgatcatatagatcttaaagaagaaacaatgttaaagatccctggttatgctgctcccgtacagtttggtgtgttgatatcttttgcctatccgcttgaaggactaggtgagattattgttgcaacaactcgaattgaaacaatgctcggtgatacagcaatagctgttcatcctgaggatagaaggtaccagcatctgcatggacggtatgcagtccaccccttcaatggccgaaaactcaaaataatctgtgatcctgaatttgttgatcccacttttggtactggggctgtcaagattgcacctgcccatgatccaaatgactttgaggttggacgacggcacaaccttcagttcataaatatcttcacagatgatgggaaaataaacagcaatggaggtgcacaatttgaaggaatgccaagattcactgctcgaatttgtgttattgaggcattgaaggcaaagggcttgtacaagggtacaaagaagacagaaatgactttgtgcgtttgttcaagaaccaatgatgtactggagcctatgataaaaccccccccagtggtttgttaattgtaacaccctggcaaaggtaggccttgatgctgtaaggtctaagaagatt

SEQ ID NO: 5215 - DNA, 834 bp, Setaria italica
  Peptide Sequence Number=SeqID_71189
tggcatgacacctgagggtatcgcaaaacgtctggaagaaggtaatctggatccaactgtattaaacattgcaaatgaaaggaagctgaatgattatcctgatggcattgctgaatgtggtaccgatgccctccgcttcgcactgatttcttacacttctcagtctaacaggataaatctcgatatcaagagagtggttggataccgacattggtgcaataaattgtggaatgccagccgctttgccatgggtaagcttggtgaccactacagtccacctgcaactgttgatgtgtctctcatgccaccaatctgcaagtggatactttctgcactaaacaaagctactggcagaaccatcgcctgtttagaagcatacaagttctctgatgcagcatctgctatatactcttggtggcaataccagttatgtgatgtatttatagaagctataaaaccatacttcttcaatgaccctcaagaattcgaatccgcaagggtcgcctccagagatactctatgggtttgcctggacactggtttgcgcctgctccacccattcatgccttacttaacagaagagctctggcagcgtcttccacagcccaaatattcttgtaggcaagcttcaattatgatttctgaatatccatctcttgttgaggaatggactaatgacaatcttgaacacgagatggacgttgtcttagatgccgtgaacaaaataaggtctctgaagcctccaacagaaagaaataaaagacggcctagcttttgcactctgccgaggccaagatatcattgccactatcaatgaccaccaatctctcatcg

SEQ ID NO: 5216 - DNA, 741 bp, Setaria italica
  Peptide Sequence Number=SeqID_71190
aaaaagaaaagggaaaagaaaagaaaaagaaattttaacctaagaataggacaataagctagaatgtggtaccgatgccctccgcttcgcactgattgcttacacttcccagtctgacaggataaatcttgacatcaagagagtggttggatacagacaatggtgcaacaaattatggaatgccatccgttttgcgatgggcaaactgggtgatcattacattccaccttcaactgttgatgtatcttcgatgccaccaatctgcaagtggatactctcagtgcttaacaaggccattggcaaaactgttagctctttagaagcatacaaattatctgatgctacatctactatatactcttggtggcagtaccagctatgtgatgtatttatagaagctatcaaaccttacttcttcagcgattctcaagagtttgaatcagcaagagctgcctccagagataccctgtggatatgcctggagactggtctgcgcctgctccacccattcatgccttatgtaacagaagagctctggcagcgtcttccacagcccaaagattcttgtaggaaagattccattatgatttcagaatatccatcccttgttgaggtaatacctgtgtcctaaagaagattctgtaggaaaaattcaattacaatttgaggacagagtctgagtacttgtttacccatgggaaaatattggtctcttttattgtactagggggttcgtactta

SEQ ID NO: 5217 - DNA, 2018 bp, Setaria italica
  Peptide Sequence Number=SeqID_71191
gatacaatctctatataagttgatagtaccgttatatataagttgcaagctcaagtaaatttacttcaaaacctatggaatatgggtcttattttgtagattatatcgcaaggaacacaactgtgaaaacggattaaaaaacggactcttaatgagttatcatcattagaaaaaaatggaacaaataaacacgatggcagtctccatgactccacctaaccgtcctgcatggcaattaagaaaagcatgcggaagcatgcggttgttgtgttgtttcacacggacaccattagatggataaaggggtcgcgcgctcaccctctgcgcgaccagtcgcgcgttaacgagctccttttgacatctgctctcgtgtatatcaggttgttgtagaaaagaagcttgtgcgtgaaaggaagctgacaaggcatgacatagggcgtaaaaattttgtttctgaagtactcaaatggaaagatcaatatggtggtaccatattgaatcaattgcaccggcttggggcctcacttgattggtcccatgaggcttttacaatggatgagcaaagatcaaaagctgtaactggagctttggtaaggttacacaaggaaggcctgatatttaagttagttccctcactactttttgttcgagtagactatcgccttgtgaattgggattgcatacttcgaactgcaatctctgacatcgaggttgatcatattgatcttaaagatgaaactatgctaaaggtccctggttatgccaatgaggtgcagtttggtgtattgatatcttttgcctatcctcttgaggaaggactgggtgagattgttgtagcaaccaccaggatcgaaacaatgctgggcgatactgcaatagctgttcaccccgaggataaaagatataagcatctgcatggaaggtatgcagtccaccccttcaatggccgaaaactcaaaataatctgcgatgctgagttagtcgatcccacgttttgtactggggctgtcaagattacacctgcccatgatccaaatgactttgaggttggaaaacggcataacctggacttcatcaatatcttcactgatgatggaaaaataaacagcaatggaggtgcacaatttgaaggaatgccaagattcactgctcgagttgccgttattgaggcgctgaagaaaaaagtattactggattttcttaactatatccccttgatatctgattatcaatcttttttatgaatatatgaattacaatatgtggcatggaatgcgtgatttaacagagtgaaaatgcaaatagtgaaataccatggtctttgtatcataaccatgatctatctatttatttcctagtgtgttgtacaaaggggaaaaaatcagtatagtaatacggagtcacgttagttctaccatgatcttcagttcagtatcagtactggaaatagcttatcagcatcagattgggatcggttatcaataattatgatttttctaggatttcatgttttatagatatccttcataatgtggaaattgttgatagatcacttgataggtctttggcttcttgttttatatgatggattaacctttttttattcttctaattaaggggttgttgttgacaccgttttttgacatacgtcaaagatggcgtcaaaaggaagtagaggtgccgatgcatactgaagagacaacggctagtggaatcggccgatagggttgcagagggcacagccgatgaagttataagagatcgatcgatgatgacgaaagctttgccgatggaggatgatagaggcatagccgatggagtcagccgatgtgaacagaaggattccagccgattggaaatgtcaaaggttcagtcgatgaagagcaggttttggccgatagaggccaagttcgtttccgactcctgcgcgagtcatttttatttatttagggagtttgtttctttagagatagatcttatgtttgtcgtaatcgactaggactagaagttttgatgtc

SEQ ID NO: 5218 - DNA, 799 bp, Setaria italica
  Peptide Sequence Number=SeqID_71192
gcgcagggccccgtcgagctccccgccggccaggtcccggccggactcagtcgcactagtgctgccgtccgcttcatggccgatccggacaccgacgaggtcttcgccaagatccgcctcgcccccgtccggcccaacgagtccggatacgctgccgacgccgaagacgccattggcgccgccgcgggcgggcaggaggacaagcccgcgtccttcgccaagacgctcacgcagtccgacgccaacaacggcgggggtttctccgtgccgcgctactgcgccgagaccatcttcccgcggctggactactcggccgatccccccgtccagaccgtgctcgccaaggacgtgcacggcgtggtctggaagttccggcacatctaccgcggcacgcctcgccgccacctcctcaccaccgggtggagcaccttcgtgaaccagaagaagctcgtcgccggggactcgatcgtgttcatgaggacggagaacggggacctctgcgtcggcatccggcgcgccaagaaaggcggcatcggagggccggagttcctgcatcagccgcctccgccgggcggcaattacgggggattctccatgttcttgagaggagacgaggacggcaacaagatgatggccacgaggggaaaggtcagagtgcgggtgcggccggaggaggtcgtcgaggcatctaaactcgccgttgagtggccaaccctttgaggtggtttactacccgagggcgagcactccggagttctgcgtgaaggcgggggctgtccgagcggcgatgcgcacccag

SEQ ID NO: 5219 - DNA, 1409 bp, Setaria italica
  Peptide Sequence Number=SeqID_71193
gggataatgatcgaattattcatcaactaaaaacgacaaattttcttttcaaaaaaaatattcatcatctagaacagacaaagtactagccaagataaattcacctgtagttcacaacaagaagattataccctagacgaaaaaagaaaagccaaggatttggaataacttgatgggtaaactgagtgtggtccaccatgaagaacaacaattgttggattacttgcagaatccttatgcgacacaaaaatagcctcaaaaggcagcttagccccatctgcaagtttgtcggaaaggttgctaatcgggactttgagtatgctgaacttatgttctgataatatggagcttatctcatctgacagctttggcagaggagttgaaacttcttgccactcccaatggctttcaatctgagaaaccttaattccatagtatatttgagggagtgtaataaggctgctggaaactgcaagaatgtcattcttgtcaagtgcaagaacattccatgaacaatctgaatcctgaggactaactcttaaaacttcacagctcacaacatttatggaaagtactacttccttactgccccaaacagaagatagaatcatagtccgtccatcagttagccatggatccctaagcaagccaaagcagtacagcccagggaaacagttctctttggggcacatcacaatgggcaccacgtcagcaacaccaaggctcccatccagtttcccatctgtaggccactcaattctatgcattgaatttgtggcattgtgtgctccactatctacagcactcttcgctgagatgaacacaagatacttcccatccggactgaaccgtgggaaaaaggcactgttcaggtctgctgttaatttgatcatagttgtagtttcacccttatcgccctcggttgatggtttctcagcttcttccctgaaaggatgaggagcagcatacagagcacaaggtctgttgtagcagtatttaataccaagctttcttggagtatgttggaaaccattgtcagatgaccatgcaacaaaaaccaagccatatgaaggtgatggtgcccaaatcacttgaccaacacttaatgatctaggtattcccttcacaggtcgaacttcaccactggatatgttgacaacaaacagtgcaggtatccttttcttcgaattacctgcactgtttgttgtcaacatatccccttgtcccttccagctcttgcagtccttttcagatgagccttccttcttgaatccgtaatcattgaacactggctttggttgaggaggttcctcggcaacataggctacaaaagtctcttcctggttccaagatatcccttcaaaccattcatcagtatagagtgatccatgaacagattttgcaatatg

SEQ ID NO: 5220 - DNA, 349 bp, Setaria italica
  Peptide Sequence Number=SeqID_71194
cagctgtccgctgtgctcccccatcgctttccccttctccctcccccctcacccagatgcgattccgcctccaccaccgccgccgcgcctagccgagccgccgccacccacccccaccccgccgcaatggcgagcgcgtcggaggacgaggccgcctcggaccgctgctgcgggagctacagccccagcgccgacgtcagcgagtccgagacctccagcgactgctccgcgcccactacccgccgcttcgcatcctcctcctccgcatccgccaccgtctcccgcctcgcctcctcgtcctcgtcgctccccacgccggcgtccgccgccgcctttctacctctccaag

SEQ ID NO: 5221 - DNA, 491 bp, Setaria italica
  Peptide Sequence Number=SeqID_71195
aaagaaacagcagcaacgaggcgcaccggggggacggcgacgccatgcgcgccgccatggaggagcttctgtacggcgggcgcgtggacgccgtgttcgctgggcacgtgcacgcgtacgagaggttcgcgcgcgtgtacggcggggaggaggacccctgcgcgccggtgtacgtcaccatcggcgacggcggcaaccgggaggggctggcggggaagtacgcggacccgcagccagcgatctcggcgttccgggaggcgagcttcgggcacgggcggctggaagtggtgaatgccacgcacgcgctgtgggcatggcaccgcaacgacgacgacgaggcggtgctcgccgaccaggtgtggatcaccagcctcgccgccaaccctgcttgccatcgaagcaagaactaattactgtaatgcatacagtctcggtaccaaattaatagtcgattgaatatgcaacggaagaagatgatttttataccaatt

SEQ ID NO: 5222 - DNA, 812 bp, Setaria italica
  misc_feature (780)..(780): n is a, c, g, or t
  Peptide Sequence Number=SeqID_71196
tttagtacttaattacttactaaaacttaacctaacttaagtacctaaaaattaaattaactggcaatatcaaacataaagttaaatccccaacaaaattctgtaaagttggtcggcaacaacggtttcatcaaacaaaaaaatttgcaatacatctctgctacaccatattacatgtaaactttgcacagtaaaaaactcgatacaaacaaaagcgaagcttaatgctgcaacgggagttctgttgggtggtccaaatttgctgccgcagccaatggtctgctaggtgactgaaacttctgtaggagaacaatgatccgcagccattgttcgaggagatgcccagctcttttgcttcggaggaaggacatgacatggagttgtaaatacaatctgcactcagtgacgccttctgtctctatgttcatctctagaatagcgatctccacgatcgctccttgaatggtaatatgagtcatcatcatgccttgacctcttggaatcatggatatccagatctctagctctatgacgaccatgctcttcatgtcttctctcatcacctctgttctggtggcctctgtatccctcatctctaactctacttaaatttgggtcataccgatcatcttctaattttcttttgtagtctctctccacaccatttccacctttccttctatcttgctctctgtccctcggtctctcttcctccctctcttgctgccttttcttctccatctccatcctctcttcatccctctgccttttgcttctctngcttctttcctctcttcctctctctgtctttt

SEQ ID NO: 5223 - DNA, 1009 bp, Setaria italica
  misc_feature (6)..(6): n is a, c, g, or t
  Peptide Sequence Number=SeqID_71197
gccggnggccctcgagatgctccacgcggcgtcgctcgtgcacgacgacctgccctgcttcgacgccgcacccacgcggcgcgggcggccctccacgcacgccgccttcggcaccgacatggccgtcctcgcgggcgacgcgctcttcccgctcgcctacacccacgtcatcgcccacaccccgtccccggacccggttccccacgctgtgctcctccgcgtcctcgcggagctcgcgcgcgccgtcggatccaccggcatggcggcgggccagttcctcgatctggccggcgccaccgcgctcggcgaggccgaggtcatgcgggtcctgacgaagaagttcggcgagatggccgagtgctccgccgcctgcggcgccatgctcggcggggccgggcccgacgaggaggccgcgctgcggcgctacggccgcaccatcggcgtcctctacgagctcgtcgacgacatccggagcgcgtccgggaacggtaagatgaggaggaacgccagcgtcctgcgcgcgctgggcatggaccgcgcgctcggcatcgtggaggagctcaaggcgcaggccaagacggaggccgacaggttcggggacaagtacggcgaccgggtgctccccttgtacagcttcgtggactacgcggtggagagagggtttgaactccaggatgcagcggcaacgccgtaagagtgcgcgatcgcagttgctactgaaaattggagcaagtgacatgcatatggttcttagaattggtgacagctccatttgtcagaaattataatccctctgctatagttgtttagacgcttgaattcgtaattccctttggcgagagattgtccgtagagttctcacccctgatatagatgttcagaactttgaacttgggttgatgtctcggttgaggttttgtagtagtacgttgataaaataagatggcattgctcaaaaaaaataaataagatggtaccgagtgcaagatacttaaaaaaaaaaaaaaaa

SEQ ID NO: 5224 - DNA, 393 bp, Setaria italica
  Peptide Sequence Number=SeqID_71198
ccatcaaggcgtggcgccgggtgtcaagcatcatcttcgcgaccacgttcgcggccgtcctcatctgctcggtggttgccgcggccatcgctgccccgcctgtcgctgccgcgttggccgcggccgctgcagttcccctggggtctatggggaagtggatcgattcattgctgaaagggtatcaggacgcgctccgaggacagaaggaggtggttagcgcaatgcaggtcggcacgttcattgccatcaaggatttggacagtatcagagttctcatcaaccgggtggaggtggagatcagctcaatgatcgactgtgtagagtttgcagagcgggatgaggaggcggtgaaatttggggtggaggagatcaagaagaagctggaaaatttca

SEQ ID NO: 5225 - DNA, 462 bp, Setaria italica
  Peptide Sequence Number=SeqID_71199
aagaaacaagaatgctgggatttctgaatagtaggtatttgttcattgggcttgatatcatgggcttcaggttcttcgcaaacaactaccataaatgacctgaaagctggtcctggagtctttaccttcaacctcacttgggatgatatttcgaagaacctgaagcccttgatatcaagcccaatgaacaaatacctactattcagaaatccaagaaacaagaatgctgggaatttcatgaggctatcagactttttggcctttgcaaaagacaaggatttgtcgggaatcatgatcacggtagaggtaagaattctatgatgcgtaactgggtcacatctagtgtgaacccttatttgagtgatattaagctaattagtggtgctggctttggatggggcttggcctgtgtcaagtagcaaaaagattttacagattttgctagattcacactagcaaaag

SEQ ID NO: 5226 - DNA, 2543 bp, Setaria italica
  Peptide Sequence Number=SeqID_71200
agggggcgagccgcgcctgctccgtccttggctccgccctgctcctgctgctggtctcgctcggctccgccgccgcgcagaagggctccacctggaagaccctgagtggcaaggctccagtgatcattgctaagggcgggttctcgggccttttcccagattccagtgatcttgcttatcagtttgttcctattgctagctctcctgacacagccctgctgtgtgatgttcggttgaccaaagatggtgctggaatctgccttcccaacataaagatggacaactgtacgttcatatctgatgttttcccacagggtaagagcacttacaatgttaatggtgtatctacgacggggtggttctccgtggacttcacaagcactgatctgcaaaacgtaaccttgaggcaatcgatcttttcccgtccatcttactttgatggttccatgcaaatagttcctgttgaagctgttctgtccgtatttaaggcccctgctgtttggttaaatgtgcagcatgacagtttctacagccagtttaagctcagcatgagaagctatatcctgtctctgtcaaaacaatacattgccgactacatctcatcgcctgaagtgaacttcctcaccagcatatctggaagagttagcaaaaggacaaagcttgtgttccgctttcttgatgaacgctccattgagccatctacaaaccagacatatggttcaatgttgaaaaatctgactttcgtcaaaacttttgcttctggaatacttgtccccaaaaactatatttggcctgtgacaccagacaattatctgctctcctatacatcagtcgctgctgatgctcataaagcagggctagaaatctatgctgctgattttgcaaatgactttactatcagctacaactacagctatgatccattagcagaatacctttacttcattgataatgatgccttctctgttgatggtgtattgactgatttccctatcactccttcagaggcagttggctgctttagtaacctgaacaacagcaagacagatcatgctaagcctctagttatctctcataatggtgccagtggtgactacccagactgcactgatcaagcttatcagaaggcagttgatgatggtgcagatgtcattgactgtcctgttcaagtgaccaaagatggcataccaatatgcatgagttcaattgacctaattgatgttactaatgttgcaaaatcagaatttgcttcgcaaacaactaccataaatgacctgaaagctggtcctggagtctttaccttcaacctcacttgggatgatatttcgaagaacctgaagcccatgatatcaagcccaatgaacaaatacctactattcagaaatccaagaaacaagaatgctgggaatttcatgaggctatcagactttttggcctttgcaaaagacaaggatttgtcgggaatcatgatcacggtagagaatgctgcattcatggcagagaaacttggatttggtgtggtagatgcagtgatcaaagcccttgatgactctggttacaacaaacagaccgcccagaaagttatgattcagtcaaccaacagttcggttctagtgaagttcaagcaggaaaccaagtacgaccttgtctacatgatcgaagaatctgtcagagatgctgcaccttcctcccttgcagatattaagaagtttgctagcgctgtttctgtcaacacccaatccgttttcccaacaactaaccaattcttgataaaccagaccaacaagcttgttcccaccctgcaatctgctggcctttcagtttatgcttatgtgctcatgaatgagttcacttctcaaccatatgacttcttctcggacgccaccgcacagatcaatgcgtatgtgcaaagtgctaaggtggacggaatcatcactgatttccctgggactgctcacagatacaaattgaactcctgcatgggaaagaatgcacctgactttatgcggcctgcgcagccaggggggctcatttcagtcatggaccaacgtgctcagccgccagcggcggctccaatgccactcttgacagactctgacgtcgcagaaccacctctacctccggtcagcaacaccaccacagcttcatcgccttcgcacgctgccctcagaatgaagaccgatgtctccattctcgtcacgttgctggtgctgtgtgcttctctcctgatctgaagatagtcctgcacattcggcattgggcgctagagctctgaggaattcttatcgagctgctaatagctattctttccaccacttttatgtagcaattctttttttgttttgcggaatttgggggatgtggatgttcagcttgatacctcgacggtggcacttgtgtgctgctcctagcaacattttggtacatatgtgtggtgatacactgttcagtgttcaggtcattcttttttccttgcctacctgcctttggattctgattattatgaattcacatttcactacaaaaaaaaaaaataaaaaaac

SEQ ID NO: 5227 - DNA, 769 bp, Setaria italica
  misc_feature (723)..(723): n is a, c, g, or t
  Peptide Sequence Number=SeqID_71201
tattactttaccaaccaacttttaatgtaagcaattctttttttgttttgcggaatttgggggatgtggatgttcagcttgatacctcgacggtggcacttgtgtgctgctcctagcaacatttttggtaaaaaaaaaaaaaaaaaaatatcagagttctcatcaaccgggtggaggtggagatcagctcaatgatcgactgtgtagagtttgcagagcgggatgaggaggcggtgaaatttggggtggaggagatcaagaagaagctggaaaatttcatgaagagtgttgaggatcttggggagcaggcagaccggtgtagccgggatatccgacgggctaggaccgtcgtgctgcaaaggatcatccggaatccaaactgaaaaaagaaaaagaggaggaatgtaagggattggtgacagtgatgtgcatgaaagggtctgtggcttagacgaagaagcaaacaaagtaatgattgtcctaaagcaacaaataatgctcgtggacttgtgtgaagaagaatccgcataactaacttatatgttccttatccaattgtctgatatttatggttaataacaccggcatgattcttttcccctccttataccttatttttaggacatcactatactgttctctgggtagtatactcgtatccctatatatctctcctaataatcgccatgagaaatgctgaagtaagtaaaaaaaaaaaaaaanaaaaaaaaaactaaaagagaactagccaaggacacacagggatagg

SEQ ID NO: 5228 - DNA, 993 bp, Setaria italica
  Peptide Sequence Number=SeqID_71202
tagcgagcaattgcaaggccgtcgtcggctggaagagcagctagctagcatccacacgcagacacgctacagctagtagtaccgggatcgacgagaggactgcgttaacctgccactctgccaaccgtgtcagtaacttgcctttccataatcagtggacaaattgcatgcaagaaggagaacaagagactttcctttcaaaaaaaaaggagaagaagagactagaagcgaggaagaggaccagaaggtggagcgataagagaaagcaggaggcgctggtggttgagcgcaattcatccatccattccattccgttccgttcccatcccaaaagaaaacgaaaaaccatggcgctctcgctgtccctcgtggcgccgccggtagtagctgcagccgccggcagcaccttcagctctcggagtagtaggacggcgctgcggcgtggtggtcggaacggcagggtggtggcgatggctgacatactgggcgacttcggggcgcgcgaccccttcccggaggagatcgagagcaagttcggggagaaggtgctggggaacgtggacaccctccaccagatcctcatcccgacgctgtcggcgctgtcgctggccggcctgccgctgcagcccggcgcggagcccctctccctcgacgacgcgcgcgggctcctcttcaaggtcgtcggctggaggctgctcctctccgagcacgacgaccagcggcccgcgcggctgcagtgcgtctggaaggtgcgcgacgagtcctgcggccaggagctcatcgccaggatcaacgtcgcgctcgacggcgccggccacgccccagcagcgctgctcctcgaggcccccaccaaccagcagctgcaggtgagggccgagctctccacgccctccgccgccggcgacagcctcaccatcaacgactacatcctcgccgctaggatagacaaagtcaagacgctcgatcttatccccaagaagcgagtctgggcat

SEQ ID NO: 5229 - DNA, 232 bp, Setaria italica
  Peptide Sequence Number=SeqID_71203
aagtctttaaggacccatctgggatcaaaataaatgcaaccaagtccatgataggacactgccttggtggcattcacctccgccagatcaccagcaagggtggatgtggcatgagcattgatatagttgacctcctctggtgccacaccagcatcttcgagactttgcttaatgcatgacgaaacaccaaggccatcggatcttgggtcagtcatatggtaagcatcactaa

SEQ ID NO: 5230 - DNA, 329 bp, Setaria italica
  Peptide Sequence Number=SeqID_71204
ctgaaaccaacatccatcgcaagcaacgctgagcccatgtttgttatagcatacggaataaagaaaggcgaaatttttctgtatcccttctcgatgagattctgaacgccatcagaaaacacagtaaggccacccatgccagtccccacgagaactccagcacgcactttgtcaagcttgacgtgcgcgtcggagcccttggcgagcccggcgttctcgagcgccttcttgccgctgacgatgcagtaccggaggcagtcgtcgagcctgcggtcgttcttgccgtcgatgtacccctccgacgagaaatccctgatctgggccgcgaa

SEQ ID NO: 5231 - DNA, 541 bp, Setaria italica
  misc_feature (16)..(16): n is a, c, g, or t
  Peptide Sequence Number=SeqID_71205
attctgaacaccatcngaaaacactgtgaggccacccataccagtgcccacaagcacgccagcccgggccttgtcaatcttttccatgggcttggagccgagggcgatcccggcggactcgagcgccttcttgccgctgacgatgcagtaccggaggcagtcgtcgaggcggcggtcgttcttgccgtcgatgtacccctcggaggagaacccccggatctggccggcgaagcgggtggggaacttggaggcgtcgaagcgatcgatggggccgatgccgctctcccctgcgagcaggcggtcgtagtaggcgtcgacgtcgttcccgaacacggagaccagccccatccccgtgatcaccacccgcttcttgggatccgtctcccgccgcggcgccgcctgggtggccgccgccgccgccgtgcggacgggccggagagcgcggcggcgtgcggaggaggaaggagggggcaggcggagcccgagggtgtgtgcgggcgcttgcatggcgggagacggagctgcggccgacgaatggggg

SEQ ID NO: 5232 - DNA, 688 bp, Setaria italica
  misc_feature (1)..(39): n is a, c, g, or t
  misc_feature (65)..(65): n is a, c, g, or t
  Peptide Sequence Number=SeqID_71206
nnnnnnnnnnnnnnnnnnnnnnnnnnnnnnnnnnnnnnntactccctgtgtgtccttggcagtcnctttttagttaggagaacgcgattgaatcgtcatataaacaaacaaatctgcttttggcagcataactcgatgaatcaaaacttgatcctttgaagctggttaaaaagaagaggaaaaatcatatgctacatctaagaaattcctcactaaattaccaatcgtgagaacatgctgcaggctgtatacgtatgtatcaaggacgaatcatgccttgaatggagcaaatactaccaccgaattgtgtcctccgaatccaaaggaattagagatggcaacattcacttcatgctgcttcttttcattggctactgtatcgaactcaacttcaggctctgggttaaattgattaatggtagggtgcacccatccagtagttatggcttctaccgtggcaatagcttctaatccaccagctgcacctaggcaatggcctatcattgactttgttgagttaatttttatctcagatgtattgttgaagacttgcttaatggctcttacttcagccaagtcaccagcaagtgtggaagttgcatgcgcattgatgtagttcacctcctccggtgccaacacctgcatcttcaaggctcctgtgatacaggatgtagttcacctctccggt

SEQ ID NO: 5233 - DNA, 829 bp, Setaria italica
  Peptide Sequence Number=SeqID_71207
tcacactgccgtggaatacagtagccgatgcattgtctgacctctatgtactaaggacaaaattcgtgagtggactgccaacgttcaccagcagggacaacccgccgagcaccggagcgaccgtgtcggggaagaactccaccccttcgagcgccgccaccgtgccatccctcttgacatcgacagggtagctgagaaggtggccatggaggtcggccacctcgtcgctggtgtagcgctgccagaactcgccggccatcttgttcaccgcccggacgcacttcaggctccccgggtccttgaacacgtccttgagctcggcgaggtgctcgtaccacagcgacatccggaagccatggacctggcctctggcggcctggccatcggcgttgaggtgagccggctggtacgcgcccatggcgatctccgtgtcgcggcccccgtccatcgaccgctggttgatgttcgccgatccgacgatgatgtactcatcgtcaacaatcatgagcttggagtgaacgtagaccatggtgcgccgcgccttctgggcccggtcgtagtcgctgccacgcggcgggtggctcttgggctcgtactcacgaggcacctccagcttcgcctccctgttgcccaagcagaagaaggagaggtaatccttggggtcggcgtcgatgttcttggccttgagcgcggcggcgatgtcgccgtacatcatctccatggtcttcctctgccagtgcaggatggcctgcacgttccagctcgaagggtccccctccggccacatgggcaccaccgcgtagacggcgaagggctcgccggcctcgat

SEQ ID NO: 5234 - DNA, 2034 bp, Setaria italica
  misc_feature (2011)..(2034): n is a, c, g, or t
  Peptide Sequence Number=SeqID_71208
ttcggtagtctattccctaagtactattccggtagccaaatcgccaattcaaaaggcgcagagatttgcacagcggcagcagcagtgctgcgcgcgcccggattcagggggggttcctccgttcgttccctggcccccagatcccgcccgcagctgcgggattcgccgcctgccggatcaggcagtcgaagatccaggagcgcattcggtcccctacctggctacccctcatccgtcctgccaggtggtatttattcagggctggcgcgagcggaggggtcgaatctgatgctcccagctcgctgaggatcgctgcgagataagcttctgattcggcagggaggctctcgaaatgatggaggagcaatcagcttcatataccgtggatgacgcactcttgtcatcaggttttgggaagttccagatattaattctttcctatgctgggatcggcttgattgcagaagctatggagatgatgctgttatcatttgttggtccatcagtacagctagaatggaagcttacttctcatcaggaaagcatgattacaagtgttgtttttgttggaatgctgataggagcttactcatggggtgtggtttcagacaactatggaaggaggaggggctttctctttactgccattgtgacaagtggagctggatttttgagttctttcgctcctaactatctgtcattaatatctcttagattcttagttggtattggtttgggaggaggacctgttctcggatcttggttcttggagtttgttcctgcaccaagtagaggaacctggatggtggtattttctgcattttggactgttgggaccatcttcgaggcatctcttgcatggatggttatgcccaagtttggctggaggtggttgttagcactatcatctgttccatctttcctcctgctcctattttatgccattacgccagagtcaccaaggttcctatgcatgaaaggcagaacaaccgaggctgtggatgtattggagaaaatggcaagactaaacaatgtgcctttaccttcaggcaagcttgtttctgacaaaaatatcgagctagatgaagtttcagtatcttcggagtccacaacacttctggatggtgctgaagaaagttacaacatagataaagatgaaggttctgattttggaggttttaagtccgttggcaagctactttcgccaaaactgatcagagcaaccctacttctgtggatggccttctttggaaatgcatttgcctattatgggattgttcttctgacatcagagctaagtaatggaaataggatatgtgcgaaagaggaggttgaatcagtacattcaaataacgcaagcttatataagaatgttttcatatctagttttgcagagatcccgggatcaattctgtcggccatggttgtggatcgatttggccggaggctttccatggcgtccatgctcttcactagctgtgttttcttgttcccactagtgttctcccggacagatataataacaagaatctccctgtttggtgcccggctctgtatcgctgccagcttcaccattgtatacatatacgctccagagatttacccgacctcggtgaggacaacgggcatcggtatcgcgagctcggtgggcaggatcgggggcatcctctgcccactggtcgcggtcgccctggtgcacagctgccaccagacgacagcgatcatcctcttcgagattgtagtcttctcctccggcctggccgtcgcattcttccccttcgagacgaaggggtgtagactcaacgacaccgaggtcgatatgaactgatcacacgatttgttgtactgtgagaaacattttattttttgcggcgagaacatggtattccttacctgattgatcgagcgatttttatacgatgtacacggcacgacacgactgatgttctgcctttggaaataaataaatctgccgacgagatgcttttatctcgttgacttgttaaaaacnnnnnnnnnnnnnnnnnnnnnnnn

SEQ ID NO: 5235 - DNA, 278 bp, Setaria italica
  Peptide Sequence Number=SeqID_71209
atctttgccggcggccggcggccggcggcgacccctccaacctccaccccacctcggtatcgccgctgctgcgccgttatcaccgtcgctgcgatgaggcctctccttacccgcctcttcacctccactcacattgccatggccgcctccccctcctcttcctctccgtctagacggttggcccatctcacacgccatctcgccgcctcctcttccggcgagctctcctcagtgggcgcccctgccgccgcagccgacaccgtccccgcgaaaagccc

SEQ ID NO: 5236 - DNA, 826 bp, Setaria italica
  Peptide Sequence Number=SeqID_71210
cacaggcaagtgtttaaagggtgctaaaggaagggttcaggagggacagttcatcactacattctctagatgaaaccggtgcattgttgcagcgaaaagtcagcatgcagtgtgctgatgagaaggcaactgatgctggaaccaacagagaggactatgtgcatgtccgggcaaagcgtggccaagccaccaatagccacagccttgcagaaagatttcgaagggaaaagataaatgaaaggatgaagcttcttcaagacctcgtcccaggttgtaacaagattacaggcaaggccatgatgcttgatgaaatcataaattatgtacaatctctgcagcggcaggttgagttcctttcaatgaagctttcagctatcagtcccgagatgaactgcgatttcgatctgcaagatatcctttgctcacaagatgcttgtgctgcatttccgggatacagtctgcaaatgagcagtgtgcatctgaatctgttcagggcatctcagcaaggtttcttgcgtccagaaccatgcggggtgagcccaaatccagcaaatgttcatgtggctagaccggttcagcagttacttcagctacctacattttcctcagagaggagtgaactgggacgaggaacttcgcaccgttgctccagatgctttcgcttctgacgttggtgctgattcgatgaaagtggagtaacaagtccacatgaccacatctgaaagtttgttgggctgctatcgggaagcttttgcaagttgaaacggtggcacggcatctcttgggatgatctagttaactttggtcttcgatgagaaggattctg

SEQ ID NO: 5237 - DNA, 1189 bp, Setaria italica
  Peptide Sequence Number=SeqID_71211
ggcggaggtggacgtcctcggccacatccgccacagcaacatcgtgaagctcctctgctgcctttcccgcgcggagacaaagctcctcgtctacgagttcatggagaacggcagcctggacaagtggctgcacggccagaaatggatggccgggagcgcgatagcgagggccccgtcggtccggcaagcgccactggactggccgacgagggtcagggtggccgtcggtgccgcgcgcgggctgtgctacatgcaccacgagtgctcgccgccgatcgtgcaccgagacgtcaagtccagcaacatcttgctcgactcggacctcaacgccaaggtcgccgacttcggcctcgcgaggatactggtcgagaccggcaaggccgacacggtgtccgccgtcgccggatcgttcggttacatggctcccgagtgcgcgtactcgaggaaggtgaacgagaaggtcgacgtgtacagcttcggggtggttctgcttgagctgaccacaggcagggaggccaacgacggcggcgagcacgggtccctggccgactgggcgtggcggcacctgcagtccggcagaagaatcgccgacgccgcggacaagtgcattagggacgccgggtacggtgacgacgtcgaggccgtcttcaagctcgggatcatatgcaccggccgccagccgtcgacgcggccgacgatgaaggacgtgctgcagatactgcagcggtgcgagcaggcgcaccagagagccgcggacgagaaggtcgccgccgactacgacgccgccccgctcctgcaggtgcaggtgcgaggaggcagccgacggaaacagctctccgatgccagagtgatggacgatggcagcgagggtggtttcgactgcaacgtctgaagaaaagcagaatgagcagatggctgtaggaaccctgaccacctcaggttaggatctaggacgggtacactagcagccttgtgtgcagtcttaggagagcagaccaaaggataggcacagctcaccacaagccaagtagccaacaacactgatggacaatgccacagtggcagtgccctcctataggtgccagtagctatgtaactgcaaagtataatattgaagccatgaaactatgcactataactgcaaaatatacaactcagtcatatatttgaggaagcagtgaagagaaca

SEQ ID NO: 5238 - DNA, 298 bp, Setaria italica
  misc_feature (277)..(277): n is a, c, g, or t
  Peptide Sequence Number=SeqID_71212
caaagcattaaacaatgcctaaggacattcaatatgatcgtgctgatgttgaaggaaatgctcaagatggacctgttgccaggttgtcttttgcatcgttgtttgacgctcttggaagatgcttaaacgacgagagctcggttctgttgctctattctttggtccatgggaactgtgactttcaggaatatgtcctggttcgaacagacttggatactttgctcatgcctatcttggaaatgctctacaatgcatcaaggaagactttcaaatcagntttacatgctgttgattattc

SEQ ID NO: 5239 - DNA, 1855 bp, Setaria italica
  Peptide Sequence Number=SeqID_71213
agaataggggtacctaatactaaccttaggaacaagtagacttacatcagcacataactctcataacaatgaatcctgattttaccatggcatagcttcagtccaagtcttcattctactacgtacatacagtgtcagagcatcagttattccacattattttttaatcaaggagcttcattactcagcttatatcaggatccaacagtaaattctagtcacaatctatctgtgcttcacataatagaaatttgctacgtgcttagttgaatcaagaaccatcaataatgttttatcatacatggtcgccttgttgagcacttggagttggagttgcagttgcagaatcaattagcccttttgccttagctactaggatagtcagaggtaagccactctccaaaaccactcctgtgttgcccaagaaggccctgtacttttctacttttgatggggtcctatctaccttggacagtgcttcagccatcccttccacagcgaaggttgtagcgtatcgaggacacgattctacaaaggatatcgtgatctggattatggcccttctcatccttggatactttggacagggcttcttgttggagttgagcgtatacaccagcttttgaacaagtcctgttccattggtatttgactccagctcgtgagcaaagcattctgggatgacgtcaccaatttgcgaagcgaggctgatcagactctccagttctttgccttccgcggtcattattttctccatcaccactgtcaaggcagaagacaagtggtcccttgcacctggacagcgcagctcatctctggagagcgcacaaagattctgcaatacacttgtcgcaacacatcggtactcatcatcagaaatcatgttctttatatccttgacaagttcatatcctggctcctccaagatcgccgagcagtttgcagtgctccccattgcaaggtttgccagtgcttctcctgacgctgtccgcagctgctgaccatagtacacattggttgttccatctcgcccaagaaacaaatgcaccaacttgctaatgatcaccttggtgtggccgatctcctgccttgcctcctcatccaaggcaaacatggctatgatatctaccgccggcttccatatctgaggatcgcttcggttgtcctccaagatactggcgaggttgcccagcaagaaggggctctcccacagctcttgccggagcatagtgcctattttcccctctgtgattgaaagcctccttatcagattcagtgaagaacagatcactgctttctgctgcacgtcatcatcccctactgtgtcggacgtgtagcttatgaatcctgtgatcttaaagatgaggtccgtggctctactaatttctgtgcagttgtcaatatcataggcaagcctctctaagattaacatgcccagaacagtgaaggagtcctgatgtgtcaagggtggctccttcggaatggaccagtgcttctctttcatccgcggccaacactggcataacaaggagcaccctccattatcaccttctccttgcgttgtttggttatctaagtttcctccattaccatgaactggttgtgccgaagattgttgccctcgcgattgattatccgcaacattctccccgttgatgcttacgctgatggcatgggacaagaaatcttgctgatggtgatgccaagctggttgattctcggcatcaactaataatgatgacacaagcttcagcatgctgggaactgaagcaagtctgaggctgcccgcgagctcggcaatgaccctggcagcgaacagcctgatatctctgtcttgttgagctgtccagccgag

SEQ ID NO: 5240 - DNA, 1017 bp, Setaria italica
  Peptide Sequence Number=SeqID_71214
ggtggacgccgtgcacggcgtgccggtgatggcgcccgaggactgctgctacctcggggcgccaatggggaacgaggaggttggcttccgggctgggggtggcggctggacagaggaggcggagatacagaagctcaaggcgaggttgcaggcgctggaggcggaccgggagtcgatgcggcacaccatcatgtccatgggagatgagaaggtgcaggtggttctgctcagggagatcgcgcagcagctctgcaaggacacggcgccattcccggctgttccgctgaaggtacagccaaggctgcaaccagttgtcatggcgcagaggaaggtggtgaagaagcggaattccttcgtcaagatcttcattgtgacagtgctcaagtgggttgcgtcaatgttctgctggcggaggaaatcaaatcgcatcaggtaccccatcggtatgtgtgggagcaatgtcggtctgatgctgatactggacaggttccccaaacagaggcaaaagaagattcctaaaaggaagctaagcgcctctattctctgataatctcgtcacaagcaacctagggaaggacgagctgtgcgtttgcacttctctggcccgaatgagctactctctgaacataaagctcgctggttttgtgaaaaaacatcgttgttgcatatctttcgacccctgtcgatgcattctttggttgattgggtttttggtgatctagttaaaaatgtgtatcccctatttgcatttattcctctgttcctgctctctttacatatattgttgatattccttttttttgtgtggtcttctagtggtttttagaacgtgatgtaaataaacacttaccttttggagcattagccgtagagagttttgacacggtggtagtgttcccttttttttgttctctaattgttctattatgccctcttttttaggaacaaaatcatgttattctgtttcaacacgattgtgttgtattgtaaataaatctcaaatagaatggtgagttt

SEQ ID NO: 5241 - DNA, 473 bp, Setaria italica
  Peptide Sequence Number=SeqID_71215
atccgttgccgttgggggtcggagccgaggtcaggggcagctcggtgacgaccccggcgccgggcttgccgtcgccgaggtggtccttgctcttgccccagatgagggagtagagccccaccactatgatcgccgcgccaaccacgcttcccaaggtggtctcttctttgagtatggtggagcccatgatggtggtgaagatcatgcagaggggctggaacgccgtcacgaacaccgggccgcgcacccgcgtcactagcccctgcacgtagaaggccacgccggagcacacgatcccggagtagacgacggtgaagaggcgggtgtcgaagccgatgacccaggcgctcatgtcgcggcgctccgcaaaaagcgccaccgcgccgctcatcaccgtgcccacgccgcagatgagcgccgtcagcgacatctccgccgggtagctctgcagcgtgttcgactggaggatgtcc

SEQ ID NO: 5242 - DNA, 429 bp, Setaria italica
  Peptide Sequence Number=SeqID_71216
cgcgtgcagggccgacaacatagagagagggaggcgcccaccggtgcgctgaggatctctccctggaggccggtgatcgcctggtccggcggcggagatggggtcgtcgtcgcggatcttcgagtatttcgtggtgtgcgggctggggccggagatccgggcgctggacggcgccaagggcttccacggcgtcgaggacatgtacatgccggccttcctcgagcagttcccgccctccaaccacgcgctgtaccctcccccgccgccgcagctccccacctgtgttttgccagcaggagtaagaatatattcttcagggctggacacggatgatatctcaacctatccacgtagttatcctatagttttgacagagggagatggttcaaaaatttatgtcagttgtattgcatttcgggatcctatttg

SEQ ID NO: 5243 - DNA, 1151 bp, Setaria italica
  Peptide Sequence Number=SeqID_71217
cgcagggcgccatcatgacctcctaccctccccccaaccgccggggcacctacatctccctcttctggtgcctcttcaacctcggcggcgtcctcggcggcctcctcccattctccttcaactacaaccacggcgacaagcccggcagcgtcaacaacggcacctacatcgcgttcatggcgttcatgctcaccggcgccgcgctcaccgccctcgtcctgccccccgccaggatcgtccgcgacgacggcaccagggccaccagggtcaccttctcctcgccggccaccgagggcgccgagatcctcaagctcttcgccaactggaagatgctgctcgtgctccccgccgcgtgggcaagcaacttcttctacacctaccagttcaacaacgtcaacggcaagctcttcacgctccgcaccaagggactcaacaacgtcttctactggggcgcgcagatgctcggctccgccggcatcggatacttcctcgacttcggattcgccagccggaggaagagggggctcgtcggggtcgtcgccgtcaccgtgctcgggacggccatctggggaggcggcctggccaaccagctcaagttcgatcatggcaacctggccgtccccatcgatttcaaggacggacaccgctatgccgggccgttcctgctatacttcagctacggcctgctggatgccatgttccagagcctcatctactggatcatcggcgccctcgccaatgactcccaaatcctcagcaggtacgttgggttctacaagggggtgcagagtgcgggagcagctgtggcatggcaagtcgacaggcgcaagacgtccctgatatcccagctgattgtgaactgggggctcatgaccatcagctaccccttgcttgccctactggtgttccttgctgtgaaggacgaggacaattcggtttcctcggtggaggacggcaaggagaaagacagcaagctgtccgcaccgaccagcttccactaaagatcaagaatgtcgcgggcttttcagtgttgtagaaatcaaggaagtacaaagaaaagagagaaatttagggtgtggtgtttatgtatgtggattacctgatcgggatggtagtgtcaatgggcaatttacttatttcctttgtttgta

SEQ ID NO: 5244 - DNA, 330 bp, Setaria italica
  Peptide Sequence Number=SeqID_71218
cgggcgatggcggcgccgggcacggggccgcggatgttggcgtcccgcatgatggccaggctgacgacgcggcggccgcccgcgggtgtcgaggaggaggattccgcgtcgtcgcagcggacgccgaaccagtggcagcacgggatgtcggccgtccatgagatgaagtaggaggcgttgccgaaggccgccttgacggcgagcagcgccgccctgtcgccggagtggcactgctgcttggaggctggcgccgccgccgctgacgcctccgcggcggcgaggagcaggagcacgagcaggacggcgtgtggccgtgcgagtgtgacgcgc

SEQ ID NO: 5245 - DNA, 419 bp, Setaria italica
  Peptide Sequence Number=SeqID_71219
ccatctactaatatgtgaagagatgtttctttttttccgtttgtagaaattttgttcatctatcattggatatttttgttttccttaattggattggtttttgaattttctttgagatccctgaaaagcataaagtgttctatgaaagatgcttccacttaaaattacccctcacttttttggaagttgggttgatatgattgctagctagcttctgttcgtgtgatcgccggctggcatcatgtgtataggcaaactgttgcgcaaaagtgttaaaggtgctccctagaattattgcatgagcaagatctagctaagatccccatatggttgtggttcaacctagctaattagaattagatatctacgtatgcatgcccttctcaattaaattccacaaccaacaaggcttattaaga

SEQ ID NO: 5246 - DNA, 535 bp, Setaria italica
  Peptide Sequence Number=SeqID_71220
cattcgcggcaggtagttgttgttgttgccggacgacggcacggctagtagcgctcgtgctggacctgctgctgctgctgctggtagttcttcctgttgtgctcgtcggtggactgcgtgtgctgcccctgctgctgctggtgctggccgttcttggaattggcgttggcgtcggtgggcggcgggcgctgcaggctcttgacgtactgccaggtgtcgcggctggagacgtcgttccaccacctgctgacgttcttgcgggtctcgaagaggcggcgggagcgcgggtcggaggcgaggcggtcggcgttgggcaggtgcgacaggtcggcgatggtgaagttgtcgccggcgaggtacttggcctcctccagccgctgctcgtagatgtccagcagcttctccaggtccttcttccgctgctcgaacagcctcaccatctcctcctccttctgatgcttcgcctgctgctggttctggttctggttcgccgccggccacccggccggggagcgctgcttgctgccggcggacg

SEQ ID NO: 5247 - DNA, 478 bp, Setaria italica
  Peptide Sequence Number=SeqID_71221
atggcctccttctttagttggtaactatgggagtttcgctcttgaagatgctacacagaatgcaataactggccatcagatgtgatacaaggaataagaaatggagaagccagcgaaaccaagcactggttgttgtttgcaaggaaactaacatacccaaatgcagatgcatcatgctgacaaatcaaactgtaatccatgatgccgaagattcagtcaccactcgctagtcagttatcctatgctttgctgttttgcactggttattgttttaccattagtgagctctttttcagtgctgatctgatgattctggactttattttattctgtatgcccatcatagctagctgttgggttacactattattaggagtctcttttgttgtctgtctgtaagatcctttatccaaagagaacagtggctatgtatctttgttgcaacattaaatcttaagattactgctacctgttaaaa

SEQ ID NO: 5248 - DNA, 436 bp, Setaria italica
  Peptide Sequence Number=SeqID_71222
caataccttcaagttctcctctgcttctttttgcaaccttctcgattcctcaacaatagtaatttcatcattcttttcttgttcatcaagtagtgcctgagcagcagcctcttttttcaatcttttctttctcagcttccacaatttcttgttgtgcagcaaccaatctttcatcaagggtttggcgtatctgttcaattatcaccagatttttattcctctcatctgaaagcctctgaagtcgtgattgaagctcacgtgcctctgtggttaaaatagctttctcaccacaaacctcactagcatgctgtagatagaaaaaatgtcagatatccttgtgccatgagccctagacaaatcaagtaagttttgtcaagtgaaattattatgtacaaagggaaagaccatatcatttgcttcctttgcatgagttagc

SEQ ID NO: 5249 - DNA, 443 bp, Setaria italica
  Peptide Sequence Number=SeqID_71223
agagaaggtaacagatcattcttattgcttctggcatcagcaatacaatcctcaagacactcaatactaacagaatggcttgaatgagttgaagatgtagaagcaaagtgattcaaattaagatcgggaagcatatccgtcttagaagacaagagaatgtcatcattctcaagtatatcccctgaaagctgcttgtcacagtcagtgccagaattgctggtattcttctgttctataactccagaagtcccagtagaggatccttctttatctggactgggaacatccagcacgggtgaaaacgaatcctttccagtaatcagaattccagaagatacttgatcattagaagaaaaggccaaaaggtccgaaaagtaactaaattctattctatccaaatttattgatttgtttcctttcgtttaaccctactttcaaacttt

SEQ ID NO: 5250 - DNA, 2346 bp, Setaria italica
  misc_feature (1)..(55): n is a, c, g, or t
  Peptide Sequence Number=SeqID_71224
nnnnnnnnnnnnnnnnnnnnnnnnnnnnnnnnnnnnnnnnnnnnnnnnnnnnnnnactttaaccaaccaaacacatcctaaataattagatatatcaaacaactgtcaatatacattgtaaagttaagcactctgagaaatatatttccgtacatagagcaaaatatagcgaggttgcggcaggggaagctatcttagagtatatgtttataagctaaaatcttcatctgtatatacaataaggcccagcagcaggactcatctcgcatactgctgctgcaagccattggcctcactggctcaccgaagtacaaaagctattccatgatagttcctccattcatatgaaagcgactaaattagtactatagcaaatataacgtttatacatcattattgttatttatattttctatccttcaagaagctccggcaactttgttatccttgaacatcttcagcaaatctcccagccatcggcgtcctcgctggaatccactcgcttgcaaatgcctttatcggtagtgtcattgccatccgaaacttccacggtgcttgggttgtcattcagatctctagccactggacttgcagctactgggacagtgtgcttatctggagactcgactgcttcagtagtcctatctgaggaactacaactcttgtgaagagaggaatgcaatgaagaagagaggcttgacatcgtggaacgctgcagcttgctcaatgataggcgctcgtccaccactcgcttgagtagtgagacatcctcacagataacagcaatctcaccttgcagcatatcaacaatttggccccgctcaaccaagaattccttcaacttcaagttctcctctgcttctttttgcaaccttctcgattcctcaacaatagaattcatcatcttttcttgttcatcaagtagtgcctgagcagcagcctctttttcaatcttttctttctcagcttccacaatttcttgttgtgcagcaaccaatctttcatcaagggtttggcgtatctgttcaattatcaccagatttttattcctctcatctgaaagcctctgaagtcgtgattgaagctcacgtgcctctgtggttaaaatagctttctcaccacaaacctcactagcatgcatatcatttgcttcctttgcatgagttagcatttctttaagctcctcaacttttgtcagaatgcctgtcccagcaacagatgactcatgctttgctactttagccttttcttcaagaagctcaacatcctctatcatttttgtaaccaactccagagaaggtaacagatcattcttattgcttctggcatcagcaatacaatcctcaagacactcaatactaacagaatggcttgaatgagttgaagatgtagaagcaaagtgattcaaattaagatcgggaagcatatccgtcttagaagacaagagaatgtcatcattctcaagtatatcccctgaaagctgcttgtcacagtcagtgccagaattgctggtattcttctgttctataactccagaagtcccagtagaggatccttctttatctggactgggaacatccagcacgggtgaaaacgaatcctttccagtaatcagaattccagaagatacttgatcattagaagaaaaggccaaaaggtccgaaaagaacaaatcatcatcaaaatttatgtcctcgtaaccactaaacatcttcaacgaatttttctggggaaagcaatccccaactggaatgttactagaatcttgatcgtggagctgtggagcttcactacttatgctgtcaccacagtttgcccctgtcgatagttgagaaaaacatgcactagataatacaccatatccaacttcagtatctgagttagccaactttctctctggcctagtatttgaagataccgcatcaaggttgggaatcaaatcatgttgattaccatttgggataggatcagaatgtcgatctagttgttcactcatcccatggattgatgtaagtctcccctcatgtagttcactgtctatgttttcttgcgtgccacttgtgacctccacggaagaagtgtcttgtccagagtgaacacttccatcaacctcattgacacgtatatcatgtccggcagatgatgaacttcccacttcatgcgtgctgtgattagcaaacacattcccaacagaaccagcgaaagatggcaagacatcatgatcagctgacaaagctccagccgaatcggtcatggacggcatgacctcatcaaggacagcaaccaccgcagaatcaacatctttatggtgctcaatggcgatagccttcagtatacgatgatcaa

SEQ ID NO: 5251 - DNA, 1421 bp, Setaria italica
  Peptide Sequence Number=SeqID_71225
ttttttttggatcagattggctttcattattatgcgcaaacctttattattgtaatcggacatacagcttgctttgctttgctttgctctcttcatcatcactaagcgccgtgaccaaagggcacggcagccaacaggcccactagttagcgtacgacccagccgcacaacacactaggagttcatttttacagagaggaggggaggggcgccgcctcgaggaagcgcgctaacggtctcggaaaatttacataacccgggtcgagacgaggcgaggcttcaaaatgtggcgagttttgaggcaagcggtggtggccgccatgttccatcatcgagacaaccttctcgcttggttatgattcaccagactcgagaccgcttctacattatcgggagctgcagtggtcacactgggtggtctcacattggaatggttcttcttgtagaacctgatggagataagactgctatgtgctctgattgatgattcaggagatccatggaagcttacggctgaaccatgtcccgagaaaaaaccttgccagagtatgacgacgcagaagataattgtaatgatcaacgggcataagttgccacctgatgacccttgtttggcattcttcatcttcttcaatgccttcattcgctcaatcctagcccttttcaacattgcaagttcactcagctcgttgaggagcttttggtcggaaacatccaatggtgtaggtgtcgacggccttggtggccgcggcggctttttggatcgcttcttcttcgctttctcccctcctgaactgtccaggaggcccagcttatcctccccttcagactttctgtcatctccgtttttagcaacagcatctaaagcaggaggggagcaatccatgtgctgattcctgtcatccttcagacatccattggcacccacgcaaccattccacgcaccattaggcgctgttcttccttgacccactgaaaaactggcatccacaccactgttattattgcttcctgctgcaccattaccactctccaggtcaagcaaagcatcctgatcaccctttgcctccatcatcactgcaaaaacttgtgcacttggatctaacacatcaataggcaaaccactctgatactagggatcagagttcccctccctcaatttggagaaaattgcctctgaaataccagctacctacagagctgcagcggccacagcgcaccctcccacggcgatcccccgcgccgaatcgagaactccccggctgccgcggccacgaacccggggaggaaagggcggcgactcgcgaaccccacggcgtgagcaacgggagggaggaggctctgcttggggatcgaggacgaggagggggaggaggaggaggggcagtgggggtgtgggtcccgtacgtcccggggcgctg

SEQ ID NO: 5252 - DNA, 375 bp, Setaria italica
  Peptide Sequence Number=SeqID_71226
atatgctgagctgtcgttgatcgtaaacaccacgaaaaacataatatgcggtcatatggattctagtatcactgtgtccacaaaagtatactactacataatatcagtatatggatactggtcataattctacggtcccatgccactactatttcactagctatgagaaatcgtgcatgcatagttccaatgtttcagctgttcgctcgtgccacaaagatgtttctgatatttgtaccttaaccaaacctttcttcgttccatgtgcacatacgcacaaatgattggctaataacacacttatgcgtactcctgttcctgtatactgtcaatgtattaaatgctaacccatgtagcgccatgggactggccacc

SEQ ID NO: 5253 - DNA, 600 bp, Setaria italica
  Peptide Sequence Number=SeqID_71227
tacaaacaagcgcaggacagacgaatcgtgggcgctttcgtagatgccctcattggcgatcctccgagcttggtcgcccaactggtcgatgcattcatggatgtcgtctgcatcaaggagaagccccctcagccgcaacagaagggtgcatgctgcaagctttggcactagaaagtttcaccattgcctgacatctcactgtgtgacgtcattttgctggttgcacttgccttctgtcactgggcacatgaacggaactctttgcagttactgacaagtgaaatggctgtcgttataacagacgcctatatgtagtaggagcttcatttggcattcaggtccattgatatctgatttattcatttaaattcagtcagtaggcggatgattgatccatgaatacaatcgaggtggaacctttgtgctggtcagagatggttcatggaccggctcagagtgtagcccgcagctgctgagtagttggagcttgtaagagtagacaggcaaactgtatgcatatgtggaatgctatggtggaagtttaactgctgtgaaatcatatcctgactttaggaagaattagtttttaattagtttaaa

SEQ ID NO: 5254 - DNA, 615 bp, Setaria italica
  Peptide Sequence Number=SeqID_71228
acagacgaatcgtggcgcttcgtagatgccctcattggcgatcctccgagcttggtcgccaactggtcgatgcattcatggatgtcgtctgcatcaaggagaagccccctcagccgcaacagaagggtgcatgctgcaagctttggcactagaaagtttcaccattgcctgacatctcactgtgtgacgtcattttgctggtaaccttctgctgatctttttgaaaataaaaataagaaaatcttctggtgattgaaggatacatattgaagttatcgcctactgttgattatcaggttgcacttgccttctgtcactgggcacatgaacggaactctttgcagttactgacaagtgaaatggctgtcgttataacagacgcctatatgtagtaggagcttcatttggcattcaggtccattgatatctgatttattcatttaaattcagtcagtaggcggatgattgatccatgaatacaatcgaggtggaacctttgtgctggtcagagatggttcatggaccggctcagagtgtagcccgcagctgctgagtagttggagcttgtaagagtagacaggcaaactgtatgcatatgtggaatgctatggtggt

SEQ ID NO: 5255 - DNA, 2385 bp, Setaria italica
  Peptide Sequence Number=SeqID_71229
tgccgtggagattcttcagtgctggacccgcagggatcttcttgagcttatatgtgtggagctgggcaaggagaggaagtacaccaatgttccaaaatctaagatgattgcctatctcttgaaattagtttcacgaaacagtggacaactcaaggatggtaatgcagaggctatgttatcagggcaggataacaaagatgaaacacaaatgaaagaatgtgaggagcaagtacagcattcactcaaaactgcaaaccctgactcatcaatgcgcagagaggctcgagctggtacagtggtgtgcagcaatgttgcatgccaagccatacggaatgcaggcgataaatattgcaagcgttgctcttgttgcatttgcaataaatatgatgataacaaagatcctagcctatggttggtttgcagctccgataatccatacagtggttgttcatgtggtatctcttgtcacttaaagtgtgctctaaagaataaaaaagctggcattgtcaagaatgggtgcaacaagttggattgtagtttctactgtgttagctgcgggaagatcaactggctaatgaggagtctgcggaaacaacttgcaattgccagggaggcaagaagagttgatatgctttgtgagaggctgtcattgagccataaaatggtaaaagggtctgaacattacaaggaaatagcaagcataatcagctcagctgtgaaaacacttgagaaagaagttggtggtgcgttggatcaagtttctgcaatcatggggcgtggcattgtgaaccggcttagttgtagcgctgaagttcagaacctttgttcaagtgcattagaaattgtagactccacagtggataacatcttggagtttgagttgaatgataatcctcaagtcctaggtccccaaccccgaatcctttttgatgagatcactccattttctttggttattgtgttgaaatatcaggataacattggtaaggagcacattgatggttgcaaagtttggcatcgaagtgctaaggttctcaactattcatcagaacccacatgccacatactgagaccaaatactaggagcctggtttctggtctaagcccttcaactgaatacttcttcaaggttttgccttttggcagcatacaggggtttactgagcaggaggcaaaatgcactacacggagcctggaccaaggcagcagccagtgttcaactcagaattctgagagtgtgtgcctcaaagaggattcagtgcagcatcagaaaaaggatttgaatttgcagaatcatcagagagccattcaacatgattcacctaagggttctacaaattcaagtgagaacaatttatcctgtgaccggtattctaagcgggctaagatcgcaaggttagatggtgcaagtgacaatgatgaaagccaattgccgccaacatctgaagttttaccattcccgagctccaactcctctccttcggaagctccaagcaaacccgacgtgcttattggcaccccagattcgtcctccaagaattatgtggagcagcagtacgagtactgcgtgaaggtgatcaggtggctggagcacgaaggacacatggacagcgacttccgtgtaaaatttctcacttggttcagcctaaaggcaacagcgcaggacagacgaatcgtgggcgctttcgtagatgccctcattggcgatcctccgagcttggtcgcccaactggtcgatgcattcatggatgtcgtctgcatcaaggagaagccccctcagccgcaacagaagggtgcatgctgcaagctttggcactagaaagtttcaccattgcctgacatctcactgtgtgacgtcattttgctggtaaccttctgctgatcttttgcacttgccttctgtcactgggcacatgaacggaactctttgcagttactgacaagtgaaatggctgtcgttataacagacgcctatatgtagtaggagcttcatttggcattcaggtccattgatatctgatttattcatttaaattcagtcagtaggcggatgattgatccatgaatacaatcgaggtggaacctttgtgctggtcagagatggttcatggaccggctcagagtgtagcccgcagctgctgagtagttggagcttgtaagagtagacaggcaaactgtatgcatatgtggaatgctatggtggaagtttaactgctgtgaaatcatatcctgactttggagatgttttatgttatcttgtgggctctgattatttcgtatggtatgtgcgagtgcagggaggtagtcttatgatttacggctacaaactatcaacctgaagtgtaggctggcagtccacgactgctgcataatcttgccagaccg

SEQ ID NO: 5256 - DNA, 1578 bp, Setaria italica
  Peptide Sequence Number=SeqID_71230
ttttttttttttttttttaaccactgaaatgcaatttatttttattccaatgatccactctcgagatttttttttccgtagaaaaatgctacagattaatattacgaactcaaaaattagctcatcaaagagaaaacaaacagaaaaaaaaatgtacttcctcatcacatccctagcaacatcacttcaacatggcctggttaccgtagcatcgcgctcagttcttgacgaacgtgctcagaacatcgaagtagtcggggaaggtcttgcgggtgcacccggggtccctgatcgtgacgggcacctcggcgcaggcggcgagggagaaggccatggccatcctgtggtcgtcgtaggtgtcgatcgccgtcacgttcagcttctccggtggcgtgatgatgcagtagtccggaccttcctcaactgatgctccgagcttagtgagctcagtccggatcgcaaccatcctctcagtctccttcactctccaggaagccacatctctaatagcggttgggccgtcagcaaagagcgcaacaacagcaagggtcatggcgacatcaggcattttgttcatgttgacatcaatggcttttaggtgtttcctcccaaatggctcccgtggtggaccggtaacagttacactagtctcagtccatgtaaccttcgctcccatcttctccagtacctcagcaaatttcacatcaccctgcaaactggtggtgccacacccttcaacagtcacagtccctccggtaattgcagcaccagccaagaaatagcttgcacttgaggcatcgccttccacatatgcattcttaggggacttgtacttttggcctcccttgatatagaacctgtcccagttatcagaatgctctgctttcacgccaaaacgctccatcaatctcaatgtcatgtcgacgtagggaatggagattagtttatcaatgatttcaatctccacgtccccaagagctaaaggagcagccatcaacaaggcactcaagtattgactgctgatggagccagatagcttaaccttgccaccaggtagccctccaatccccttgacacgaacaggtgggcagtcagtgccaaggaaacaatcaacatccgcacccagctgtttcaatccgacaaccaagtcgccaatgggtctctccctcattctcggtactccatcaagcacataagttgcatttccaccagcagcagtcacggctgctgtcaacggccgcatcgctgttccagcattccccaagaagagctgcacttcctctttggcgtccttctcaactgggaacttgccgccacagccagcaactacagctcttttggcagctttgtctgcttcaacggagagcccgagggccttcaaggccccaagcatgtagtggacatcctcactatccagcaggttgtcaaccactgtcgtcccctcggctagggcggagagcagaggtaaattaaccggtttaaggtaaagtaaagtaacgtacggtaaacaagttaacaactaaagtaactaacaaagtaaaccaaaataaaagtaaaaaaccttaaaacgaaacaaaa

SEQ ID NO: 5257 - DNA, 247 bp, Setaria italica
  Peptide Sequence Number=SeqID_71231
aaatacatgtaagtatacacatctaaggcatacatctaacaggaatcactccctcttctttctaggtgtttatcacaaacacgctagtatttcttctctggtggcacatgccaccaaagaagaaaaactagattgtgtcagtgatagacacctaggatagggagtgatttccaactatgtgactaatgattgaaatagttcttccaatgaattgtttcattgttgcttcataggcaacataagcaag

SEQ ID NO: 5258 - DNA, 420 bp, Setaria italica
  Peptide Sequence Number=SeqID_71232
caaataaaaatttatagtggttttctgatagaaattttcttgttgcgatcctatgaatcagttcaattaaaaccttagattcatactagagccacgatgattgagtctcaagctaaacaaaaggcaagggttcttcgaataaaaaccgcttgatgatcatttattgaaagagaaaaaaattgtcttttgggcaaacaaaattggaaggaagaaaatttcttttttattaagaactacttgaattttttttttcagtctggttgcgaggtctaaatagtgagtatgaatcatagttccatttttttcttgatccactctatgtatttcgtgttccagatactagaataaataatatccgacgaattagaatcatcttgatagagataacaggttatgtctatgtattatcaataggatcaa

SEQ ID NO: 5259 - DNA, 290 bp, Setaria italica
  Peptide Sequence Number=SeqID_71233
ggagaggttgaggtggacgaggccgttgaggtcggagaggcggcccgggatgggcccgtagaagcggttcccagagaggtcgaggtggcgcagcgaggagagggtgccgatagcggggggcaggcggccggagaaggcgttcccggcgagggagaggttctggagcgcccgcatgccggcgagcgtcgccatcttgagctccccggagaggccgaggccatcgagcgcgacgccgaccaccgcgccgccgtcgcacaccacgccgcgccacgcggcgggcagctcccgca

SEQ ID NO: 5260 - DNA, 302 bp, Setaria italica
  Peptide Sequence Number=SeqID_71234
tcctggaggctttccatattctgtggtaagttctccaaatcggtagtaacaaagcttgtacattaggcagttcaacatttttggtgctgcacccttatcaacacgatattccccattaacaaggtaatcaggctctttgattacaggaaaaacacccccaccaatacgcaccatccataagaacttattaatgtcatctgaagaatagccagtaacacctccaaatacaacaagcacataattcacgtccagtgactgcataaatctcatatgcagtaacacctccaaaatacaacaagcac

SEQ ID NO: 5261 - DNA, 532 bp, Setaria italica
  Peptide Sequence Number=SeqID_71235
cttgaatacttggaagaggcatttacaacatcaagttttatatctttgttgccaatctccactcctcgtacacgatcatatcctggaggctttccatattctgtggtaagttctccaaatcggtagtaacaaagcttgtacattaggcagttcaacatttttggtgctgcacccttatcaacacgatattccccattaacaaggtaatcaggctctttgattacaggaaaaacacccccaccaatacgcaccatccataagaacttattaatgtcatctgaagaatagccagtaacacctccaaatacaacaagcacataattcacgtccagtgactgcataatctcatatgcttcatcttcataagaagacatcgcacacccaacagtagttagtcttattgtatgtgttgttgtcgacgataacagttctgttacccatagctgtaatttgatacccatagtcccaccaagacataaccttggctcttggaattggtactgcatctggttacatctccccttggacaggg

SEQ ID NO: 5262 - DNA, 659 bp, Setaria italica
  Peptide Sequence Number=SeqID_71236
gtattcaagttttatatcttgttgccaatctccactcctcgtacacgatcatatctgcattgcaacaaaaaaaaggcaaaaaagaagagagaaatatgagtagaactccaaaatccattagtagatggtcaattatcttagtcatctgaaaagtcatcatgtcatcaatgtgcaagctgtaaggagcaagtatacttctagcatatatgaattgtcagttatttctgaaatatcaaaaagtattgacatcttcattttagactgtgagacaatcttgaacttgttaaggaatacaagaatgtctcacagcaatgtaaatagttaagacataccctggaggctttccatattctgtggtaagttctccaaatcggtagtaacaaagacttgtacattaggcagttcaacatttttggttgctgcacccttatcaacacgatattccccattaacaaggtaatcaggctctttgattacaggaaaaacacccccaccaatacgcaccatccataagaacttattaatgtcatctgaagaatagccagtaacacctccaaatacaacaagcacataattcacgtccagtgactgcataatctcatatgcttcatcttcaataaagaaagaacaatacgacaacaacccaaacaagtaagaca

SEQ ID NO: 5263 - DNA, 2681 bp, Setaria italica
  Peptide Sequence Number=SeqID_71237
ttttttaacagaaccaacagtctttcatccttttagttccgagaaaattttcattgccttgcaatattaatcaaagacaatcccaagttactactcaaataagccattgtgcctacaaaaacttttgatgttcggtcatgacatgcttaagcttaacaatcaaaaagtgctcgtcgttgtcacaattggtccttctgaatgacacggatcaccaaaccaaatgaggggaaatatggttcttgactttgagcagaactgacactacggctactacagtcagtctcgccaaagcagcgtccatgttttgaggggctcccgttgcaaatatcaaaacaaccgccccatctcctgtagccactcagatttttgacaataatacttgtctgaggttccaaacacttcaccaccgatacctcaggacctgttcttcgggggtttgaccttgtatatgcgcactatccagtttgatgttgtaaatgcctcttccaagtattcaagttttatatctttgttgccaatctccactcctcgtacacgatcatatcctggaggctttccatattctgtggtaagttctccaaatcggtagtaacaaagcttgtacattaggcagttcaacatttttggtgctgcacccttatcaacacgatattccccattaacaaggtaatcaggctctttgattacaggaaaaacacccccaccaatacgcaccatccataagaacttattaatgtcatctgaagaatagccagtaacacctccaaatacaacaagcacataattcacgtccagtgactgcataatctcatatgcttcatcttcataagaagacatcgcacacccaacagtagctatgtgtgtgttattccatgtgttgttgtcgacgataacagttctgttacccatagctgtaatttgatacccatagtcccaccaagacataatcttggcatcaggaggagtgttctgacgaagccaatagtatgcctcacgataatcatcaaagatgactcttccaccattatgaccccttgcggccaaaactatagatggagaagagtaagcctcagatgtcacccaagtgcagtgaatggcatacctactgagcaagtaaaaggcacccagaagaagagcaatagctgcgttatgttggaatggcaaagattgatcaaccgctccctttgcagctgcctttgagccagttgtttttccagaagtagcctgtggacttttgctctttgcccggatcaaggtagtcagatttttaattgtagcagatgcagcaatggcactgataaggcaaacagctggtgctgccacaagaattaaccgaaccatcacaccagcaaagtacatactcgtgaggccatacataacaatgaatatcgtggcatctgacaggcgcttgaaacagaaatagaggccagctgggaacaggaaaaggaggatgtggaaatcaaacatgaatgatgaccatgctgttggctgatgctcagagacagacgcaatgatcggaatatggtccttcgcataggtaggatcaagaagggagtaaaacctccctgtccaaggggagatgtaaccagatgcagtaccaattccaagagccaaggccccaacagtaatcacacatgtaagagtaattcgaaggaatgacttgaatagtctggcatcattcagcaaatatttcacccagtccaagaagaagaaaacctgcaacaggaagaagactcccattgcggccatgtgctccccggactgcacatgctggaacccgacaaaccggatctgcatcgcaagcagcatcccgagcacatacatgcaattgtaggccacatagagcctctgcgagtacctcccagtgacaagcagcacaagcacataaagtgggacgagattgataatgaacacgtagcctccccatgccgacaccatgtagaagtagccgaacgcggaggcgagcgcccaggcgagcgagcccgtgttgacggcgcgcacgaaaaggtagaatgtgagcagcagcgcgaagatggcgacaccctcgttgtcgtaggaccccgcgacggaacgggagatgtaccccggtacgatggcgatgagcgcggcggcgacgagccccgccccggagtcccagatctcgcggccgaaggcgtaggcgacgagcgtggtattggcggcgaagaagggcgcggtgaggacgcagacctcccggatgtggacggcgagggagagcgcgcggaggaggcggtggagcagcgcggcggtgaccatgagacccgggaagagtgtcccgcccacgacgcgcccgagcgggtaccagctctcggagtcgaaccagttccagaactcgctgaagccgttctcggagaggaagagcgtggtgcggtagttgaagtaggggtcgaactcgtggatcatggactcgtagcgtaggacggagaagaggcggacggcgaaggcgagaacgtagatgagcgccagcgtggagacgcgaaggaggagctcctgctgcttcgtcttgagccgcagcgaccggagcggcgccgggaggaagtccagcgcggtggtcgccatggcggcggcgcggtgcggcgacccgggacgcggagatctggatggttcactagggtttcatgcgcgcgcggcgtgcggcaggggggtttagtgtggagttcgtg

SEQ ID NO: 5264 - DNA, 397 bp, Setaria italica
  Peptide Sequence Number=SeqID_71238
cgtgcaggtcggcggcgccagcagcgggagcgggagcagcgtcgcgcgggcctgccggcaccacgcgtacagccgcaagcagaagtcgctcggcctgctctgctccaacttcgtggcgctgtacgaccgggaggacgtggagacgattgggctggacgacgcggccaagcggctcggcgtcgagcgccgccggatctacgacatcgtcaacgtgctcgagagcgtcgggattcttgtgcggagggccaagaatcggtacacgtggctcggattcgggggagtccctgcagcgctgaaagagctcaaggagagggcgttgagggagatgtccggatcaccagtgttactgcccatggaggagtcatccactgctaatctctctgacttctagttgatt

SEQ ID NO: 5265 - DNA, 165 bp, Setaria italica
  Peptide Sequence Number=SeqID_71239
ggctccgcagctccgcgctctcgatacagaacatctcggacaggcggagctgcggagccgcgtgctctaccgcggcgccgccggcgacgtgaagcacgccggcgatgagccgttcagcgttttctcacattcggatgctagggtcttcgacaactgatactacaa

SEQ ID NO: 5266 - DNA, 1014 bp, Setaria italica
  Peptide Sequence Number=SeqID_71240
cagccatacagggagccaggcatgcgcaatttgttccacctttatcagatctccaccttacccacctgcagtcgagcctgctgtaccccggcctccgccgtcccgatcacgtcggtcgggcggctcccatcccggcaagaatcagcaccgacctgaccatcggcggcgcgccggcgcgcgacgacatgtcgtgcgcgctgtccatcggcgccgacaagaagcagcccggcggcgccaagccggcggggctagtgctgttcgggcggaccatactgaccgagcagcagatgagcctcagcggctccgccggcgcgacctctccggcggcgaccgggaacggctacatgaactggaacgccgacaagggccccaacgcctcggagggctcgggctccggcgtcatccagaacagcccgaccaagaacgcgtcgtcgtcggagcggcctccgtggttcaccgagcttgccgggctggagcccgggcagtgcaaggtgttcgtcgagtccgacacggtcggccgcaacctcgacctctcggcgctgggatcgttcgacgagctctacggccgcctgtccgagatgttctgtatcgagagcgcggagctgcggagccgcgtgctctaccgcggcgccgccggcgacgtgaagcacgccggcgatgagccgttcagcgttttcgtcaagtcggcacggaggatcaccattctaaccgacgctgggagcgacaacctagggagctaaacgatgagcagtaaaaccaatcccagtcgcgagcattctgttattggtactgctagcatgtacaggtgaacccgcgaggttttgttcatctccgttagattccagctctgaagagagatctccccgtggcagctcgtaagcaatgccacaatcattaggcacttctccccttctctctccccagtgtatccctatcaaatgtaaaacgtgggggtaaccctagtactcatcttgctccccctctgtgtatccttggccattccgatgcaaaaaa

SEQ ID NO: 5267 - DNA, 399 bp, Setaria italica
  Peptide Sequence Number=SeqID_71241
caagcctgcagaagtggtggtgaagttctatgttctctatgagaagtggcggaggggtggagcttccaaatccttcatcagttttgcagtacttgaaaagcattactcattcgaatggaataattattcatccttctggatcggagcgttctcttcatgcgtccattgatgctctaagttcttgctatggcgacaaacaaggcaacaagttccgggtatgggtggatagactagttacatcaccgattggtacaagtaactggttggtgaggtttgataactgggaaaaagaaggtctgccgtcagcctcttcacatgatacactaattgtggcccttaatacaagccagtggttgtcactttttcatatagcttcatgacatttcattttaacatgcc

SEQ ID NO: 5268 - DNA, 535 bp, Setaria italica
  Peptide Sequence Number=SeqID_71242
tcagttttgcagtacttgaaaagcattactatccttttcttttgtagcattcgaatggaataattattcatccttctggatcggagcgttctcttcatgcgtccattgatgctctaagttcttgctatggcgacaaacaaggcaacaagttccgggtatgggtggatagactagttacatcaccgattggtacaagtaactggttggtgaggtttgataactgggaaaaagaaggtggtgctcggaattgctgccgcactactcttctgctgaacatgaagcctgagactccagagggcttggagctgacacacattcacaagacctgggttgaaggacactctgcagggagcgagaacgcattcatcttgtaggtcaattagtcacttgcaaagtgcaaacaggcataacatatctttttcttcaacagtccaaatagaatcagaatgtacttccagataggctcaatccatggtaattccatgtaatgtacaataaaagatgttccatgattctgtctcgtgaagttcatgag

SEQ ID NO: 5269 - DNA, 714 bp, Setaria italica
  misc_feature (135)..(135): n is a, c, g, or t
  misc_feature (154)..(154): n is a, c, g, or t
  Peptide Sequence Number=SeqID_71243
gacagcccatatgaaccaaaactgcaactatgcaagccgtgcaggtcatacatcctattcagctcctatgcacttccacagattgtggcccttctcggttcccagtcaccttggtgtttggcattatcggtgtcntaaatcttaatgtcaatcncctttcgttcccttggttgtacgaaatactgatgcgacagatattactgcagaaataaatcaacacaattagacactggatgaaaacagaacactactattaatttacaaaacttttatagaacagagcataattggacaggcaaggtttcatgcaactaagtgcaatatccaaagatcaactgaaaattcttttgagcaaggttttagtgtgatgtatcaaagaggaaccaagtgcagcggtaggaacacaagaggaggagctatatatgatttaacttatgtccctggcaacaacactgtcgtcacgacttcatctggtctctgcctgagcattttatgacattttcctgagcatttcggtgtcctagattccaggtaatctcaacgattccaccaggcacaactggaaagatacatccataaacagtcaaaacgtagccaaaaggtagcattcagaaattgttgcatagatagtagactagccacaacatatcattcatgaattatagaattcatataatgccttcaccctttgagtcacaacctaagttgccgttg

SEQ ID NO: 5270 - DNA, 575 bp, Setaria italica
  Peptide Sequence Number=SeqID_71244
agtagcacgacgacgaccacgtcgggtacttgcacggcggctgtttcggcagcggaggcggaggaggcggcggagacggcggcttgtactggcacccgcagtgcggcggggggcagctgcatggcggcgaccaggcgccgggcttcgggcacgggtacgggtaaggatacgggcatatcagcttgcacttgggctccggaggaggaggaggaggaggaggaggaggcggcggtggctcggggatctcgatgttcttgatgatcctgccggccttgcaccagaggtagcagctgagcttgttggcgtcgaagggcccggagacgatcaccttgtccttctcgtacaccaccttctcgatgacgaactcgcatcgctcttggatatagcagaggaccttctggatcttgctgctgcagcggcagcactccgggtccaccgtgatgatcaacgtcgccatcgtctctcttctgaagaaatgcagggtagctagctagggaaggagacgactaaaagcaagtgacgctcgcatctgtgaccgatcagccgctctgtgcctgtacgtgctaggtatagca

SEQ ID NO: 5271 - DNA, 316 bp, Setaria italica
  Peptide Sequence Number=SeqID_71245
atgagttggtttctccatcatcaggcttcttctcatgcctcctttcactcttcctgctgggggaccgtgaatagctagattccctttcttgagaaattggtcttcggtcatgaaagggacgatgatccctggaatctcggtcaggggaatgtctcctatgaggcgaacgcctcctatcaaacctatctctgaagtcaccgcctctataatctcttctcccggcgcggggagggaacgaggtgcgggagccaggaaaccggcggagctcggcgtgcccgtgcgcgaagctgcaggtgtcgcgggagcagccgccgcg

SEQ ID NO: 5272 - DNA, 557 bp, Setaria italica
  Peptide Sequence Number=SeqID_71246
gatcttttctgtagttgtagttttaccagatttgtcaagatgtagctgaaattaaggaggcctctttttgtatcgatgccctcaggtttacagaagtgacatttgtacaggacagacaagatcatcatgtatttttgtccttagttttgttgatacttcagctacatcttgacaaatctggtaaaactacaactacagaaaagatcaggcaaaaaaatggagccacggtgcaaaatttttgcggagttacaaagaggtgagcatgtacacagaacagcatgctaatcatctcgaacatctgcccatcatgatccggttactgtggaccttgaagccaagaagagaagggtcaatctgctttcctttctttgctttcttctttgcacccttaccacctgggccaccgtcagcagattctgaggtatcatattgcaacggtggtttctttgacttcagcgcttcgctgaatgaaggaccagaggcatctggattgttggttggcttgtattggtctattgtctttatttacgttccccttttgttttcttttctttttt

SEQ ID NO: 5273 - DNA, 414 bp, Setaria italica
  Peptide Sequence Number=SeqID_71247
tttgtccagatatcttccacactccgcagagacttgcaattaccaggcttcccaatgaaactaactgatgcacaatattcaaggatttctggtaaagctgctaatcacatggtcatggcacatcaaatgtatatggacatcattcagtggagtcgtcatccaagatactggtatgcccacttcttgatataggacaagcattagtcacaacaaatcatcgaaataccaagtgaagaatctatataaaggtcgtattatcctctggcagcagttgagtctaataaatctgctcaggagtctgctaattcgaatggtagttaaatcaaaagacaaccagtaagaatgccacctaattcggcgcggggagggaacgaggtgcgggagccaggaaaccggcggagcgcggacggacga

SEQ ID NO: 5274 - DNA, 638 bp, Setaria italica
  Peptide Sequence Number=SeqID_71248
aagcttgtgaccttttcaattcttcctgtgccttcaaaaagcgagcatgagctttaatgaacttctttatttttgaggtcatcctgtggcattcctctttctccttccttagctgagatcaagatcatttactctgctagaaatcttgcgtacttctgcattcttctcatccaaaattatctccaggtgagatttatcatcacgcagaagttccatatcctgtcttatttgtttcagctgtatttcttgatcctctttgtcatcaccacttaagagtgtctccttttttctatcatcattattgtcggagatactcaaactcctagatgagttggtttctccatcatcaggcttcttctcatgcctcctttcactcttcctgctgggggaccgtgaatagctagattccctttcttgagaaattggtcttcggtcatgaaagggacgatgatccctggaatctcggtcaggggaatgtctcctatgaggcgaacgcctcctatcaaacctatctctgaagtcaccgcctctataatctcttctccctttgagctacaagataattcaataagcaataagtagaagggtctccagtataataccactagccacaacaaagtagggaccaaaaaattaat

SEQ ID NO: 5275 - DNA, 504 bp, Setaria italica
  Peptide Sequence Number=SeqID_71249
aacaaggggagaatgggggcacgagaaagggatgtgtataccggcgcggggagggaacgaggtgcgggagccaggaaaccggcggagctcggcgtgcccgtgcgcgaagctgcaggtgtcgcgggagcagccgccgcgctgccacagcgcgcacagcttcgtcttgtacgccggcccgcgtcgcggagggccgagcatcccgggcggcggccgatccccacgctcgcggctggggaattcgcgatcgaccgatcggtcgcgcatggtggcgggtagggtttcgaggggaggcgcaaagccctagcaggaggcgacgaagaaggggaagagtagcttcaaaattcaaatgatgctcagcctcaacctgagggattctgcctggaatatttgcatcattcataccatccaaccgcccaaagtttgcaggccattcatcacgaatactggaagcttcattcatcctgctaagttgtccatgtctaatgtttacaggtggaatgtcct

SEQ ID NO: 5276 - DNA, 3612 bp, Setaria italica
  Peptide Sequence Number=SeqID_71250
cgtacacctgagaaaattcccaggctcagtctgacctataccttcacagtttacgacagatcaacaaaacttcggacaaaaatacatgatgatcttgtctgtcctgtacaaatgtcacttctgtaaacctgagggcatcgatacaaaaagaggcctccttaatttcagctacatcttgacaaatctggtaaaactacaactacagaaaagatcaggcaaaaaaatggagccacggtgcaaaatttttgcggagttacaaagaggtgagcatgtacacagaacagcatgctaatcatctcgaacaatctcgcccatcatgatccggttactgtggaccttgaagccaagaagagaagggtcaatctgctttcctttctttgctttcttctttgcacccttaccacctgggccaccgtcagcagattctgaggtatcatattgcaacggtggtttctttgacttcagcgcttcgctgaatgaaggaccagaggcatctggattgttggtggctgatggcatgctatacgcccctgtctctttgttgctaggaacagaggtttccatagcctgggctactgaggagacgacacctggttccatcttattctcatcagaggacgcaaggcctgccttcttcatcctgattgttgatagatccgtagaaactgcctgggatgtagcaggatgttggtttgtagagcgttttagtaaggagtgagagctcccttttgatatgccactatcagaccagttgttaacagcttcttcagaaaaattagtatcatccccagccaagttcacgcttgaaccctgcttttttcccctagtcaactcattgacgctcccaaccaagtgattagctgacgctctgccacctgtgacatctgaaaaatccctttgaacatcatcaattccaagaaaatgcttctgctcaagcattgatccagagcctgatctaaggttatattttccactgttctcaatgctgttggttaaactatcaaggttgaccgatccctcctgcgctgactgccctgtttttgaaaaaagtgacctttctgcaagagattcctcaaaagacaacctgtccactggggacctcaaaggattctccacaacaggctgtgcaaagtgatctttacgcccaaatgatgccggcactggaacatcagggaagcccaaagattgttgtgactgaaggacaagtttcttatgaatcatatcactcaaatcttgttctgcattcctctctttgttcataagtgctgcccatgcatgtgggttgtcagcagcaaggttcatttccacgttcctcctctgcttctctgcttcaatctgcaactggttgatgcgtgaagattccattagactattttgcagttgtccatttgcatctgaccagtgcctttccagccttcctaagtgagaaccagaatgctgctcctgaagcctatgttgctggggatgaacacctgaaggaagcataggcatttggcctaaagaatataaatcaccatgtgtttccaactgaccaagtccatgatggcgtgctagggcatttataacatctgggtttggtacaggaccaccaccaggcaaagaaccagaccgctcgagtgagtgaataccttggcctcccctatgcaaacgctcatgcaaggacaagctcctatcaagaggttcatgctgctcaaacgatgaggatctctgaaggttctccagaagatcaaaacgaccatgccgagatgcatggccttgatttggactggttcctgggcggataaactgggcagcatcatccatcggccagaccccacttaagtgcctttcttcctccctgcctgaatgttgcctcagagcattagccagctgttgtgactgaagctgctcgtgctgaagacctaaaagaatttgctgctccaaaggaagcatctgtctctgatttggacgtgaaagaacatccaacatatcattatgatgctccctatgaagcccatggccaaattttgcttgaattagttgttcaatcgccgcatcatgctgcctttgtaaatggtgtggttgttgatgcagttcatttaatacatgctcccgaagtaagacttgatcaaccatatttgctggtccaaaatttgaaccctgcaactgctgctgcaacagttgctcaagaatcatctgttgctgctgctgctgttgttgttgctgctgttgcaagagctgggcttgccgttgctgctgcagctgcctctggtgctgctcttgttggagctgttgccgacgttgctgctgctggtcaagttcaaactggactctcaaaagatgctccacgtcagaaagtggttgattcataggctgtcggtgttggtgcaaagaatcaaacacctggcctggaaacggaccaggaaactccaaattgttacgggccatcatttgctcttgctgcagttgctcccttcggatctgttgaagcagcagttgctcctcaaaattcaaatgatgctcagcctcaacctgagggattctgcctggaatatttgcatcattcataccatccaaccgcccaaagtttgcaggccattcatcacgaatactggaagcttcattcatcctgctaagttgtccatgtctaatgtttacaggtggaatgtccttgggtgctgtaggcttgggacttctacgctcatttaaaccaagtacattcgatgagagaggttgctttggatgcatcccttccagctcagaccaaagcaagccaagaggactcagatcactctctcttgggacatcatgctgcggcagattagcttctcccaccccagaatgaggatcacgtgatgccaactggaaatccgcacggtcattctctagatcccgtacggattgaccaatgctgctattaggcctcccagtgtacaacacttcagcatcctgaggaactgattcaggaatgtgctgctggcgattactgatatttgctatatcctttcctgtttcaggtgaagataaccaaccagtacgcgaaggtaatgatgcttcatgatcacttcttttaggatcgactgcattgctttcagaatcccatttggaagcttggtcacctttcccagaagaagcaggagtagggattgcagcctcaaatttactctgagcagaatccaaagattcagcattttcatcacagagtgcaggcggatgagattgcggtttctgtccaaggtgtggcatgacttcaacaagtgggcggaaaggaacatcatctggagcctgagacaaacgcacaggtaactccaaaccaaagtacccatcttcataccaggagattatgtcagcacccagaaatggaccctgcatgcctccttgtggatccagataatataatgtcaactcctccgggtaactagcatggccacctgatttcatatccatgtcactgttttggtacggcataggggtttctgaacgatgctcaaagggtgccacatcaaacagagtgtttgaatcatctggtagcttagtgctaagatcaggatcagcacttgacttggcttcatcagttttcaaaccttcctgaatgccagtaataccatactcattactaccagcattttcctc

SEQ ID NO: 5277 - DNA, 3001 bp, Setaria italica
  Peptide Sequence Number=SeqID_71251
aaagcaccagggaactgacaagatttacaccaacgggatatattaggtacaggtagcaggatattcagggtttcacattcacgaaaaaaaattgagctccacatagctgacagcttaaatcgcatccactaaaggtgtcactaaagaattttttttatatagaaggtaaattccaacaccaactacataagactttacacaggcaatagctaacagcttattccagtaccatctcgacacagcacttattccacgtcgacttcctcatcatcaccctcatactgctcataagcattaaccactggtggtggctgtgagggcatagcaggcgacctagtttcatcgccagcatcattttctattagtgcatttatcggatcatgcctatcctccagttcaacagcttcaaatagatcatccacagcatgagcagccataccagtggagggcaaaacatgtttgactggagaatctttgaccttgtcagtgttggctgaggaaactacattgcctatcttatccttttcatcttcccacaatttcttcttcaaatataaaccttttgttggctcagttcccttgcttggtttatcaaattctgcatctcgttctctccttttctttacggcttttgcttcttcacttgttgagtacaggattgatctcttcttagctgtagcagcatttgggctcctttcataaggcccatttggatcttcatcaacgttgatactggaaacttcttcattagcaccacgcttcagaatatcagaagcaagcaaatcaccgagtctctcaaaacgagcttgtgaccttttcaattcttcctgtgccttcaaaaagcgagcatgagctttaatgaacttctttatttttgaggtcatcctgtggcattcctctttctccttccttagctgcagatcaagatcatttactctgctagaaatcttgcgtacttctgcattcttctcatccaaaattatctccaggtgagatttatcatcacgcagaagttccatatcctgtcttatttgtttcagctgtatttcttgatcctctttgtcatcaccacttaagagtgtctccttttttctatcatcattattgtcggagatactcaaactcctagatgagttggtttctccatcatcaggcttcttctcatgcctcctttcactcttcctgctgggggaccgtgaatagctagattccctttcttgagaaattggtcttcggtcatgaaagggacgatgatccctggaatctcggtcaggggaatgtctcctatgaggcgaacgcctcctatcaaacctatctctgaagtcaccgcctctataatctcttctccctaaagatagagcaaatgttatacaaggaaagatacaatactgaacgaaaaatgtatcaatatggagataggtcacccataaacctgtaagcttaccacaacctttgagctacaagataattcaataagcaataagtagaagggtctccagtataataccactagccacaacaaagtagggccaaaaattaatgcatgggtagataccaaaatatggtatggaaccactgatgcacccattaagatgatactgaactcataatgttgattgtcacaaatcaaattgatggaagcaccatgaacaacctcaaatagcaattatgacaagttgaggtcttctataatctcaatatccccatataaatctactatcatttgtccagatatcttccacactccgcagagacttgcaattaccaggcttcccaatgaaactaactgatgcacaatattcaaggatttctggtaaagctgctaatcacatggtcatggcacatcaaatgtatatggacatcattcagtggagtcgtcatccaagatactggtatgcccacttcttgatataggacaagcattagtcacaacaaatcatcgaaataccaagtgaagaatctatataaaggtcgtattatcctctggcagcagttgagtctaataaatctgctcaggagtctgctaattcgaatggtagttaaatcaaaagacaaccagtaagaatgccacctaattctgcaacaagcttccacttgttagaattgttttctatctgcagcaactgaggttgaattcaagcactgatataaatataagaaaattaacaactcacagaagcactatagataatagaaaacatagaaagcacactactacaaaaatcatgaagcaagaataaagttccctatgaacaaccccaaggtaaatctgttacttagacacctgtgtcctttttttttgctgaatcatacaccccacaccaatgccagattttgacacccgtgttggattccatgtgttatttggcgtgcccccaaaaaaatctgccgaatcggatacccacaccctagtcctacactgatacccacacccatgtctgtgtataacaccttaaagctccaaagacagccatccataaatgatccaatcaaatatattcattctgtcaatctctatcccggccaaactgacctaattcttcccttctgttattgatatccaactcagtaacttgccatgtataccatttccctttttgcatggcacgccaaaaccgcataccatcaaccatttaatgttcttcagaagcacatggatttcatgaccaaccatctcataccgccacgtgtcgtgttcttcagaagcacataaatctcatatattacatgaccaaaccattcatcataggatccagaattcctgaaacttaacattaaagtgagctgtttctgacactgtactccgcgatactattcacttaaccacaccaactgactgcatctagtaagccatacatctaaacctaccaacaaaacaacccgagaaagaggattcgctgaaatttcatagaacgagccctcccaatcaagaggagccataagcccctatgggggatctgatctcagaagataaacactcaagtgaaaaaaacgaacaagg

SEQ ID NO: 5278 - DNA, 959 bp, Setaria italica
  Peptide Sequence Number=SeqID_71252
cgcgtcagaatggaagtcgaggaggacgcagtggcggcggcggcggcgagcgcgtggccgggttcgtccaggcgccgccacctccttcagtttctcctccacgcctccaagcggctcgacctccggcccatcgtcaagtactccgcgctcgagttcttcgccggacgcttcctccccgagctcccgaggaagttggggttctgcggcgcgcgaagcggacgagccgtgaggtcctggctcctcgagcccctgagggacagcaacctggagctcttcgcgctcgttgcggtgtggatcgccagcaagatccacgacctgaggccgctgtcagtgaagagcctcaaagcgttgggcgatcgcatcatcgccgaccagcatttcacgtgccgagacttcgcgaatgctgaattggtgttcatggaggtagtggagcataacattggatcttcaagcattgcttttgtatacctggaggatcttctcatccatttcagggaaatatcaaaattaggtgatcttttggatctggatgtgtgcatggaaattttggatattctgtatgagactgaagatacctctttactttttaactctccttgctcgcttgctgcttcaactcttgttgctgcatatgctatatctgttcctaagcagacatgggagtttccaatccttccttgggtcaggtttgctacatcatatgatgaggaggaaatcatgaagattgttctgacaattctcctgcatgtgctcaaaccagacgggatcagagagaaggacaagggagattttgatgtcagatgtttattgtgaataagtaatgtgtagagcacaagaatgtgccccagttttgcctttgagttgtgaagtactgatgccattaaactgagtacagaagatacatgcctgtagaacacttggcctctttttgtgcaggggttcaagattaagatgtcctg

SEQ ID NO: 5279 - DNA, 610 bp, Setaria italica
  Peptide Sequence Number=SeqID_71253
aggacaaacaatggcttttcactctcgctctcagcgtctatcagcttgcctcctgatttgctttagtttcatgatcagagcagatggatctcgcaagttatacattgcctacctgggtgacaagaaacatgatgaccctagtcttgtcgctgcttcacaccacgaaatgctcagcaccatccttggaagcaaggaagaggcaatagactccgttgcttacagctacaagcatggcttctcaggatttgcggcaatgttaactgaagatcaggctgaaaaccttgcagagttacctgaagtaatcagtgttactccaaatcagaagcatgaattgttgaccacgcgaagctgggatttcctggggctgaattaccaacgacctagtgaacttctgcagaggagcaattatggagaagacataattattgggataattgacacagggatctggcctgaatcaagaagtttcagcgatcatggatacggaataataccaccacgatggaagggtgtgtgtcaactaggacaagagtgggggcgtacaaattgcagcaggaaaatcatcggcgcaaggtattatgctgcaggtctcaacaaagccagccacaag

SEQ ID NO: 5280 - DNA, 380 bp, Setaria italica
  Peptide Sequence Number=SeqID_71254
tttaagttttacttaatttaattttagtttttagtaacccttcctaaaaataatgtgtgtatttgtttctcatcattgcttgctagctgagtttcagcaaggaagaggcaatagactccgttgcttacagctacaagcatggcttctcaggatttgcggcaatgttaactgaagatcaggctgaaaaccttgcaggtgcgctggcattagctaagaaatttagctcactgctaagtctgctattgctagttaagatcgccaaactgaatatatgtgatcctatttgctgactgaatagagtacacttacaaacatatattgcgttagtggttgaaagaatgtcttctatctgaaactaattcacttccattaagtatgca

SEQ ID NO: 5281 - DNA, 872 bp, Setaria italica
  Peptide Sequence Number=SeqID_71255
cacggaatccttcgccatgaactgcagcgtcagcggcctcagcggcgcgccggaccccggaccgggcgccgagccatgcgcgccgggcttcatgatggaccgcttcctcccggccgcgcaggctgtggccgtgggttccccgcagtacaccttccggaaggccggcgccgccggtggcacgggcaactctggccgcgaccacgcgcgtgcggctgtggcgaaggcaagcgtgggcaatggcgacgatcggatgaggagaacgcccgtgcagctcccgtaccagcacctgccgcccaattacttgtcctgcgcctatcccagacgcgaggaacatgaggaggaggacgaagaggatgacgatgactacgacgtgcatagtacccggggattttcagccaagggctgtggtttgctccctggcctgtgtgtgaaaacctccttgttgctcttgaatccaatgcctgcaatgaagcgcggcaaggcgcaagggcggggtagaggccgactgtttccgtccaaaggcaggggccaaatggcacagagtccacttgcgcggagctcacagaacaagcatctaggatgtgattccaacgggcaatcctgggaggacgtgtataagcacaagttggagcagaagtatcttggtcaaggagaggatggtagtagcaagctgacaagtgagtcgaatcagctgactttctggagcgattcacagactgtggatggatcttcaccatatcaccgctccatagctggtggcatgttgccctatcggaactatgctgtgatgtcaccatcaagtagagcaaatgggtcatctagaataggagatagggatgataaggcaagtaggagcaatggttctggttcgc

SEQ ID NO: 5282 - DNA, 296 bp, Setaria italica
  Peptide Sequence Number=SeqID_71256
gttttatttctgtatcttcggagggcacggattgtgtctccggccttcctgctccctctcctctgggtccatgcagagaaccatgaagaagctcacggcaccggcggtactgctagcggcggcagctcatgtcctgctgctgacgctgaggacggcgcaatgcttcaacccagagatctacaacacaggcgggctcagccgccgcgcgttcccggcggggttcgtcttcgggacggccgcgtcggcgtaccaggtcgaggggatggccaagcagggaggccgggggcctagcatct

SEQ ID NO: 5283 - DNA, 381 bp, Setaria italica
  Peptide Sequence Number=SeqID_71257
cagattttgcttatttcccttgtgcactttttttcatatctgtaagagaacattctcttttgatcgaatcataatttgcaagccgccgaaacaagaacttgggatatttgagatagttctcacttagatgagcacttctaagttctgcttttataatcttctcttagttatcaatgttttcaaggaaaggtgtacataacttcttccatgaatgtaattgccccagatcttcacgattttgactgtttctagtgactctagatgacagtgacatggacaagtggctatggtaccaatgaggctacaccatttgtcagatggggcatacaaggacaaatccaaatcctttctcctgcaggcacccttacttttagtcgcaac

SEQ ID NO: 5284 - DNA, 1406 bp, Setaria italica
  Peptide Sequence Number=SeqID_71258
ggatccgatctagaccatggcttaaccgatgattcccattccaaatacaaaattggagatccaattgaacctagtttttgaacaggatttcttcatactagtcagtctcttacaacaattgattgttttcttgtgaagttccaaggaatttttatgctttcaataaaagctgggtatccttttgtccagaacttttcgctgtttgtagcttagacgtcactccttgactgcccactgttgcataatctattgcttagctttataccacaatagttactttaagcgagaggagttcttcttgcttgctgcttgctgcttggagcaagcgagcatgatgcagtcgctgcctagaacggccgtagcggtggcggtgtatgcgctggtcgcccttaccgcagccgcggcgggaggcggcgagcagccgctgtcgaggatcgccatccaccgcgccaccgtcgcgccccaacccggcgccttcgtcgacgcgtcgccggcccttctcggcctgcaggggaaggacagagaatgggtgaccgtcacatatagcaaccccaaaccttcgaaggatgactggattggagtgttctcgcctgctaatttcaatgattccatttgtccatcagagaaccaatgggtggaggcccctcttttatgcacagctcctattaagttccaatttgcaaactacacgagtcgtgactatggaaacactggaaagggatccttgagacttcagctgataaatcagagagaggatttctcatttgcattgttctctggaggcctctcgaatcctaagctcatcgcgcactcaaaaagtgttactttcatcaacccaaaggctcccgtatacccacgcctagcccaaggaaaatcctggaatgaaatgacagtgacatggacaagtggctatggtaccaatgaggctacaccatttgtcagatggggcatacaaggacaaatccaaatcctttctcctgcaggcacccttacttttagtcgcaacaccatgtgtggtcctcctgcaaggacagttggttggcgtgatcctggtttcatacacacaagttttctcagggacttatggcctaattccatgtatacgtaccaaattgggcatcggctatttgatggttctattgtttggggacatcaatatagcttcaaagcacctccttatcctggggaagactctttgcaacgtgttgtgatttttggggatatggggaaggctgaggttgatggttcaaatgagttcaatgactttgagcctggttcacttaacacaacgaaccagctaatcaaagacttgaagaattttgacgtggttttccatattggggacatcacgtatgccaatggatatctgtcacagtgggatcaattcactgcacaaggttgaaacc

SEQ ID NO: 5285 - DNA, 1199 bp, Setaria italica
  Peptide Sequence Number=SeqID_71259
tactattctaattattagtctttctaaagtctaccttcctttattccttggggtaagacctctttgcaacgtgttgtgatttttggggatatggggaaggctgaggttgatggttcaaatgagttcaatgactttgagcctggttcacttaacacaacgaaccagctaatcaaagacttgaagaattttgacgtggttttccatattggggacatcacgtatgccaatggatatctgtcacagtgggatcaattcactgcacaggttgaacccattgcttctactgtgccttacatggttgggagtggtaaccacgaaagagattggcctggatcgggatcgttctatgggaacctggactctggtggtgaatgcggagtgccagctcagaacatgttctatgtgccagcagaaaaccgtgagcagttctggtactcgatggattatgggatgtttcgtttctgcatagccaacaccgagttggactggaggccaggtacagagcagtacaagttcatcgagcactgcctgtcatctgttgatcggcagaaacagccttggctcatcttccttgcgcaccgcgtccttggctactcatcggccaccttctacgccgacgaaggaacgaccgaggagcccatgggacgagagagcctccagtcactctggcagaagtacaaggtcgacattgctatgtacggccacgtccacggctacgaacgaacctgcccagtatatgagaacgtgtgcgtggccaaggggtcggaccgctacaccggcgccttcacggcgacgacgcacgtcgtggtcgggggcggcggcgcgagcctcgccgactacacggccgcccgggcgcggtggagccacgcgcgggaccgcgatttcggcttcgccaagctgacggcgttcaaccacacgacgctgctgttcgagtacaagaagagccgggacggcagcgtgcacgaccacttcaccgtctcccgcgactaccgcgacgtcctggcctgcggcgtcgacaactgccccagcaccaccttggcgtcatagagtttcatgtcgattcaatttgttctttgtcctttgaattctgatagatgcactgtccattgaattcctgaggactaactagtttgtccttttaaacgaaaagttttgcttcttttttaagaaaaaaaaagataaaaagtctcattggcaat

SEQ ID NO: 5286 - DNA, 337 bp, Setaria italica
  Peptide Sequence Number=SeqID_71260
actcacctccccgctcctgggcggtcgtctctcccctctaaatcagcgccagccagcgagtccccgcatctgcagtttgagaggccagttcgccgccccgcccaaggacgacggcggccgcgccgtcacgaggctcaccccagccgccggcccgtcgaggagagcgcgcgcgcggcggagattttctctagagaggatggcgcgcggcagctcctggcggctcgcggcggttggcgtcctcgtcgcctgcgcggccgtcgtcctcgcgccgcccgccgcggcgctcgacatcggcatccagtccgccggcgacggcgtgagcaagcagcaggctgca

SEQ ID NO: 5287 - DNA, 1707 bp, Setaria italica
  misc_feature (1646)..(1707): n is a, c, g, or t
  Peptide Sequence Number=SeqID_71261
ccaattgcgcatccactaatattttgcgccacaatcgataacagtgacttctgttgtccctaccacaatcaccccttcatctgtgttattcattggcttgttggactcaaatattgtcttgttgaacgaggggctcatactctctgtaaagctttggttaacaacacagttgcagtctggtggaaacttcacattttctggatcactggaacctttctttggaattggttctgatgttatttctccaaggaaaattggtacttccttagctgaaaatgttgagtttggaagacaatgcttagcagctgttcaaattcatggtgacaattacttaattctgtgtggtaattgggagaatagtttccagatcatttctctaagcgatggaaaaattgtgcagagcatccggcaacataaagatgtagttagttgtgtggcagtttcatctgatggaagtgtaattgccactggaagttatgacacaactgttatgatctggtatgcattccgaggaagatcaaatgacaaacgatcaaggaatgcaaattacgacatatcaactaaggatcacgtcattattgaaagcccttcccatatattatgtggtcatgatgatattatcacatgcatatttgtcagcacggaattagacattgttatcagtgggtctaaggatggaacttgtatgtttcatacactgtgtgaggggacatatgttcgatctattcgacacccctcaggtgctagcttgtcaaaactggtaacgtcacagcatggtaggctagtgatatactctgatagtgacctttccttgcacatgtattccataaatggaaagcatattgcctcgtcagaatccaatagtcgtctcagttgcatggagctaagttgctgtggtgagtttatggtatgtgctggtgatcatggtcaaattgttctgcgctctatgcattcccttgatgttgtttggaggtatgagggagctgggaagacaataacttctttagttgtgactcctgaggagtgcttcttggcaggaaccaaggatggtagtttgattgtattctcaatagaaaaccctttgcttcgtaaaagcaccatgcaacggcacaaggcaaaaccttctattggtggttagtggtatagatgaaaacaataccagaactccttgctgcatgtttcaaatgagaggtttatctcatcagcaacaattgtaaaagagaagagtctatagttcctgtacaaatgtacatatggcatcagttcagttagcattctgcagaaggcatgtgccgatcacaagcaaaaggcagatattcttctaaccgtgaaatgcatacgacaaaaactacaatagatttatgtttcatgttcacaagacaaaggacctgaccttcatatgatctcttgagattgtagggtgtagttggttggggggtgcattttagtgtaatatacctttttttgggggtattcttgctagtgaagagtgagcaacaattttcccagaaagaatttctagtaggtaaataggtggccgctgacctgtagctaataactgcacattgtacatggaactgatgaaagttcataatacgcatgcagctttcgtaaagatgctcttgaggttagagcgaataaacgtnnnnnnnnnnnnnnnnnnnnnnnnnnnnnnnnnnnnnnnnnnnnnnnnnnnnnnnnnnnnnn

SEQ ID NO: 5288 - DNA, 370 bp, Setaria italica
  Peptide Sequence Number=SeqID_71262
tgacatggctgcagtcaataatatcctttaggctgatggagcagtttggcatcaagcctgacattgtcacctacagtcaccagttgaacacattcagctcgctaggccacatggccaaatgcatgaaggtgtttgacaagatgatcgaggcaggaatcgaaccagatcctcaggtgtacagtattcttgccaaaggatacgtccgtgctcagcagcctgagaaagcagaagagctcctgctgcaaatgagccagcttggtgtccgcccaaatgtcgtcaccttcacgactgtcatcagcgggtggtgcagcgtggccgacatggatagtgccatgagagtcttagtaaagatgtgcaaatcaggcgtcca

SEQ ID NO: 5289 - DNA, 413 bp, Setaria italica
  Peptide Sequence Number=SeqID_71263
agtttctcccctcccttctccggttctccctcagcggcggctgcgcttgggcgaggagccgaaccgagcacgccgccgccgccggggcgtcgtggtcaccgggttggaagcggggcgttggcgagcacgtgcctaagaggcgacggcggcggagaggcagcgttcaccagccccaatcgattactcgtcaggagcacttggagtaatcatggcagggaaatctgagcagaaatctcggaaagagagacggaaagaggcgagatcggagaagcagaagctgcggtttctctcttgggttcagcaccagggtggcaaaaagaagaagctggcaatgccagcagtagagccaagcccagcagaggagaagaaaccaaagaaagaacctgctgctgtgaagaaaaagaggaagaggg

SEQ ID NO: 5290 - DNA, 499 bp, Setaria italica
  Peptide Sequence Number=SeqID_71264
ggctcacttacagttaacgccttagcggtgaaataccagcagaaccaagttgaatggggtgaaatggtggaacttcagttacagcgctgcagaattaccagtgccctggtgattccaggaaaatgatatcttgaggcgggcaagcatgggtgcaggttagcaaggttctaagaatgattctgatgttgttcagataggaggaaggttgtatcacggacacatggcctcaagattctggaaattgaagttccaccgtaaatctggaatatccacagcttcaataaacccaatcacaccatgatgcagttccattctgggcaccgcagttcctccataaaccacttcagagttgaggaagttcctgtgggttctccattgatgctcttaatatcatacctgctctccgcttcttgtcatcctttgcttcctccttcaagaaggaaggatcatccctcaggtccaaggctcttgaattcagaacagctggtcttgttggtct

SEQ ID NO: 5291 - DNA, 548 bp, Setaria italica
  Peptide Sequence Number=SeqID_71265
aataattcaactgttaaagttactgtgcagagcaagcctactgaaaggtaactttaacacaacgaactcccaagatttcggtcatacaagagccaaagtgtgtattgttaatgatgcatacatgctttaatagatctctggatcattttcctatatgagaaaaacatatatacaccaatgcactgcctagctaaagtttcgccattctgatacctacactcaaatttataacaatgaagattacaaatcaatatgaatccaatagcattcaatgatggacctcgagagcaattgacagccaggaccaatgacttgcaacaagttacatgttacaacgtacctcaagattctggaaattgaagttccaccgtaaatctggaatatccacagcttcaataaacccaatcacaccatgatgcagttccattctgggcaccgcagttcctccataaaccacttcagagttgaggaagttcctgtgggttctccattgatgctcttaatatcatacctgctctccgcttcttgtcatcctttgcttcctcctt

SEQ ID NO: 5292 - DNA, 1425 bp, Setaria italica
  misc_feature (1)..(28): n is a, c, g, or t
  misc_feature (1384)..(1384): n is a, c, g, or t
  Peptide Sequence Number=SeqID_71266
nnnnnnnnnnnnnnnnnnnnnnnnnnnnttttttcacaagctccatccaacatgatgccttttaaaatcttcacacgttcaatcggggaagctcaggttagacaggaaaaataagccgaaagaatcatattgcacattgttattacagtcccagaaaggggcactaatcgctctgcaaagcactacatcagctctctctcaggatcatgaactcactgaggacagatcttcaattgatcctcatgaattgagtccatcatcagatctttgcaaagcatcccaatcgcaggcgaccttactgcactattaggccagcatgttgcataaagaagctggctctcgagagtaacccactaggtacatcaatcctgtctgagacgagtcttggtcaggagaatcaggttagcttttgtacaaacatctctctccaattctaccagggaatacagctacaaaaagtaaactcgggagcttcattcttttggatgccatgcctggggagaggaaacacagcctcccaaatcagctccgtatgaagcggctcacttacagttaacgccttagcggtgaaataccagcagaaccaagttgaatggggtgaaatggtggaacttcagttacagcgctgcagaattaccagtgccctggtgattccaggaaaatgatatcttgaggcgggcaagcatgggtgcaggttagcaaggttctaagaatgattctgatgttgttcagataggaggaaggttgtatcacggacacatggcctacagaaatcaccaaagctcaagtcagaataataatttatttgacatgctaatttaccaccatgctacgaagcaggatgtcataaaggaatacgcagttcctactagaatgcagatccattctgtactgtgtaatatttgttctccaaacccatgaaaaatgtaatgaaagttggatggtggattgatttaccatggctaattattactatttgttgtgaatgtgaatactctgctttggacctttttaactgctgcgtgtagaactacttgaatattgggccaggtgtactatatctgctttgatcgtgcacccacctagttgccagttaccaatacaagaacttcacagagatccactttaaggactataacatattatctatattaccttgctttcatggaaatttgtaatattcacatacatgaaaggatgaacatggaagtgcataccacagtgtaactaaatgattggaaagtgatacaccacattaaggcaatctaaatattaactaccaatggcagcacaaaaataacagctattgtctaaccacttagtaggcattaaaacataataaagaatattgctctttcatgtcttaactgactagtttaaaggnggctatcaaattaaaaaaacaccaaacaaaagaataaaaat

SEQ ID NO: 5293 - DNA, 1055 bp, Setaria italica
  Peptide Sequence Number=SeqID_71267
tgtccttagctaggtgcaacttaacaatacatgcgtacaccagaatataaactacaccacctaatcacccacccattttgtatattgcaagcatgtatgcagctgtttcaaactaaacaatcttctctctttgagaagaaacacctttcaagtaacacaaaccccttaaccccaaagggataaaaagcaacatatatatagctaattctacacacctctctctactaccccctcaaataatgcatcccagccgttggttggatcgatcaaggagagcaagaactcttgaccacgcaccctacgatctggtcatttcacttttcacaacctcgatatatgcatgttttttattacgtatctacactggtagcaacacaagctgatgtcaccatcttcacctgctgcagctagctagaactttgctccgtttgagccgttgatcatgtagccatcgacgaccaagctcgagtcctccaatccaaaatcttggtagtcgagcagccagtcggtcgcgccgtcccacggcaactccgggccggcggcgatgctgctgaactcgtccacgtcgacgctgccggcggtgaagtcgagccacggctcgtcgccggtgggcgggtcctcttccaggagccacttcaccagcgggtcctggtcgtggctgccgccgctgctgctgctgcttccgccggtgctgacagtgttcgtgctcgattccgtcgggctgaaaccgtcggctgccaacacgtccctgacgacgtcgctcgccgggctctgctgcttggtcgcctcgtcggacttgcttgttgagtcagcggtgacgacggaatgcgaggttgtggccgggctgctggtcttccggtcgaggggctcgtgcgtgaccggatcgatgcccatcttgatcagcttcttcttgatgtgggtgttccagtggttcttgatctcgttgtcagtcctgcccggtagcttggcagcaatcttcgaccatctgttgccgagcttggcgtggaggtcgatgacgacctgctcctcggcgtccgtgaggaggccgcgcttca

SEQ ID NO: 5294 - DNA, 370 bp, Setaria italica
  Peptide Sequence Number=SeqID_71268
ttttttttttcccgaataagtatagcatagtgaatcattcaaagagatcatcagatgccaagcgtgcatcttcctgatgatccaaaattacagaactggaaaccttgccgttccagcaaacaagtaggagtacacactagcctgctagtttaaccaaggcctgcccaaagcgggtgatcaccaaggaagaaaattctatgcggcggtgccgcaccacgcctactagaactagaacttgccgttctagcaaacaaatacgcgcgcatgcagagcacggcacgcacgtacgtcgaacacagcgcgtgcattgttacaccggcgcccccaaatcgagtgatcggccggctcaaaaacatggcatgcgacgccg

SEQ ID NO: 5295 - DNA, 250 bp, Setaria italica
  Peptide Sequence Number=SeqID_71269
gcttgaagtcggaaccgcagacgcagaaccagagcctgccgcagttcttctcgtgggtgcgccagtcgccgcgcacggcgaaccgcttcccgcaccgccggcacgcgtacggccgcgcgccgtgcttccggcggtagtgcgtctgcagcgtccggaagtccttgagggggcagcacgcgggtgctcgatgttgttccggcacccctggcgcagcagtagcacggcagccgcatcagcgacgccggcggcg

SEQ ID NO: 5296 - DNA, 223 bp, Setaria italica
  Peptide Sequence Number=SeqID_71270
tgcgtacctccttgtacttccttgtgatctgtatgatggatatgatttcgcatgcatgtttgttgcatgcagtactcctccggccagtactcaaatcatatactagctaccatatatagctgcatccaaatcatatatcgtcagtcgtcttgccaagccatccaacaggaagagagggtgtgtgtgtgtgtgtgtatacagtacacgatggccgccgccgccg

SEQ ID NO: 5297 - DNA, 935 bp, Setaria italica
  Peptide Sequence Number=SeqID_71271
caggaaaggagcgatgatggctcgatgaagctgaataaacaaagccagcacgcaaaccagtagcgttcacgggacgctcatttacataaataccctcgtcctggttcttttccccgactccaaactccattattggttgatccttgagaagagaggaagaggagaggcagaagcaaaggagaaacagcagttcttcagttaggcaggagagcaaggaagggggagatggcgtcgaagaggattcagaaggagctcaaggatctgcagaaggaccctcccacctcgtgcagtgcaggtcctgtgggagaggatatgttccactggcaggcaacaataatgggtccatgtgatagcccatattctggcggagttttcctagttacaatccatttccctcctgattatcctttcaaaccaccaaaggtggcatttcgcaccaaggtgttccatccaaacataaacagcaatggcagcatctgccttgacatcctgaaggaccagtggagtcccgcactcaccatttccaaggtgctgctgtctatctgctccctgctgacggatccgaaccccgacgaccctctggtccccgagatcgcgcacatgtacaagacggaccggcacaagtacgagaacaccgcgaggacctggacccagaggtatgccatgtaggaggaccgggccaccggagctggcgctgctcgtctccgctgtaatgctggacctggagtcctggacgtgtctcctttgcgttcgatcgtgtgatgtgtgatgaatcaagttgggtttgcagtgcagtgcgctgtgtggtgccgaatgttgtattgtgtcacttcgaagcagtaattctgaacgtcaaaaactggtgtttggaatgtcttttcgttggatgatgttgccatgcaggtccattggtgttttgttgttataaaaaaaaa

SEQ ID NO: 5298 - DNA, 646 bp, Setaria italica
  Peptide Sequence Number=SeqID_71272
tccatgaaacaactcccttctgcaactcgtgctgtctgctcgcatggggcagatgaagatacacaggacactgaagagcttgacaaagctgcacgttctgatacagactcttgagcttttttggctaacacctctgcgtggatctgatttgcatatgcctgatatgctgctgctgcagcctcctcagagtcatatgagccaatccatttcgggtttttctcacaggatcgcgaatctcagctgcccaacgaccccagggtcgcttacgcacaccacgaaacctgcttgatttcccctttttctctgaaacctccagatcctttgttccacatggcacaagcgtctccagacatttagatgtcttcgagttcttcaccggaactagcacctctctaaccattttctttaccttgatgttctgaccatcttcatcatcagaggagtcagtagcatctggatcagaacagaaaatacggaccttctgcatacagggcatcatcttgtagcccagctttcagattgccttaacgagtaaatgtttagacaaaattgggacaaaggctcctggtctgtgcaaaaactgcagcacagaatcttgcaaatcagcaggattctctacaaaattctgatgaaaactcgagaaaag

SEQ ID NO: 5299 - DNA, 1054 bp, Setaria italica
  Peptide Sequence Number=SeqID_71273
tctgaacaagaaaggcaaaggccaaaggcttcagcttccagggtccaaagcaaaggcgacctcagggaaaataaaaggatctgaagcctcttgtgcgattggaggctgcagcatttgaggtggtcaggatgagcaaggaggacgtcctcaaggtgcagacctgtgtgctgaaagttaacatccactgcgatgggtgcgagaagaaggtcaagaagatcctgcagaagattgatggtgtctaccagagcagtgtagatgcagagcaggggaaggtgacggtgtccggcctgatggatccggcgaccgtcatcaagaagctgaacagggcgggcaagcccgccaacctctggggcgccaagcctggtgtggtaagccaggtccaaaagctccagctcggcggcgccggcgccggcggcaagggccagcaaccgaaggatgctggcggcaaggggcagcccaaggatgccggtggcaagggccagcccaaggatgctggtggcaagggccagcccaagggtggagccggtgccggaaacgccggcggtggtggcggcggtggcgcgaaagacgcaaagccgctggcgatgccacagccgactccgcagcagcttcagcaactgcagcagctgcaacagcagatgcagatgaaggggatgaagcttcctccccagctcatggccatgggcggcaagatgccgttcccggcggccgcgccgccggcgaaggaccccaaggccgtcaagttcaacgttcccgtggacgaagagttcggtgacgacggcagcgagttcgatgatgagttcgatgactacttcgacgacgacgatttcgaggacgacgacttgtacgacgaccccaagatgatggcaaagcccatgccaatgccgatgggcgccggcgggggcgacaagaagagtgccaacggcggcggaaatggcggcaagaagggtggcggcgggaacgagatcccggtgcagatcaaggggaacgccaacaacggcggcaagaaggactctggcgcgaagcagaacgccggtggcggaggcggcaacgg

SEQ ID NO: 5300 - DNA, 464 bp, Setaria italica
  Peptide Sequence Number=SeqID_71274
caaggatcacggaaggtggggttgaagccgcgggagccctttttcgcttcctctccgtcggaaggctcggagagcgggtttcgcgggagctttgatggcgaagccgttttggatgtgccgtttggcagcaccagaatactggaggaaccttgatccatcatggaagcacactggtccacctatgcggcgctactttcaccctgatggctaccacagcgcagaccctcatgacgctgtgtggggtggccacgagtgcacctacacggtaatcacaagctttgttggcgatggccgaatcagggaacactatgtgaggatcaaccggtggccaccgttgaaggtttcgaggaaggatgactggagctgggagctgtcgaaccacctctaccgctacaacagcatccctgatgctgacaggaaaggatgcaccggtcctttgttcccagtatggtgaatacacttct

SEQ ID NO: 5301 - DNA, 842 bp, Setaria italica
  Peptide Sequence Number=SeqID_71275
cgggcgaccccgtcggaggcgctcggggaggtggtgatggggcgggtgatggagctcctggacgcgcgcagcgtggcacgatgcaccgtggtctcccgcgcatggcgcggggtcgccgccgacgaccgcctctgggcacccaagtgtgctgagctgatggcgggaaaggcacatatccctcgtttaacgttgatccgcactggatctaagttgtctacttattcaatggccatcatggatggaaaacggagtcggatcacaaaagaggatctctgcgatcatgcgtgggagtattgtttcactatagcagcaccagaatactggaggaaccttgatccatcatggaagcacactggtccacctatgcggcgctactttcaccctgatggctaccacagcgcagaccctcatgacgctgtgtggggtggccacgagtgcacctacacggtaatcacaagctttgttggcgatggccgaatcagggaacactatgtgaggatcaaccggtggccaccgttgaaggtttcgaggaaggatgactggagctgggagctgtcgaaccacctctaccgctacaacagcatccctgatgctgacaggaaaggatgcaccggtcctttgttcccagtatggtgaatacacttctctgcgactagaaacttgtgtcgtgatcttgtgccggtagaaacttggcgtgtgcaacaagaggttatgtttggcattgaaagccagctacgccacctaaggttaagcttaggtgtgtgtctgtaatacatatgtactgttgcttatgtgatgagtggttccgcgtagttcttaattaaaaaaaaaaaaaaaaaaat

SEQ ID NO: 5302 - DNA, 205 bp, Setaria italica
  Peptide Sequence Number=SeqID_71276
ccgtgccggtgccgcacgtgctccccgccgagcgctacctcgtcggccgcatcgggccgccgggccaccactcctaccggtgcatcgtgcgctacggctaccgcgacgtgcaccaggacgtggactccttcgagacggagctcgtcgagagcctcgccaccttcatcaagctcgactcgctgctcgaggtcggcatggtctacgt

SEQ ID NO: 5303 - DNA, 499 bp, Setaria italica
  Peptide Sequence Number=SeqID_71277
cctgcccccacttatcgatcctctcctgtggggcgtcaaagctccactaacttttattgtagctctcgcctggatatgtatgccagtgccgtccgtgatctcttggtgcttgctttcccctcctcgcgcacatattttattcccctccccgccggttccgttccgcgatcctcgttcgcattgtctgtcactcctcgattgtttttgtttcgaggtctgtcttggtttctccatcttcttgttgcttatcaaggctggccaagggaagggccggctgctcaatccgttcgggcagcggctcgtcgcattgctcgtctgccgccgctgatgcgtttccttcttggagcagggctgcaaggcaggcgtagcttcatgatcggagcctagcttctccggttcagtttcttggttgatcccatctcgcatcgcagacatggatactgagttcggagttggcatggcgccccgaaagagggagtcatggcggacgacgctgctg

SEQ ID NO: 5304 - DNA, 734 bp, Setaria italica
  Peptide Sequence Number=SeqID_71278
gccgcgtcgggccgccgggccaccactcctaccggtgcatcgtgcgctacggctaccgcgacgtgcaccaggacgtggactccttcgagacggagctcgtcgagagcctcgccaccttcatcaagctcgacgcgctgttccggtgcagcgacgccggcggcgagcagcgggacagcagctactacgagcgcgagaacgcgctcaccgtcatcgggagcaacccgctgcggcgccacctgggcctgggatacgacgactcccacgacggcgtgtcgtcggcccacgaggccgctggcagcgcgaacgggatcgagctcgcggcggcggcgccggcgattaagaagcaggtgaggttcgcggtggagagcgcggcgccgaggagccccggcgtggacgagcgcgtgctggaggagctgcaggagctgtgcgaggcgcgggaggcggggacggcgttcatcctggggcactcgcacgtgcagactaagccggggtcttcggtgctgaagaagctggccgtcggcgtcggctacaacttcctgcggcggaactgccgcggcccggacgtggtgctgcgcgtgccgccggcgtcgctgctcgaggtcggcatggtctacgtgctatgacaacgtgattgcggatctccctgcttctttttgtcagtgcgtcaactacggatctctctgctttcgtgtcagtatgcagatctcgacctgctgatgaaaattgtaattcgt

SEQ ID NO: 5305 - DNA, 662 bp, Setaria italica
  Peptide Sequence Number=SeqID_71279
ctcgccctgggcgacaagctcggcatggtgcgtgtcccgggcatcggcctcgtctacaccgacctcacctccggcgtgccggcgaacttctcccgcttcgtaaccaacctcccagcgttccaccgggtgctcgtcttcgtctgcgtcaagtccgtgccggtgccgcacgtgctccccgccgagcgctacctcgtcggccgcgtcgggccgccgggccaccactcctaccggtgcatcgtgcgctacggctaccgcgacgtgcaccaggacgtggactccttcgagacggagctcgtcgagagcctcgccaccttcatcaagctcgacgcgctgttccggtgcagcgacgccggcggcgagcagcgggacagcagctactacgtcgctgctcgaggtcggcatggtctacgtgctatgacaacgtgattgcggatctccctgcttctttttgtcagtgcgtcaactacggatctctctgctttcgtgcagtatgcagatctcgacctgctgatgaaaattgtaattcgtaacgcgatgcgatgatatagaattatagatgccctgatatttgccagtggcaccatgtgttcaatatatggttgttgaatcaaattattggcaaattttacatacactggttacactgtaaccaaaaaaaaaaa

SEQ ID NO: 5306 - DNA, 1990 bp, Setaria italica
  Peptide Sequence Number=SeqID_71280
ccccgtccggtccgttccgcgatcctcgttcgcattgtctgtcactcctcgattgtttttgtttcgagggctgcaaggcaggcgtagcttcatgatcggagcctagcttctccggttcagtttcttggttgatcccatctcgcatcgcagacatggatactgagttcggagttggcatggcgccccgaaagagggagtcatggcggacgacgctgctgctggcgtatcagagcctcggggtggtgtacggcgacctcagcatctcgccgctgtacgtgtacaagagcaccttcgcagaggacatcacgcactcggagaccaacgaggagatctacggcgccctctccttcgtcttctggacgctcaccctcatcccactcatcaagtacgtcaccatcgtcctgcgcgccgacgacaacggcgagggaggcaccttcgcgctctactccctcatctgccgccacgccaatgtcagcctcctccccaaccgccaggtcgccgacgaggagctctccacctacaagctcgagtgcccgcccgaggtcgcccagaggtcacgcgtcaaggagtggctcgagaagcacaagaagctgcacaccgcgctgctcgtcatggtcatgatcggcacatgcatggtcatcggggacggcgtcctcacgccggccatctcggtgttctccgctgtttcagggcttgagctctccttgtccaagcatcaacatgaatatgcggtcatcccgataacctgtgctatattagtattcctgtttgctctccagcattacggcacccaccgtgtcggatttctcttcgcaccgatcgtgctgtgctggcttctctgcatgagcgcaatcggcttgtacaacatcatccactggaacccccatgtttaccaggcactcaatccctgctacatgatcacattcctgaagaagaccaggaagtctggctggatgtctctgggaggaattttgctatgcatgacaggatccgaagcaatgttcgcagatcttggccatttctcctacagcgcaatccagcttgctttcacttctttagtgtatccatcactgattctgggatacatgggtcaagctgcttatttgtccaaacaccataactttgacgcaagctaccaaattggattctacatcgcagttcccgagagtgtaaggtggcctgtgctagtgctggcgatattggcgtcggtggttggaagccaagcaatcatcagtggaacattctccatcatcaaccagagccagtccctgagttgcttccccagggtgaaagttgtgcacacctctgccaaaattcatggtcagatatacatccctgaggtcaactggatgctaatgatcctctgcattgctgtgaccgttggtttccgtaataccaagcacatgggaaatgcatctggcttggcggtgatcacggtgatgatggtgacgacgtgtctcatgtcggtggtgatcatgctgtgctggcaccggtcgcctctgctagccctggcgttcttcctcttcttcgggtcgatcgaggcgctctacttctcggcgtcgctgatcaagttccttgaaggcgcgtgggtgccgatcctgctgtccctcatcctgttggccgtcatgttcgtgtggcaccacaccaccatcaagaagtacgagtacgacatgcagaacaaggtgaccctcgagtggctgctcgccctgggcgacaagctcggcatggtgcgtgtcccgggcatcggcctcgtctacaccgacctcacctccggcgtgccggcgaacttctcccgcttcgtaaccaacctcccagcgttccaccgggtgctcgtcttcgtctgcgtcaagtccgtgccggtgccgcacgtgctccccgccgagcgctacctcgtcggccgcgtcgggccgccgggggaccgaccgggaccaaccaactacctaaccggtagacaatacgtagacgactaacggactaaccgacgaacgta

SEQ ID NO: 5307 - DNA, 250 bp, Setaria italica
  Peptide Sequence Number=SeqID_71281
taacagaaccggatgcaaagcccctgaaaagaaatttgtaaaaggagccacatgcccggcccatccgcagaaggcagaaccaataattgtagtatcatataggccatcagcagaagatcacctcactaacggtggtaagagcaatgtcaagcagcaagaacaaacttaccaccgattaggggtgccatgatcgatgaatctggtaactatggtagcattctgatataccgatctgattcaaagatccggg

SEQ ID NO: 5308 - DNA, 578 bp, Setaria italica
  Peptide Sequence Number=SeqID_71282
ccgccttctcctctctctttctcctacctctcgccccgtcttgcccccgagtcccaagcgcaagaacagccaaggaatcggcggcggcggcggcggcgatggtgtgcgccaagtgcgagaagaagctcgggaaggtgatcgtgccggacaagtggaaggagggcgccagcaataccaacgagagcggcggccgcaagatcaacgagaacaagctcctctccaagaagaacaggtggactccctatggaaacaccaaatgtataatatgcaagcagcaggtgcaccaggatgcaaaatactgccacacctgtgcttattcgaaaggagtgtgtgcaatgtgcgggaagcaagtgctggacacgaagctctacaagcaaagcaacgtgtgatcctagatgtactaaactgctaataacttgtatgaaatcttgtacttgcaatctagctgttgaaaaatagtgatgtgtgctataacagaaaaaagtatgtacttgactaacaattctggaacatgaaacgtttccaaaattaaagctccagcaactcgagcttgtgtaaacaaaaaaaaaaaaaaaaaa

SEQ ID NO: 5309 - DNA, 393 bp, Setaria italica
  Peptide Sequence Number=SeqID_71283
cgttaatttaacacgtgttaaaagcaaacattattgggacaaagtcatgcagatatatccatggagaggaaaacaatgaaattattacaagacaccaactactacactcgcaaatgaacaacaagcgaaacagcaaagcatcaacagtaggtacatgcccggctgatcagaaaacaaagctcaagaatagtcctgcactgcctctaccctggccacgcaaaatagccaggccgcgccgtgcgtctcggcggcggtggtggtgatcatcagaacagggcgagcttgaggagcacgccggcggccacggcgagagcgggcgcggccgtgtagcgtgcggacgcggcgttcccgggggccggggtgcttggggtgccggggttgtggggtgccggg

SEQ ID NO: 5310 - DNA, 810 bp, Setaria italica
  misc_feature (776)..(776): n is a, c, g, or t
  Peptide Sequence Number=SeqID_71284
tagtatctgcataacaatgcgataatacatagagatataaagggtgcaaacattcttgttgataacaaagggtgcatcaaacttgctgattttggggcatctaagcaagtggcaaagttggctactgtaacagcagcaaaaacaatgaaaggtacaccacattggatggcacctgaagtcattgttggaagtgggcatagcttctctgcggatatatggagtgtagggtgcacagtcattgaaatggcaactggcaaaccaccatggagccagcagtatcaagaggttgctcttctatttcatgttggaaccacaaagtcacacccacctatacctgaacatctctctccagaggccaaagattttctgctaaaatgcctgcagaaggaaccagagttgcgttctactgcatcagacttattaaaacatccttttgtcactggagaaccagacgaactgcagccactcaaccacactgcacaagaggactcttttaatgagattcctgcacatgatatgccaaatggcttgggtttgaatcattcttccaactggtcgactatgaactccaacaaatcatcaaaaatcaaacccttatgggagggtagctgtgacgatgatgacatgtgtgagtttgctgacaaggatgactatccagcagttggatctagctataatcctatgtcagaaccatttgataactgggaaagcaagtttgacatgagcctggagcaaaattctcatcaatcaatggaatttagtggattagcaaaacntcctgaagcagcataactgagaatgattttactt

SEQ ID NO: 5311 - DNA, 391 bp, Setaria italica
  Peptide Sequence Number=SeqID_71285
cgggtctctctgttactgctcctgaaattttgtatcagaagccaccaaatacttcttcaaatgcccagcggctccacaatgtggtctggccaggtgattccactactacaccaaaggggtgggttttcccgaacaatggccagcctctgcgagttggtgttccaatcaaagcaagctttaaggaattagtgtcaggtggcaggggccctgataatgtgaccggttattgcattgatatattcaatgcagcaattaaactgcttccctatccagttccttgccaattcataacaattggggatggtacaaagaaccctaactatgacgacatcattaagatgattgctgccaattcccttgatgcagctgtaggcgactttgctattgtgag

SEQ ID NO: 5312 - DNA, 710 bp, Setaria italica
  Peptide Sequence Number=SeqID_71286
tactggcgatcactggctagggaagaacagggggccgaccctgcaggtgttgtgcgactggcagtggcagcacttgtggcccgccacgccggagaagacccgcgtcgtgtccctgcagtcgttgcacacgatccatccctttcccatgtaaaagtagcttgcttccatctctgcatccagggccgtcaggaacttgtccatgtcaaagatggacgtcgagcatatgggacaagagaacttgtcgtgcttcaacatctcgtggaagcactgcaagtgcatcgtgtgcccacaccggagcacagacgtctccctcaaagaatcaaacaggtactcgtagcagatggggcagttgttcttcatcgagttctcgatgcagcagtgcttgtcgcgcagggtagtcgagtagcacgatccacacttctggcagtggaagaagttttccttccctccaactctgcagatgccgcagtctttgcaatgatactgctccttgtcaacgtcatcgtcgaagaacttgcacgtcgcgcagaagtactcccccatgcaaactccgcagttgcaacacacctgcgcaaccggctgctcggtgtcgcaaacaaggcagatgacctgtccagctcgtgcccgtctttctgcgcccagtccaatccaatccaatgacgcggaccgagagcaaaaggaagatgcacatggaaataagaacagaaaac

SEQ ID NO: 5313 - DNA, 658 bp, Setaria italica
  misc_feature (555)..(555): n is a, c, g, or t
  Peptide Sequence Number=SeqID_71287
ttttttttttttaaacttaataggcattccaacaaaatacgtgttagatagcaataatcccttggaagatagttttccatccaaaattgatatcatgaaaccttctttgtggtacaaactcgtcatgagttgtactctgtgttggtggttaaaattggcaccagcccaacaatcatggtatatacgctaattatgcgtatcatttagtgagacggaatggcgcagttcatcttggactggaatagaatactagtgcatagaagctataatgacactctgtgtatcttcgccgatgatacgtatagatcgacggatgaatcaacaacaataatctggcgatcactggctagggaagaacaggggggccgaccctgcaggtgttgtgcgactggcagtggcagcacttgtggcccgccacgccggagaagacccgcgtcgtgtccctgcagtcgttgcacacgatccatccctttccatgtaaaagtgcttgcttccatctgcacatagcgaagcactttcagtattcggacaaagaggctattgatatagggggtntttggatcttgagctacagtttagtccatatcacattaaatcttcggaggctaattagaaggactaaacataagttaaattataaaaactaattacacagata

SEQ ID NO: 5314 - DNA, 388 bp, Setaria italica
  Peptide Sequence Number=SeqID_71288
tcttcagtagctagagactgaagcaaggtttgttaggacacaaattgaaaatgatatatacagaatgaagtaaggtttgtcagacgggaaaagggaaatgactctgcttatcttcctgcagttcagtggcaagagagtcgctattctggggcttggcaggataggcttagctgtagcgaaaagagctgaggcatttggttgctcgatcagctatcactcaagatcagagaagccatttccatttccaaactacaaattctatgcgaatgctgttgatctggcagccaactgcgatgtgcttgtcgtggcatgctcgctcaatgcggagacctaccacattgttaatcgtgaggtcatcgacgcactaggaccagaaggtgtggttgta

SEQ ID NO: 5315 - DNA, 1169 bp, Setaria italica
  Peptide Sequence Number=SeqID_71289
gtgtggtttgtcgccgctgccgcgtcaccaactcgtatcgtctcccacccacccaccctcccgtcctcgtgcccgcggcggcgatggagtccctgggcgtgctcctcctccaccccatgaacgcgtacctggagcaggagctggaccgccgctgccgcctgcaccgcttctgggaggccccgccgggcccgccccgcgacgagttcctccgcgcgcacgcgggctccatccgcgccgtcgtcggcaacgcctcctacggcgccgacgccgcgctcatcgacgcgctcccggcgctcgagatcgtcgcctccttctccgtcggcatcgaccgcgtcgacctcgccaagtgccgcgagcgcgggatccgggtcaccaacacccccgacgtcctcaccgacgacgtcgccgacctcgccgtcgggctcgccatcgccgtgctacgcaggatcccgcaggccgaccgattcgtccgcgccggcctgtggaaggccaagggcgactacgcactcaccacgcggttcagcggtaaaagagtgggcatcattgggctgggcaggatcgggctggccgtcgcgaagcgagtggaggccttcgactgcccggtgaactactaccagcgaacgaagcaggactaccccaactacacctactacccatccgtggtggagctggccgccaacagcgacctcctggtggtggcgtgcccgctgaacgctcagacccggcacatcgtgaaccgggaggtgatggatgccctgggccccaagggcgtgctgatcaacatcgggcgtgggcctcacgtggacgagcccgagctggtagcggcgctggtggagggccggctgggcggcgccgggctggacgtgttcgaggacgagccgaacgtgcccgaggcgctgttcacgatggacaacgtggtggtggtgccgcacattgggagcggcacaaacgagacccgcaagggcatggcggacctggtgctcggcaacctggaggcgcacgtcctcaagaagccgctgctgactcccgtgctctgaggtctgactgtgtccgattgtgcctggacacacaatagaagccactatttctctgttcatggacacttggtgtgtgtgtgtgtgtgtgtgtgtgtgtgtgtgtgtgtgtagcgctagtaggagtgttcgttt

SEQ ID NO: 5316 - DNA, 554 bp, Setaria italica
  misc_feature (536)..(536): n is a, c, g, or t
  Peptide Sequence Number=SeqID_71290
cgcgcactgaccttggccttgttggggctcttgtgaagttacaatagtcaatcaaattcttcttaccatcatgcatatcattttccacatatgtcacctcaccatcagaagtgttgttatccaaagcagcctcatccaaaactcgtttatcatcttcagcttcctcatcaggaacttcatcttgaatcttaccatccggtaactgcttaggctccgactccataacaacaccagcagaggcattactaacatcagtgtctctctcttgattgaccacatctgattctgaattcagagcctcactgtcgtcctccatctcaccctcctcagtctcctccgtcacctcaggcgcagcatcagcatccttcctaacatcatcaacagatctcacaatctttgacctggtattctccatgtctaaccctgctacagccttcgccgtcaatggtgcttcctctctcactacctctgtaacactgctcctcacctcatcactccaccgactgcctcgtcgctccctaccgaaatccaggtcnccccatcttcatcctcta

SEQ ID NO: 5317 - DNA, 316 bp, Setaria italica
  misc_feature (297)..(297): n is a, c, g, or t
  Peptide Sequence Number=SeqID_71291
acgcggcgcggcccgcggcggccagaagcgcacgggcatgcctccgccgcgcctcctccagacccgcgcgcatcctctctgcctcgagccttacgagcgcatcgatctccatgccctggtggtgcatccacgccagaaagccccgcgccgcgctcgcgccattagccgccctcccgctggtggacgcgacgccggagcccaccaccctgctctgcgcatcgacgacgccagatggcactgccaccagaccctcgatccccgccgggatcataaccgcgcgctgatcgtccaagaacntcccgcgctggcgcctccg

SEQ ID NO: 5318 - DNA, 1125 bp, Setaria italica
  Peptide Sequence Number=SeqID_71292
tttttttttgaatcagaaaagaaatatgcatgtagcatcccaacaggcaacaatacagtctgacattaatggtatgctactttcattgatatatgtatccctacatttgctggtgacaaagaacataagctggaaacagaataacttggaagttgttacagaaaacacgtgctcacatgctggggtattgggaccattagtataatctgtaagacttgacccagtggacctattccacgcttcctcaaactgcatgaattggactgctgtttctcttgcttagttcaggtctattcattggtggactgacatgaaaagctgactgccttgcatccgtcgatccaataagctgaagggaaagagcagtgggttccatggagacagagctagcctcaccaatgctgagcttagacataccaacaacatcatccgccttaaccgcctccttaccgttcaaaggagttggttttaggacttcatgggttgtgcctgattcctccacgtgagcaacacttggaggccaaagagttagtggaacagggaccaatgttgggtagaatgctggcaccgccggaacagatatggtcttgaatggcgcaccggagttcatctccaagtctggtaatggcaatgaaggttctgcatattcagattcctcatgctggcttagctgaaaagttggcagctgcttagcaacctctactttcttctgttgcccaagatgtaaggctggcaattgatttgaacttgcagcttcatcttgagtattttggagagtaaactgttcaacagcagctggggactcgtccattggcatttctgggaccatgtcaaacaagctcgaccgcctcttccgtcttgatgagtttgactgtctaataaagtacttttgagcatggcttgccacttgagttggagtcctggaaacaacaaagtttcgggatatcccgcgccagtctcccttaccgagcttctgcagacccatcagaaacattctatgctctccttcagtccaaggagtacctttcttgcgctcggcgcggccgttcgtcgagcaggatgcgtgcgcggggtcgtcggacacgtacccggcaccgccgtctccccctcccggccccggcgtct

SEQ ID NO: 5319 - DNA, 743 bp, Setaria italica
  Peptide Sequence Number=SeqID_71293
tttttttttatttatgttgatgagatagatgctttcatttacgacgtattcagtgcaggtaggtaggtacatttgacaagtccatcgtaccctactaccataaaatcttgtgtaacaaatgaaaacggtaatgcagtaacaaagaattgcatgatgattcttagctaggtcccctccatggcatctaatatctaaaacttttcgagattttgcaacacctagtccaggactaccatccatgatccacccatgtgtttgtttccaagcatcaaccagtgcccaagtgttcaggcgaggctgttgcaaaggaggtaccgcatcaatggtgaacttcttttaaggtttatgaagaactttacttttgagttgaactgctctcttgcactccctgcatctgcagcaatttctgctgctcctcatcattctcttcctttggctcaacctttggtgcttttggttttgtggtggattgctggtagagtacaccacctgacatgcatataaggagcccaatggtacccacaaaggaggcatgcttgtcccagataagcagattaatcaccacggtcaggagtttgttcactatgcccaatactgtgaacccagtagcagagatagcccgtctgcaagagaacccaaagaaggatatcgacagcccaaataggcatgagagagcaacagggaggaccacatcaaatgaaagccaatttgacactttggagctgtcaaccttcatctgatca

SEQ ID NO: 5320 - DNA, 833 bp, Setaria italica
  Peptide Sequence Number=SeqID_71294
tagggggtaactagtctattctaaagtctttctaaggtttgtgcaagagaacccaaagaaggatatcgacagcccaaataggcatgagagagcaacagggaggaccacatcaaatgaaagccaatttgacactttggagctgtcaaccttcatctgatcaaactctcccattataaggagctcaagggggaacagcatcaaagcttcaaggttgttgtatagcacaaggccccatgtgttcagcccaatggtcatgacaacgtgcttgatgtacacaaaatcaatggacatgcttactaggtaggccaccgcccaggtgtaagcagtcacagtgaattggttgtctgtgaaaacatagatcacacttccaccaagtatagtggaaagtgaaagccatgtcttcagcgatggccatggctggtgaagatacagcgtctctccgatggcaacaaatattggcacagcagagcggaacacaatgaaagtgtccacgttggcatgcagcaggagttcactgtttgtgaagatggagatatagaacatcacagcagcaggtaaaaacttccacatagtcctcaaattgaggccatcatgctcaatgagctttagctgtccacagaggagaactccagcaacactagtgaagtactgcagagctgtcagggctccaggatacggaaatttcatgactgcccatttgttgatgatggaaagcagagatgctgatagacaatacccagcagcaacaccatagactgaggcttgctgcagaagagtgttcaatgcgttactccaggctccatttttctggatagtacctgaaccctctgatg

SEQ ID NO: 5321 - DNA, 1345 bp, Setaria italica
  Peptide Sequence Number=SeqID_71295
cccgcaccttgcccttgcgtagcagctcctccacgacgccgggcgcgcccgcagccacggcgaggtggagcggtgtgttcccgtccttatcctgcgtgtctaggaggccgtgtaggaaggggttgctagtggctagcgataccaccttggagcgcttctccctggccgcggtgtgcacgaaggtcctgccgttgtcgtcacgaagctcggctgcgtcgaggcagctgtttaccatgtcagccactatggcactgtggtccattctcgccgcgacgtgaagtgccgacagaccggccgagtccttcttgtacagtgttctcggcggcgtggcgcgcagaattgcttgtacgatggtggagtcgccgtcggatgccgcgaagtggaccgggctgctgccattgcagtcgacttggtccaccagagccggcctccaattcaatagcaggctaaccatttctgtcgtacttcttatatgcattaattatattcttttttgagagtattaatactaatctcttatatctatgaatgcaaaatacaatgctagacatgaaacaaacaatgaagaacctaacctgagctctggaagacggctgcgtgcagagcattctgggagctcggcccggcagatgacacgtccctgcaagccataatcgctctgactgcttgctccgacctgctgattaccgccaagtacagcgccgacacgcctgcgttgttcagctcggcggccgactctgccgcctccgagaccagtacctccaccgcagcgccatgtccgtgccttgccgccaggtgcaaggctgtgtcccctgcctcgttcttccatcccagcagggtgctctcgccgcagtccctggccacctgggcgaggatcgtgacggcactgacgtgcccagcccttgccgcgcaatgcagcggcgtgtccagcgctgagttccggcgagagagaacgccctgatccctgaacctgaggtagagctcctggatcaactcatggtgcccacgctccgcagcaacatgtagaacggtgttcctccctgcagtcacctcgtgtatgttgcactgtccatgtttaagaatgcctgtctcggagacttcaaactctttttcttgcaggttcacaatgaacgccccagtggcttgagaatctgtcgcagcagcgtgttgttccggaagctgcgccatgacctccaccttcagccctttgtagacagcgagatggaggaaattgcacatgctggtcaagcgtgcaccatcatgttgcggctgcatcggcggtgtcacatttgccgccggcgcgccacgggaagtacgtgcgagctggatgtgcttgtcttgtctt

SEQ ID NO: 5322 - DNA, 338 bp, Setaria italica
  misc_feature (10)..(10): n is a, c, g, or t
  misc_feature (27)..(27): n is a, c, g, or t
  misc_feature (39)..(39): n is a, c, g, or t
  Peptide Sequence Number=SeqID_71296
caagcaggcngaaaactaagcaggganatttggtgcgcncgggcggtgtgagccagcagcgagcagtcagcaacagcaggcgactcggcgccggcagggagggggtgccagcgatcccgaaccatctgccctccacctggaaccccgcgcgggctgtatcgccggccgcggccggtgcgaggagacgacgactcggcacgcgctgttacccgaccgcgcacccacaccatcctgccggccctcgcgcggggaccgaatgatgattcctagggaaccgcggcggccggagcccccgtcgactcctgattccggatcccccgcgatcgcggcggcggcgt

SEQ ID NO: 5323 - DNA, 843 bp, Setaria italica
  Peptide Sequence Number=SeqID_71297
tgagtctttgcctttcttccggtttttctttggctggctttcctttgaaacagcttctgagtcggcaggagtgttagaactaccatcccctgctgtagaatagccatcatttgatgtcggacgctgaaatttcatcgatcttgtaaggacaccaaaagcttcagatagagcaatcccagacaaaatgcatgcagcgggagcaaggacaagcataagccggaccattactccagagaaatacacagaggttaccaagtacaggaccaaaaatgagcttgcatcagataatggtaagaagcatgatatgatcccagcaggaactaagaaggccagcacattgatatccataaaataagaaggccaggttggtggttggtgttcgctcacactagcgataatagggatatacttgcttgcataggttgggtcaagcagactcaagctgcgaccactccaaccttttgttgggctagatgccaccaatgcaatgagaattgctgcaacagcaaaacaaacagccaaaccaactgttataacaaatgtcatggccactttgaagagccgaggagttaaaagtccttttatgtaataaaccagagcgaccacatggaggattataaagaccagaaatgatgcaaagtgctctgatgtcattactgcattaaaaccaacaacaggtaccaatgctgccagaagtgtgccaagcacaacaaggggagcaaaagcaatataaagtcgtgaagagtaacgaccagtcacaatacacaagagaacatggattgggataagattgatgatgaacgtgtagcctcccaagaacagaccatgtagaagtatgagaga

SEQ ID NO: 5324 - DNA, 470 bp, Setaria italica
  Peptide Sequence Number=SeqID_71298
tcggcggcgacggcgacggcgtcgacgtgcgggccgaggcagcgggcgccggagcgagggtcatgctggtggcggcgcggccgcacggcgaggcggtggtgcgggacgggcccttcgtcatgaacaccagggaggaggtggaacaggcgcgggaggacttccgccaccgccgcaacggcttcgagatggccgatggctggacctccgaccacgccgccaccaccgcggcgcgttgatactctaggcatcaaagcatgggtagttgtggattttgccacacgaaaaatgtccgtgtagcatagaaatagtgcttgtattaagagtatgatcaagggatcaatgttcacggcatggccgcatgggtgccatggattagaactttaagattcctgtgtgcgtcccagttgtcttgaagtgaactgtagaatgatctggcactaacggaaaaggttcgaaagttcagcaaaatt

SEQ ID NO: 5325 - DNA, 291 bp, Setaria italica
  Peptide Sequence Number=SeqID_71299
agggaattgttgtctatgtcttgctgaacttgcacccttttcttgctacttcagcatcagaatcatcgtctgcgacaagatcaaagcgactataatctattggaggtctgttgcgcagtgatttcctgcaggtatcgcttccagaagtactgcaagttgtgtcactctggcgattcactgaactggataggtattccaaaatttccacatcattgtcaacactctgtaatgctacaacaggactagaatgagcatcaacaggtttaatatcgtcttgggttgcccacgatg

SEQ ID NO: 5326 - DNA, 232 bp, Setaria italica
  Peptide Sequence Number=SeqID_71300
tattggctacttggctaccgccatggccaggacactcgccatggaaacggcggtcgaattcccttggatcatgcgcatacaaaagcgtgcggcatggcgcgcgctcagtccgtcgcctctgtctgctcctgcagcctcttctccttctcgatcatcctccgcaactcctcgtcggtggccttgagcatgtccggcagcggcagcgcgacgccggcctcctccgcggcgcggt

SEQ ID NO: 5327 - DNA, 259 bp, Setaria italica
  misc_feature (178)..(178): n is a, c, g, or t
  Peptide Sequence Number=SeqID_71301
tttccactggagcccgtccgcaccaaagcgccgccgccgccattctttctccatcgccggcccaagcgccgccgcttccgcccattgccgccaccgtgattctcgcatgcacgcggtcatctctgcttgaacacgacgtgccattcgaggaaggccaggagcagcagttagaaaaagngttttcgcagtttgtcgaggaagaagacgacgcggagtacttcgacgacttcgagttctagaagagcgttcactagtcaag

SEQ ID NO: 5328 - DNA, 344 bp, Setaria italica
  Peptide Sequence Number=SeqID_71302
tcttcttcagaaattgccatcattaatccaagctgtgcgccaagatattgcgatcaaatcttcacagggagtctggaccttgagcacaaagcaaaagatcatagccaaataaaaccagctgttcaatctcaatcaggacgagcaggactcctcccacgaacatgtcactgcatgagtgctaatagtcaaatgaaacaaagcgtgttagtgctaaaattcaggctgtaaatcagagcagggaattgtgtcagaaaatttgcaagtatcctgacctgcataagaaatactgggcaacaccagaggaagagagaaaagaaggaaaaggaaaacacaaatcttgccca

SEQ ID NO: 5329 - DNA, 385 bp, Setaria italica
  Peptide Sequence Number=SeqID_71303
ctttcacctgaagtctccccacaacaggtgaaagaaagcgaggcagcccctttgatctgttgtggggagacttcagtgttttttgctgtgtctccactgtgcagaagtatgaatataaaaccattccaactactgcaattaggattccaagtatgtttctccagctaaatggatcgtgaagcaaaacataaccaaaggtaagaacaaggcatgttttcagatggcccaggacttggtaagtaacaggagatgtctttccgatcacgagaaaagtgctgaagttcactgagacagatatcaagcatgacaacacaatgaaaaactgcaaatgaaataagagaagttagaatatgacagaacactgttggaatatgtctgctaaaga

SEQ ID NO: 5330 - DNA, 1810 bp, Setaria italica
  misc_feature (1)..(30): n is a, c, g, or t
  Peptide Sequence Number=SeqID_71304
nnnnnnnnnnnnnnnnnnnnnnnnnnnnnnggtaaactaaggaaaatggatgttttcttaaatgactttaaatatacaacacttgcataacagggtccaaggtgaatattaactaacagcacaaactagaacctatgcacaactctggttatctggatctttggtacaaaaagaatggagtctatctttggatataggcatgtccagggaagttacagtaagaagatttggagcatatccagatacaatcatacaatatctgctgtctagtttcaaggtagacctgcggctccgaaggtaaaggtcctccagagaaacagatccattcaccgctagtaataagcgacgctaaagaagcccaaaaatgtaactgaaacattcattacactctgggttggcttccaaccctactatctgcctactaaattgaatcctgtatgatgccatcgtcaagaggatgaaattttcactcccgcgaatactttgagctccacatgggtaccttaagaggctcgtcatcagcaacaccacccccgttttcaactttgctcaaagagtctgagatcaaaggggctgcctcgctttctttcacctgttgtggggagacttcagtgtttttttgctgtgtctccactgtgcagaagtatgaatataaaaccattccaactactgcaattaggattccaagtatgtttctccagctaaatggatcgtgaagcaaaacataaccaaaggtaagaacaaggcatgttttcagatggcccaggacttggtaagtaacaggagatgtctttccgatcacgagaaaagtgctgaagttcactgagacagatatcaagcatgacaacacaatgaaaaacacaacttgagatgtgtaattaaaagcaaagacattttggttagtcaaaaagccatcaaggaaggggccaatgagaaacagggtcagtgattggtaagggcaagactggtagagcagttgggttgatgaaaccttgaacttcttctgaatagtgtttgtcataatttgagcaatgcaagtcgtgataattgccagcagggacagtgtggatcccacagcatttagttgcagatcggtgaccgttgcaacaccaacaccaagaaggagcacagaaagggacatctggatactccggctgaacttcttcctgaagaaaagtgtctctaaaatgacagtgcacggaatgatcgccagcttagtcatctggtagaacccaacagagttgaagccaagactcaagttgaggagcccaatggagattccgttaagcactccaaaacccatgacagttcttgaatcgaaaggcttatgctcgaagaatttcatccataatgctacatgtagggagcagaatgtaaccagcagatgccagctcgtcaaggtagtggcgaagttgaagcctagggagctcatgagcgctttgttgcagatgacaatggagacggaggacaccaccgagaggctcagcgcccccaccgtccccagctggaacttctccccgccgacgccccatctccgccgctctccaaacgcaccaccaccgacaagcaaaccaacgaacgccccccaaagatcaaaactttccaatcaaaccgctggaatcacgccgcccggagcaccgctcctgtgtcggctagggaaatcagaaccacgttcggatctgggcgaggagggcgcgaatctgggcagggcggcagcaatggcggtgagatctgggtaggagcgggcgggatcagggcggtggcgctcgtgcccctctggtctcgcgaatcagctacggggaggagggag

SEQ ID NO: 5331 - DNA, 453 bp, Setaria italica
  misc_feature (396)..(396): n is a, c, g, or t
  misc_feature (411)..(453): n is a, c, g, or t
  Peptide Sequence Number=SeqID_71305
tagtacggaaccaagctaccgcggatgcaagctcgtgagcttcgccgcgttctgcgaggccaccggcaccctgttcttcgtcatggccgactgggtcgtggcgctcgaccgcacgacggggaggctgcaacggctgtggcgcaacgccgacgtgtcgcggccgctgggcgatgtgtacccgtgcgagatgctgcaatggccgccggtgctgaaggatctcggcgagacccatgaccatgaggcgggaggtgtttgctgaaatgtggattgattcgatgttggggttatcttttgcttgttaattggtagatgcaattaaaattctggattgttatgtatgatgcgttaccgattgttgaataaattatggaattgggggacaaaaaaaaaaaaaanaaaaaaaaacaaaannnnnnnnnnnnnnnnnnnnnnnnnnnnnnnnnnnnnnnnnnn

SEQ ID NO: 5332 - DNA, 724 bp, Setaria italica
  misc_feature (720)..(720): n is a, c, g, or t
  Peptide Sequence Number=SeqID_71306
ctcgggatttctcatgggctatcaatctttgtgcatcagctaatgtacaaacattagagtttactgctggaaccagatttgcattctcactgttacacaaatatggagatgaggaagaacaattgtcaacagctccattcagacggtaatcgtgattatttaacctcattcttttatagatttctggaaaatatgatgcctcagggatggtggaatgccaagcatttacagatgccaacccattattttggtgactgaagttcgtacctaacatagtctgagcatcatttgaagcagtttttcctcgtctgctatccatagcatggatatgtgaggagtcctgagaagcatgagacctgggggctgctccagtatacctgtatggaccagtaatccttaagtggtcatcagttgtaacaagttgattcaaattttccatcactgaattctgttcggtattggcaggtgtcttgcggttgcttgccaatatataactaccaggcatttggtctgccgtcactccgttccttgtatataatctttcaaaaccttgagtttgtgtcattggatattctggcctttcataaccagtaagcagctggttggccatttgcttttgtcttaaagaagctggaggagacgaaagcaagttttcagtgaaatcggtagggatgctctgcaatagaatgatcgaactgttgatgtcaggtacatttttangtgg

SEQ ID NO: 5333 - DNA, 255 bp, Setaria italica
  Peptide Sequence Number=SeqID_71307
attgtaaacgctgtgagggatggcatgaacttaataccatatgaatacaccgtctgcaggcagggaaatgaggatatcgataagctcagaggttctgataagagctcacttcatacaagcacactgattgtttctgaatttgtgggttgctccccgtcgcttagtggagctttcagggtaaatccttggagcgttgaagatgtggctgatgcattgtatagtgcaacagacctgacacaatttgagaagattcag

SEQ ID NO: 5334 - DNA, 433 bp, Setaria italica
  Peptide Sequence Number=SeqID_71308
caaagcttgttctgtgtgagaagagagcagcacagacatcaagctcaaagagtcagggctactagccaagatcacaactgaccaaccacttccaagaccccaagtgcctccaaattccaagctcccttgcggcgctgcggcgtgcatgctctgcccgcatatctgagggagcaagcgcgactgccacttcacatctttctccaggcggcgaagatgtcggtggcggtgtgccgtggcccggtcatgacgacgttcgaggcccccagctggttgcgccccgtcgagacgtacaagaagccggaggtcgtcgtcgacgaccggcccgcgcagctggacgtatggaacgccatccaggccgccgacgtggacaaggcggccaagaaggcgtccaagccgtacgtgcacccgctcgtgcgccggtcgtcgagcctga

SEQ ID NO: 5335 - DNA, 344 bp, Setaria italica
  Peptide Sequence Number=SeqID_71309
caggtaaccagctcccatctagcacttcagcgacgaccatggccatggcgtctctgcaggtggcctcaatccctcctctccttccgtccagaaatggctgcgccagcacaagaccgcgggtggccgccttcgccttcagctgcaaatacaaccagtcagccaatgcccaaggacgaacaaggttcagaaaccacataacacgcagagataccctgtcattcatgtcatctgccatgttggctgcattgctggtggctagccctgctgaagctagaacttccaggctggagaacaagagaaagccatggagaagttggagaggctccgggagaaggcgttgggcc

SEQ ID NO: 5336 - DNA, 523 bp, Setaria italica
  Peptide Sequence Number=SeqID_71310
cgaaggaaagacaacctctcttctacggcactgccaccttcacccagaaatggctgcgccagcacaagaccgcgggtggccgccttcgccttcagctgcaaatacaaccagtcagccaatgcccaaggacgaacaaggttcagaaaccacataacacgcagagataccctgtcattcatgtcatctgccatgttggctgcattgctggtggctagccctgctgaagctagaacttccaggctggagaacaagaagaaagccatggagaagttggagaggctccgggagaaggcgttgggcccaaaggggaagaacggatccacccgtaaggagatgccgccaccggcgaacttgctgatccctcccgcggcggtcgaggcttccttgtgaaaggccctcgatcggtccatggggcctttgttaatctcaatgctaatcttaatttctatgttgttagaacttctttttttggaactccatgtatcatgatgccaacttgttcttgatcaaaaaaaaaaaaaaa

SEQ ID NO: 5337 - DNA, 446 bp, Setaria italica
  Peptide Sequence Number=SeqID_71311
gacaattaacaagccatatctcccccctctctccctctctctgtcttcctacatctctgtttctggtcctttccatctctgggaatgtcaagaggtggtagatagagaagttgcaacctccatgacctctccacatatacatcttgcccacagcccttccctccatagagtcagagctagagagagataagatagatagagagagtagcagcagctatggaagagttcacattccccagcgtcccgtttgagcactgcaacgccgcccctcacttcgcctccccgtcgccgtggctcgtcgtccccggcggcgtcgttgacacggccgcgcacgagtacgatcaccggaggagcttctcggccgtggagcagcaaaccgccgccggcagcgaccaccaccaccacctgggaggctacgacggccaccaccacggctcggcaaggtt

SEQ ID NO: 5338 - DNA, 569 bp, Setaria italica
  Peptide Sequence Number=SeqID_71312
tactagaaagagactgaatcagatggtgtgcacatgcatcctaatgttgtcttaggagcttcagttagcctagtggcatacttctgtacagagtgtgataaaaggatctcattgcttgaaataagatttctgattcctacaagctgttggcaaagatactacttttttgcttgggagaagccattgtttttgcaaaacttgttcatgagattggatatctaagtgaaaatggaagtagcaatgatgtgatcggttggagcagcttcaggcagtgtatacaggttattcagggttcacttcatagtaccaacatacagctatgcacagaaggagctaactgaaggttcagaatcacataaagattctttcaaattaaattaagaaataagaaaaggaaaacaaataacaaacaagactaggtagactaataggaaagaacaagaacttgacaagacaaaggaacttgaggagccctctgatttgcaatgctcaagtactgaacaacaggcaaaactatgaatttgcagcagcatcccatgaagatcatgtcgaacttgaaagacatccaa

SEQ ID NO: 5339 - DNA, 4475 bp, Setaria italica
  misc_feature (4453)..(4475): n is a, c, g, or t
  Peptide Sequence Number=SeqID_71313
ccaagcccattttaggagagactgaaatttctacagcacagcggcgagcagcatgcgagggccttggtttattagcacgagttgggaatgatatcttcactgcaaggatggcccgctctcttcttggagaactggtaacagcaacagatctgagctatacagcttcggttgcattttcactgggctgcatccatcgaagtgctggaggaatggcattatctactctggttaccccaactgtgagctcactatctcatttgagtaaaagctctaattccaacctgcagttgtggtcgctacatgctcttctttaaccattgaagctgctggcttgtcttatgtctcccaagttcaggggacacttttccttgctatggagattcttctcttggaagaaaatggatacggggatcttagacagggaattggccatcttattaatgcaattgttgcagttcttggtccggagcttgcccctggtagcacattcttttcacgttgcaagtctgtcattgcagagataagttcctcaaatgaaatggctacactcttagagtcagttagatttgctcagcagcttgttctttttgcttctcaagccgttcccgtgcactcccatgttcaaggtcttattccgacgctttactcaagacagccaagccttaggtatttagcagtgtccacactgcgtcacctgatcgaaagggatccggctgcaatgatcgacgagaacattgaagagaatctgttcagtatgcttgatgaagagacagattctgaaatagcgatgttggttcgttcaactattattcgcttattgtatacatcatgtcctctacgtccatcgcgttggctgacagttctacgaaatatggtacttgctacatcaattacaagaaacacaggtgaagttctgtccagttctggacagaatcccactgatagtacatctgagaatgatgtatactacggagaagatgaagacaacatgatttccagctcaaaacaggagcaagtccaccgggctgcttctatatccagccagtttcctcaaaggaataagcacctcagatatcgcaccagggttttggcggcagaatgcgttagccatgtaccaatcgcagttggagcagaaccagctcattttgacctcttgttggcaaggagcgcaatagctaaagggacttatttgtcaaatgattggctagtgcttaagctacaagagctggtctcactttcatatcagataagtactggacaatttgaaggaatgcaaccaataggtgtcaaacttttgtgtttgattatggacaagtttggcatggcagtggatcctgaatttcctgggcatatcttgttggaacaatttcaggcccaacttgtttctgctgttagaacggccataagtactgcatccggcccacttcttttggaggctggacttgaacttgctactagggttatgacaagcagcgtaattggtggggacagagtggctcttaatcgcttgttttctctgatatcacggccattaagtgacatagagggcctattttatccatcttttgctgactgggttgtgtgcaagataaaagttcgccttctaactgcccatgcagcagtcaagtgttacacctatcaattcttgagaatgaaggaaatgctcctgatgaataccagcagttggcaccttcactagtcaacagctcaactctattaggaaaatactggattggagtcctcaaggattatgtttcaataagctttggcttgcactcaaaaatcaattacaagccattccttgatgggattcagtcactattagtctcatccaaggtgcagaagtatcttgaagaagtttgggcattaattcttcaagcaacagctcttgatgctgcgcctatggaatttgacatgaataagtctgatggtttacttgaacagacatttatatctgggcattgtatggtcaaattggatagaactgaattcgagtttctttgggggttatctatccttgtgctatttcatgcacgccaatcagtggagaatagtactttgaagatcagtcttgactttaggcacgacaaaaactttgggggatttattgttcatggactagatgataaaaaaccatgtgatcaggtcttacctgtgttgctgtccctcacaacagaagtctttttcagcaacaatttcctttcagtggatatttgccaggaactcctccaggctcttacatatgctgattcctcaagtgctcctatcatccgtctgttcactcagattatcaggctctgccctgatagccttttttgaggttgaagcctttgtctccgctgcattagagttattctctcggtatctcagcatgatacttcaatgtagggtgggagttctcagaagcatccaagtaatactttgatttctgagttgtctattgcaagtgagacgatggcttgtcgaatgaaaggagagcacctgtggaagttgatgatattactggtatccacatcacaacaatcatttcaacaagtgtcaactaatttatgcttgtcaaatataatctctttccttcaaaatatcttgcctttgatgaggaaatgttttacagaaagagctgaatcagatggtgtgcacatgcatcctaatgttgtcttaggagcttcagttagcctagtggcatacttctgtacagagtgtgataaaaggatctcattgcttgaaaataagatttctgattcctacaagctgttggcaaagatactacttttttgcttgggagaagccattgtttttgcaaaacttgttcatgagattggatatctaagtgaaaatggaagtagcaatgatgtgatcggttggagcagcttcaggcagtgtatacaggttattcagggttcacttcatagtaccaacatacaggtgcacctgctgggtttgcatgtactgagaagctatgcacagaaggagctaactgaaggttcagaatcacataaagattctttcatgatgttgcttacggaattgctgggagatgtgtttttggtaatgcagactacattgaaggaatgttcaaataaagaatctgtcggtgttattgatgaatgctcgaaacttcttttcctcttccacacactagcacaatcaaagaaataccaacaagatgctacaactcttctgctggaggccttactaatggttttctctctctccagtgatactgtttcacaggaacttgctgaagtaaacatcatttccaggaagttgttctcgcattttattcagattccatctgttgctatacagatcaaggatataatgctttctgcaccacctgaaaggagacaacagcttcaggacatggtccgagcttcagtcagtcaaggccagataacggtgccaatgaatatgagtgcacgctcagagcagaatgtccaggatactaacaacaataaccctgggtccacagctgactccacacctgagggttctgagtgttgtgtaactcaagggaaggatgaaaaggaagttgatgatgatgactgggatgatgattgggatgctttccagtctcttcctgcaactgctgccaatgatgctgttgattctggcgagaattcttctgcaagtagtcatcataaacagacccctcctgaaaatactagtcaaggtattattgatgaggacatcacagctggtgctatggaagacagaacttgcagcaaggaacttgaggagccctctgatttgcaatgctcaagtactgaacaacaggcaaactatgaatttgcagcagcatcccatgaagatcatgtcgaacttgaaagacatccaacggttgattgcgaagagccattggctcatattgagatggcagatgaactgctgcacgttcatgaagacgctgatgaagcaagtgaagatctcaatggtatctctacggaggatgagtcgaacaacagcagcgacatttcattgagggttgacggcaagcttgtgaaggatgagagcagagaagagcatcctgtcgacctctcatgatgctggcataccagatagcatgcctgaaaacgtgacgagcgggagtgaaggaaatgagcatcctgtggatgtggtcactaatccagaaccatctcaggatggaaggtcagatttgatgtcataactaggataaacttgtgaccaaccttgtgaaaaactgcaggagagatgtactcaggaaataatataaagatttggatccttgtatatgtgccttgattgtacttctgaagtatgagtgtgcacttctgtagtctggaatatttgtttgcaccgatatgtagccatgtatgacctcatgtttgacctcatgtttgtgttgggttgcatgttgtaaattttgggacagaacattccttcgacatgtacatacttataaaatgtctgatgttttgcgttagagaaaacnnnnnnnnnnnnnnnnnnnnnnn

SEQ ID NO: 5340 - DNA, 263 bp, Setaria italica
  Peptide Sequence Number=SeqID_71314
gcggataaccaaggtagtgtaatcattggttggaggagacctactagatcggacaccttcgccaagcctgaagaaagtaggtagcgccaaggttatcacaccagattgtaggaggggaagacgaagtacaacctagttcagagagtaacgattgaattcaggttaatttagcagcagctagagcaatactccgatattgatttgattctccgctacccaccaaggtggatgattgcttgatccgcaaaagaagtatgctttta

SEQ ID NO: 5341 - DNA, 302 bp, Setaria italica
  Peptide Sequence Number=SeqID_71315
tcgtacagggggcggacggcggtgaggtggagcgacgtgaggccggacagggcagggcaggcggcgaccagcgcggcgggggagaccgccgaatcgggtagcagccgcagcgtggagaaccgggcggcggccggcgcggccgcgacagcgagcagcacggcgtcggcgtcgccggccggagtagcagcggagacgacggtcagggcggagaggaacgggtagtgggacagcagggcggcgagggtcgccgtccccgcgctggcgcggcatccgggggagccggcaggcggagggtcagggac

SEQ ID NO: 5342 - DNA, 1296 bp, Setaria italica
  misc_feature (1)..(18): n is a, c, g, or t
  Peptide Sequence Number=SeqID_71316
nnnnnnnnnnnnnnnnnntataacaaagtaattattcaatatgcatatccatcactggatgtgcaagtgatatcaaaattgcattatttacagttctaacaatagttctaggaagcagatgttacagggttcataatatcttcctagcctttaggtatgagtacatgaggaaaaatccagctactgctccaactactattccaccagtcgtcgcccaaaatgcccacgcgttcgtctcgaggtatgatttaagattcatgccaaatatccctgcaattaatgctcctacagcaacgcaaaaagttcccacttgaagaagcagctccactctacttacttcaagtcgccgggagcttaagttcacggaaattgagtcttccatttctcttgcagaatccagtagtctctctgcttgaccatggcatgattcacatcgctgaagataattttccaatagcatttcaatttcttcctcttcctcttcagcaatctgcttatctaaaggaacagagcactccatgtcatcactcaatttatcaagtgtgcaatttctccccattatgcatattcggcggatttcatgaggatcctctaggagatcaatgagcatttgtttcaggtcacctgctcgtgaacccagctcaaccaattcttgtttacttagacgaagctgctccaaaacatcagcagtcaagcgatttggtagaacttcgagcaatgcagccacactaggctcaattttcattagtctctgctccaatcttagtattctagaaagaagtgcagcttcaacaacctcaagctgaaaaggcattgcaggcccaccattgatgtttcttgggtttaacctaggcagtaataactctagaaacgcctttcctccttgactgttatagttgaatataagaacacgctcatacatagcaattgctcgcaaggaaccaagattgattaaaatcgcttgttcacgtaccagcagggaaggcattgaattcattaaccatagtgatgggtcaacgcttcgagtatctcgtaaacggaggccactagatttcaatagctgccgccggcttattttcttggtggacatcctcccactagatctcacttctatcacctcatacacgggctccttgatgccaagagatatgtagtccgcggcgaaccgccccgaacccctggccgcatcctcgcttgctccaccactttccccctccttcctgacctccaaatcctcttcctcctccatcacctcctccgtggtcacggcccgcccatccttcccctccgcggccc

SEQ ID NO: 5343 - DNA, 899 bp, Setaria italica
  Peptide Sequence Number=SeqID_71317
aaaaagactagcatgcagtagcaatcgggtgcacttaaatctcaagccactgaagccacgtgtgcgtttgtcggatcaaccatctgatgactcagcatgcaccttcacttcttcagttagtagaggcggtcatgccagtccttggatccctatcctagagagcccaaaccacagcacgttgcaggtaaacccatctggaatagcttcacaatccacatgccggctgagacattctaacatagtcccaggctcccagcaatgtgttcttgcaattcaattaatggagcacttccaactaggagttaagcatttcccaaggctgaggtgcatgaagtgacaatggacgatattatccttctctgcagatttttgtactccaatgctagcttcagatcccaactggcgctctccccgtcagactcatctggctcgggcaactcttcaagcatcggattaaatatggacagcagtgtttccagcaccaccctgtcattttctttgatatcagcctccgtagtagtggattcatcaatatcacaacctagagcaacacggagatgggacagcaggggccgaggcaggccatacgtgggaaatcctctacatctggatagccatgtcccacgaaccatatgagtggtttggcttgtactcacagactgagctgccccatcctcatcatcagcagatgtatcaagatctaaaggtataacatcataagggttatctcctcttggtaggaaaccatagaatgtaacaagatgtgaccctgggtgtttcccgtaactgagaaaacattgctcccctgcatcacaaggtctagacaaggggaacttcaaagattttgtagcttcatctacccgaccatagtgcagaatatgaggggataccgagtgatt

SEQ ID NO: 5344 - DNA, 470 bp, Setaria italica
  misc_feature (434)..(470): n is a, c, g, or t
  Peptide Sequence Number=SeqID_71318
agagtgcgtgaagcagtggctgatggtgaagaacttgtgtcctatctgcaagacaacagcattgtctgcccaccgaagacatggacaatgagcaggaatgaataaagcctgttagttatttgcttcgacctccgttcagctcaattttgtatataagaagtggtagacaatggtgctacctgtatttgctgttcactttgttgtgatcgggagtactcagattcctgaaactgtacagccataacatttattatttttcctccaaatgtagaatattttaaattgctcagttcgccccccttgtgtatgataaggcgaaccggggaaacaaagcttccgtaatggcatcgctaggcagccttgtatctattgttaactttgatgaaactaatagaacatggatccccctgtactaatttttaaaaaaaaaaaannnnnnnnnnnnnnnnnnnnnnnnnnnnnnnnnnnnn

SEQ ID NO: 5345 - DNA, 621 bp, Setaria italica
  Peptide Sequence Number=SeqID_71319
ttggcttcgtttgttagaattataaaagcacaagtcagtttactaggaaaatggtattctgagttctttactggagtgatatggtttgaaatgttttgctttcagcaggcagatttgcccattcaggagccacagaaatggcaaatggaggcttccatgaatatcagaatggcccttcagctgtttgtaggggacctgtaccttatttcccccagcatgcgatgcatggcatgcgagctcataatctgcttgatcacactcaaatgcaagtcccttatcaacagctgaagggccattctgatattcatggaagcctccatttgccatttctgtggctcctgaatgggcaaatctgccttgaacattagtagttgcattgatgtattcccactggggaactccatcagcaataccatttgcagcctgggacatccatgaatggccaatgtgagttgttggaaatgtatagcttgcacgctgtgctggttctggatgaacagccattgagttgaatccattagttccagttatggaagatccttccaaggacggccaattgctgcggctgtgatattctgatgggttgaatggtgcaacattagaggaaacatttgattcaaa

SEQ ID NO: 5346 - DNA, 2111 bp, Setaria italica
  Peptide Sequence Number=SeqID_71320
cgatccccttccccccctcccacccgccgatcgccctccgctcgccccaccgcggcgggcgatcgctcctctccctccacccctcaccagcgcgcgattcccgaggcgaggcgccaacccaccacagattccgccggcggccggtcggctggctcgctcccttctcccacctcgccgatcggatcgcgtgctccccgaggtagaggtgatgataaagcatagttgttgacttagtctgccttagctatttcctgaggctaagggaaataataattagcgttatggcatttcgaaatatggtatgcactccccaagtcattgatcttacatctgaaagagggcaaactcgtggaggcaatgatagtgagatatctgagcaaggtgcacaacatgctgtcagagttgtaggaaatgcgacgaacattggtctctctgatatgcgaagttattatgatgcgaacataaatcatcagcatcagcctgttcataacccacccccgagtttaggtgttgattctggttttgtcttcacatcaactatgtacaatcccagcttggcatcaacatcaatgaacagatatgcttctcatgctcagagctttgtatcggggaatcaaccattgcctttgaacccagtcccaggaagtatggatgagaatagcagaaatgacagtactggtgaaagtgctagaggacatattaaaaggaaaaatgctgcagtcgcgggaagctaccattttgttaatggatttgcaagctcaagctcatcttctcatgcacctcagaatcctatgcttaggccttgggatccttcttttgaatcaaatgtttcctctaatgttgcaccattcaacccatcagaatatcacagccgcagcaattggccgtccttggaaggatcttccataactggaactaatggattcaactcaatggctgttcatccagaaccagcacagcgtgcaagctatacatttccaacaactcacattggccattcatggatgtcccaggctgcaaatggtattgctgatggagttccccagtgggaatacatcaatgcaactactaatgttcaagcaggcagatttgcccattcaggagccacagaaatggcaaatggaggcttccatgaatatcagaatggcccttcagctgtttgtaggggacctgtaccttatttcccccagcatgcgatgcatggcatgcgagctcataatctgcttgatcacactcaaatgcaagtcccttatcaacaatgccacaataatggtgtattgcatggtggtgttaattattctggaaatcatctccacataggtccacgaattccagttctgttctccagttctgagcgtacttttgggcttccacatcatccatttctggcaaatccagttaaccaccagaacataaggattctaccacctgagcatgccactatgatggatttttcaagattgtatgaagtgccaaattctgtagatgagcatagagatatgcggctagacatagacagcatgacttatgaggagcttttagcactagaagagcagatcggagatgtcaatactggtttgacaaaaaaccacattgtagataaattgaggactagcttatatgttccaggaacatccagcacgtctgaccagccatctaaatcttctctagagaatgatgcttgcattatatgccaggaggagtaccaggttaaagattgtattggcacccttgactgtggtcacagttaccacgcagagtgcgtgaagcagtggctgatggtgaagaacttgtgtcctatctgcaagacaacagcattgtctgcccaccgaagacatggacaatgagcaggaatgaataaagcctgttagttatttgcttcgacaaacgttcagctcaattttgtatataagaagtggtagacaatggtgctacctgtatttgctgttcactttgttgtgatcgggagtactcagattcctgaaactgtacagccataacatttattatttttcctccaaatgtagaatattttaaattgctcagttcgccccccttgactagtgcgactgagtcggaaaacaaagcttccgtaatggcatcgctaggca

SEQ ID NO: 5347 - DNA, 650 bp, Setaria italica
  Peptide Sequence Number=SeqID_71321
tgcctcagtaagcttcatggtcctgaaacattcaagcagaacacatcagccacatcttcagccaagaaaaaaacctgaaatcctaaaagactgcgaactgcaactgtgtaaaaaactgaatctcatgataatctcaagttaccttcttgggggtgacgaaggcgaggaacttgctcttgggcttctccttgtcctttggagaagaggatggcgacgacttgtcatccttcttgctcttgccgctggagccgccgccggcggtgaggccgtgcttccggagctgctccctgacgaacttgtcgtagatgaaggccgcgcccctgaagttggggagcaccagccacgcgatgaacagcagcttcagctcgtaccaaatcgggatccagtagatgagggactcgaggaccatctccatgagcgtgatgaaggagtagaggatccagtaggcgagccactgctcgtcgtccagcttcgacgggctctccatcgcctgcaccgacgcatacagggggtacaggagcatcaccgttggccctgcaagggagtggaggtgagtgaggatcgtccagagcttgcccatcttctaacaagacttcttactacaagacttaggtagaacctaggttagtagactagtacgacttagacaa

SEQ ID NO: 5348 - DNA, 740 bp, Setaria italica
  Peptide Sequence Number=SeqID_71322
ttttttttgtacacggaaagtttgctctcgtctccattcaatatctctgctgatgttcgcacatacaggatcgccatatacatcaaacagctctatttgaagtgaagggcatgagcaaaaacataaacggaacactagaacactacaggctctgcctcgacaaagctgcagggatgatgtcactccaccctgcctcagtaagcttcatggtccttcttgggggtgacgaaggcgaggaacttgctcttgggcttctccttgtcctttggagaagaggatggcgacgacttgtcatccttcttgctcttgccgctggagccgccgccggcggtgaggccgtgcttccggagctgctccctgacgaacttgtcgtagatgaaggccgcgcccctgaagttggggagcaccagccacgcgatgaacagcagcttcagctcgtaccaaatcgggatccagtagatgagggactcgaggaccatctccatgagcgtgatgaaggagtagaggatccagtaggcgagccactgctcgtcgtccagcttcgacgggctctccatcgcctgcaccgacgcatacagggggtacaggagcatcaccgttggccctgcaagggagtggaggtgagtgaggatcgtccagagcttgcccatcttctacaagcttcttctcagcttggtgacctggttgtgctgtcgcttgcaacaaacactgggacctagatgaatgagcgagtgagccaa

SEQ ID NO: 5349 - DNA, 344 bp, Setaria italica
  Peptide Sequence Number=SeqID_71323
cctgcagtgcggcaccaaggaggtaccctcctgttggtctagtatctctgccaagcagcacttgcgctctgtggtggccccccaatggaattccctcgtccttgacaaactgaaggaccagctgcaggaggacttcggggtcgggggcgttggcgagggcgtcggcgaagggctcccagtgctgggccatcatgccaccgtccgggtcggcgatcttgacgccgttgtcgccgacggggttgtgggaggcggtgatgacgatcccgacggcggcgccggcgagcttgagggagcggagcgcggcgaggatgccggcgcggcagacggcgggcgccatgggtggc

SEQ ID NO: 5350 - DNA, 860 bp, Setaria italica
  Peptide Sequence Number=SeqID_71324
ctttgtgagtggcaccatgaactctgacggttataccgatgatggcaagctgaggactttcagggggccagactccaatgttctgaagattcagttgttccctcagatatacaacaaacttggcaacctgaggctgttgcagccactagttcaggacttcacccaagggtctgcgttttcagatgtcgggagcttgaatgcgtccctgcagaaccccagtgatggagtggtgaatactactctttacataagttatctctcagactacattgtggagatcagcaatgagagtgtagtaggtccagttagtgttattgcgagtattggtggcctttatgccttcagtgtggcaatttgtctctgcctcatgtcccaatgcgaagctaggataaagaagcttcgtgatgaggataccagaatgctgaaaattctgagcaaacgacgtgctcgacggaattgggataaggtccggaagtttgtcatgtatacctggggtccaggctacccggatccaactgatagaagtggccagcagcctgaaggttcaacggtagattctctgcatagaaccttgcacaagagaagagaaccaattagacaagcaacctcagatgctaacagacctaatagagttcctgctgacatgggggcgattgacatcgaaagagctggggaagcgaagcagccaagcagttctagatagccttgatggatggatgctttggctgcaaagttcagataggccctttgacacgctcattcctagcacttccagcattgatggatctttcaaaaattcccccctttgcataggccttcattttaatacgggaagaaagcttcctttatcatctataaaa

SEQ ID NO: 5351 - DNA, 451 bp, Setaria italica
  Peptide Sequence Number=SeqID_71325
atctattaatagaacagttactaattgggagtataaccattagaaacggttgacttatttcaagacatcaaataatttgagcacttattcaaaccaaagaaaggctggtccaggaagcatctccaattacataacctctgaagccattgttgtaacagggtcaaggagaatccactttcagaagaattccttggaccatctatattctctttctatgcatgagcatgacaatgatagcaacaatgttaggtgacacaccaaagaatcacctacctagaattgacagatgaaacactaaaacatctttgcactagtcaacattaaaagtcatgtacaactgcatctgcatcgatacatcaagtcacaacagcatagaagatctgaccaaattcaccagcatcatctcccttgcttataaaaacatgtcctttattcttcagtcaccaaattt

SEQ ID NO: 5352 - DNA, 487 bp, Setaria italica
  Peptide Sequence Number=SeqID_71326
gtatccggcagcaatggcgtcagctcccatgctgtatccggccagcggctgctgctgctccgaatgtaagcgtaggatcagctcgcagctctagactgatggatttgatagaagctgcgttggccattagtttcaggttcaccaaaatcgatttcaccaatctctaagggaagttgaacaccatcagtggagataccttttccgttactctccatactaagctgttcaatatgtggtgccaatttctcaagtgccggggaatatggtaatattgctctagctgggtaaccaagaaatgaaacattccacaccctcagcaaaccgagtacaggtatatttttctcaaatgaagatgtgtagaagtggttgtcaatgctggaagcaccctccaaaaatcttgtctggtttgcatcgatgctccttcattaaatcaagaacatcccacatctctgccaagcatcccactctcccatatgcatccaccaaa

SEQ ID NO: 5353 - DNA, 1411 bp, Setaria italica
  Peptide Sequence Number=SeqID_71327
caattctaggtaggtgattctttggtgtgtcacctaacattgttgctatcattgtcatgctcatgcatagaaagagaatatagatggtccaaggaattcttctgaaagtggattctccttgaccctgttacaacaatggcttcagaggttatgtaattggagatgaaacactaaaacatctttgcactagtcaacattaaaagtcatgtacaactgcatctgcatcgatacatcaagtcacaacagcatagaagatctgaccaaattcaccagcatcatctcccttgcttataaaaacatgtcctttattcttcagtcaccaaaatttgcttctatcttctccataaactgttcattcatgggttaccctacccattacaattactcatgggagtagtagctatgctaagatgtccccagatagctctgctactgaaattgcaaaaataaattttcatgtgcttctcataaacaatcaccatcatggggcatataataagaatgtttgattcagtagcattcaaatcagcaactcataatatcagagattcagaggaatgtccgattcagtagcattcagcaactcatgatatcgagggcaggtgagattgatgcacctatcatctatgtaaaccaagggtctgtatgactgattccactttcttggaaattgcagacaaaaaccactacttcaatgagcggcttttgtgttcagacctatgtatcatctgtaattcgcccatctttaagatcacgtagatactgaacacgatgatcattaatccctttgacaagaaaccatttgatcatcgtagtgcaagttaccttgtctggtttgcatcgatgctccttcattaaatcaagaacatcccacatctctgccaagcatcccactctcccatatgcatccaccaaacagttgaagaacacaatatccaatgttatatctgaattctcaacaattctcaatactgtctttattttcttaacttcctcagcccttccatatgctctaaccaatgaacagagtgtaacacagttgggttttattcgctcagatttcattagtcgaaatatatattccatctgttcaaggtctcctgcccttccaaatgcatcaataactacattgtatgtgactattgtccatgagtagtaatacttctgcatgtactccattacagctcccatcttctcatacattttagctttaccataggagtcaagtaaaatattgtaggtcttaatgtttggggagataccagaggcctggaacttctcatagcagttttccatagtctcaatctggccactgctgccaaaagctctgagagtagaattcattgtccatacgtcaggcttgcaattttgtgacaacatcttcagaagagtcgattccatctcagcaaac

SEQ ID NO: 5354 - DNA, 2467 bp, Setaria italica
  misc_feature (1)..(85): n is a, c, g, or t
  Peptide Sequence Number=SeqID_71328
nnnnnnnnnnnnnnnnnnnnnnnnnnnnnnnnnnnnnnnnnnnnnnnnnnnnnnnnnnnnnnnnnnnnnnnnnnnnnnnnnnnnnttttttttttggtcaagcaaaagacacaggtatggtattataactgcaactgagtttacacacgttaattccacgggtatatggtacagcgcccaaaaaatcgaaaaaggcattcttcggtttcctcatgctgccccaggtaaatttatttattccataacatcagccgttgtgttttcttctccaaggagtaggtgtacacaaaaactgtaaaactacagcactgccaaactggctgtgagcctgtgacaactcccgaaaggaacaaagacttgtgctgaaccttgccaagtaagaacttagcaagtagcatcagaagcatataatttacaccttcggcagcacggtagtgtcgtatggggtggatggcttgacagccagatatcgtgctagcaaacttgaggtactgtggttaaagccctcgacaggcttcccttccatccgggatccatgcaactgtttcctcacttgagaagctagtgacttccctagctccactccccactgatcaaacgagttaattccccatatgaaaccctgaactgcaatccggtgctcgtagatggataaaagctgtccaatctcatatgcggatagtgtaggcagcagcaaacttagcgatggccgattgcccttaaaagtcttatgagggataagatgttccggaactttttcactttgcaattgttcaggagtctttccataagcaagtgcatcaggctgggcaaagaaattggacatcaattcatcatgattactcacagtttcccctttcaagtaaacaggctgctgactttttacaacaccaataaaatcgcaagggatgacccttccctgatggattaattgatagaagctgtgttggccattagttccaggttcaccaaaatcgatttcaccagtctctaagggaagttgaacaccatcaatggagacaccttttccgttactctccatactaagctgttgaatatgtggtgccaatttctcaagtgcctgggaatatggtaatattgctctagctgggtaaccaagaaatgaaacattccacacactcagcaaaccaaggagtacaggtatatttttctcaaatgaagatgtgtagaagtggttgtcaatgctggaagcaccctccaaaaatctctggacaattggaaagccatactgaagagataacggaagaacaccaacagcactgcaaacactatagcgtccaccaacccagtcccagaaggcaaaagcattgtttgggtcaattccgaactccttcacaagcttaagattagtactgacagcaatcatatgttttgaaacagcctgtggcccaagggaagagatgatccactccttaagggttcgagcatttaacattgtttcagctgttgtgaaggtcttcgatacaaccacaacaagagtagtttcaggatctaaatctttaatgcttcgtgcaacgtcaactggatcaacatttgctaggaatctcagctgccggcctttcgcacattctgctgcttctggatcagtctggagtgcagtatgcacaaatagaggcccgagaaagctaccacctattccaaccgacacaacatttgtcaatgcttttccagttgctccaacccacgatccacttctgaaagtctctgaaaactgcttgattttatctttaacgctccaaacctcagggaccacattcaccccatcgctgtttatgactgcatctctaggagccctaagagctacatgaagcacggacctgttctctgtgctatttatcttttcgcctttaaacatcttctcaatcttctccttgagcttcgcagcctctgctaatttaagcagcttctcaatggtttcgctggtcgcctgctgcctcgagtaatccagaaaaatcccttcgtactcagccgtcattgccttgcagcggtcggcgtcggccatcaggtcccgcaggtgcgtcttctggatcgcgccgacgtgcgcctgaagggccttccactgctccgtgtcgcagattagcgccggcgacgccatggcttccgctccaagtcgggaaaggaaggggcgatcgctgatcgaggaagcggatctgctcttggcctcctgcgagttcctccggattttgtatagcgcctagccgcctggctgcttcgtttgcctttacccgtgggcggccgacgggaacgacggtggacggacacagacgatggtggtgctacacgtacgtttccccgccctttgaattggatattcggttgatatggttggagtggacgcccacggcctgccaaactgcggaccgaattacgttaatttttacttaacctttaaagttttaactttttaactttttaaaagggttttaaaagttttttaagttttaaa

SEQ ID NO: 5355 - DNA, 510 bp, Setaria italica
  Peptide Sequence Number=SeqID_71329
gagccagcatctaggcagctttctaatccatctgaaccaatagtttcgataccgcgttctcgaacctctcagaaaatctacctgactgtcttcccccagcgtgaactaacatcgctccagtcctcactggttgtggaagtcttgaatttcctgctcatgcttcctctggagacaagatctgacagggaacttttcttgatgaatttggtcgagaagttgctgaagcatctgacctcacaccttggtgagcactgtggaaacatgccatccttggcagaatagttggatgtggagtatgagtcagcgttcttcagttctagaaccgaatttgacagattattcagtgagccatgtgatatgtttgactgcaaaccgtttggtttcatctcgctgtcatcgacatggtacatcggagattctggagcatatatcatcgcattttcaggagatgtgcaccatgtcagattcttgttgtggcttgatctttcatggagtttagctgccaagaat

SEQ ID NO: 5356 - DNA, 338 bp, Setaria italica
  Peptide Sequence Number=SeqID_71330
gcactctcacaactgtcatgccggttgagatttttgtgtctattcggaattccaaatgcttaattaatctgtttgcaaactgtaacatgaaatacatcagaatccagaaatgtcacaaggttgaagaaacaacctatgatttatcgatctatatcatataagtatctaaaagatagtatactgttagcattgcctccccaaaagagcactttcttgtgtagggacagagcatggtggcgagatatgaattgctcgttccgacaaaaaacaaaagaagaatcatcactttgatatttctatgataattcagtttgattcatgtggctaagattcctgtg

SEQ ID NO: 5357 - DNA, 1186 bp, Setaria italica
  Peptide Sequence Number=SeqID_71331
tttttttttttaaagttaaacgaaacgacgtagtgaaattttactttgattgagcattgctgctcctgagaagaaaaaaataatattttaaattgcggaaaaataaaacgagacaatgttacacgtggattacaagaatattaacatcacaacgaacaagtacacaggattacacctgacggtcgtatgggggcgaattagcttccgctatttcgaacggctccacgaatgcgtgaatccccacagctcaacattctttaattcaaactctggagtatatgccaagcatgagcttccaaatgtatcgcatgacccactgcttccatgtaacagatcttcatcaacacacaatgcgaagcttccacctcctccaaatgccaaagcatctttcaagcacaaatagtagaatctgtttgcaccagttggtctgaaaagtctaggttcaccatgtactgttgtgaacacaaatgtctggtttgttccctgatatttccttttctccgtaggccgcagaggactgttcaataaaccaccaaacacagccccttgcatatctccgacaatcaataggcatggaccctgaacattctcacttctacgaagaagtgttcttagagatatcccatgcttccaggtgctatatagcaatacccagtggcacccctttaaggtcccagggagagaagattcaaaaaatgcatacagttttggagatacaaacatagacttttcagttagataatgaagagtgcctgcacagtctgaagtcgatgtttcctcatttccatttgagttttcttcagatctgtatgactgatggacctggtttttactaacataactattcctttcatctctcgcactttcggacccagactcctcgctcaattccagcggcagctcttgccatgtgaaatcactccctctccatctcttaggaagtgattcaggaggtaatggtctcaaagtctctgaacaaggtgaattctgctcatgccccgagtttgcggttggtaggagcgacaatacacaagaagacaacaatgatttcttgggggaagtaaaatgttctgctgggaaagatattgcctgcggcggcccgacggcggcgggggccggggaaggggaaactggggagtccgcgaggaggcgggcgaggcggtccgccaccctctccttccacgcg

SEQ ID NO: 5358 - DNA, 528 bp, Setaria italica
  Peptide Sequence Number=SeqID_71332
ccccgcccgacacgccgcggtggccctcgtcgccgatgatggtgccggccgcgttgcgcaggccgagctggtcgatgagcgcctgcacgcgcttcttcttctccttggtggggagggagcgcgggaggcggaactcggcggcgaacatgagggtctcctccacggtgagcatcgggtacaggaggtcgtcctgcatgacgtacgcggagatgaccttgagtaggttgctgtcgagcgactcgccgttgagcgtgacggagccgtggaggctctccttgacgatgcggttggcgagcgcgtcgatgagcgtgctcttgccggagccgctggcgccaagcactgccatgatctcgccctcccgcgcctcgccggagatgttgtccagcagcgtcttcatcctgggcgcctcgggctcggccggctccccgccaccgcggcggaacggcagcgccggcaggcacgagcccttcttccgctgcttgacgctgtatgtcaggtccgtgaacttgagcacgaacggcagcagcg

SEQ ID NO: 5359 - DNA, 337 bp, Setaria italica
  Peptide Sequence Number=SeqID_71333
caacacaccggtgtaccttggccggccgtggaagcagtactcgcgggtggtcgtgatggagaccaccatggatggctcggtcgcgccggacgggtggctggcgtggccggatcaaccgacgccgagcacgacgctgtactacggggagtaccgtaacagtggggccggtgcggggacgaagggaagggtgacgtggactggggtgcacacgtcgatgtccacggcggatgccacggggttcacggtggcgaagtttatcatgggggactcatggttgggcgccactggagttaggtacacttctggactgtaagaaagatcctgatgccctttacta

SEQ ID NO: 5360 - DNA, 896 bp, Setaria italica
  Peptide Sequence Number=SeqID_71334
cctgaatgaaatgaaatgattcctttttttttccgtcaatgcatcttgtgcatgtacttaacaacaaatgtctgtccaagaacaagcaaatgggtgcaggaatgaagaagatgcaagcagatagatggataccatcttacgaagcatctgaaactgaatggaagaagcatctgactcacatcaacgacatgcgtgtactagctgctactacttaaacagatttttgctcctttttttcccactcttgatgatggatggagtacttgtacttggcttatatatagcatacatatatagaaagagcttctccccgttcaggcgaggaatccgagcttctccccgttcttcttggcgaggcggatgaggccctgccgctgcttggcgtcggcgccgatggtcttgcagaactcggtgatgacctgcgagtgcagcgcgattgccttccccctgagctggttgaagcgcttgcggccgatgatgttgcgcgccaccaccaccagcggcgcgaacagccccttcccggcgttcacgttgcccatcatccgagtcggcgaccgaagcggccgcgcgctagacctagaccggggccgcgccgacatggccagcatggggtaggagtggtggtcgtcgccggagccggacacggagctggaccacgtggggagggcctgcaccctggagaaggacacagcggcagccatgcctcctcctcctccttcgatggctacctcgttcgctggcgcaacaatgtcttcgtcggagaagagaagaagagaggcaggcaggaaggcaatggtgttgatggtctggtgggtggtggtccgactcccagcaaggatggaagagatggagtgctttgtgctggtgagcatgccacaccacacccgccatctctc

SEQ ID NO: 5361 - DNA, 418 bp, Setaria italica
  Peptide Sequence Number=SeqID_71335
tcgtttttcttacggttgtttttggtttacttaggtttttctattgttaaactagttttactaaacgtaaaaaaaagtaaattagtcgtcgaacgaggctctgctatccactcgacaatgctaaagtttagggggcgaccaggagcacgagcataatgactgttgcattgtatgatgggcagagagagaagaaaccaacagtgtgctccgtatcctgctgcagttttacaccaccccggaccgggagtcgcagcacaagctgcccaccaaaaacactcttcacatagtagtagcagaaatccgcgaggatgaatgtctgaacgatttcggagagaagcaccattgacagcgctgggctatggtctgtggccatcaatggtgcttctctccgaaatcgttcagacattcatcctcgcgg

SEQ ID NO: 5362 - DNA, 1219 bp, Setaria italica
  Peptide Sequence Number=SeqID_71336
tttttttttttttatttttttggttttcgtttaacttagttgtataaattccaaataatgttagatacatttatcgtaactagcacatctatctcatcagcttttacaacggttaacaactacacgggagtatctgtattgaactatgaagatgtattgttgatgttatcacccgtcagatcaggggaatccttctcaagatcagagatcagctgctcgatgtttcttctgtatataggcatgtaatgatcattgatcatcattttcgaaagcctcagcttgccatacagagatcttggtgtcaggaagatccccatgctgctctgcaactccccattcgtcgcatcatcctgatgaacatcaggctcctcttcatgagctgtttcttctctgctggaagttaatatatgcatgatttttccaggagggtaaaacctatgcacttccttcgtctcactgagcacatcttccgctacgccacccacctcctcagcaattgtactttcagtcatctcttccgctatgtcatcatcatctccctccctcttactgtacaactcgctttcaagttgctgccacagctccacatcagtcatcctgtcctcatccacatggtgatcgacgatgtcctcatcgctgtctaccttgtcatctaccaagccaagtgcatcgactgccacagcaacagaattatgaacctcttgtgatgcagtgcactggatagcttctgatgcaactgtctctgaggtttctacagtggtttcagtcaacagcgaagtggattctgatccaccacttgtagatgttcttatttcctctgatgtgacagttgaggtagatgaaacattatttcgccgtcttggtccaatacaagtccatgaggatagttgtagtgctggtcgtgttaaccaaacctgcgctacactgcgagctctcctcattacaacctgtgtcccagtagatactggtcttaagatggcgccagcaccagctactcttgctttagcatttgccatagaagggagtcgggatcccaaggctgatgcagaacgataaaaagtgcttaggattctggtttgttcaatctggtgacggagatcatttagccaagcagatgctgtcacctctgaacgaagatcatctactgaagcggctgaaaatgttggaaccaaatcagctccgttgatgactgtagtgataaaatgcactcctgactctg

SEQ ID NO: 5363 - DNA, 838 bp, Setaria italica
  misc_feature (838)..(838): n is a, c, g, or t
  Peptide Sequence Number=SeqID_71337
agacaagaataaataagaaacaatggggtagatgataagaggacccaagtactattatctgcctgtctacaaattcttcgggtacgagggggaacgggtcatccaccctgtccagacctatgccatgtactactggtgcttccactacttcaagaggatcatggagacattcttcgtgcaccgtttcagccacgcgacatcacctctgtcaaacgtcttcaggaactgtgcctactactggactttcggcgcttacatcgcttactactgcaaccacccgctctacaccccagtgagtgaactgcagatgaagattgggtttggcttcgggatcatctgccagattgcaaacttctactgccacatcctgctgaggaacctcagaagcccaagtggtagcggtggttaccagatccctcgtggtttcttgttcaacattgtgacctgcgccaactacaccaccgagatctaccagtgggttgggttcaacattgccactcagactgtagcaggctacatcttcctcgtggtggctgcaagcatcatgaccaactgggcgctaggcaagcacagccgcttgaagaaggcaagttgtgcttcccctgatatagatttactgaccaattactacgcatgtttcatatctttactgacaatgcttcttctgcagctgtttgatggcaaggacgggaggccgaagtatcctcgccgctgggtgattctccctccattcctgtgaagaggtgatgattgtgattgctgctggcctgtcacgaatgcaatacctactgcgttccagtgttcagaagagttccaagtcatgaataccatgcaaacn

SEQ ID NO: 5364 - DNA, 711 bp, Setaria italica
  Peptide Sequence Number=SeqID_71338
cctcgtgccggcgcccaaggggtacaaggcgcccattccctggcctcagagcagggacgaggtgtggtttagcaatgttcctcacacacgattggttgatgacaaaggcgggcagaattggattaccaaggctaaagacaaattccgatttcctggaggaggaactcaatttattcatggcgcagatcaatacctagaccagatttcccagatggtaccagatgttgcatttggatctcatactagagttgtcctggatgttggctgtggagtagcaagttttggtgcatatttactttcacgtgacgtcttgacattgtccatagctccaaaagatgttcatgaaaatcagatacagtttgctcttgaacgtggtgtgcctgcaatggtagcagcatttgcaacacacagattattatatcccagccaagcttttgatattatccattgttcgcgctgtcgaataaattggactcgtgatgatggaatcctgctgctggaggttaatagactgcttagagctggcggttactttgcttgggcagcccaacctgtttataagcatgaagaggcccagcaagaggcatggaaagagatggaggacctcactgcccgactttgttgggagcttgtgaagaaagagggctatattgctatgtggaggaaacctttaaataactcatgctacatgaaccgtgatccaccaacaca

SEQ ID NO: 5365 - DNA, 246 bp, Setaria italica
  Peptide Sequence Number=SeqID_71339
ttttacatacatttttgctctagatctgttagttttaataatttacttgctaatgtatgataacttagccatggaattctgtttggttcttgccgttgtgggaatagagggaatgcagatatcgtgtacattccgagcatttggagtttaagagtggggatcaagtgtcgtaggttttacattttatgttcaaattaagagattaaatatatccatttgtttggcactcataagttacttactata

SEQ ID NO: 5366 - DNA, 245 bp, Setaria italica
  Peptide Sequence Number=SeqID_71340
gcatcgtagaacttgtttacagatcgaacgaacgcatggattagtcaatacaacaatgatggatcttccggaagaacaagggggaggatgaaggcgagcgaggtttgctgcatgaagctggccggcgaagatacgatgatgatgatccactgaaaattaaacatctcttttgctgatcttcctgtacactatatccagagattgggctgcaccttatgcttcccaatttctacttctaccttttg

SEQ ID NO: 5367 - DNA, 482 bp, Setaria italica
  Peptide Sequence Number=SeqID_71341
tcgtgcatgcatcccagctcgctaagccaattgctgttctgaatggaatcttcatctgaacaaaaataaaagaagggcaattctgaatgaatgattattcatctcctcctcctcctcagctagcaacaatggccgcagcagcgcactggcgacgccaccgatggacggccctgcggtccctgctcctcgtggctctgctccaccgcctccactgcctggccttcctcgccgcctcgtcgcccgtgtggctgctcgccgccttcctcctcggcgtcgtcctcgtccacagcgagcccaacgtcccgctagcggcagcatcagaggatgaagaccgccacctctacaagaagatccgccacctctcctccgccggctcctcctccgccgaggacgacagcgcagacgacgggtcctcggccaccagctcggaggaccatctcgtcggcggcgagaaagaggaggaggaggaggtggtcaaggcg

SEQ ID NO: 5368 - DNA, 563 bp, Setaria italica
  Peptide Sequence Number=SeqID_71342
ctcgcacaaagaattgcttacagtggaccacttgctttgctacgctagctaatctggtgctaggcctgcagagaagcttgggccgcaacttgttggcctgctggcttgcaaactgagcttcacgagctgggtcgaaaagctggcttcctacagctgatcggatgggctgctagccttgatctgctcctgctaggctgctgcttcacggcccgcctgccggttgaatcctcctgggccgtgcgtggcagcaggcctgggttgcggtgtgggctggttcagcttgctcctcccggtggactgcgacctgccgctggcttgtgggcctgctgtgctccctcggcctgctggccaggctcgcacgcggctccgtgcgtgcgccgccaccggttcgtcggatcgacctggagaacagaaagaaaacgaagaacaccaagaactagaaccaaacttcaattcgtaagatctcttcctatacttcgcggatcgagatgaaatctgaaacaaggatgcaataccccaagggcaaatagatccatgaaactaaatcctgaaaaagactacaa

SEQ ID NO: 5369 - DNA, 433 bp, Setaria italica
  misc_feature (425)..(425): n is a, c, g, or t
  Peptide Sequence Number=SeqID_71343
taacttagaagacaaaaatagaaagaagcttgagcacctaaacgttattgagtgctcatcgctcactcagctgccacgagggataggccaactgaaaaggcttcaaatgttattgggctacattgtttcctacgccgatggaaatccaatgtcagagttggaatcattgacaaacctccatggcctcagtttgcaaagtcttgaaaaggttattgatcctttagatgcaagatttgcaagattgaattacaaaacaaatcttgagtcgttgacattgcagtggaacatggatgattattcgaacgatacaataccagcttatgccgtacttgaatctcttcagcctcaccgacgcttgaaagcattggagattgttggatatgaaggaaagtccttccttcttggattggtccgtgactaaaccntatctggt

SEQ ID NO: 5370 - DNA, 522 bp, Setaria italica
  Peptide Sequence Number=SeqID_71344
gttgggtcttttctaaactattattgtcttggactcactgttggggagaccgatcgatgcagaaaatttctcagataacgtctttggagctacggctagattgttcactggtggcatattaaatgccttctgtcttaggacatgattctcattttccaagttagtgagtttctcctgcaacttgtccaaattttgctgtagatggttgcattttccctccacatccttcaatttctccattgtatcatcactacttttacgagctacattaagttctttctccagtactgagttcttcatagataatgattcgaccaagttctttaggttggagttttctttttctgcttctgctgtcataattcttttactctgcaacatagtgatctctctcaaagaatcgtccagcttcttctggagcaacaaattttgccatgttcttttgagcatctgactttgcagcagcacattctgcgcttaatgattcaattattttgtcacgcttcaatatttcagatgact

SEQ ID NO: 5371 - DNA, 250 bp, Setaria italica
  Peptide Sequence Number=SeqID_71345
cgctgatgccgccgcttcctccgccgcgcagccgcagccgctcccctcccgcaacgcctcctccaagtacgacttcgtcaaggtcaaggtctggctcggcgacaacgccgaccactactacgtcctctccaggttcctcctcagcaggatgctcaccgtcacaaagattcctaatcatgtcgccatcaagatagcccttgagctcaagaagctgcttgtcgacaacagcctgcttgatgtttcccagagt

SEQ ID NO: 5372 - DNA, 285 bp, Setaria italica
  Peptide Sequence Number=SeqID_71346
cggcgatcatggtggaatcgtgcaacgtgcccctgtacacgatcccgtagccgccctccccgatcacattctcctcggcgagcccgtccgtggcctcctccagctcacggagcgtgaaccagtggccccacccgaggtgcgagacctccggcgcccccgcggcgctcccggtgctcctcggcgtggccccgtcccgctcgctcccgccgctcgtcgtggccgacatgccgctgcccggcgtcttccgcgcgggtggcaccgggacctgcgccctgtgctgcggcg

SEQ ID NO: 5373 - DNA, 1748 bp, Setaria italica
  Peptide Sequence Number=SeqID_71347
gatcaaagtctcacccatgtagtaaagggtaaagacaagccgaagcgacagaactgacccagatgcggtatactggacaaaggcatttgccagacgaatataatacaaatttgcaagcatctgcacgcaacctgcttgctaatggcgaccctaatcaaacaaaggctaatcagatgcagggtgaatgaatgaatgaaagtgtgatgcagtggcatgtgacctcatgtgcaggcagcaaagcactgaccaaccagtaagctacaagaagaagggatcagctattctagttgtacctaacctagtaaagcatttaggaatcaggaatggacgaccggtgtggattgaacaggatgcagtagttagtacaaaaaccgtacttgcatttgctggattccttgcctttaaaactgcaagtattggctggggacatgttagtcacagcaccatgctgctacacttgtgtgtgtgattcaagtatcaagtgtcctaacagaatggtgctcgcatatatataatacaaccaaagagcaatgagattgaacaagaggggaaagaatgtaatgggaacatggttaatgtcgctactctctagtggcaatccatacaacctcatactccgctctagtatcgcgctgctgttcatcatctgtaccgatggtgctcacgcttgctgaagctcccatcttccttggagctgtatctgtctgaaccctcccttccggccttcttatcatctcggaataggaggtcatccatttcgagcatgtgaattacatgccccattttaggcctcttgttggcatcagggtcgacgcagcgtagcgcaacgagcagtgcccgctttagtgttttgggagaaggcttttcagccatcttagggtccactacttcctccgctttcctctcggcaaccatggtcttgagccattcaaccaagttcacctctccagctggtcttgtataatctacaggagatctaccagtgatgatctccattataagtacaccaaaactatagacatcactcctctcatttaacatcccagtgctggcgtattcaggtgccacataaccaaaggttcccataacacgggttgtaacatagcttttctctgagcacaatagcttcgcgagcccaaaatccgacactttagcattccactgctgatcaagaagaatattgctagctttgatgtcacggtggacaaccttcggttccagcccctcatgaagataggccagccctttagcagttgcaagcataatgttcatcctgatgtcccacgttagtgggctcacttccccaacatcaccatgaagccactgatcaagattaccattgtccacatactcatacacaagcatcctgtaagcaccttctacgcagtagccaagcaacctgacgagattcttgtgccgaacacgaccgattgcttcgacctccaccttgaattccttctcagcctggcccctattgttgagcaggttcttgacggcgatcatggtggaatcgtgcaacgtgcccctgtacacgatcccgtagccgccctccccgatcacattctcctcggcgagcccgtccgtggcctcctccagctcacggagcgtgaaccagtggccccacccgattgccgagacctccagcgcccccgcggcgctcccggtgctcctcggcgtggccgacatgccgctgcccggcgtcttccgcgcgggtggcaccgggacctgcgccctgtgctgcggcggcg

SEQ ID NO: 5374 - DNA, 385 bp, Setaria italica
  Peptide Sequence Number=SeqID_71348
cggccgacgccgtggcggcaagctgatcctgatccttcacttgtgctgagcgcgtgcacgcatgtggcctggcgatttttgaagagcgcccaagctgccccgcgagactgacgcacacggacgacctgtaaattacagtagctttgttccaggcgggcttccttccggcccctctgtcggccgagacacggatgccggctggctctatgttttcttttgcctgagcttttgactctgttgtcccagttgctgcgttgatccgaactgaatcaactgatatgttgtaccgtagtagatactaatatgatccatcaagacgtttacctctgaacttctccatttgtggttgcggatggatagattgtttctgctcgtctgcaagttt

SEQ ID NO: 5375 - DNA, 258 bp, Setaria italica
  Peptide Sequence Number=SeqID_71349
tcttttctttggttgttgtactgctggagatgatctctggtctaagggcactggacccaagccgacagaacgagaaggtgaacctggtgaactgggcaaagccattgctggctgaccggaggaagctcagccaagtgatggacagcgggctggagggacagtacagttccaaaggagccctcctcgctgcccagctgaccctcaagtgcctgaacggtgacccgaagagccggccatccatgaaagaagttgtggagg

SEQ ID NO: 5376 - DNA, 839 bp, Setaria italica
  Peptide Sequence Number=SeqID_71350
tgaaaagcttcaggaccagggatttcatctcgcggcggcccctgtcctcggtgctcttcagcaccaagtcgatgatgtgcgcgagggtgtcgttcggcgggtttgctaggatgtcagatgtcactctcctcagcaagggattcaccctgtggtcctcgtcgtgcagttgccgtatggatgacacgacgttctcttcctcgtcgccgacccatggaactgcttccaggtaatctaggcatgacatgatgcacgctcggaagcctagtgattctgcgaccttcaagattcgcagaactcgtggaacattttgcctgatcagcctctgcttgacatccttgcagtacatcaacccaacagtctcgacataaatctccacatcctcgcaatctggcacctcaatgcacgacaccggagactgcctcgagattctattggcgaaaaaggtactattttcagcaaggatgttcttgtgaacaatcatcttcacagcaaccccttccttgccatacagcacaaccttcagatcactcgtgccgagctgcccaaatccaaccgaaatcttatgttgctttggtcgcttctcgggtgccggtgccggtgccggtgcaggtactacctttggtggatcaggggcagcaacagcatctgctggagggcacaattgctcatctgaattggttctagaccttgtaggagcggactgtgctctcttctctgaagaaacggtcggcgccctctgaaccgaggatgcctttgatggagcaggggatgctcctcctctaggtctgccctgctggtttgggctctttgctgtcttctgaagtgcagcctgtgatggg

SEQ ID NO: 5377 - DNA, 1086 bp, Setaria italica
  Peptide Sequence Number=SeqID_71351
catgggagcttaccaagaatccagagaggcccacgtgggggtggtatgtcgaatgccatgaacccgctgatgcagacagtttggcctccttgctccagcttgacaatgtactgctctggtgttagtgtgaaggtcttgtttgcaatggtgaatgcaagctttgccatcagatatcaaagatgccaaagcttgcattcacccattcgcaaacaagaccttcacactaacaccagagcaggtgctttctagtagcctatagctcatttttcaactacagtaaccttgttttttcattttctacagcacagtagtcaaaattttcagcagatgttgcttttggtaaatgatcaacaaattttactgaacattttgtgaacaagatactagtggactcaaacttttgcagctcaactttcatcagaagagacctattaaattctagattaaggactcactgttggcacagtacataactgaacatttgaagtgcctacttttaagtgcataaatttcctagaagttttgaagtgatatgattaggtgttgatatttgggaccaaaaaaatgacctggtagatggaatgcagttgactttgtaggtcttatttttcgacatggtttgaagtaaagtctgttaacgtcacctcaagttccttttcattacataatcatcactgcaattgcatacatttttcaaactttctgaaacttgtattgcagtacattgtcaagctggagcaaggaggccaaactgtctgcatcagcgggttcatggcattcgacataccacccccacgtgggcctctctggattcttggtgatgtcttcatgggagcttaccacacggtgttcgacttcggcaaggacaggattggcttcgcgaaatctgcatgagtgtgggagcactctgctcttcacaaaagatatcctatctattagggagcattgtaaataaatggatggtgaaactgcatgagtgtgggagcactctgctcttcacaaaagatatcctatctattagggagcattgtaaagaaaggtctaccgtgtgctaaatcacgttctcagtttcaccatccatttatt

SEQ ID NO: 5378 - DNA, 736 bp, Setaria italica
  Peptide Sequence Number=SeqID_71352
cttgtaggtgctagactttcttggaatagtatctgtggtggagtagcatgctatcgagaagtagcatctagaggaggggacccgagaggttggagctcccggtgtcgaagatgacggtgaagttctgcggcggctgtcctgctgcctggcgagcttcgccgcggccagggcctcgccgtcgagccggttcttgttgaggctgaccctgagcagccagtacttcgggtcgtcggcatcggcacgccgccgcagaacttcaccgtcatcttcgacaccgggagctccaacctctgggtcccctcctctagatgctacttctcgatagcatgctacttccaccacagatactattccagaaagtctagcacctacaaggctgatggggagacttgcaaaattacctatggctctggagccattgctggattcttcagcaaggataacgtgctggttggagaccttgtcgtcaaaagccagttcattgagacaacacgcgaaaccagtgtctcatttatcctagggaagtttgatggcattcttggtcttggatacccccagatctccgtcggcaaagctcctccgatttggcagagcatgcaagagcagaaacttcttgcggacaacgtcttctccttctggcttaaccgtaatcctgaggcatcatctggtggtgagcttgtgtttggcggtgtagacccgaaacacttcaagggaaccacacctatgtccctgtttc

SEQ ID NO: 5379 - DNA, 520 bp, Setaria italica
  Peptide Sequence Number=SeqID_71353
aagctcatgtgcgccatgaacttcaccgcggagcagatcaggaccgtcgcgcagacgtcgtcgtcctacgccgtggactgcgccggcgcgtccctcgacctcaactacccgtcgttcatagcgttattcaacccggacggcagcggcgcgggcgagaggacgttcactttcactaggactgtgaccaacgtgggcggcgtgccggcgagctacagcgccaaagttgttggcctgaaggggttgacggtggccgtgactccggacaggttggtcttcaacggcaagaacgagaagcagaagtacacgctcgtgatccgggggcagatgaatagcaacaccggcgatgtgctgcaaggatcgttgacgtgggtggacgacgccggcaagtacacagtgagaagtccgatcgttgcaaccaccgcgagatcacagctgctttaggatccgtgcgtaccgttgctattacgaatagtatgcaataccggaggtttatttccgggtttatttttttaggttagtt

SEQ ID NO: 5380 - DNA, 882 bp, Setaria italica
  Peptide Sequence Number=SeqID_71354
tttttttttttttttaggtaactaagtagaacttacaaagtgttcattcagaatgaaacagtattctttgctattcttgcagcgtaaacatttgagaaaagggggggtgtatctgcacagtaagaactaagaactgctcaaatctgtcaataatacttggccaatgtgcttatgtactctgtgatattgctgggattattgcttggtccgcgttttctttcttcatggaacactgttactgatagtgagaggcaaatatagtgacactgtaagagtaaataataaaagctcaactaattcaaccctccctccctaggctcctacttgttgacttcctgcatgtcatagttcatccacaccccatccttgtcacaagggaaagatttcagcttcatacatctgaagacctccagaaaggtcagttttggaaatatgtcaagcacctggatccattgcactgataaatcattcaagaatttcaggcgcaatacctcaatgttccacacctccgacatgttttttcgccaaaggtatttagcattcctccagtgaagtagagtctcttcagtcgcaacagcttacttggacttaaccaatctggtatcttctctccagggaagcagcgcaggtctagcttttcaagatatagaggtagggaaagtgaagttagcaatgatgttgaatcataagtttgatgaactcgctccttctttgaaagtgatacagcccatgtaattttcagcacacgaaggcctttgatgttctcaagctcaatcaattcgtcttctatcactgtaactttgcttccaatatatacactcagcttcttcaatttgtccagcctggtcaactctgctacccgacaattgtaattaccagtgg

SEQ ID NO: 5381 - DNA, 498 bp, Setaria italica
  Peptide Sequence Number=SeqID_71355
taaaagtactaagttaccaagcagtccacctcaagaacacagctactgatcagcgggggctagctagccagccattgccgccatttcctggatggcgatggccgtccacgtcaggaagccgatctgcgctctcctcctcatcgccttcctctgcttgtcatgctctgtttctgctcactctcactttgatgacgactacgggcccggcgggtacggccatgggcccaaagggtacggacacgggccacgcttcgggcgtgggccgtttggccgtgactgccgcttcggacggtgccgcggcggcggtggcggcttcggaggtggtggtggagctgggggccgcctaccacgccccaaaccctagccgccccaccctaccgccgccatggccgacccgcggatgttcccatcaggatcggacgaccgcgctgaagcctccgacgccagccgccggctgtacaacccgtaccaggacctcaatatgcccaacagctaccg

SEQ ID NO: 5382 - DNA, 488 bp, Setaria italica
  Peptide Sequence Number=SeqID_71356
aaactggagcccgtttcctatggatgacggcagtgtgagatgcggcgttgagaggtcaagagcaccgaaatcgacttccagtgagttgtcatccttggcccagttctcgtcatataatgtctccttgaacttgagatactcagacggtgtgattccttcgaccgacagatcgtcggaatgaactttgacgtactcccagatgccaggattcatcctgacagcaaatgcaacatagggtggtagcaccactgcttccggtgtcgaacaaataatgtaaccgaggaagccttcgacaagcttttccttctcgactttgtcatccagtgctttctccagctcctctaggagctgctggttcttcaagagcctctttcccttggacaaatacctctggaagcatctcttcatctggtatcggctttgccttagcgcatcgggcatgccatctgcaatgctgtccgtcctcttgaagctgaggttgttggacg

SEQ ID NO: 5383 - DNA, 307 bp, Setaria italica
  Peptide Sequence Number=SeqID_71357
cgattcgaccccgaccgggcgcggaaataagcgctgcctcccgctcccaacaaaccctcccaattcccagttccccttcgccgccgccgtacaccggaggtggagcttgccgtgtgggtcactccgtgtccacctccttgaagcgtgcaagtgccccccaggagtccgacctccataggaagggaaggaggctccctacgccatccccgtccccggcgacggcgagcataacgccaccggtccgtgcctctctcagccgaaccctcctccgaccggtcacggttcccctctcggtccggtgggggag

SEQ ID NO: 5384 - DNA, 410 bp, Setaria italica
  Peptide Sequence Number=SeqID_71358
taattaatcaatacctcctcctaatccccagttggcacattatttatccatcatacaaccaactactatgatgaaatgatgatcgaggatgtgatataaaatagtagagtgaaagcctggtggcatattctaaaaaaatcgcaatataatactgtagtaccagtgccaagctgcctgtaattaattagcaaagatgccaaaagcaaaagttcatgagcaaaaatgtaacatacaaatacatgccacatgttcatagcaattagtactaacagtcccttctttccatgcactgtttgataccttgatcatgttaccctcaaacgaagatcattatgttagcgctcagctcacgtgatggggagcacgcgagcgcgcatcacgaggccggtttgttagtgcggtcgatcagc

SEQ ID NO: 5385 - DNA, 637 bp, Setaria italica
  Peptide Sequence Number=SeqID_71359
gcgaactgctcagtgaccatcttgcatgcactctccagaatactatcaatgtacttctgaagcgcttccattctgatctgcacacgcttctggacctccacttgttcatgcagtctgcgttgcacttccatctgcgctctcagtgcctctttgacttcttgactttctttcacatcctgggcagcaactctaggggatacactcattccactttgagcatctagaagataggatgcatctttagattgctctgacccctctttaccagattgtttgcctagtctgtatttctgaagatggctcttcaggtggaaaagcgtaagccccttgacacccattgtcctcaagatagtttttggtgtcgctttctcgggcccgccgagctgggcgacagcgtccacgaagcgctcgtgcaggtcggccgtccaccgcagtctcggcttggggtctgccgtcaacaccaggctcggcccgcccgggccgccgccggggccggagcgcggtgccccgtcgccgggcgcggggccgtctgggcggtggtggatcaggccaggcgggaacatctcctcctcctctgctccctcctgactcctgctgctctccgcagcagcagaaagaggagagacagggccttctt

SEQ ID NO: 5386 - DNA, 971 bp, Setaria italica
  Peptide Sequence Number=SeqID_71360
aaagacacttgttctagcacttcaggtagttcatatgaacataggtttcttttgattgatcaataaaagagcagaccctgctacctggcactctggcaggcactaacaagagaacaagtcagctactacaagattagaccatcatttcccttgtcacgacgacatttgacattactaccaaagacaaggaagccagaaataccctcagattttgtcaacacagctcaagaggacctccgtttgagctcaggcgacttctggaggagcattggtggtccttcgatgcccgagggagaaggcttgcctcctggactgtgcgagtcaattgaactgacagagagctggttgaagacagaagagctcaacgtgtcagtggggccacacataaccccaccaggggatatctctgggagatcagggtcggagatgctgaagccacttgaggcgaactgctcagtgaccatcttgcatgcactctccagaatactatcaatgtacttctgaagcgcttccattctgatctgcacacgcttctggacctccacttgttcatgcagtctgcgttgcacttccatctgcgctctcagtgcctctttgacttcttgactttctttcacatcctgggcagcaactctaggggatacactcattccactttgagcatctagaagataggatgctgcaatttgggggaaaataatccaaaaacagaggtcagaagttagcaaaagaaccagctttactttttgacgcagaaaaacagataacacaagaacatatggtaagcagttacataccatttcacataagatatacatgggttttcactaggtattccccattttattagttacttgtgcttgacagtagacaatcatacaatattatgatgattacgccttgtgaattagcagtgctatttttaattcatgaatacaaaccatactaaacattttgtaaagagaatataa

SEQ ID NO: 5387 - DNA, 464 bp, Setaria italica
  Peptide Sequence Number=SeqID_71361
gggggtgggtggggtttggtttggtttggtttggtttgctcttgtgatcttcccacaaggaacggggttggggtttgggtcaggacggcgggctgcgggggcatggcggcggcgccatggaatcgcggcggagcatcatctatctattttgaagatggtggagcgatcaatcggtcgatcgatctacgacataataggtaagattgagttgtactaggtttgagcagcagcaaactcgcaatcgatggattggggattccagcttgaactttactttactttacctggtggaacgccgcggcctctgcgcggctccgcccgggcttccgaggagcaggagaggcgagggggaaggggattgatcgatctgattcggattgcgctgcggggatgcggattgcggctgcccgacacagacagcagcacagcgcgcagcgagacgttcctgctggctgctgcggtgg

SEQ ID NO: 5388 - DNA, 741 bp, Setaria italica
  misc_feature (38)..(38): n is a, c, g, or t
  Peptide Sequence Number=SeqID_71362
tttgtctagttcttctttttttttagtttttttttttnttttttttttttttccttttaattaaatatatgtatttggtgagcacacgtacaaaacacaacaggattacacgaacatgcatttcacacacgttacatgcatctgtagatggatctcaatctcatccgcatgcagatacggcgcatgcattcgcatacagcaggatgagctcgttattctatagtgtatatatgtatatagtacgtatacgagtagttaattagacgcacgcggacatgatcgcatgcatatacatgcggcacatttgggtcgtgcgtacgcattctcatggaagtacgttcaggctctgcccacgcacgcatgtgtaggggccagcccagttgggcttgacgaggccgacgatggtgatgttagtagagggaaagcacacgcatactttggtgctggtgccttgggggaccggcttagggaagagagtcaggaccataccgcgtctaaggtacaccggcttcggctaatacaagcgcggcgaggttagggaagccagaaggacaaggaccttgggatggtgccggggcaggcgtgggcacaggtgctggcgtcggagctggagtgggtgctggcgtcggagctgacgtcggagctggagttggtgctggagttggtgcaggcgtcggagccgggttggtgctggagtaggcgtaggtgtaggggccggtaccggcgctgcagctggagtcg

SEQ ID NO: 5389 - DNA, 297 bp, Setaria italica
  Peptide Sequence Number=SeqID_71363
aggctacccgatccggagcgtttctctctccgcgatggccgagcagcccccgcccggcgggatcgacccgcgcagcggcttctgcgccgcgacgcggaccttccacagcctgcgcccgtcctccacgctcccgccggactccctcccggccaccgccaccgcctacgccttctccaccctccgctcgccgctacccgaccgccccgcgctcgtcgacgccgccaccggcattgccgtctcctacccctccttcctcgccgccgtccgctccctcgcgggggggctctggtccgcccg

SEQ ID NO: 5390 - DNA, 296 bp, Setaria italica
  Peptide Sequence Number=SeqID_71364
atatacaagtacggcggcctacatgaagtattggtgatacatagctagatagtacaaatggggatctgataaaaacaaagaaatgatattgttactttgttagtggtactagtgttgactgtaaggattatggttccaacacacctatgatattgcatagttaaattattggtggagcatgagtgaatattatgcccagctgttacttctcactgcagattgataagatgtgtccttgttctgagtggaatgtgatagcttctgataagatgagttgaagcaaaaaccaagacata

SEQ ID NO: 5391 - DNA, 478 bp, Setaria italica
  Peptide Sequence Number=SeqID_71365
ttttttttttttaaatttttgtcggcaaagccaaacttatatgataaagaaaatgaccttgtatgctacaatgtcttgtcagtttgtacacagctcggcaaaatgtttttttttttcttgaaacgcaagcgccaaacagttgggctgacacatcctctgaatctgaaggaaatgttccttatagaatactagagcgatgaaatgagggccatcaggtgctaaccctgaaatgtagctttctaaccactaccaacaacatacgatgaataggagccgtacatttcagcattgtctagcaacctcttcttggtccacagtgatccttccacacagatgcctcagaaaatcagtgtgcagcgcatgaccagcctaataggcaattatatgagcgattgggaaaccctggttaccattctgtgcaagaagcgagaagtcacctataagataccaatatcttgtggcggcaaggctcgtcctc

SEQ ID NO: 5392 - DNA, 744 bp, Setaria italica
  Peptide Sequence Number=SeqID_71366
cggctccggcgagcccgcagtggaaccagacgctgctcatcgtcacctacgacgagcacggcggcttctacgaccacgtcgccacgcccaccgccggcgtgcccagccccgacggcatccgcggcccgccgccattcttcttcaagttcgaccgcctcggcgtcagggtgcccaccatcatgatctcgccgtggatcaagaagggcaccgtcgtcggccgacccgccgggcccaccgacacctccgagttcgagcactcctccatcccggccaccctcaagaagatcttcaacctctcgtcggatttcctcaccaagagggacgcgtgggccggcacattcgagcacatcttcaccgagctcgaccaaccaagaacggactgcccagagacactgccagaggtgccattcgagaggccaaccccgcccaacgaacacgggtggctctcggacttccagcgggagctcgtggagctcgcgagcttcctgaacggcgactacatgctgacgagcctcgcgcaggagacccggaggaagaagatgacggtgaagcaggccgatgcgtacgtgcggcgcgccatcaccggcttcctgcaggcgagcaagcaggcggtgcggctgggcgccaacgagtccgccatcgtgaccatgcggtcgtccctgacgagtaagacgacgaccagaagcccttgattgttgatgagtatgctaatatacatagctagttaacagatctagaaaagat

SEQ ID NO: 5393 - DNA, 460 bp, Setaria italica
  Peptide Sequence Number=SeqID_71367
aaaagaattggaggaggatacacggtgtttgcaaaagccacctgcttgtatcataaaacacagtgacattttgaatcacgcagcaaaagtttatacacatagaatctacaagttgtttgagacagattttcttgatgggtgtggtgccacaaaattcaaggagcttccatgtgaagataataacacacatcaatttgagatgaccatgcaagggcgaggatcaagagtctgcacagtacgtctcaatatgtctacgatggaattaagttgcagctgcagtaaatttgagacaatgggtttactttgcccgcatgctctgaaagctcttagtataaaaaatatatgcaaaaattccagaaagctacatactgaagcggtggaccaaggatgccaagaaatgggttttaacccaaaacgaataatagaatcgtcatatcaggatagcatggatgatgatgat

SEQ ID NO: 5394 - DNA, 340 bp, Setaria italica
  Peptide Sequence Number=SeqID_71368
cttccgaagtcgacggcacccgtctcctcccgcacgcgaagccccaaccctaatccggccccgatctcgcccgacatggccggcaagacgaaggagttcgatggcgccagccccgccaaaatctttatcgggggactctccaaggacaccagcatgggtacattcaaagagcattttgggaagtatggtgatataactgatgccgtcataatgaaggaccgctacactcaaaagcctagaggctttggatttattacctttgcagatcctgctgttgttgacagagtgattgaagatgagcatgttatcaatggaaagccggttgaaattaaaagaacta

SEQ ID NO: 5395 - DNA, 451 bp, Setaria italica
  Peptide Sequence Number=SeqID_71369
tggaggtcttgattcgcttaataggtgctgatgaaactatgtattcaagttatgcggattctatgcaatggttagatgacataaaagtccttgagatgatagttgacaagttcagcacatcagattctcctgaggttcatgcaaatgctgctgagatcctttgtgcagtaactagatatgcccctccagcacttgctgcaaagatttccagtccaagcttcgtggggagattatttcaacatgcctttgaagattcaaggcctaaatcggtgctggtccactcattgtcagtgtgcatatctttgttagatcctaagagacttgtatcggcttcctaccaggctttccgtagtcagctgagccatggaacactagttactgcaagtccagaaacagtaaatgggatgctggatagcctaggtgatttgttgaagctgctggatgtttcatc

SEQ ID NO: 5396 - DNA, 950 bp, Setaria italica
  misc_feature (1)..(1): n is a, c, g, or t
  Peptide Sequence Number=SeqID_71370
naaagcactcagatttcagatagccttaagacaggttagttggaactggctgtttttaagtgtgcttcagcatacaaaatttgctgttcagttgttctctatggagcagtctaaactttagaccaagaaggcaagaacatcatatggaacgaattacaagtcccatttttcagtacaagaatgcgagagcaacacagaaaatcagatatggcagcttcatgtatgactaaattggtgtcaggaaccacttgagcttgtcctttgacatttcccagcctgccatatgttttgcttcactgggcgcagtgtgttatagttcatcatcgatctggatggtagcacttgtggaccgacagtgtttgctaatatcttcacaaagggccttgctcacactttccgattctgaggagcttgtttttatccactcagagagctcatcctctgtttcctcaagtaaccttccacagaaggtggacagatttttggaatgtgctcgtgctgctgccttcttttcagtttgaaagctgttccaatctgttactttcacccatccttttccacctgattccaacttctgcaaggtataatcttgcatcttatcgcacaggtcatccagaagttctacaacccgaagctcactgactctgtagtcaatgaccttcccttccctctgacctttagaattcaagcggttgcgcaagtccaagtgatttcttggtttctcactcgaaattccaatctctagctccgcagcaacggccttgcaggcggcgcacttgtccccgatggcggatgcggaggaggcggccgccgcgaagatggcggcgaggagtatgagggcgacggatctgtggattgcagctctcggctccatctcccgcgatctggtgcagcctgcagcgtcgtctccctcccgaattccagtctccgcttccgcgtgatggtctttt

SEQ ID NO: 5397 - DNA, 821 bp, Setaria italica
  Peptide Sequence Number=SeqID_71371
aacaaattctgaatatgaaaacaatcaactgactgcattcgagtcaaaatttcgtacaaatagcaccaactacagtactggacatgcatcaggacaagatatcacctattcacctatcagttatttaccagggtgacgaacagaaccccactatgtggttgagaaagaaaaaggctgactactttcagcattttgcacctcgtatgtagcgcacagactgcaggcattgacacaggcacacagcaaaaaacctcccaataaattatgttacagatcaaacctaagcagctccatgaggcaattgaatctttgaggctccatcaggtgcatgtggggggccaccttaagcaaaatgtgtagatcacaatccacatatgatcctcaaactgtttatacaataatggtccgaccagttcctaatgctgcctgcatgtccatcaactgatccaccatcgtgtgaattgaactctgataccctcaaatttatttcacttcattccctcttattttcatcttcctcctgattctgtccacccagtggatactctgaaacagtgctctcaccaactggttcaggatgcttgattgaatcggaatcagatgaaaccggtagtactgcttctgctgtggtctcaggcgccgaagatccagacgaattatcactctcctttacctctcctaatttggcctcacaaggcatgacatcatccatggaatgcagctgcttctcattttcaacctcaaaatccggagctgtggtatccttctcaacaacaccaccaggttcagcttcttcctcctccattcgacacactcaggtt

SEQ ID NO: 5398 - DNA, 2363 bp, Setaria italica
  Peptide Sequence Number=SeqID_71372
tcggaccattattgtataaacagtttgaggatcatatgattgaattgtgatctacacattttgcttaaggtggacatgcacctgatggaccctcaaagaatttcacttcattccctcatggagctgcttatgtttcatcttcctcctgattctgtccacccagtggatactctgaaacagtgctctcaccaactggttcaggatgcttgattgaatcggaatcagatgaaaccggtagtactgcttctgctgtggtctcaggcgccgaagatccagacgaattatcactctcctttacctctcctaatttggcctcacaaggcatgacatcatccatggaatgcagctgcttctcattttcaacctcaaaatccggagctgtggtatccttctcaacaacaccaccaggttcagcttcttcctccctccattcgacacactcaggttgactctctttaacatcaggggttggtggtctgatgtcgtcttccaacttatcgatggtaccatttgccaagactgtgtgaccaaactcttcatttatgtccttattggagactgctaaaggtggttcagaacctttcgtatctggtaaagatgattcagaaccttttgtgtcatcaataacttcaccaagaatgacttcatcagtctcatcatccagttttggtgcagatatctcagaatttggggatggggaagcttctgagctaacagaaccatcattcaatgctttgtcctcgtcaaacgcaaaccaattggaatttgtaaagagcgagctactgtcttgttcgtctccaaggcgaagagaggagattacaacctctgcagattcatcatcaaaatatacatcctcatcatcccgctcaagtgacgcttgagcctcatcaatatcctcattgctgtaaataccatatttaaatgcctggcttaaattactagcaagtgctgccacatcatagtccctatctcggaagtcttcatcatcactgtccctaccacgatcctgcagtgatgttggtcgaccacaagcccactggtaaacattctctaatacattacgcttcgttaggatactggcatgccactcgatccaaccagaattttgctgcaaatgtgattggaccatggtgttggtattggccaactgaaggagtttgttagctatgcgtgtcatatgaccaacaattcctattcttggtggagattttccctctgcagacaatgtatgcttagttaaatctgttgacagcgcagagttcttctctgcttccagaattcttgtgacaagtttacactcatcaaggacatggccaataagttgatcctgcttactctccagacaggacccaatgatgttttccacatggtggtgcaaaaagttattgaatgggtactcaaaaaatagatctatggcccgcttgattgctcctagatggatcagtcgcgcttcagcagcttcactaccaattgatagtagaacagagatgaactcgacaatcttcaagcgatgtttcccaagaggaggttgtaagcttccataagttgttggcagcacattttcagcagatgaaacatccagcagcttcaacaaatcacctaggctatccagcatcccatttactgtttctggacttgcagtaactagtgttccatggctcagctgactacggaaagcctggtaggaagccgatacaagtctcttaggatctaacaaagatatgcacactgacaatgagtggaccagcaccgatttaggccttgaatcttcaaaggcatgttgaaataatctccccacgaagcttggactggaaatctttgcagcaagtgctggaggggcatatctagttactgcacaaaggatctcagcagcatttgcatgaacctcaggagaaactgatgtgctgaacttgtcaactatcatctcaaggacttttatgtcatctaaccattgcatagaatccgcataacttgaatacatagtttcatcagcacctattaagcgaatcaagacctccatgatggaagtaataccaataagatcaacaagttggctaactatttcaggatgaccctgcacataactaactagtgggagtgtcttcctcatcatcaagcagatcactaccttggcaaagtaaccagccgaaagtgtcccatgagggtggtcagattggaggaaggagaaaagtaaattcataagatcttcatcctccactaatgtcttcatgataacatccacttcgcatgtgaatatttcacaagctataaacggaaatctaaatatccttttcttttctgcatcttcaggtgcctcctctacaatgtagcgaaggagttgctccacttgaaccttgtcccga

SEQ ID NO: 5399 - DNA, 444 bp, Setaria italica
  Peptide Sequence Number=SeqID_71373
ctgataagcctactccatggaaggatatcaccctttgctcaccaatctctttctcgacctgttgtggtggaggcataatctcatagcacagcaatgatagtggatatatgtgcccaggaacaccagcatgctccagaagcctcctcatattgtccactgaggatgaatcgaatggcgccgggtaccattctcccgttgaatggtctggccggtccctaccaccacttggtgcaatccaaattaactgtgaaccaccaatgttattgtaagggaagataccgtaaaagcaaggccatttccttgaggcttcgagtatttgatctcctcttcatctcaattagctcagggtaatcatccatatgtttttcgagtatacgcagatgaggtttcttcccatgctaaatggcttgcaaagcggatcagtgacaaccctatccccagcaa

SEQ ID NO: 5400 - DNA, 428 bp, Setaria italica
  Peptide Sequence Number=SeqID_71374
attctatttgctgtgctatgatagtggatatatgtgcccaggaacaccagcatgctccagaagcctcctcatattgtccactgaggatgaatcgaatggcgcctgcccttgttttttgcaagtagcagtcaaagtaaacttaagggaatgcaagcacaaaggctgtgtacttttcaagcgttgtcttaggtaaaaagaaaatacttgtcagccatgtgcacaactgccactgtaccatctcatttcctatgcttgctaacaattcaattgcattgaaagagaagacgtacaataatgtatagcaaagtcagaaaacatgatgagccagtcaaaatggaagaacaagactagcaggcaagagaatataccgggtaacattctcccgttgaatggtctggccggtccctaccaccacttggtgcaaatcc

SEQ ID NO: 5401 - DNA, 1045 bp, Setaria italica
  Peptide Sequence Number=SeqID_71375
cacatatatccactatcattgctgtgctatgagattatgcctcctcatattgtccactgaggatgaatcgaatggcgccgggtaccattctcccgttgaatggtctggccggtccctaccaccacttggtgcaatccaaattaactgtgaaccaccacgtaaaagcaaggccatttccttgaggcttcgagtatttgatctcctcttcatctcaattagctcagggtaatcatccatatgtttttcgagtatacgcagatgaggtttcttcccatgctaaatggcttgcaaagcggatcagtgacaaccctatccccagcaacataaactatgttttcactaatccatggattggttttttcaagcagcaaggcaataattgctggatctgcttctgtctgatggttagacatcaaaacaacattgtggccctgcaatgatgcacttcagtaatattttacatataagataagaatttttggagccatggattgcaagaacgagtatgtcagtaaaagtacaacgacctcatgccttgtgcttcaaattgtaacagaactaactagatgcataagtaaaaatggtttccaaagtatgatgtatatgctgccatcatactttcttctctcaaacttgataattgggtcatgatgtcataataggaaagcagtatttggaatttgcatcactgtatttcaacagatatctctaaataacactcaaacagaagaaacaaaagtatcagttccagttcagtccttagagattgatatccattttatctttgttaacaattttcatatgctgtagttgggcttccataaacaatgacagtttacattatcctcttcttccgaaaagaccttgatggtttgaattcaccataccattttaagatctagagcgaaatgaactagagactagttactgaaggaaacgtgaaccatagtgacaattagatgaatcgacctggcggagcttctcttccatgtcatgaaaaatggaaatgttgccaacataggagttcctaaaatctaccagtggt

SEQ ID NO: 5402 - DNA, 1691 bp, Setaria italica
  Peptide Sequence Number=SeqID_71376
ttcacgtagagcacgtaatcgtcatatgggatatgtttcctctttatcctgactccattgagtacgaaagagacaggttacatacaaggatttcaggcgcaagagcagaaaattagaacctgcttttatctccaaatgtggagccaaaaaaaaatcaaaatctatatacacgaaacagaatataacaaaattaagacatcagccgcacaaatccacatgctcgtcgacaagcaggttcgacgcatgcaccctgatgtacaaccagcacattattgtgcaacctgaggcgacattcttgcgctagaccgactgaccagcgtgccacagctgctggagtccatatatgcagaaccaccgatcaccagtttctgcaggacagtagcgggctcctccatgattaataaagtgcagtgatatcaaagtttaaagttcaacaatttcttccagcaaaattgcacaatggccgtccatctgatcttctgaaaagtaaggttacttcactaatgaatctggacattcatctccatggttgtgacagtgagatggcagtgtttgatgcagctcctacatgatctctaaagatagcagacttgagaatgttgtactgattaacaactgagttgtacaaagtatttgcaaatagctcccttccctcatcagcattcttggtatgagcagtaatatccccatactttatttcttcagttactgataagcctactccatggaaggatatcaccctttgctcaccaatctctttctcgacctgttgtggtggaggcataatctcatagcacagcaatgatagtggatatatgtgcccaggaacaccagcatgctccagaagcctcctcatattgtccactgaggatgaatcgaatggcgccgggtaccattctcccgttgaatggtctggccggtccctaccaccacttggtgcaatccaaattaactgtgaaccaccacgtaaaagcaaggccatttccttgaggcttcgagtatttgatctcctcttcatctcaattagctcagggtaatcatccatatgttttttcgagtatacgcagatgaggtttcttcccatgctaaatggcttgcaaagcggatcagtgacaaccctatccccagcaacataaactatgttttcactaatccatggattggttttttcaagcagcaaggcaataattgctggatctgcttctgtctgatggttagacatcaaaacaacattgtggccctggcggagcttctcttccatgtcatgaaaaatggaaatgttgccaacataggagttcctaaaatctaccagtggtctgatgtaattctgaccaaacatgtaatagtcgaacggttctcggatagctttgtgataaggtggaaaggtaaatggattctgtacatccagcagaacacgatcaaacaaagccgtcatatttgaaagcatgatatcatgtgcattaggatctccattctgcaggacagcattcttgtaattgtaatacagctcctccagggcgctagcaacatctgcaggcagatttccctcctccacttcctttctgatgtgcaaactgagctcttcctcgtcgaccagcggcgacggtcccaccacctcctcggcgcccgtgtaggaggcgagcacggcgcccttggccgggacccgcgggcccgcccgcctccggccgcct

SEQ ID NO: 5403 - DNA, 609 bp, Setaria italica
  Peptide Sequence Number=SeqID_71377
ttttcctaaatgtaagtttgttctttttccccttcactaccatgacacttttttcctttcttttttccctctcttatactcaggtgtcagaatgaagaacgatcattgaatcaacagcatgtgtcacgaaaaatgaaccaaaaggtgggggtcaaaacagtatccgagtacggtcggtttctcacttgacattaacaaatcaggaacccgatagcaggccccaaaacaagggggaaaataatgaaactagctacaaatagaaaatatgatgatatggctgcttttccagctacagatcgagacgcccggaaccctagaacatgctaatacttagttacgggaggatagccggcgaagaactgaatcgaatcgcgccggcgccaacaggtgcgccgccgccttggaggccgataatccttctcaggatccgagcagtagggcaacacggcgggcggagcgagccggcgaggaagggaggaggtgaaggggatgcggccgagcgagaggaagaccgaccggccagactatccagggagccgcagccggtgtcgaggataccctagtcgccgtcgccctcctcttctctcgtgcgtgcgaactacaacggta

SEQ ID NO: 5404 - DNA, 256 bp, Setaria italica
  Peptide Sequence Number=SeqID_71378
ggagctcgtcgatcttggcgacgacgtcgatggggaggtgcttggcgagcacctccggcgggaggccggacttggcgacgaggtgggagcaggtggtccagagctggtgcaggtcctgcttccgcgacgccatcagcaccttcatcacgtcctcgatcgaggccttctccaccattccggccagctgcttctgcaagcgcaataaccaccaaattcttcagtgcgagtgaccttgctgctggctttcactgtgagt

SEQ ID NO: 5405 - DNA, 1024 bp, Setaria italica
  Peptide Sequence Number=SeqID_71379
aaagacgacgggcctccttgccctctgctcccgccgtcatcgccgtcgccgccgtcgcccatcttgccgaactgcgcgtccatccctaggttcagatacaccattctgttgtccaagctcagattcaccatgcttgagttggtgccgctcgcattgtacacggcccccccggcgcccccggaaggctcgccgtacatcggcgcggcgttgaccgccgcggtggcggtgtgagcgtcctcccgggacatgaccatggccgccgactgcacgagctcgaggcacagccggagcttgttgggctcgatgtgcgcgaggcccggcacggcgcccttgaagaggaagtcggaggtgagcgtgcggaggatgtcgagcggcgtgacgccctcgacggtgcgcacgttggggtcggcgtggtggtcgagcagcacggcgaccatgtcggggcacaccatctcggcggcgacgtgcagcggcgtcttgccggctgggccggcggggtggttgacgtcggcggcgccgagctcgaggagcgccttgacgacctcccggctgcagttctcgacggcgtagtgcagcgcgagcgcctcgtcgaggttgaggccctcgcccatgaccatgagcttgacgagctcgacgtcggaggagtcgagggcgcggcgcatgcggcggatcttgtggtggtcgtcgagctcgccggcggaggaggcctcgatgcctgccgcgtggtgcgggtggtggtgcgccaggaacggcgagcggcgggacatggaggtcttgaggcggagctcgtcgatcttggcgacgacgtcgatggggaggtgcttggcgagcacctccggcgggaggccggacttggcgacgaggtgggagcaggtggtccagagctggtgcaggtcctgcttccgcgacgccatcagcaccttcatcacgtcctcgatcgaggccttctccaccattccggccagctgcttctgggtgaggagggcgagctcctcgacgccgaaggagcgggcggcggcgaggg

SEQ ID NO: 5406 - DNA, 513 bp, Setaria italica
  Peptide Sequence Number=SeqID_71380
acttttgcttaagctaaaaggatcttccccagttgatttgctcttgcaattatcttgtcatcaatgtcggtgaagttccgaacatagcgaacttcatagtccaaataacgcaagtacctgtagaggacgtcaaaggcgacgtatgcgcgggcatggccgatgtggctgtcgtcgtagggcgtgactccgcagacgtacatgccgacctcccggtcaggagctcgcggccgaaaatgctccttcttcctcgacttcgtgttgtacaggtgcagctcgcgggttctctccgcggccgcgccattcgacgcggaggcggaggccgagaagggggaggtggagaagggcctggcggggtgcgagaagaggcgattggagcgaggcggagagatcagggatagcgcccggcggagggggatgcgagcaccggacggcgaggagaggagagggagaaggccagcggcacgcctcgccgcggccgccgccatctttctgggtcgtgacggcagtgcgcga

SEQ ID NO: 5407 - DNA, 325 bp, Setaria italica
  Peptide Sequence Number=SeqID_71381
ggcggcggccgggacgacgacggacagggcgaggaagaggagccaggagagcgcggactggcacgggcccgagtggtccatgcacacccagcgcaggcaggagcggaaccaatggagctcgtcgtcggggcgcgacgcgcaccgctccatcacgccacgcttcagcgccgacgggagcagaggctccgccgacgccaccgccgcggcgttggaagcgctcggccgccgccccatggctgcgggcctgctgaggaggatcgcgcggcgctgctctggtcgggctctgtttcgcttgtgcgtggcgtggcgcgggtggtggtggcag

SEQ ID NO: 5408 - DNA, 228 bp, Setaria italica
  Peptide Sequence Number=SeqID_71382
aatccatgcttggatccaccatcgatgcagagtgcatgtgaagggttgcaaagttgcggcagcgagccctcaagcatctcacttttgggggtaggatgctcgagttctatggcggtgagctcgaattaggcggcaaggagttcggtccccatgattcattgagatttgtcaagtctgatgtcacaattgattggcatttcctcactgattctgacaagtacgcgattg

SEQ ID NO: 5409 - DNA, 279 bp, Setaria italica
  Peptide Sequence Number=SeqID_71383
atcacttgttcagttgtagcatacgggatcggaggagcacgcgcagggttcgcaagatcagctcctcaactgctgtagcctgtaggcaggacacctaaagacagtcgctggcttcaagatgggtgaagctggtgaaattcagctgcagatcgcaggtatccgaggccaagaagctgaagacgatcagggacagagagctgggaacggtggcgcatgtcctgcgaccgcggcgccgcggccggcgctatccaaacggctcgcgtggtgggcctggttctt

SEQ ID NO: 5410 - DNA, 203 bp, Setaria italica
  Peptide Sequence Number=SeqID_71384
tcaattcacagaatcagtagagaatcacttctcttcgaaaaatcattttagagaatcaattcacagaatcagtagagaatcacttctctccaaaaactatttggtagagctcctgctggattcagcagagaatcaactcagatctttcgaacgcacctgaagataataatgcatcagatgccacgactagcaacgactagaat

SEQ ID NO: 5411 - DNA, 380 bp, Setaria italica
  Peptide Sequence Number=SeqID_71385
gtgcaacaaacgcaaacgcaaacgcaacgcaacgaatcgaatcaaattcgccgtcgacctcgtcggcgtccgcgccaccggccttgatcccacgcccccgtccgatcggccaccggagatgcagcacgggagcggcgactacgcgtcctccgatcccgccggtcactactacccgcaccagtacgcgcccccggactcgaacccgtacccagccgccaccgacgcgtcggcggcgggggcgggcggctacgtctccgcctccgcgccgccctactccgtcggcggaggctactccgaccagccgccctccgccccggcctactcgcagccgccgcccccacagccccagtacggcgccgtcgggtacccgccctaccaca

SEQ ID NO: 5412 - DNA, 881 bp, Setaria italica
  misc_feature (118)..(118): n is a, c, g, or t
  Peptide Sequence Number=SeqID_71386
aaaaatcgaaaccagtgaaatgtactgtaaactacaaatgaccccaatgcatacacagaaaactttggtgtactaagttagcatacacatcacctcagcagaatgttcagatgatcanaattttttaaaaaagcaacaagcttccactggactatccatttgcaccaactgccagctttcctgaacttgttattctctttgctctgatcaacacgatggtgagccattataacaaaaccacaccttttaagaaaggattttatcttgtgaactgtggtggaatgcgccaccaagacatatttgagaatatccaattgtgttcatgtccattcacaacagccattttttttgttggtgaagggtaatcttaattgaacatgtatgctttctcaatacctcccgcactcctgtcaccttgacaagtccccttgaccagtcctcttggtaccaagaatctctccttcaacctgctcttggttcagtcacaactatgttgaggcatgatgtgttctgcagtcgagcgcttctcacactcatgaccataacatatgcctaacgaagtgatcccacaagaagtttcatgttcatcacttcctcctgagttttctcatgcttcgccggtgtaaacagcttccagaaccctgtcgggtgctgccgcctcaccatttcctccttctccctgactagtcccccaaatatcctctcacattctgggtacggcttgacaaacatgttgtagaaccttctgcgactgaacctcacatagtgcttcatctcaacagggtccccgagcccgccaaccgatttcaagtgctccaccacattgtgccgcgggatgatccagttgtcgaggttcacccccaggaactctgggtactgaa

SEQ ID NO: 5413 - DNA, 749 bp, Setaria italica
  misc_feature (727)..(749): n is a, c, g, or t
  Peptide Sequence Number=SeqID_71387
tcactcagcgccgctcgcgtttgctcctctctgcttccaagatgtcgaagcgaggacgtggaggtactgccggtaacaagttccggatgtcactgggtctaccagtggcagccactgtgaactgtgccgataacactggagccaagaacctgtacatcatttcggtgaagggaatcaaagggcgccttaacaggcttccctctgcctgtgttggtgacatggttatggcaactgtgaagaagggaaagcctgacctcaggaagaaggtgatgccagctgtcattgtgaggcagcgcaagccatggcgccgaaaggatggtgtctacatgtactttgaagacaatgctggagtgatcgtgaacccaaagggagagatgaaaggttctgccatcactggacctatcggaaaggagtgcgctgatctgtggcccaggattgctagtgcggcaaatgcgatcgtctaatggaagcagctagttgaagtttatcagtagcatttcctcatttaagagagttcctagctagatgagcttttgatggccccaaggatgtttcgtggattgtgtttgtgttgccggatcgttttctctgttaactttgaaggcaattctctcggtatcgataagaacctgttgcttagcctgacatatggcagagtttaatcgtttgcaagttctgaaaacatggacaaattactactacggtaatacgaataaaaaaaaaaaannnnnnnnnnnnnnnnnnnnnnn

SEQ ID NO: 5414 - DNA, 377 bp, Setaria italica
  Peptide Sequence Number=SeqID_71388
gcgaaatggatcaaggcacgctaactttagctcgaggtgaagtcctgttctcgttagtaagtagcagagtagcaatagcttgagaattggtttgtcttacgatgtgtgtgtttgatcctgatcaagttaggccacctcctgctatcgctgagagcgtgtggcatgttgatccgccgcaggagcgccacagtccacaccgctcctctcacgagctacgcgcaacttgctagacccatcaccgcatgcttcggatctacacggccgcccctccgttccgccgcagcccgtagctcaaggctctggcagcccgccatcgcttcaccgcacagttccaacaagctcctctaccgcccattgacactcaatgcccatgcgcc

SEQ ID NO: 5415 - DNA, 1055 bp, Setaria italica
  misc_feature (1)..(81): n is a, c, g, or t
  Peptide Sequence Number=SeqID_71389
nnnnnnnnnnnnnnnnnnnnnnnnnnnnnnnnnnnnnnnnnnnnnnnnnnnnnnnnnnnnnnnnnnnnnnnnnnnnnnnnnacactttgctcagatcatgcattgcactctgattctgtacaaggatacaaggggttcgttcctccttcctatgtctctcgacctcaccaaacaaaggccacgaaagaagcaaccatggccgactcatcgtcaaaaccccagttagaatctcaaagcaaacaatctacctaaaggctagctaaaatctccacggctgttggagcctgaaaacttccggtgcttcggcgcaacagaagctgcaggagaagacctttgcatttgcatcagtctcctgttggtgcccgttgccggcttgtcgctgctcaggcgcaccagagggcgagcgagcagccgccgcccgacgaccatctgtgcaggagctcgcccacgcacagcacggcgtagaccaccacgacgagcttgagcaggagcgggaagtactgcgacagctccacgctcgacgaatgcaggaccatggcgactccgacgaactttgctcgccgtcccgatggcgacgcggcggcgatggcagagggtggcagcaccagcggtttcctcttggccacggcctcgcacggcggggtggcttgccgggcctcgccgtggagcagttcctgaggcgctgcacgtccttgctctgcagtggcttcacgatgaagtcctcagcaccggcgtttaagcatctgctgatccgctggggctcgtcttctgacgacatgacgatcaccgggatcggcttcagggggttcagcgccttgacggccttgagcaggtcgtagccggtcatctcgggcatgcagtagtcggtgagcaccatgtcgatggcctgctccttgccgtccttgaggccgaggaactccatggccttcttggcgctgtcgacggcgatgacgtggaatgagccggcgcaggagtcgctgctgagcaggagctgcgccacccggcgatccacggggagtcgtccaccagcagcaccctcatcaccccctcctcca

SEQ ID NO: 5416 - DNA, 1578 bp, Setaria italica
  Peptide Sequence Number=SeqID_71390
caggtctcgccggcggggtttggtctctagcgcaaatggcgccggccgaccgccgccggagccgctctcctccgtccaaccgccggcggagcagctcccctccggccaccgccacctccccctactttcccccggagctgatccccgaggtcgccaagcgactgacgagcctccaggacttcttcgccctccgtgccgcctgccgagcctaccgcgccgccctcccgctgaccgcgtccaacctcgcctcccaggcgccgctcctcctcctcgttccccaccggatctccaaaccagctgccctattccacatctcccatcgccgcctcctccgcttccgcctccctcgtacgcgcccagacaaccgcagcggcttcttccccctcggctgccgcgtcgccatctccgacagctcgagggattccagctgtcgggagctccgcatcgtccacctcctcaccggagagcaaacccgcctccccagacccaaggacgccttctcccgcatcctcctctccggggacctcgtcgtcacctggagattcttaggccgcacggttcagtactgccgccacgaggccgctggctggcgtgtggcgtcaatcagcgagccctatctccttgaggggatggccagtgtaaggggcaccctctacgcggtggttaccccaggttccccgttaagaatcccagtttaccgtcttgctcgtgttgagctatcggatcacaggaatttggcggaattggtgtttatcggaggagcattggatgcacggattctgcatctgcctgatgaaacagagttgtacttgtaccctgcagagtgccgcggtgagctgataatagttattgccgtggaatttgatccaagggtgtaccatgttttccagtggaagtctggggaggctaagtgggtgaggattactagccttggtggctgcacgctgttttttgcaaatcgtaattttgcagggtgccttggacgtgatcatccagggattcgaaaggactgcatgtactttaacgatgaaggtttatggcgtgagtattctttggttgatggatcttttcctctatctgatgtggtctaccctggagagacattagataaggatttcacgccagctggttggatatttccgagcatgtgttgacgccctcctgtgagctgagaggtgcagggaagttattgtccaaaggtacatgatgcttttggtgctctaccatgccttcatcagctagtcgcattcaacgttttgtaatggcaattgcaacagcatgttgatggccttcaatgtgaatgtaggcgtgtagccctgttacatattgaaccgaaaagcatgttcaacctgaatgtattggccaatgatgacaacatgaaactttaccatggtaagtagtttaagcacctatgtaagtgaagaccctttggaagcagatgtgtttgaatgtagatgttgagtagttttcttgtagcacatatgaagaagaactgctctgtaataatgtgcttaatctgcaaaaggtatacagattagtgcaatgctgcatttcataagtgaaaaaaaaaaaaaaaaa

SEQ ID NO: 5417 - DNA, 950 bp, Setaria italica
  Peptide Sequence Number=SeqID_71391
ggtaaagaaaataagattgcgaggagttcaattggcagttgccgagcctgagcgcgctcgccctcgccgtcgacgttgccggcggcgatgggaaactcacaggcttcaccggcgtccgcctccagctcccgcttcgccacggcctccagggccttctcgaagcaggagctggatagcctccgcactctattcagctccctcgcagcgcagtcgcagaccagtggccgtgccatctcacgccccgtcttcctcgagtactatggggtgcggggctcgttgggcgagagactattccggttggtggcgaaggagagtggtgggagcgatggggtcacattcgaggatttgatcatctccaaagcaacatatggaaggggaactcgagacgaggttgatgaattcatttatcaactatgtgacgttacaggagatggtgtcttaaccaggtctgatttggaatctgtcttggcgtccattcatgaaactatatttgaagaaaacaaggaagttggggaaggttccaataacagaccgtttgaagcattcctcaactctgcagtattttcgaaggatgctgaagcggtctcagagaagtctatgtcattatcagactttaggaactggtgcactctcttgccatcattgaggaagttccttggaaatttgttgatgccccctgattcaggcagaccagggtttgaagtaccactgcttcactatcctgaaaacatctccaccgatttgcttcttttaaataaagagtatgcctggcatattggaggtggcttttcccaacatgaggtgcaagaatggaagcttttgtatcatagttctcttcatggacaaagcttcaacactttcttaggcaaagtaacgaatggtgatgcgcagactgttctaattgttaaagatacagaaggatcagtttatggtgggtatgctgagactgc

SEQ ID NO: 5418 - DNA, 1880 bp, Setaria italica
  misc_feature (1863)..(1880): n is a, c, g, or t
  Peptide Sequence Number=SeqID_71392
cgatgctcttcgtcccgcgccaagtcgccctcgccgccgcctcctcctcttcctcctcccaggcccgcgccgccgccgccatggccaaggaggagcccaagaaggagaagaagagcaagagcaaaagcaaggcggcggccaaggagaacaccgccgccgccgccccgggaccgagggccgcggtggtcgcctccgtcgcggccttcctcgaggccggcgggttcccgcgcacgctcgccgccctccaatccgaggccgacctcgaggcaggtgcttggaggtcgtcgccggtgaacctggaagagttggtggccaaattcttggactcgagcaatcccactccgatggctgttgtcatgggaagcgatgagcaaggtaaagcaactgatggtgtagcagaagacggtggcaagaaaaagaaggggaagaaaactggtgcagaggctggtgaatctgagaacaaagtgagcccttctgctcacgagaagcccagtgaaaatgcgggtggtgaggccaaagagaagaaacagaagaagaagaaggatgaaacttcagctgcgaatgctggtggtgacaaagcaactgaaacagtgaggaaagatgatcataagcctgatggcaagaagaagaaaagcaagaagcaggaaaaggaggatgacgttgaagcaaggctggacaaggtggaattagcaataaaaaccaagtttgaggcagcagaaaatctcaatggggatggcgatatgtcaagagaggaagaaccgaaggttcaggatgatgatgctgacaagaacaatggtgctgtagaaaaggagaagaagaagaagaagaagaaagacaaatcagccaccgagacttcagtgaaaactgatgcaggagctgtgcctgctgatgctgatggtgccaagggaaagagtggcgttgtagagccagtgaaggatgataatgagaaaaaggccaaaaagaagcggaagaagtctgaccctgaagaaaatgttcaggtggaaggtaaagaggttgcagggaaagattcagtcccaaaaccagaggatgagaacaagagtggaatggagattgaagaaggtgatgatggaaagccatcaaacgagaatgcagttgctggcaaaaagaggaaactagaagaagttgaaggaagcaatccccctgcgacagtgaaagaagataacacagctaaccagagtttaaccaatggttttgcagaggataaaataaaccaggacagcaacataaaaccaagtaagaggcagaaacattcgtctgagccaaaaactgtgaatccttttcaacgggtgaagctggaggatgtcaaatttgcagatgaaaggcttcaggataactcatattgggctaagggtggtgcggatactggttatggtgcaaaggcgcaagagatccttggccaagtcagaggaaggggttttcggcatgagaagaccaagaagaagcgtggaacctacaggggtggacaaatcgacctacaaacccactcgatcaagttcgaaaattcggacgaggagtgatcacttagcttcccctatgatggaaggagtctacaacatttagcagttcaccattttttatggccattacctatcagtcttgctgggaggaagaagtgaggcgcggtgggtggtgctacgtggtaaagcggagggcaattgttgcaatgtgccggtttgttgtgatggacatcctgctaagcctgaggcgtggatgttttgggttgggctcactgatgtatcgatcaattttgctactgctgatgcgacataacgttgcaactacatgcatattgtgaacttacccgtgatgcgcaatcagtctgtactatttggttgccttgtnnnnnnnnnnnnnnnnnn

SEQ ID NO: 5419 - DNA, 253 bp, Setaria italica
  Peptide Sequence Number=SeqID_71393
aagtacctgagaatgatagctttgagcaatgttgctaagcaaacaagctttacaagtgcagttccaagataaacaacattgctcaaagtacctgagaatgatagctttgatccctatcaggagttaatgaaagtttttattgggttcattgatgtagctggactatattttgctctgacacagttgactcacagaaacatctctcagaatcataagttccaggctgttggtcttggttgggcttttgctgatt

SEQ ID NO: 5420 - DNA, 1158 bp, Setaria italica
  Peptide Sequence Number=SeqID_71394
tttttttgttttttttttttttttagtatgcaaccaatgcttttattcttgcattctgataagataactgaattatacgatctatacgctagatgatgcgactcaaacataggatatgaaatgcacagcaagattaaaaagaaaactctttccgctcaaatgccttgaatagcatctgttacataaccactcatttgaggcatggatttctgctctgcaactcacaacagatgattctaagtaaaatgttctataatcaaagacgaagaaagctttgtagcggaagggctcaaggatcatcctaattcttgacatacatcaggaggcaccttcaagagcgtcaaactgtaggtaaaactgagactgctatcgtcgactcactacaacggtctctgacaagccgagaacagctgccagctgatgaaagccataacaagcgaggagaatagctcgaagccaaccacctttggtgtctgccactccagtgatcttctcaagtaacttgtgatagatggcattgttgccaagagcagagcacatgcataaattattggaaccaaagtcctaggcttgttcttcctaagccacatcaatgatcccaatgcagcaagggagagggtcatcacaagattagcatttgcttcaattccttgaaatatgaactcccacgtaaattcaagccctcttgccccaatccacagaggtgccagtcggtgcagaaccgaatcagcaaaagcccaaccaagaccaacagcctggaacttatgattctgagagatgtttctgtgagtcaactgtgtcagagcaaaatatagtccagctacatcaatgaacccaataaaaactttcattaactcctgatagggatcaaagctatcattctcaggtactttgagcaatgttgctaagcaaacaagctttacaagtgcagttccaagataaacaacagccgcttttacagaagtgccgattgtatcatactctgacaggggggtggcagagtagtagacgacgtggggaccgaaggtgaggaaggcgcagttgaggaagtggaacaccgtcatctcgccgccgccgtcgtctccagcgtctgtgcagcggcgaggccgaggcgcctgagaccgtacgtgcgagacgattgggggagacgcgctgtga

SEQ ID NO: 5421 - DNA, 520 bp, Setaria italica
  Peptide Sequence Number=SeqID_71395
cctaactccaacactccccctcacgtgcagactctctcaggccgcatacatggagattggagtgagctgcaattattttatttaatcgcgcccgccaggattcgaactcgagacctctagctctgataccatattgagttgcatgcaccaactagttcaacccaaaagcttaagctgatggggagaggtgggcaattcacttatactccaacaggtaacagtaccagacaatgtaaactaaagagttttttggaaataggacaaatgaatcataccattgagcggactaatcgtaaagcactgcgatagaccgagtaatttggcttcagagcatgagcagctgcaacatagatagcagattgactgtaaagctcgttcggggaggacatctggtttcccagatctcatggtatcctcagctaaaccgtacaagacagttccgaggttgtatattgcccgatggaaatcaaattgcagctgctcatgctctgaagccaaattatcggtctaatcgtaaaag

SEQ ID NO: 5422 - DNA, 1417 bp, Setaria italica
  Peptide Sequence Number=SeqID_71396
tttttagttttaatttttaaatttttaaccggttttactttaaaggttaactaattcgtcttcttttcctttttttttgtaaacttgatacatcgttacagagaaataaaaccacaaactaaaggatgtccgatgcatctgctgtgaatacacaatagtgacacggccatttttacaaacgaaaatggacacatcaccaatcagtggaaagtatgagttacaattcaacatatataatataccctacatctagaaaaactgtgcgataaatcacagatggggagacataacaaatcaaaggagggcattgaactgataaggttgcagcagaatctccaaaacttcacgcctctatccagtggctgttttgcacttgcagccaaccaatttaaccagtgataataccggcaaggacatcgctctttcctcttgcaaaaatagtgtagactaggcgtatagcgtctagccagccgtcaagagcctcccaactatcggcgaccaagaatgtaggtccatgaattgtttctatacaaaggccagcaccacttggcagcgttagatcagcacatgctgataccgaaacaatatctgaaacatttattctgacaggctttctgcctctgtccatgtgcccaggggattgtgatggaggctggtcagaagcatcagcctgctggagtccctcatgattcaaaataaactgcgacctctcccaatccttgtgtggtgcaatggcgttgtttgctggaggagcagtcagataccccactttgagatatggcaaaggcaacattgagcggactaatcgtaaagcactgcgatagaccgagtaatttggcttcagagcatgagcagctgcaacatagatagcagattgactgtaaagctcgttcggggagacatctggtttcccagatctcatggtatcctcagctaaaccgtacaagacagttccgaggttgtatattgcccgatggaaatcaaattgcagctgaattgcagcacggaacttacttatagctgtttttatgatggtttgtttatcccgggcaggaacaattgcactgagctcctgtagcccaagaccccagttattgagagcctgtgggctattccaattaagctgaacagccttctcatagttcagtattgcctgcttccagagttcttcagcttcttttgtccgacctcgcattttagcccgatcagcaattgcaatagcccagttataatatgcatcataaagagttggacaaagtcgagtagcttcagcatactttttgcaagcctcctcaagcaacgcatctttggaggagctagaattgggatccacattgtctgcactctcctggaggactagagcccaattataatatgcatcagggtcatcaggattcctttcgattgcattcacata

SEQ ID NO: 5423 - DNA, 931 bp, Setaria italica
  Peptide Sequence Number=SeqID_71397
agcagcagcactggctattaacaagattaaatttgaagctgaaatgatatgaaaacatctcatttagctttggccaaatgttggagaaaataaacccaaaaaagggtcaataaggataagccagtgcgctctggtttcttgagcaacaagttttttttcttgaatggatatattagaacaagaaaaaatagctacgaaaatcataattctctaaaccagtaaaccttgatggtctttgtatcagttacatggcacatatttatcatccccttaactcaaactggagccttttattttttttatttatcatataatttgcaatcagatacatttaattaccgctgacctgtgctattccaattaagctgaacagccttctcatagttcagtattgcctgcttccagagttcttcagcttcttttgtccgacctcgcattttagcccgatcagcaattgcaatagcccagttataatatgcatcataaagagttggacaaagtcgagtagcttcagcatactttttgcaagcctcctcaagcaacgcatctttggaggagctagaattgggatccacattgtctgcactctcctggaggactagagcccaattataatatgcatcagggtcatcaggattcctttcgattgcattcacataccttttggcagcaaaagaaagaatcctttggcgcgagcggccttcctcatcaactccagttacactatttatcaagtccatcgctacatcatggtgggatgaaaactgctgtgtgctatcttggctgtaggacgagccctcggcatcagcggatccgatcccgttcccatccccgaacgcagatctcgcgctgccgccgccggaccccacggccgccgcctcgccgtcctccttgagctcgccgagggaatcccgcatggtgaacgggcggg

SEQ ID NO: 5424 - DNA, 563 bp, Setaria italica
  misc_feature (1)..(11): n is a, c, g, or t
  Peptide Sequence Number=SeqID_71398
nnnnnnnnnnnttttttgtcggtaaataatgcacagagaatttattcaactgccacggaaataatgcaccaagaatgtacacaaatcctctctatagaaccaaaatgtagtgcggtaaaagtacaatgcgacacccgcgggcagaacactaaccaccacccgcccgcggaaccaaagaaaccaatgcatcaccatcgtcatcatcgtacatcaagaatcgagcatagagccggtaaaattaaataacaacacgaaagaaataaaaaaaaggagagatgaaatggaaacggaggagcagcaacgtcgtcgaggcacggggagggatgaggtgacaacatcgacgggaggaggaggaggagatctactactcaaagcaggacggcgaggcccgcgcccgccaatgccacgagcgtggcgaagccggctgcgcgcgcgcctgcacccgagtcttcgttcggcgtcgtgcccgcgggcgagagcgcgggcgacggggacgtcgcggcggcggggctcggggtcttggggctcttcggggacgcggacggtgtcgccacgggcgggag

SEQ ID NO: 5425 - DNA, 334 bp, Setaria italica
  Peptide Sequence Number=SeqID_71399
tctgctgtcggcagcggccgcggccgcgtggtcgtcgtgtgtgttcgacgcgctggtgcggctcgtgtggcggccgcgcgcggtggcgcggcggctccgggcgcagggcgtgcgcgggcccgggtacagcttcttcgacggcaacctcagcgatatcaggcggctccgtgccgcgggcgccggcgtgaagctcgacgtcgccgaccacgacttcacccccatcgcgcagccgcagttccgggaatggatccccctctacgggcgcgtgttcttgtactggttcggctccacgcccgacatctgcgtggccgactacgccatggccaagcaggtg

SEQ ID NO: 5426 - DNA, 248 bp, Setaria italica
  Peptide Sequence Number=SeqID_71400
atttcatgagagatgagtagctaatggatagccatgtaccttttgttattagtatgccatattgaggactgcgccattgtttggtgtaatttctacttgtcctcccaagggaactgtttgctcactagtataagcagtaccccttagtcgtgataatatgcatcatcagattgtcatttgaagttggacatgctgtttcagcgatgtacagatttaaggtcgtccaagtcccaagcttacaatggccc

SEQ ID NO: 5427 - DNA, 375 bp, Setaria italica
  misc_feature (305)..(375): n is a, c, g, or t
  Peptide Sequence Number=SeqID_71401
cccccggcccctccgccgagcccccggcgtccaccacccccgccaacggcgccgccggcctccgccccgccttcgccttcgccgccgtcgccgtcgccgcggccgtctacgccttctagatgacccagtggtcctgatacccctctcctgatgtgtttcttgattgatctccccctcgctgttgtcttgctccccgcttcttttccgtcctcacattggtgtatcttctccgtacgagctgttgtaattatgaacattgatttaatttatccattcctccattcttaaattttaaaaaaaaaaannnnnnnnnnnnnnnnnnnnnnnnnnnnnnnnnnnnnnnnnnnnnnnnnnnnnnnnnnnnnnnnnnnnnnn

SEQ ID NO: 5428 - DNA, 964 bp, Setaria italica
  misc_feature (897)..(964): n is a, c, g, or t
  Peptide Sequence Number=SeqID_71402
cccacagccccccaaaaaatcccaaacccccaacggccatgtctccgctgccccgccgcctcctcctcctcctcctcgccgtctccgccgccgccaccgcggcgggcggcgcgtcgctcaagggcgcggcgaacgacctgctccccaagtacggactccccaaggggctcatcccggactccgtcgcctcgtacaccttcgacaaggccacgggcgccttcgagatccacctcgccagcacctgctacgtccacttcggctcccacctcgtctactacgagaggaccatcacggggaagctctccaagggcgccatctccgacctctccggcgtccaggccaagaagctcttcctctgggtctacgtcacggggatggtcgcgcaccccgacaagggcaccatcgagttccaggccggcttcgtctccgagtcgctatcggcgtccatgttcgacgaggtgcccacctgcggatctggtgtcggcgcgcagctacgcggcgccgcgggggtgatcggggagctcggcctgctccccgttgcgcaggcctaaacctcgagttgagcatccgcttccagcgacctccaggaccttcgagtttgctgtcgcgggaggcctagagtgcaggaagttcagctgtcgtctgttctgcctgtaaccatacctggttgttgctcccatctcaatggtagtggatcctctgtagaaatgtatatccatctgctgttcctgaacctgtgtaggtcgtagataaaatcctcaatctctttgtgctcatagtcccggatttcatgtatttgtggaaccatgagctgccccagaagtgaagcggcactagaacgatgccactgtttaattgatgcgtggttctgctgagcttatacaaaaaaaaaactannnnnnnnnnnnnnnnnnnnnnnnnnnnnnnnnnnnnnnnnnnnnnnnnnnnnnnnnnnnnnnnnnnn

SEQ ID NO: 5429 - DNA, 892 bp, Setaria italica
  Peptide Sequence Number=SeqID_71403
aagaaagaaatgaacggaataatggtggaggaaaaacacaatccaaaatcttcaaatttgtggaggcctcagatgtccagaaggggaagagtgtaggtcaaccacagcaactgctcttgtgcgaaagctcagatggagcacccttggtctacaatttgattggtcaaaacgcaactatgatgtatcacttccacacaacaagatttcagatcccctagctagtcttgccaaaaatatggctattccagctatgccttctggagaagaattcaagccagaagctgctatagtgaattattatggtccaagtgatatgctcggtggccatgttgatgacatggaagcagattggacaaaacctattgttagtataagtttgggctgcaagtgcatctttcttcttggaggaaagacaagagatgaagttccaacagcaatgttcctgcgaagcggtgatatagtattgatggctggggaagcacgagaacgcttccatggtgtaccacgaatcttcacagaaagtgaccaacaagaaatctctgcagtggtttcacaactatctggtgaagaggactgctttatcttggattatatcaaggattccaggataaatatcaacatcagacaggtctactaaagatcggattgattgcgacttacacatgaaagattggtgatgaatgttgctacttcgctgcagtccggtcaattcgcagagtacagtgattcgataagtggcatctggaataggaatgcaggatcagaagggacgcatcaaactaaccacaaacgtagcctattgggcaagaattttgtataatttggcaacccagggaagatatcagacctttgagcagaatttactgctctagtcaattagccatcggtagct

SEQ ID NO: 5430 - DNA, 865 bp, Setaria italica
  Peptide Sequence Number=SeqID_71404
gggctggaagtttcaatcctggcttccacgaggtgatagggcccgctaggacaagctccgccggcgatgtacggcgcttccgaccccgccgccgcggagcgcacggcgttccggcgggcggagaagcagtacaagctatacaagccgcccaacctcaagggcaggtccaggtccaggagcaagccggcaggcgttgagggaggcggccgcggtgacctatcagcggtagtcgacttccacgcgctgcttgcggccgatggggagctgcccgccgggatcggtcggcgtgactgcgccgggttcgaccgccccgtgttctgcttcttggaccggccaggattctatttcattcctggcgctctatcaactgaggaacaatgctactggattagggaaagcttgaaaacatttccacagccacctaataggactaatttgactgctatatatggctcaatttctgacttgttcattgctgctaaaaatcaaaagatcttggttcaagtggaaaatcctgatgtccaagaaagaaatgaacggaataatggtggaggaaaacacaatccaaaatcttcaaatttgtggaggcctcagatgtccagaaggggaagagtgtaggtcaaccacagcaactgctcttgtgcgaaagctcagatggagcacccttggtctacaatttgattggtcaaaagtatgtatccatcttcttccatggtggtgctgacaaccagcttatttccattattgcttgaattctggcttgcggtggtactgatatattctggtacattgtactgcagtaaagatttttttcttcaaaatgctgcaattattagaaatatgtctgatttggttcaatcatatt

SEQ ID NO: 5431 - DNA, 2265 bp, Setaria italica
  Peptide Sequence Number=SeqID_71405
tcctaaaaactggaatcaaaactcagccattcttcccctactttgaacatgacgttaacaaagctcctatcacccctagaatgttatagagaacaggtaaaacttatctaggtcagtcatacatacaaactgtatactggtccttggtgacatcttcacatctaactgctcagaacggatgagccttcaaaactcccgaaaccttatccgggtggcaaagtaacctggggatgcacaaaaccacatctcaccgaggctggtgtaactccagaaaggaagaagatagcatgttagccttcaagcggtgtgagttgggtttcatctggacatcacaagattgggaacctgcacaggcacacccataaaacactgctctccactgctcttgcacgcctcctcatcaggcactgaattcagctgaccagaacttccactggggctggatgagcccatgtctccgctgctgcttccactgctagtgtccgactgccttcttgaaccagatcttctactgcgcttccttggcctccacctcaagttatcaagcttcaaaacatttgtaaggtcagcaaagacacgtttattatcacgtgagatcttgctgacagaagatttttcatcacgcctctcatcaaatcgaaggccctcctccaattgtggttctggttttggagacatattgacatctaatggaatttgtttccgattcaaatcttcacttccagtgcctgtggcggaggtcagtttgtttgcgatatcttttctttccttcaaaggattccatttgttaccaacccactcaagggaatgcctcagctcatcttcaagaaattcagctactcgcttttctccaggaaaataaacttgtagatgcccactatctccctgccgcaacacaattccctcccaccaaccaccatgccaccacgcatcaacaatggctccaacattaaagcaagaggccttgctttctcccacatgttgtgggcgaaccattggccttccaaggaaacgtattcccagttgatcaggtttagcaaccctagtcagcataacccactcctccaagtttccagtttcgtcagcatcctggagttctaggtagcgcaccttgattttatcattatgcctcttcaggatcgaacatctaaaccaacatccccttataccactatcctgtgatagaacttccacttggcatccagggtacaagtatttgtcacccaaaaaactagatgcagaagcaccagaaccaaggaacttttgtggattagcgtcatcattgaatgcatcgcgcttcctcttcagccctccatctgagctgggtccaaatttagggaccttgaaacgcaccttcagagaggaagttgcattgaacatggtcctcagtactccctggctccagtagccttgaagttgtgtaacgtcaaaaggcttgacttcatcatcatctatctgccggcggcaaaagtaaggttgccacaagctgtatctggtaccactcttgaacttctcgtagtgctgagcactcaggactgcagccaatccatcaatgcattctacattgagatcttgacgaccaagagaaaagaaaatctctctgtcatcgacatccatgggcaacggaacaccaacctcatcagctttgtcaaaccattgcaccttgaccatgttgtatgaatttgtatcctcgtagagatcttccacataagcaataagtctcttcatctcttcactcatgatgtatacaaaactatgcaccgagatagtaattccccttcggcagaaagatttgtagtgcttcaaatgttgttggcaatgccatgcagaacccaaccatgtgaaatctttcgaaatttccctagaagaaacatcctttgaataagtaacctgagtgcagttaatgtcattgtcgtcgtatgaatttccattccacctattagctgatgagtaaccataattgcaacctgattgagtttacattcatgctgctgcttcgtttatctctattcccaaatgccaagcttaagcaattggcccaaaggaagccagcagctgcttccactgggtcacacctgtattctccataatccggaaacgagggaggacagccagtccacgacctcccgcctggaccgccacctcctcggggcgcctccgtccgcccccgccccagccgccgagggcgaccgtgacggcgacggtgccactgcgaccgctcccgcggctgccgcgagcgcgcggaggaaccgcccctgcacggcg

SEQ ID NO: 5432 - DNA, 292 bp, Setaria italica
  Peptide Sequence Number=SeqID_71406
ctgctgaagactctttccttacctcgcactcatgggcgatccccgccctatcatccatggagatgtcaaatcatcaaacatcctcattgattgtgactacaccgcgaaagtatctgactttggcgcttccatcctagcaccaactgatgaatcgcagttcgtcacccttgttcaaggaacttgtggatacctagacccagagtacatgcagacatgtcaattgacggacaagagcgacgtgtacagtttcggggttgttcttttggagctacttacacgcagaaagccatta

SEQ ID NO: 5433 - DNA, 263 bp, Setaria italica
  Peptide Sequence Number=SeqID_71407
gcgcacaaccggtacccggagctgtgggcgcgcgtcaaccgcgagttcgccgacgagtggagagccaacaacgccgcggcgacggcggcggaggagaaggacggtggcggtgacgacagcgaggacgatggcttggtgttcttcgtgcggtcggggttccgggagagctcccggtgggcgatgctgttctgggagggggaccagatggtgagctggcaggcgaacgacggcatcaagagcagcgtggtcggcctcctcagcgg

SEQ ID NO: 5434 - DNA, 3361 bp, Setaria italica
  Peptide Sequence Number=SeqID_71408
tacgtaccaatattgccctctcctctgcatccgcccttcgatctcaccgaggccgagggagaagacgactaggagtccactgttctagagaagaaagcggaggggagaagaatccaggagagcagagcagcaacagctgctcctgctgctgcggttggtggatcgaatcgatcgccgcttgatgctgcccccgtgctactgaggagagaagggaagggatctgagggaggaggaggatgtcgtcgtcctcgtcggtggtgtacgaggggtggatggtccgttacggtcggcgcaagatcggccgatccttcgtccacacccgctacttcgtgctggagccgcggatgctgtcctactacaagcgcaagccgcagcacaaagctgacaaggtcggggggaagctccccatcaagtccctccccatcgacggcaactgcagggtcgaggacagggggctcaagatgcaccacggacatatgctttacgttttgtgcgtttacaacaaaagggagaagcacaaccgcatcacgatggcggcattcaacatacaggaggctctaatttggaaggagaaaattgagatggtcattgatcagcaacaaggagcagcacagagtgatggcaacagggcttttagctcatcgcagcaaaaggctagcttagaaaatggaaggaagtcttcttcctctgaccacgaaagtcagtacagtcatgaagaggaagaggaggaggaggaggagaatcagcgatcattgctaaggagaacaacaattgggaatggccctccagaatcattgtatgattggacccgtgaaaatgatttgggaatatctaatcagggaagccctgaccaagttttctctagaggacactggcgccttgtcagatgccagaatggcctccgcatttttgaggagctccaagatgttgattaccttgcacgaagctgtagcagggcaatgaaggctgttggtgtggttgaagcctcctgcgaggctatatttcagcttgtcatgagcatggatactacacgttttgagtgggactgcagcttccagtatggtagtctagtagaggaggttgatggccacactgcaatactataccataggctacaactggattggttcccaatgtttgtttggcctcgcgatctttgttatgtgcgctattggcggcgtaatgatgatggaagctatgttgtgctgtttcaatccagagagcacccaaactgtggtccacaaccaggatttgtaagggcagatattgagagtggtggcttcaacatttctccactgaaatcccgtaatggaagaacccgaacacaagtgcagcatcttatgcagatagatttgaagggctggggggttggttatgtaccttcgtttcagcagcattgcctccttcatatgctgaacagtgttgctgggctcagggaatggttttcacaaagtgatgagagtcaagtgcttcctaggattcctgttatggtcaacatgactccatctgtttcttcaaagaaaggcaaaaaagcacaagagaatactacgcaaaccagcctaccgatggatccaagcagacattctacagttcttgaggaggagtctgatgaagatgacgaatttctgatacctgaatctgaacaagagccatcaactcgtgagaatgctgcagatgttagacagccagagccagggcgggatgaggaggattcagatcagattgatttatctgggttttctgggaatttacgtcgggatgaccgtgataacagtcgtgactgctggagaatatccgatgggaacaacttcagagttcgaagcaagaattttgtatatgacaaaagcaaggttccggcaggaaagcctcttatggagcttgttgctgttgactggtttaaagatacaaagcgaatggaccatgttgctagaagaaaaggctgtgtggttcaagtagcggctgagaaggggctgtttgcattggctataaatctacaagttcctggcacaacaaactatagtatggttttctacttcgttacgaagaaactgataccaaattccttattgcaacggtttgttgatggcgatgacgaatttcggaatagtaggtttaagctgataccatcagtacctaagggctcatggattgtccgccaaagtgttggcagcacaccttgtctattaggcaaggcagttgacattacctatatccgcggagcaaattacttagaaatagatgtggacattggctcgtctacagtggcgaatggagtcttggggcttgtatgtggtgtgataacgacgctagttgtggacatggctttccttgtccagggtaatacatacgaggagctcccagaacggttgattggggcagttcgcatgtcgcatattgaattgtcatctgcagtagttccggtgcttgaggattaaccaaagctcgtactgcattgggctgccgctatgaagcggctttgcttgaatctctgacagacgtatacagcatactaggaaacatagataaaggtggctccaggggccggtcctcatgcaaccttcctcgtcctgtgagtgagttaataaactgaggatgtttctatgcatgtactatgtattgtattgcacatttaggcattgcaaacctgacgtgaattgtgtaggtattataatgggttgtgttggagatataaaagagagagagattagagttaggaatagaagcagggaggggctaagtcaggtttgaataaacggggggcacattcagagttgcttgggactagtagtaggaaaagaattgagatggcaatggatatacttatcgaaatcgtaacttgagacaccacaccattctccattacttgtattgttcttgtgtgtaattctgtaacgtaatcataaaagcatatggtatgtacgtgtactgctgtaatgtactcgtaccacgtaccagtcgtatgtatgtagactattaacgtactcccttttctaaacaagtaagtattaccatggacattactgaacaaaatgactcaaagccattattttgtttgctctttatcttctttgcatacatacgcatgttttgggtgtattgtgcgtaccgtacactagtttgaaaggacaatccgctaattatgctactcatttctagttgttgctcctgatagacgtgtcttgtaatactaatactatcattgttcattgttgttgtgacttgtgaacaagcgatgatgggtgatatcaaatgctgacattgcattttccatagttttgttgatgatgcaactatgtttacttttgcaggttcctggcacaacaaactatagtatggttttctacttcgtttacgtaagaaa

SEQ ID NO: 5435 - DNA, 338 bp, Setaria italica
  Peptide Sequence Number=SeqID_71409
tctccggtgcaagtcctccatctgattgcataaatagcacattcacctgttcagaacccccttcaaatctcgacatgaatcctgataagtactccttgatgactggtgtcagatacgcgtccacgctagccgtcaagccccgaggtaccgcacggaccatcggtgtcagcgacgaagacaaggacacatgcttgaatcccatctccagagctaacttctcaaccaggagctcatggttaggataagtatacgaatgcatcaacaccactgccaagcatctaatccctttatcaagcaaacctttcaacaaaggcttcaacgtttccacatcgacaggc

SEQ ID NO: 5436 - DNA, 1230 bp, Setaria italica
  Peptide Sequence Number=SeqID_71410
ctatccaataaaaatagattgtcagttccaacagagctgcagtcctcaggggttggtctgtagtgtattatagcaccatttgcaccataaccacttatggtgtcgaagcttgtctctataaatccatcttgcttttgacgaaattcaagaagcttttcagcaacttctacctctgtaagaggcacacttttaccaacttcctcctctagccagcaccagaattcttaggtgtgaattcttcattccctcaatctctgcctcatttttaactgacttggcaagtgttaccggtgaaacattgtatacaacatttaatgctccattctcaacaacagggcctctagttgttggcttgtctgaagatgcttctttctctccaacctttttccctgattttcctttctttttcatatgtctatcgcaacttgatataaaagcagtaactatggctgcattcatacttgaagaatccaaccagagctttgcacctttctctgccagtctttcaacttcagacacaattgcttcatatggcttaagttttactccagctttctcaaggtgcaccaaaacatcttcacaaactttgttgctatccacaaataatgtagcagtgctaacttccacaataagatagctataaaatactggtgaatgagggacatcacttcctcgcatgttcaacaaccaagcaacttcatcgagcattgaaattaccacagcatcacacccattttcagcaaggtgtgatctaatgaacgacaattttgatggcacatcaataccagcatatttgatgttgtgcaccctagttggttcttttgggggctttggccttgcatctccccatatctcatcaattaggttcatgccttgaaccaaaaccaactcatgattcttatttgagattgaatcctttaattcttcagcagcatcaaatgagaaaagaaactgcatccgggtcaataccaactcggcaaccagacggtaaaacatcattcaaccactcactagtagttggaacaccatgatttccactgcgcataagtgtccattcatggctcaattccttctcagcctgaagaaaatatctgccatcagtccagagagcagccttatcttttgtgaccacagctgtaccagcactgccagtgaagccagtcaggtatgcacgcctcatgaagcattctgcaatgaattcgctctggtgggcgtcctgtgaggggacga

SEQ ID NO: 5437 - DNA, 363 bp, Setaria italica
  Peptide Sequence Number=SeqID_71411
cggcagcgaatcgaattcctgaagcagctagaggtgaagcgcatggagaatttcgtcgaggcccatgtgaagcttgctagggcaaagcgccctaagaagactaaagtgggtacaactgatggtgctggtgcaatggagttggttgccactgttgcttcgctgccttttgtctccacctccaccctcctctgatgttgggggaagcgttcaggtataagtccaaactttagattagcatcaccatagaatgttgttcatttatttcgttattcgaattacaagtttataacattgtaatcctaaagtagatatgccaatgctttagttactgatgaggtcagtacgattattagagggaataac

SEQ ID NO: 5438 - DNA, 1716 bp, Setaria italica
  misc_feature (1671)..(1716): n is a, c, g, or t
  Peptide Sequence Number=SeqID_71412
atattcaaagctcaagagaatggaggtactccctccatccaaattgcaggttgttttgacttttctaggtgcatagttttttgctatgcatttatatgtagtgtatgtctagatgcataataatatctatgatcctagaaaagccaaaacgacctacaatgtgaaacggagggattagttgtttacatgtagttgatcctagattcctagttgagctgagtttgacaagtattcagtgtcaagtttgggcacaagccatgcttgcagcttagtatttgatctctcattcctaatgtgcattaaaaggtagattttaagaggcttccaccatgcttggtacgagattcgtggatgaggtatactggtgatctgttaagattattttggttttcttatttgaccagagtattctttgatccatattattttactgctgtatttctggtgtttatgaatcgaactctgctgcgtgaaaaatttggaatctggtcttgtcgcaatttgtgcaatgtgttacccacaggttccacttgtactagtgttttgtgccataagatgtttgtttacagtaagaggagcttgtaacttttcagttgttgatcttgtaacgaaaattcaggctaactcatgggggtattatttccaggtccttagcaaaccattctgtctggatgctcttgctgttatcaggcaacagattagtgtccgatacttgtctaatacctatgaaaaccacgtgttactgttctttgaaatttaataaagttaaagcttctgacagcatataaccttaaggagagttcaggctagctaaaacaaaccgaagtaccgtgtatttaccaggataccaccatactagttgaatttggatccctgctttgtaggcctggatattgtctaacacatatcagggtctgaggtccaggtttattttctgtgccctagtcctggctatctttcggttgaagtgcttgtgcaatcactattaaaacttgtctcttgaacccaccttctctatatacaacttgaagctcaataagccactaagccataggtaaagtaaattgtgaatcggactgtcagacatttcacatttggacgcctctataattgagaacaagaacgatatcacaaaccgattagaggttgtgaaggctgattagtccttaactaatgaggctctgaagaacaatgatttattgcttgctcttttaaaactacaagtgaaacttgccttctaaatagttatcttctctttcataagaaaagcaagttatgtgacatgttatttagcatttgtcgaagaaaaatatgcctcaaaattgtgattttattagtacttttctcttagtgatgtattgataccttactaactaaattctctttctgcagatcatgggatggcgttctctgcagtgaagggccccttggtagcgaacaatattgtcgttggggtattatttagtccgagcagttcttctgaggttcattcagtttgtaatttagtatatgaaggttaattgaggactagaaattcttagtgtaaagctatgttggcggtgtttttcccggctctttacctgattgtttaattgacgatgtagctcagagtgtctgaccttgtctccaaaaatatggtgaatgaaaatggtgtcgaagtcatttaacctnnnnnnnnnnnnnnnnnnnnnnnnnnnnnnnnnnnnnnnnnnnnnn

SEQ ID NO: 5439 - DNA, 1437 bp, Setaria italica
  misc_feature (26)..(26): n is a, c, g, or t
  Peptide Sequence Number=SeqID_71413
cacgccaccaccacgacttccgtgcncgtcgtctccccgggctagggttcggtgcgagatctgattccgggcgccgccggaggaggggatggaggtgagggagatggcgatggccgcggcggcggcggcggcggcggcgggaggaggagggggcaagctgccgccgcccaaccccaacctgccctacagggaggactgctggagcgacggcgagacggccgcgctcgtctccgcctggggcagccgctacgtcgagctcaaccgcggcaacctgcgccagaagcagtggcaggaggtggccgacgccgtcaactcgcgccggggagcctccgcgcgccgccgcccgccgcgcaccgacgtgcagtgcaagaaccgcgtcgacaccctcaagaagaagtacaaggccgagcgagcccgcaacgcgccgtccggctggtccttcttccatgagctcgaccgcctcgtcggccccaccctcagcgcctccgcctcgaagaggcccccttcgtcgtcgccggctactcaattcgccatgcccatgcccttgcatcccccggccgtgaggaaccacgcatcgccttcaccatccccgcctccgcctatggctttgccgctgcccaactaccaccaccgtaggtctccgcttcctgctgctgctctgatccagaaggaagctgcagctgcagccgcacctgtgtctgattcggaggactctgatgatgtgggtggtaacaataatcacaattcacagcggtcgccgtcgcactcggtgtcatcactctctggcaataacaagaagcgcagcagagatgaggctggcagtggtggtgacaaaggttgcaaggagctagcaagggcgatcgaggcttttgcggagatgtacgagcgtgtggagagtgctaagcaaaagcatgcattgcagatggagcggcagcgaatcgaattcctgaagcagctagaggtgaagcgcatggagaatttcgtcgaggcccatgtgaagcttgctagggcaaagcgccctaagaagactaaagtgggtacaactgatggtgctggtgcaatggagttggttgccactgttgcttcgctgccttttgtctccacctccaccctcctctgatgttgggggaagcgttcagatcatgggatggcgttctctgcagtgaagggccccttggtagcgaacaatattgtcgttggggtattatttagtccgagcagttcttctgaggttcattcagtttgtaatttagtatatgaaggttaattgaggactagaaattcttagtgtaaagctatgttggcggtgtttttcccggctctttacctgattgtttaattgacgatgtagctcagagtgtctgaccttgtctccaaaaatatggtgaatgaaaatggtgtcgaagtcatttcctattcacgtctggaactggaaac

SEQ ID NO: 5440 - DNA, 1900 bp, Setaria italica
  Peptide Sequence Number=SeqID_71414
gtgggaggcgggagaccatcccggccggcgccagcaaagctaagaagcagatagtcttcttcgacgcagcgccgccggtgtcgcagccgcagccgcagcagggcgggagcgtcgttgagaagggggagagcgagaaaccgaccaaggaaggcagcggcaacgcggcgctgtcgttgctgaggagggcgacgaagaagacgctcgcggcgctgtccaacctcccgcttgccatctccgagatgtttaccatcgccgctctcatggccctgggcacggtgattgaccagggagaggcgccgagctactacttcgagaagttcccggaggacaacccggtgttcggcttcatcacgtggaggtggatcctgacgcccgggttcgaccacatgttctcctcgccggtcttcctcggccttctagcgctcctcgcggcgtccctcatggcctgcacctacacgacccaattgcccatggtaaaggttgcaagaagatggtcgttcacgcattcaggagaaagaatccggaagcaggagtttgcggactctcttccccgagcatccatacaggatttgggagttatcttgatgggtgccggatatgaggtattcaccaaggggccttctttgtatgcctttaaagggctggctggtcggtatgcacctatcggcgtgcatttagcgatgcttttcatcatggctggagccacacttagtgcgacaggaagtttcaaaggctccgtcgatgtgcctcaagggctgaattttgttataggagatgtgatgaaacccagaggggtcctctctgttgcgccagatgttttcaatactgaagttcatgtcaaccggttctacatggagtactatgatagtggagaggtatcgcaattttatagcgatctttcacttttcaaccttgatggtaaagaagtgatgaggaagactatcaaagtgaatgatcccctgaggtatggaggaattactatctaccaaacagactggggattttcagcattgcaagtgaagaaaaatggcgaaggacctttcaatttggccatggcccagttgaagctgaatggcgataagaagctctttggaacgttcttgccacttgaagactcgaacgcttcaaacccgagtgtcaaaggaatatcgatgcttgctcgtgatctgcagtctattgtgctgtatgatcaagatggtaagtttgtaggagttcgtcggccaagctcaaaactccccattgagatcaatggtaatgaaatactcattgaagatgctattggcagtactggactggatcttaagactgatccaggagttcctattgtttatgctggatttggtgcactcatgttaacgacttgcattagctatctttcacactctcagatatgggcattgcaagatggaagtacagtagttgttggagggaagacaaatcgagccaagcttgaattttctgaagagatgaaccggttgcttgataaagtgccagagttgatcggtgccaatgagaatgtagtagatagcaaatcgactgccacatgaaagcatttttttcttcagttgagattgctgaagacgcagatggcgactcaggtgaactgaagcttgaattcgcagaatggtgccttcgagaacagaaaatttcatactgtctttcagtagaaggtagtacatgctgcaattggactcagcacagtgtcgagtcagaagatcgctgtacaagtttcatgctcgtaaagccttctgttgttgctgctgcaaagaaactaaactgatagcttattgtattgctatagaaaaaagtggaaaactgtaaccttgcttctgtaactgaattttttttgcggagcacgtttcaagaatgcaatagggagtcattcagattcacatcaaaa

SEQ ID NO: 5441 - DNA, 278 bp, Setaria italica
  Peptide Sequence Number=SeqID_71415
gtcggcactggtcaaagcggcggagcacctcggggtcttgcatggatagcacgaagcgcgatagcgcctcgaggtagagcgccgcctggtaacccccggcggcggcggcgagctccgaaagaacgccccgacggaggcggttggcctcgagcgcgacgcccttgagctcctccaggaacgcctccacgtcagcggtgccggccacctcggcggccacgaaggcctcccgggcccggcggaggcggtcggagacggcggggacggcggcgcggatccgg

SEQ ID NO: 5442 - DNA, 330 bp, Setaria italica
  Peptide Sequence Number=SeqID_71416
tagatcaaacgcgcgggaggtggtggaatgcttggatcccctgaggtgctcgcgcagcgtcaggttctcctccctcatcatgtccatggacgacgcgagctgcctgatgacctccctcttctcctcatccttcccggcgagctccgccttgagcgccttgttctcctcggctgccttctgcagcgccgcgttctgctccttgagcctctcgatctcggagcgcaacagctccacctgctccttctgtcgctgctgttcccgcaatgacaactccatcttgatgatctcctcgcgcatcagctccacctggctctttctgtcgctgctgct

SEQ ID NO: 5443 - DNA, 416 bp, Setaria italica
  misc_feature (325)..(325): n is a, c, g, or t
  Peptide Sequence Number=SeqID_71417
ggtctaattgttggttggtcaaggactcagctgagctgtcacggtctcgggaggctgttgatgtgcatactacagaggtggcgcgtggacctgcagtggcagtggccgcttcagggcagcgggcaacatggtggaattgctgtgggctttttgatgcattttctggttcagggagatagatgaaggtgagatggttctgtgtctcatggttgtgtttgggtaaatatgaatgacatcgaatttcagtaggcattctatcattataccaatggaagtggtattggggaatatgctgctgagttttactgattatgcattcgaaacncgaggtgcatatcttagttcattgtgcatagcttaattggtgagatcattgcttgctgttcgacatcagtgtaagttagatggaaataaaa

SEQ ID NO: 5444 - DNA, 1289 bp, Setaria italica
  Peptide Sequence Number=SeqID_71418
cgtcctcccatcgctttgccccggcgccccctttaccctccgcgccgcgccgccccccccttcctcgaatcgaaatccctctccgccatgccgaagggcgcgaaaaagcgggccaagctcaagaagcagcagcaggagggccaccccgacgatggaggcaacaacgccaacgccagcaacggcaacggtaacggcagcgacgacaacaacgccttcagccgccgcgacggcgaccaccacctgcggatcccacccaaggcttctcgcgtggacgcgagcgaggactccatggagagctccgaggagatggtgacgcccagggccgccgcgtcggaggcggaagaggaggagaggaaggccgccgcggccgaggtgctcgtggagcgcgctgtcccgccggaaacggttgggcaggaacgcgagggtaaggtggatgcggcggtggaggtgcaccccgtggcggcgcaggaaccggaggtaaaggatgtgatggtggccgaggaatccgtggtgcaggagccagagtcggtcgaggcatccgcggtggaggtaccagaggtgaagagggaggtggccaaggtgcatccggtgcatgaacctgagccgaaggttgatgaagtggtggtggtcgagacgcctgtggcacctgaggtgcaggaacctgaggtgaagggcgacggtgccaatgttgtggtgcaggaaccagagactaggggtggcaatgtggtggtcaaggactcagctgagctgtcacggtctcgggaggctgttgatgtgcatactacagaggtggcgcgtggacctgcagtggcagtggccgcttcagggcagcgggcaacatggtggaattgctgtgggctttttgatgcattttctggttcagggagatagatgaagggttggaacttggaagtcaagaagacggaaaatgctacattgttcggttcaaagctgatgggcagtttgtaactagatttggttgaatagtcacatgaacgatggggcagaaggatttcgaataacatcgagctgatgtttctacttcctcccttccctgcatttctgcgtctgtgcaaagttacaccctcctggttgtggttaatattcttgatgtccttggcatcccgaacgcccctcttccctcccttgtctagtgtgtcgtctaggtcctggtcttgtagcataagagttgaagtgggtcgaccgtaaagaaattttgttgtttctgcttttatacttattttcctggggtacgtatcatctgccatgcccctttctctcagggttta

SEQ ID NO: 5445 - DNA, 671 bp, Setaria italica
  Peptide Sequence Number=SeqID_71419
gtcctgcgcaaatatgattttgtttttcagctggtatgttaaagcagctcttttgtttcttatgcaccacaactaattgaataatggctactggtgttccacattagacttttttccctcattgttaggatgaaacggaagatatgtttgttgtttctgtcatactagtattcaagtatttgctttaacactcttgttctctcctgaacgcagggttggaacttggaagtcaagaagacggaaaatgctacattgttcggttcaaagctgatgggcagtttgtaactagatttggttgaatagtcacatgaacgatggggcagaaggatttcgaataacatcgagctgatgtttctacttcctcccttccctgcatttctgcgtctgtgcaaagttacaccctcctggttgtggttaatattcttgatgtccttggcatcccgaacgcccctcttccctcccttgtctagtgtgtcgtctaggtcctggtcttgtagcataagagttgaagtgggtcgaccgtaaagaaattttgttgtttctgcttttatacttattttcctggggtacgtatcatctgccatgcccctttctctcagggttgtcacttgtaaggagtatatttgttcaaacaatttgagatgttctttgcagagcctttagtccgctga

SEQ ID NO: 5446 - DNA, 1250 bp, Setaria italica
  Peptide Sequence Number=SeqID_71420
actacggacgtagacccaaggggcctgccgccgaaacgcgacggtgtgcgccgcggggtgcgactacaagacggtgcgggaggcggtggcggcggcgccggactacggcgatgggtggttcgtggtgcgcgtgaaggagggggtgtacaaggagacggtgagcgtgccgtgggagaagacgaacgtggtgctggtgggcgacggcatgggcaagacggtgatcaccggggacctcaacgccgacacgcccggcgtgtccaccttcaacaccgccaccgtaggcgttctggctgacgggttcatggcgcgcgacctgacgatctccaacacggcgggtccggacgcgcaccaggcggtggcgttccgctccacgggcgaccgcacggtgcttgacaccgtggagctgctgggccaccaggacacgctgtacgcgcacgccatgcgccacttgtacacccggtgccgcgtctccggcaccgtcgacttcgtcttcggcaactccgcggccgtgctccacgacacggccctcgtggtcctgccccggcagctgcggccggagaagggcgagaacgacgccgtcacggcgcagggccgcaccgacccggcgcagcccacggggattgtgctcagccgctgcgccgtcaacggcagcgacgagtacatggcgctctaccgccagaaacccgacgtccaccgcgtctacctgggccggccatggaaggagtactcccggacggtgtacctcgggtgcacgctcgcggagatcgtgcagccgcaggggtggatggcgtggaacggggacttcgcgctccggacgctctattacggcgagttcgacagcgccgggcccggcggcgcggcgagccggagggtggcgtggagcagccaggtgcccagggaacacgtcgacgcgtacagcgtcgacaacttcatccaggggcacgagtggatacccaaagcgtagctacactcttcatgtagagaaagagaatgtatgtatggtgaacgtgcaaccgtgccgaacaattgacatggtggccctggcgttgcgtattgcagagttatggggatggagcgaaagaacaccaataaacctgtggctatcaaacgatagatggtggacgagaacccggcaagagtggcctggcagaaatggcagggtgaagtggtggcgtggcagggcagggaaaaatgacaggcagatgatgagctcggcgtgcggtttccgcaattagcaggtcctggcaaac

SEQ ID NO: 5447 - DNA, 346 bp, Setaria italica
  Peptide Sequence Number=SeqID_71421
accttggccttgcgcggttacgcttccccctcttccgtcgatccgcttgccggcttgcccctttgccccaagtcccccgcaatccggcgtcgcagcgcagggtccaaaaattcggaatcccgggggaagatggctgcctcttgctccttccgctccgtcgtccgggcgcctccgctctcccggaggttcgccaggagcgccgtgcgctgccgcagcgccgccccgcctgatgccggtggtaccgcccccacctccaagcttgtcgtggaggtgaaggaacggctggcgagggagcacccaggcctccccagggcaggaacgggagggacgatgacgacatgatcct

SEQ ID NO: 5448 - DNA, 844 bp, Setaria italica
  Peptide Sequence Number=SeqID_71422
caagcgggggcgaggacctccaaggccctggagtgtactccatccaactcatcagatgccatgcccgttgaagctagcaccacgcagcagtttgccgcgcttccggtgaagtacgaccagcaggactacctgtcaatgctcgcattgcagcaccaccagcaagggaacctgcaggggctagggttcagcctctacagctccggagtgaacctggatttcgcaaactctcatggaactgcttcatccatggccaactgctacgccaatggcgcctcacatgagcagcaccagcaccatcagcagctgcaagatcaccagcaggatcaggcgcagcaaagctccaacagctgctcctccccaccattcgccatgccgatagctttcagtgggtcctatgaaagctccatgacgccaggcccctttggatactcgtacccaaatgtggcagcctttcagacgccgatctatggaatggaatgattcggggtggtggctgctggcatttggcatatgcaaaagggcagaagccatgagatcaagactgacatggctctcacacaaaaaacataaagggagtgaaagagtggtaccagtaaggatgatggagacataggaagcagcatgcagtgtgcagtagagacaatgacgatcgagtcagagacggaggagagtactcgacctgctaacaaaatgatcgatatgcagctagctatagcatatttgctttcccttttgtagctttggttttttttttccagcttttatctgtctgtcgtcgttgctgagctttgttgccctcatcagcttcctgcctttgaagctttcgctttctactgacatgatt

SEQ ID NO: 5449 - DNA, 1061 bp, Setaria italica
  Peptide Sequence Number=SeqID_71423
ggtcgggacgttaccgtaaagaagtgggttgtaggacacgttgaacctgttcagctccgtgagctggctcaggctccccggcagctcgccggagaagttgttgtaggacaggtccatcatctcgaggcaccgaatgcggccgatctccgacgggatcgcgcctgagatgatgttccgcgagacgttcagcacgacgagaggaagccggctgatctctgtcggcagccgcccggtgagccggttgttgtcgaggtggagcaggctgaggttccgcatcgccccgatctctggcggtatctctccggacagccggttaccggacagctgcacgtatccggagatcgtgttggacctcaccggcgacgaagagttggtgcagatggggacgatgccgtagcccttgaggatccggtcccatatgctgcggcagttctcccgcgtcatgatcgagtacacgaagctgaacgggggatagctcgccgggatccagcgcttcatggcctggcactcgccggagccggcgagcacggctgtatctttcctgttcttggcgaacgtagggccggggttggtccctatcgctgccatctccggcgggatcttcccggtcaactcgttgtcggccaggttcagccagagcaagctggtgcatttgccaatttccggcggaatctgtccagagagccggttccccgcgagcatcagccacaaaagcgacgtcaggttccccacggtttccggtatcccgctggatagctgattgtaagacaggtccagtgcctggagctcggcgagccggccgtacgccggcggtatgcttccggagaattggttgtaggcgagcatcaggtacttgaggctcttcatgtcggccaactctggagggagctcgccggagaactcgttgaagctgaggtcgagcctggctagcagcggtagccggagcacgccggaggtgacgatgccgccggtgtagttgttgtggtgtagcacaaggtacctcaagctcgcaaacctgccaaaggtgtcttgcacgttccctccaaacatgtttttgctta

SEQ ID NO: 5450 - DNA, 281 bp, Setaria italica
  Peptide Sequence Number=SeqID_71424
tcgcgccatggaccccgtggagccgctcttcctgggcggccgcggggacgacgccggcgacgcggaagacgccgagcccggcctccacacgcagtagctctccggagccgcgccctccaggccgtccgccctgtcgtcgtccgtcgccgcggacgacgacgacgacgccgtcgacgccgtggagctggtggacgagttccgcgcgcgggtctcctctaggaagagccgccctagctggcccctcacccgcggcgccactgccggaactggaacggaccgcg

SEQ ID NO: 5451 - DNA, 249 bp, Setaria italica
  Peptide Sequence Number=SeqID_71425
cttgctggtattgatgccgggtctctggtggtgactggtgaccatccaccattcttatcgcgtaatctcgcaggcgtgctgcagtactgctgccatgtaccctgtacaagatgccgttcgttttcctgctgccggccgccgttcccgttcaccatgctctgcgcctcctggccgcctccataacttcccctgattttgtaggtggtgcaggtagtggtggttgtgcctttatgacatcctccacccgtc

SEQ ID NO: 5452 - DNA, 345 bp, Setaria italica
  Peptide Sequence Number=SeqID_71426
aaaacccctcttgcatgcattcagtgacatgtaacatgtactaaacaagtttttagttacaatttaagttagaatgtgctccactacaagcttctcctcaactcttctgcatagtcccacaagtaattgtaccgttggacctcatctccatgaatagaacttaaaatcagccttattgctctagcaagcttgctcttggaaatggtcaagttcaaatcttttggactgtcttgacaaacctggtgatgctcatcttctcattggctctaaacaaatcagtgtacttactaaacaaccacctagaagtgcacctcctaagtatgcactctttctgacaattgtacg

SEQ ID NO: 5453 - DNA, 863 bp, Setaria italica
  Peptide Sequence Number=SeqID_71427
tttttttttcggtctttcaaatgtaacctccatttgtcaaaattctgcgcaaccttcccgtgttgcctagttttacaaacttgactatgggacatcaagcttgaaaattacaataacgcacacaagaatggggaataccagcggcagtctactcagcatcttcatcgctattttgtgatgaatctgaatcctgaccaaacaccatttcatcgacttcttcctcttcctcttcctcctcggactgaatagcagcagcagcatcttgaatctcctctgatggctgctcagatgcgttattagcaaccttgtcaacctgagcctttattagccgaagccggccagaaagcttcagcagatcttcagttgcggagtatctttctgaacacatcttctcaaggttgctaatcagttttgtggatttctcagagtgaataaaacggccatgaacaactaataggcagtatatccaccgcaaaacaagctttgtgctaccagatctcattttccatgcagatactaaattttcaaggagtttgcaagcatcttcaggtttcaatgatcttagatgcactcgaatcttcttgctgggtaaattagcatcagcttttatgctgccatcaccaaaaaactcagaaaaaatattagttggaatgccaggatggccttcaatgctctgatctactccagtatcaaggacaccacactccctcatcatgtcttcaatgcatataccgtcatcttcgattctttgcacaggaactcttttctgtatagatcttgctgtggtgatgtcactatgaatggcaggctcaatgtcaccactgggttttgtcacaccatgtttcctttttctttttccttgc

SEQ ID NO: 5454 - DNA, 1101 bp, Setaria italica
  Peptide Sequence Number=SeqID_71428
gtactaagtaaagtaaaaaaccaaataacttttaagaaaaaacttttaaggtttgttatggtacggatattaatctgggcatttctcaagatggagttctcttgccaaatattcaaaccaccatgacaaagaaagaccaaactgtgaagaagcaagaaactgtcactgctctagaccgagccaatgccgaagatgccatccttcctctgccaatatgttctgtcatctggtattggggaacggtatattgccatttggaagttgggtagtgataaaactcagagctcaaactgtatactgtcgatggagcacccagcaatatttgtagactgcaaatgttcagacgagggagaaatacacgtgttggctatttccgagattggtgtctgctatttctggtctgcaagtaacattgatgacttgcgtaataagaagcctaccaagatctcagtgtccgagtcctctctatcaagagctcaggcattctcgatatttgccgcgaaacttcaaggagtggatggacctacttctgcccatgtcctgctggcttatgggtctgtagtaaaaccatcttttgaaaaacttttggtttgttatggtacggatattaatctgggcatttctcaagatggagttctcttgccaaatattcaaaccaccatgacaaagaaagaccaaactgtgaagaagcaagaaactgtcactgctctagaccgagccaatgccgaagatgccatccttcctcttccaaagctccatacgcaggaaaagaaaaggaaacatggtgtgacaaaacccagtggtgacattgagcctgccattcatagtgacatcaccacagcaagatctatacagaaaagagttcctgtgcaaagaatcgaagatgacggtatatgcattgaagacatgatgagggagtgtggtgtccttgatactggagtagatcagagcattgaaggccatcctggcattccaactaatatttttctgagtttttggtgatggcagcataaaagctgatgctaatttacccagcaagaagattcgagtgcatctaagatcattgaaacctgaagatgcttgcaaactccttgaaattta

SEQ ID NO: 5455 - DNA, 251 bp, Setaria italica
  Peptide Sequence Number=SeqID_71429
gaagaccaagctcgacaatctaaacggaatcatatatagcaacattatacatgctcactgccaatctgggaatatggatcgagctgaagagctggtccgtgaaatggaagaggatggaattgatgctcctattgatgtttatcacagtatgatgcatggatatactatcattcaggatgaaaagagtgtctaattgtgttcgaaaggctgaaggagtgtggctttaaaccatcgataatatcttatggttg

SEQ ID NO: 5456 - DNA, 368 bp, Setaria italica
  Peptide Sequence Number=SeqID_71430
tcagcctcccaacacaagcgcaaacacaaacacaaacacaaccaagaagtcagtagtaatggagtactgctaccagtacaacagcgtcagcagcagcaacttggcgaaggagaagaggccggcgccgaagagggggcacgtcaagatgcagatcgtgaggaccatcagcaacatcgtggcgccgagcagcggtaacaacagcttcagaagggaacgaagctacaactgaatacccctgtctctgtcgtctgtagatgtacatatatatgcatatggcgtgccccttgtatctgaacttttctctttgaggggtttaattgaggggttttagctggacagagtagactgccgctcatcagagctgagtg

SEQ ID NO: 5457 - DNA, 323 bp, Setaria italica
  Peptide Sequence Number=SeqID_71431
cgtttgaaattcaaaatttcaaccctgcttctctagatgatgttgcacgagttcattccaagtcttacatcactggacttgaaaaggctatgagtaaagctgcagatgaaggtctgatattaattgaaggaactggaccaacatatgctacagagactactttccaagaatcacttctatcagctggtgccggaatcacactggttgattcagtggttgccgcatcaaagttaggtcctaatccaccccatgggcttctgtgtctttgggaacattgctgtggcagctcggtatgctcagcatcaatatggactaaagcgggt

SEQ ID NO: 5458 - DNA, 445 bp, Setaria italica
  Peptide Sequence Number=SeqID_71432
tggctttgcgttagtaaggccaccaggacatcatgctgttcctcgaggtcccatgggcttctgtgtctttgggaacattgctgtggcagctcggtatgctcagcatcaatatggactaaagcgggtgatgataatagattttgacgttcaccatggcaatgggacatccgatgcattttatgatgatccggacatcttcttcctctcaactcaccagcttggaagctatcctgggactggtaagatcgacgaagttggtcaaggtgatggcgaaggcacaacgctcaacctgccactgcctggtggcgcaggtgattacgcaatgaggtgtgcttttgatgaggccattgctccatccgcccagagattcaagcctgatatcatccttgtttcagccgggtacgacgcgcatgcactggaccccctggccggcctgcagttcacc

SEQ ID NO: 5459 - DNA, 553 bp, Setaria italica
  Peptide Sequence Number=SeqID_71433
tagtaccggtttcccgagaaatgctgtatgtttccctaggttgccgcatcaaagttaggtcctaatccaccccttggctttgcgttagtaaggccaccaggacatcatgctgttcctcgaggtcccatgggcttctgtgtctttgggaacattgctgtggcagctcggtatgctcagcatcaatatggactaaagcgggtgatgataatagattttgacgttcaccatggcaatgggacatccgatgcattttatgatgatccggacatcttcttcctctcaactcaccaggtttcttgcctctgcaccttttatttgcataactaggtgctgaactttaccatgaaacgacctttgttttctatgtttcatcgatgtagcttggaagctatcctgggactggtaagatcgacgaagttggtcaaggtgatggcgaaggcacaacgctcaacctgccactacctggtggccaggtgattacgcaatgaggtgtgcttttgatgaggccattgctccatccgcccagagattcaagcctgatatccttgtatta

SEQ ID NO: 5460 - DNA, 274 bp, Setaria italica
  Peptide Sequence Number=SeqID_71434
agaagataagcttcgtcttgctcgcgtctgctgtgaaagtgaaacgacgatgccacggctagtcctcccgccagctaaaacccctttcctctcccccttccccgcgttcccgccgccgccaccacctcgtcctctcggcatccgcatatccgcagccgtcgcggggaggggcagcgctggggaggacgcggcggcggcgtccgggaccacggcgagggagcgccgcttggtcaaggtgcgggaggagcgccgccgccgcgagtacgaccgcgag

SEQ ID NO: 5461 - DNA, 911 bp, Setaria italica
  Peptide Sequence Number=SeqID_71435
agaaggaaaaggaaagtctcgtactcctaagagaaaacgagggcgtagcaaggaaaagtcgatcgagacaacaatatggcgctgctcctgctcctccacgtcctcctcgtcacggtggtggcgagacctcctgcggctcacgcatggggcaaggacggccactacatggtgtgcaagatcgccgagagctttctgacggaagaggcctcgacggcggtgaaggacctgctgccggggtgggccggcggcgacctcgccgagacgtgcgcgtgggcggaccggcagcggttccggtaccggtggtccagccccctgcacttcgccgacaatcccggggactgcaagttcagctacgccagggactgccacaacacgaaaggagagaaggacatgtgcgtggttggagcaatcaacaactacaccgcggcactggaggattcatcaagtccatttgatccgacggagagcttgatgttcctggcccactttgtcggcgacgtccaccagccgctccactgcggccacgccgaagatctcggcggcaacaccatcatcgtccactggtacagaaggaagagcaaccttcaccatgtgtgggatgtgaacgtgatcgagacagccatgaaggagttctacgacaacgatctaagcaccatgacacaggccatccagcggaacattactgaggagtgggctaacgaagagaaacaatgggagacgtgccgtagccggacaaagacttgtgctgacaaatacgctgaagagagctcaaaactggcctgcaaggcgtacgagggtgttgaacaggactccaccttagaagatgactatttctttgctgcactaccggtggttcagaagaggattgctcaaggaggcgtcaggctcgctgcaatactcaacaagatatt

SEQ ID NO: 5462 - DNA, 925 bp, Setaria italica
  Peptide Sequence Number=SeqID_71436
ttttttttttttttgtaggcccaactagccttcgatatttcgtcatcatagattaatatcaaagcagacgctgtttggggtattaagtattcaacaaggacaaaaagtttactgtgtcaagccactgagttcaaactcaagatagtattcaccagaaatttattccgcttggaacaacaagcacattgctggcaaatgacacaagaaactagtctctactcaacgcagcaaaatgtgaaatgccaccatcgtgaagagtcgacatctttatgccttcacttgaggaggagcgtcaccctgcagagcaggatcggatttgacggcatctagggtcttgaagaactcctcaggaagagcaacaggccggtgctgaggaacatgcttaggaatcggggtgtcatcttcaatcacctcgcattcatagtcctcaggaacaccccagggatcccattcaatcattttggcgatgagcttgagctcgtcctcggcctcctcgatgagctcctcgacctgcccgcatccgattcggtcctcgatgcgcttccagtcgtcctcctcctggcagatctggaggcggtgattggtgaaggactcgacggccttgcggtagccctcgtccttggggacggcctcgatctccttgagggtgcgtgtgtagagcccgatgagcacctcccgcgcgttgggcaccacatcgaggcccacgatccccgtcgtctccttgacggcgcgcgccgcacgcagcgccgccaggctgcccccgccggtcaagatccgccgcaggaacatctcgccgtcgtcgccttgcagtggtggtggtaaggggggcgtctctctctgatgagctgcgggggcgaacgaatagaagacttagaagactacgtacctacggacctacctacgaatagaagacttaccttacgaa

SEQ ID NO: 5463 - DNA, 555 bp, Setaria italica
  Peptide Sequence Number=SeqID_71437
caggagcggtatgaggagctgggcatcctgctgaagccgttcggccccgagaaggcgtctcccagggagaccgccatctggctcaccaagagcttcaaggagacggcatcatagccgcctccttgttgcggtatggacatagtcaccagttttgtaatgcgcaatgtagtagctcaggtagtttaagctatgttaggacccaagtttagcttctgaaaggcaacaccagctcagtgttggcataacttaaactctccatcctctagccaattcccagcttgcatgtaggtaagttcagcaaccagtagtagctgtagaaccccaagctgaacccccaggatctggcaaagatcctgaaccttgttgtaaccaaatcatcatgtgtaactctcaatcatcatgtagtactaaattggagtgctggagatccagttggcagtaggttggttgggtctccatcaccccatcttgtgaacaaaggctgaagaatcctatgctgcagggatcccctgatcccagctttcctctgactaaactaccacacctctgaattgc

SEQ ID NO: 5464 - DNA, 482 bp, Setaria italica
  Peptide Sequence Number=SeqID_71438
tttttttttttttggttaataaaatcgatatcagtgtacttccatagatacaggtaatgggtttcagtatacctgcaaacatgtctacaaaagttcaaatcaatataaggttaatccgggcctgttgaaggtgtacaagctctaagtcgctaattttaacgataactggtacaagttagcggtgaaaactaccgagcccttatccatcagatagtcatgagggatactagccacatgccaggtgttaagatatttcttcggctaaaacctgaggtgcttaattattcgacatggctgtcccagccagagatggagaaatctccttctcagtatagctcttttctcggcaaaattttgctggatctgcaaataaccttgtaaatggccacctgcttagtcgaatggtctcagactgtatgacgatttcttcaaacatgtctcctttttccatagaaaaatatttggccttcaaacgcgctgca

SEQ ID NO: 5465 - DNA, 488 bp, Setaria italica
  Peptide Sequence Number=SeqID_71439
taaggtaggtaggtagtcgggtaggtcgttacctgcgcctcgccctgacggtgctcgccgggctcgcgcgcgttccggaggttgcggccgacgagggggtcgtctccactgtgcccctagtcgccgaggttgtctccaaatcggctgatcccgcaatcactgaagaatgctttgaacttctgtcacttattgcaatagcctctgaagacggggcttacaagttttgcgagcctggtgtaatagacatgatcttccttcaaatctcaagcttaccagatggttcaaagtgcatagaacttgccattaatctaatgcgattacttgttcataaactcaaagtcgacaacatgagtgtggaaaaactgcaaggaatggcaagcatggtgacttgccttgccaggctttttgctgttcttcatactgcagttaaatttgatgccctgcacatgcttaccaccctcctgtcccaaaaggaatctccacttcat

SEQ ID NO: 5466 - DNA, 680 bp, Setaria italica
  Peptide Sequence Number=SeqID_71440
gttggtgtatatgaaattgatgctatactagatagccataatttggatttccattaattattcaaacatcgaacactgacaaagatttaggcctaaaaatctacattcaacttcctgtcgatatcggagaacatctcgaagaaagctttgaagtgtctgtatgttgtgtctacatcttctttgccgcacatttctcgtatgctgtgcattgaaagctgaggaatgccacagtcaacagtccgtatgccaacaccagaagcaagtatgggtccaatggtggagccacatcccatatcattccttacaacaaattcctgaactggaaggttatgaatcctcgctatttctttgaagagaaaagctgtaacagcacttgtggcataacgttggttagcattgtgcttgatgacaagtcccttctgtagttctggtctatggcactcttcatgcttgtctggatagttcgggtgcagggcatgagccatgtctgctgaaacaaggaacgaagaatgtattgcacgttccagagctccctctcccattgactgatgcatcaaggaatcgatgattcgtctcatagcctggaacatggttggtgcacctgccccttgcattgaatctgaacccacctcctcattatcgaacatagcaaccatccttatagccttctcactggacaa

SEQ ID NO: 5467 - DNA, 544 bp, Setaria italica
  Peptide Sequence Number=SeqID_71441
ttttttttttcggtcatgttaacagtctgtgactgcagatttgttgatcttcattgcacacgaagtggaaggttttgcatactggtgcatagagtgttggatactgaagagattacatttggtgctactatattatttaactctcgggcattttccagccaacctggaagtactcttatccggaatgtgtggagaaaaatggcgcctctgcaggcaactggaagatttctgcagcgctacggtatcaccgagggtttctcctcaataacctgcacttcccccttggatgcaatcaccgcatacgattggttgctacaaataatcccatgatccacaacgccagcaactttgtccaacttctctgctacctgacctagatctgggattggagtcgtaaagatcacatcaagaacgtgatgaccctccttagtgaccaatgggtgatcaccccctagtggaccggcagtcccaaatgatggcctcctccaaacctctgcatcctctaggaacaaatcgtcgatctcttcagcagtgtctatcctaa

SEQ ID NO: 5468 - DNA, 943 bp, Setaria italica
  Peptide Sequence Number=SeqID_71442
ggtttcagcgccccgaccgcgtgccccgagctcaacgcctctttcgtcgacctcgagatcccagtggatgaggcggagggtggaggagatggcgtgcaggcgcggcctgtttatgtggccgcagtggatctcgcttgttctgaggagtttctggaactcatcaagagttcgcttctggctgccctagaagctcttattccgggctccctatttgggcttatgacattcagccacaagattggggtgtatgatctccaagggccgattccagttgtgaaaaatgtttttattccaccagacttagaggaagatggtctgcctgttgcccttgaagatgccatgccccttctttcttttttggccccagttgacacgtgcaaggatcgaattgctgctgccctggagatactgcgacctacatcttcatgggagcgaggtgctgcttctgggcaggaagaggatactgttttgcttggcggacgaggctttggaacagccatgtctgctttaattgactatctaagttcagaatatggttctacttttgctttggctcgggtgtttgcttttctatctggtgctcctgattatggagctggtctgttagacaccaggagatatggggagcaatatgctagtaaaggggtagatgctgaccttgcattgctccctgaacagatacctttctacagagacctggcagctgttgctgttcaagcaggagtatgcatagacatatttgctgtaactgatgagtacaccgatttggcttcgctgaagtttttgagtattgaaagcggtggatcgttatttctctatgcaaatactgacgattcaacacttccccaagacatataccgcttgctaagccgaccatatgcatttggttgtgttctaaggctgagaacatcttcagattttgaaccaggcaattcttatggac

SEQ ID NO: 5469 - DNA, 477 bp, Setaria italica
  misc_feature (74)..(74): n is a, c, g, or t
  Peptide Sequence Number=SeqID_71443
ttttaactaaccaaggacaataacaagaatacccgactagttagtaacaagaatacgcttttcaagtacagtgngattgaacctgttgaagaaacatcaggcaatgaatcacgatcatctccaagttacaagttttgtttaaagaggcgtttgagaataagaacattgcagtactgtccggctaggaatatcagtgaaatttatgacagtgtagatccagaggttgtactgcatattcttgttcataaggttattttagagtccttggataaaggggttagagaaggcagacaacaagtgcatgcttggctagccctccttgcagcccgttacaaatggtaccacaactcgtgttcgcactgttgagaagtcctcttcttcgcttgcatgaagaaggcgtacacccagattacaggatatatttacaatgccttttcagtgcactggagccatcttctcttgctaaggctatatatc

SEQ ID NO: 5470 - DNA, 1727 bp, Setaria italica
  Peptide Sequence Number=SeqID_71444
ttcttattcttggttgtcttccttgtatctattggtagtcttggttcttgtgttagacaccaggagatatggggagcaatatgctagtaaaggggtagatgctgaccttgcattgctccctgaacagatacctttctacagagacctggcagctgttgctgttcaagcaggagtatgcatagacatatttgctgtaactgatgagtacaccgatttggcttcgctgaagtttttgagtattgaaagcggtggatcgttatttctctatgcaaatactgacgattcaacacttccccaagacatataccgcttgctaagccgaccatatgcatttggttgtgttctaaggctgagaacatcttcagatttttgaaccaggcaattcttatggacatttcttccctgaccctcaatatgaaaatgtgcaacacatcatctgttgtgactcatttgcgacttatgcatatgactttgactttgctcataatgacggtttctccaggcatacagatcccgctgttgtacagatcgcttttcagtacagtgtgattgaacctgttgaagaaacatcaggcaatgaatcacgatcatctccaagttacaagttttgtttaaagaggcgtttgagaataagaacattgcagtactgtccggctaggaatatcagtgaaatttatgacagtgtagatccagaggttgtactgcatattcttgttcataaggttattttagagtccttggataaaggggttagagaaggcagacaacaagtgcatgcttggctagccctccttgcagcccggtacaatcaggcccttagctctgattctcgaactccactatcgagcgtcgacattgacttctcgcagtgcccacagttacaaatggtaccacaactcgtgttcgcactgttgagaagtcctcttcttcgcttgcatgaagaaggcgtacacccagattacaggatatatttacaatgccttttcagtgcactggagccatcttctcttgctaaggctatatatccagttttgatatcatattcctcacctgacaagcaagcattcccacggcacactttaagccgtgctgctctaatcatgagcgagagcccaatattccttctggacgcttttaccaaccttattgtttactattcatcaactgctgatccttcaattccttttcctccaccccgagattgtctgttgagaacaacgattaataaattgaagcaggataggtgtataacaccaaagcttacattcatccatggagcgaaagatgattcaacattgtttgagagctatctcatcgaggagcaagatgttgatggttcaggctttacaactggttcagggtttgtagccttccgtgagagcgtcaggaatgttgctgcagaaatcgtccaggaagaaattggaagctagtttgagcttgattatccttctggttccgctgcagattgtatcgacagggtcgcattgatgcttttaacctttaatgttatagtagctaactgtatgttacttgccaaaacaaagaaggaatgtcaaggaataataaaaaggtggccactttatagttacttctgtcagctcaatgcttcaggcattattagtcagagaaaacttctgtaccagtttttttgtcacttaaatttatcagccgcggatatctattgatgcaaaagagactcaagaaattttttttcgggggaaaaaaaa

SEQ ID NO: 5471 - DNA, 977 bp, Setaria italica
  Peptide Sequence Number=SeqID_71445
cgggtggtggttggttgagctgccgggattattcctcgtatgttctgaattattgtgacgggtgcagcaagttctgggtggtgaccagaagtgattgcgatgacgtccttgtcgcgaacgctgtcccgggccgggccgatgcagcagccagggtctcgccgcatcctgaggacacagaccgctgtgaaccttggcgagcccatgtttgacagtgaggtggtgccatcatcgcttgttgagattgcgcccatcctccgtgttgccaatgaggttgagggggccaacccccgcgtcgcctatctctgtcggttctatgcattcgaaaaggctcacaggttagacccgacttcaagcggtcgtggtgtccgacaattcaagacagctctcttacaacgccttgaaagggagaatgagcccaccttgatggaaaggggacaaaagagtgatgcacgggaaatacagaccttctatcaacagtactacaagaaatatattcaagcacttcagaatgcttccgaccaagtggatcgtgcccaactaaccaaagcctaccagactgctgctgttctatttgaagttttaaaagctgtcactcaacaacatgctgttgaagttgaccatgagatcttggaagctgccgataaggttaaagagaaaacgaagatatatctcccttttaacattctccctctcgatccagacagtggcaatcaggcagtcatgaaatttcctgagatccaagctgctgcttctgctcttcgcaatactagaggtcttccatggcctaaaaattatgagcataaagttaacgaggacctcttggattggctgcaagctatgtttggctttcagacagatagtgtttcaaatcagagggaacatttgattttacttctcgctaacatacatatacgaagaaatccgaagactgatcaacaatctaagtaggatgacaacgcgctgaatgatgtgataag

SEQ ID NO: 5472 - DNA, 514 bp, Setaria italica
  Peptide Sequence Number=SeqID_71446
agcatcatcagaatcatccagcacctggaccaagaagtttgaccttggccagtccaggctgcaaactgcaccaatggattgctggtacacctccctctcattgcacatgggcatttgcacgagcaccatggggaagtcctcggcgccggcctcgacgtcctccttgtcggcggccagcggcacgggcttgatgcccttgagcctgatccagaagcagccgaggcaaagtacaaggcggtcgacgctctggatcaggaagaggacgacgcaggcgttggtgaggaactgcagcggcggcgcgaggtagtcgaggcgggcgcgcatccagcccgcgtaggcggcggcgaagaggccgtcgacggcgaggagccccgcgtccacctcgaggtgccagccctggagccacgccgccacctcgacggcgagcagcagcagggagagcacgaggaacacccggatgcagccgtagaagcgcgcggtcgtctagtcgccgttagtttacttaccccgggta

SEQ ID NO: 5473 - DNA, 962 bp, Setaria italica
  misc_feature (1)..(73): n is a, c, g, or t
  Peptide Sequence Number=SeqID_71447
nnnnnnnnnnnnnnnnnnnnnnnnnnnnnnnnnnnnnnnnnnnnnnnnnnnnnnnnnnnnnnnnnnnnnnnnnccctccgttgtcgtgtctttttttttttttttttttaaacagaactaacaaggatattctttattgcgataaccagatacaagcaatagtacaaatgcgacgcccaaaactcaatgcaatgatcaaccaattcacggtacaatgacgcaacacatcctgaacggcagtgaatctccaaacgccgagggcaacaggggctcgctgagccgagatgctcagacggcatagatggcgacagccgcgaacgcgagcgccaggctcaccgccccccggatcgacgcgccgccggatgtcgtcaggtacggcgacgtcggcgtcgccttcgatccgccgccggttcctgcaccagctgcgctcgctggcacgccgccggacgacggcgtggtcggcgtcgcggcgcccggagagttgccaccgccggcagagttgcacttgctcgccggcggggtcttgacgttgcaggcctgggggagcgcgagcgcgcgcgtcttgtcgatggtgacgccgccgagggacgacgagtcgccgctgagcgcggcgcagaggcactgcgggttggactgcacgacgctggcgagctgcgagcagcacgacgacggcggcgccgacacgttgccgctgatgtagttgaggcacgggtacaggctgatcagcgtcgtcgtgcacccggacgactgcgccgacgacgacgccaccagcgccgccgccacggcagccacgagcaataacgctcctgctcttgccgccatttctctctcctcgatcgcttcgctaactaacacgagagcaagagatgcctcttgagttctaggatttggtggtgaagctgctaattgcttggttagtgatcgctgcccacacaatcttcggttctcggcgcggaagcaat

SEQ ID NO: 5474 - DNA, 263 bp, Setaria italica
  Peptide Sequence Number=SeqID_71448
ctccatttctcctgctcttttcttttcctttcattcagcccaatccgccaattttttctgctctcgcctagtctgcttacttctcccctcctccagcgcagcagcccagcaccgccagtctaccgtcatcccctgctcttctttgcaacctcagtaacgtgacgaaccatgtccatcacgtcggtctgcgacgacccgacctcggccatcgccgctctcatctttctgccgagctccatcgctttcactctcctcgccgcacg

SEQ ID NO: 5475 - DNA, 525 bp, Setaria italica
  Peptide Sequence Number=SeqID_71449
tcatctatgtacacattccggtagcttaaattatgcctgttatgctgaaaggatgcaagctcatcaccaggggcctggtcaaatatttctgtctctctaggatagaagggggaaatgaacaagtttccaatgcctccatattcaccagatactacagaatgtgaatcgttttcaagagcatccccttgcatataggcatcataaaggccccaaatctgagaccatgatggcttaaaaggttcaagtggcacatcaaaggtcggtgtataggactgaatgttgcatgcatgtgctggagtttccaagatgtggacatcactttggtcacaatattttgaaaaatgctcataatactacaaactctgagaagaaactggttccgtgggttcgacctggacatttagtgcttgtttatagcaatgatggtgataacaataaatagggtgaccagagatcatgtgctcaacatcgtaggatgacaatgcctcatgctgaaattcctctacttgatgagactttgagtag

SEQ ID NO: 5476 - DNA, 1283 bp, Setaria italica
  misc_feature (1279)..(1283): n is a, c, g, or t
  Peptide Sequence Number=SeqID_71450
ccttccttcccccggggctccggaggtttccgtaaacccgtcgtccgtcgccgcgcgcccccctcttctttctcgaaggtatcgacgaccaactccttcattcctacgtccctcagcacagcagcgaccaaattgggatttttgggggcattcggattgtgcatcagtttgctgcctttgagcatttggtacctggtcggctggactcgaggagttctgcttaaggaactcctctgtgaggtttccttggattatgggagctttctgttcttgcctgcaacccgattattccgacgaccatgggaaccacacgtcctcggcgtttaggaactgtgtgtgcctcagatgttttacccagcagctcatcaatgcgtacactgttttattccgagctggagcagtgcattctgtatctcaagctatagaagccactcctgttgattcagctgaaagttcctttgatacatatcgttcacccccaagaccgctgccctatgatgatccacgattttcacctcctgctcgtaactggttaaggcatgaaaccccaagccattccccagaggagtcagaaccacttcgagcaaatgatgatgaggaggaaatggagacaccaagtagaatagacaaggcaagtaaaacaaactatgacacaaaaatgaagatatgcagctctgcttatggagataaggtgccacccaaggaacatggaagttactttagctacttttccccaactgctgaagatgaagatgtctgcccaacctgtcttgacgattatacttctgagaatcctaggatagtaatgcagtgctcacaccatttccaccttggctgtatttatgaatggatggaaagaagtgaggcatgccctgtctgtggaaagaaaatggaatttgacgagacaacttaatcatctggctggagtctacatcttggattaacaacctcatatggcggtctgaaaacacaggtggtctagccgcagcaagctctctgtaaatacaccctgtaaatattgaatcggtattgcgctctttgccataccagtgttcttgaaattctggatcggtgcacatagacattcttttacgatttcttccaaatagtcagaaggtgaaggtttccccttcacctgtctgcgcccctgcctcgacaaggcttagaggtgctgtgtttctcggtgatagcatcatcggaaagctgtaaattcacgacctatgttgatataatcatatgaaggcccacggttcggttacaaaaaaaaaaaaaaaaaacnnnnn

SEQ ID NO: 5477 - DNA, 1592 bp, Setaria italica
  Peptide Sequence Number=SeqID_71451
acgtgcccttcccgcgccggcagtctgtccagcaccaccagcagcctctccctcagctgctcccggaacatggcctcgtcggcggcctccagagacgcgtccgggatcacctccgtgaactttgcgttctggccgatgccgacctccgagtagagtgacacgaccctgcgagagcacttgcgcgccagcctgacgttggccaccgacacgccgaccatggcggcgatctctgaatccgatgggttcctcccttggctgtaccggatcgcgcgccgcgcctccttcaccttgcggatgatgctctccattcttgcgggcaggatggtgactcctgaattctcggccaggagagctagcatccctttcctgatccagtacttgacgtacgtggagaacttgcaccccttccggctgtcgaacttctccgctccatcgaggacccccattttcccagcctgaagtagatcgtcgaaagccgtccccattccggtgtatgttcttgcaatgtacctgaccagccactcggtggtcactatcagcctctctcggcagcagtaacctgcctgcagcctgctcttcagctctgcctcatcaactccagctgcctctgcccacctctggtagctcacctcctgcccatccttcaccatgttctctctgatcttctcaaggtttgcacattccttgatggtcactagcaaggatgattgttcgcgtataatggtccttctccggaccggattaatttttccactcggatataaactggctgctactagactttcgcgatttcttcgatcttctttgattcaccttcacagagatcctggagcccttttcttgatgctctcattcgtttcagcttcctctcttgactcttgccactccgaacgattacttcagtatcttgctcctccttcagaggagtctctggatcgaactcgatgattttgtcgagcagagaacaatcttgttcatgtgaggtctgtggtagggtgtccagggtggtcctggacatagacgcatcaaacgatctcagagctccaagctgttcgatacgtacaaggatacccttttccagcattttcaggtctttataagccaaactagtctccaattcatgaaggttttgcattaacaacccatactgcagatctctgtctgtgtaattcctatccatccagaataacgtctcttcatccatccagtcattctgtacatttctgccaagagcgtcgtcaaggaccttcctttctgccttgggttttgtcaagctgcttgacttgctctctgtgatctgaagcacactggatgaagatgcaaaagcggtcgcaatgtcccggccatggtattttcggcgttttagcaagagatgcaaggccagtgccgcaagggatccagaagaaatcgaccttcctccactcaatggatggtgagactgctttgggggctggacctgcaccatccacgaccacgaggaggaagacgacgaggacgatgcgcagggcctgccatgcatcatctgcagacccatacagacgcagctcctgtcttgcagcaatggcagacgaggccggatggggaggaagaag

SEQ ID NO: 5478 - DNA, 751 bp, Setaria italica
  Peptide Sequence Number=SeqID_71452
ctctggttcgacccaacccaaggactaccactccctactccgtcctcctggaacctctacatgatcgcgttcttcgtggacgacgtgccgatccgcgtgttcaagaacagcagcggcgacctgggcgtccggtacccgttcagccagccgatgaagctgtactcgagcctgtggaacgccgacgactgggcgacgcgcggggggagggagaagacggactggtccaacgcgcccttcgtcgcctcctaccggggcttccacgtcgacggctgcgaggcctccgccgaggcccgcttctgcgccacccagggcgcgcggtggtgggaccagccggagttccgcgacctcgacggcgcccagtaccgcaagctccgggaggtccgccagcgttacaccatctacaactactgcaccgaccgcgaccggaacgccgccatgccgcccgagtgcgccaaagaccgcgacgtctgaatctgatcgtgctagctgcttggtttggatttagcagcctgctactgtattgttttggtgtattttgtgtgttgcgtacgtgtggttcatggttcatttctgagagccatttctgagcacgtactcctacctattgtgctgtacactgtattgtaacgtctcagagcaaggtcaccaattgatattggcattggttttgaaaaatcatcagtcctccttgttcttgctcgaggtcgaggatttggtcgagtatattcgtccattgctattttttttcaaa

SEQ ID NO: 5479 - DNA, 877 bp, Setaria italica
  Peptide Sequence Number=SeqID_71453
gcagccaccctcagtccaccaccccccactgccgagagatacagagtagcaggagatcatggcgacggcgcggtggcttctcgctgccgcggcggcggcgctgatgcttgcgaactgcgcgtgggcggcggcgccgcggaagccggtggacgtgccgttccagaagaactacgtgccgacgtgggcggaggaccacatccactacgtggacggcgggcgggaggtgcagctgtacctcgaccgcagcacggggacggggttccagacgcggggatcctacctcttcggccacttcagcatgcacatgaagctcgtcggcggcgactccgccggcaccgtcaccgccttctacctgtcgtcgcagaactcggagcacgacgagatcgacttcgagttcctgggcaacaggacggggcagccctacatcctgcagaccaacgtgttcaccggcggcaagggcgaccgcgagcagaggatctacctctggttcgacccaaccaaggactaccactcctactccgtcctctggaacctctacatgatcgcgttcttcgtggacgacgtgccgatccgcgtgttcaagaacagcagcggcgacctgggcgtccggtacccgttcagccagccgatgaagctgtactcgagcctgtggaacgccgacgactgggcgacgcgcggggggagggagaagacggactggtccaacgcgcccttcgtcgcctcctaccggggcttccacgtcgacggctgcgaggcctccgccgaggcccgcttctgcgccacccagggcgcgcggtggtgggaccagccggagttccgcgacctcgacggcgtgttggtaacgtccgtacgtacttgggtcgttacgttcgttctt

SEQ ID NO: 5480 - DNA, 439 bp, Setaria italica
  Peptide Sequence Number=SeqID_71454
gtcgaagcagaatccaaatcgacatggaactctccccgacctcatcccttggtctccagctcgtcctgctcctcccaatgctccctctgctctacttgctcctgcgccaggaccccaagaagcagcctcgcgctcatggcctcaaggcctacccactcctgggaacgctccctcacttcgtcaagaaccaggaccgcatcctcgagtggaccgccggcgtcatgaagcgtgaccccgcgcacaccatgtccgtcaaggccctcggcctcaccggcgttgcgatcaccgccaacccggccaacgtcgagcacatagtcaagacaaacttcgccaactaccccaagggcgagctcgcggtctccatgctcgaggacttcctcggccacggcatcttcaactccgacggcgaccagtggctgtggcagcgcaaggccgccag

SEQ ID NO: 5481 - DNA, 244 bp, Setaria italica
  Peptide Sequence Number=SeqID_71455
caacgacaatgcatggacacagcgcgcccaggatcttcggcagggagagaacgctccacgcggccctgggtggtcgcagagcggcggacatcatcctctggagggacaagaaggagtcggcggccatccttgccgccgcgacggcggcgtggggactgttcgaggtggcggagttaccatttcctgacgctggtctgctacgcggccatgatcggcatgctcgtcttcttcatatggaccaacg

SEQ ID NO: 5482 - DNA, 483 bp, Setaria italica
  Peptide Sequence Number=SeqID_71456
tgtaggctgtgggaccaactttcattgtatactttatattgatattattaaaagttacagtacatccccacaaaaaaaaagaagaatggatctgaagcggaattcattaattatctccgctctgagctcattaagccagcttcagtatttcgccatcaacattacaaattctgtcatccaaatattaagaaacttgatgtgtggcaaatcgttgggaagactcttgaagcgtacaatcatttctttagctgtgttgttgggcattgtttctcagttttatatacttgttttttggctggctctttgtgcaatgttagtaatatgtaagaaatcgatgctgatgcatagcctcacatattagattcgttccatgtttgtgatttagtttcgttggatatttgcagcactaacttctgcctgtgacattgcagcttgccccaataagaggggaaagttgagcgttcaggtactgggtcagctgtc

SEQ ID NO: 5483 - DNA, 870 bp, Setaria italica
  Peptide Sequence Number=SeqID_71457
aaaataatcaaactttataaactttgaccaacaattagtcaaattgtatacaatactactacataaaagttgcatcgatatatttcatttcaaatatctttcgatatgaaatatatagatttttgtagtagctgataatgtaccataagagcaatctatactcaaagtataatttccaaaccctaatactattaaaaacaaacaatgtgagtaataatttacagataaatttaactttgcggatatgtgatatatgcaagttctttcgggggccatggatatacggtgcatagaaaagcaaacatgaggatttggcatctttatccatgaagatttcatgtgtggacagaccgatagaggtcagcgtaaacccgtctggtcctgtgaacaacgatgaggctcaatccagctccaacaatgcagagcactgacattatcaatgagctgacgaagaagcagacggggccttcgcacttaatctgatgttggtgagcttgtttctcagcttcatagtcatacagggtactggtaataaggcctgagaagatgaatgatcctgtggggtttcccattgcaagaaaattgtacatggcgccaaaatgttttacgccgaagagttcagagacagcagctggcacgattgcccaatgagctccgtatccgagtccgaccaggaaggtcccgatgtacatggttccaggccaagccatggcaaatagaaatgtgcagcagcaatcaggatctgtgcaattgccagtgctgtgtgccttgggtatccacgctccctgacaatgatctcagagaagtagccacctccaacacgaccaaggaagttccatatgctcaccaatgacacgaagatatgcgcat

SEQ ID NO: 5484 - DNA, 1146 bp, Setaria italica
  Peptide Sequence Number=SeqID_71458
cagctacctccgcgtcaccttcggtgagttggcggcgttccttacaggggcgaacctgatcatggagtacgtcttctccaacgcggcggtggcgcggagcttcacggcgtacctgggcacggccgtgggcgtggacgcgcccagcaagtggcggatccccgtgcccggcctgcccgagggcttcaaccaggtggacctcgtcgccgtcggcgtcatcctcctcatcaccgtctgcatctgctacagcaccaaggagagctcggtggtgaacatggtgctgacggcggtgcacgtggcgttcatcctgttcatcatcgtgatcgggttcgtgcacggcgacgcgcggaacctgacgcgccccgccgacccgtcccgcaaccccggcggcttcttcccgcacggcgccatgggcgtgttcaacggcgcggccatggtgtacctgagctacatcgggtacgacgccgtctccaccatggccgaggaggtggagcggcccgcgcgcgacatccccatcggcgtctcgggctccgtcgtcgtcgtcaccgtgctctactgcctcatggccgcctccatgtccatgctcctcccttacgacgcgattgacccggaggcgccgttctcggggccgttcaggggccggaaggggatggcgtgggtgtccaacgtcatcggcgccggcgcgagcctcggcatcctgacgtcgctcatggtggcgatgcttgggcaggcccggtacctgtgcgtcatcggccgctccggcgtcatgcccgcctggctcgccagggtcaacccccgcaccgccacacccgtcaacgcctccgccttcctcgggctcttcacggcggcgctggcgctgttcacggagctggacatcctgctcaacctcgtctgcatcggcacgctcttcgtcttctacatggtggccaacgccgtcgtgtaccgccgctacgtcggcgacgccgagctcggtcgcacccgcagagcctggccgacgctggcgttcctcgccgccttctccctcctcgcgctcgccttcgcgctggtttggaagctggcgccgcccgagcgcggcgtgcggacgggcctcctcgccgcgtgcgcggcgctcgccgtcgccacggtcgccgcgttccaggcgctggtgcc

SEQ ID NO: 5485 - DNA, 239 bp, Setaria italica
  Peptide Sequence Number=SeqID_71459
acgaaagtaacgaaggaagaagggggaagacaaggaagctgcgagatcgcgcgcgcccgagatctccaggaagttgcggcaacatggggctcaccttcacgaagctcttcagccgcctcttctccaagaaggagatgaggattctcatggttggtctcgatgcagctggtaagaccaccatcctctacaagctgaagctcggagagatcgtcaccaccatccccacaatcgggttcaat

SEQ ID NO: 5486 - DNA, 175 bp, Setaria italica
  Peptide Sequence Number=SeqID_71460
tcgccaacaaggcttgaagctttttggcagggctccaggaagaggaatatgcctgaacaacttattgctgtcctttttacatgttataaagataatacaatctacgaatagatagtgtgggtgtttgtgaagaaaaacacaaccgaatctggtactagcccctcaaaagagagcg

SEQ ID NO: 5487 - DNA, 435 bp, Setaria italica
  Peptide Sequence Number=SeqID_71461
ttcatggcattgggaagatcttgtttgtttgcaaacaccagaagcacagcatcacgaagctcgtcctcgttcagcatcctatggagctcatctctggcctcaacaacattgccaacaaggcttgaggcatcttggcagagctctgatcaatgaaaatacttcggatgttggagcgcgtactgcctttaccatactgctatgaactatatatagtcgtgacagtgacagataatgtggggtgtttttgggagtactaaagctctttggtcaaggagctagctatcagatgttttcgtgggtattgctaattgtccgttttggttcgttcaaggtatactatgaagcgccgttgcgctgtgtactggacagtgaggtgaaaaggtaagttagtaagtatcagacttgcctcttggcattatggcatagctagcttaa

SEQ ID NO: 5488 - DNA, 722 bp, Setaria italica
  Peptide Sequence Number=SeqID_71462
gtctgggatgtcggcggtcaggacaagatcaggccactgtggaggcactacttccagaacacgcaagggcttatctttgttgttgatagcaatgacagagatcgtgttgttgaggcaagggatgagctccacaggatgttaaatgaggtaaatcctattgaaaaggccgcattcatgtttctcattatctgttgcatggtaaatcacatgcagccatctcaaattttcttggacaatggcggtgaaattttgttggagtgttctctctagctatgttcaaaatgccacctggatctattaagtattaattgattccagagcagtgcatcatcattgacttctgtatgccaaagttgtgtaatggattaagtttaaaaaaaaggtgtgcagtacgggtgtcctctctaaaattaagatggtaaagcatggcatagaccgcaaccaacaaggtattggaattacttgatctaaatgatgggagatactagacattttgtgccactggagatattacctacagtttcataatcaatttgctaacatctaagtttgcaacacttaactgattaaagggtctaaaattaagatggtaaagcatgacatagaccacaaccaacaaggtattggaattacttgatctaagtgatgggagatactcgacattttgtgccactggagatattacctacagtttcataatcaatttgctaacatctaagttt

SEQ ID NO: 5489 - DNA, 351 bp, Setaria italica
  Peptide Sequence Number=SeqID_71463
gggtctgtacgaggtctggactggctgtccagcaacattgctagcaaggcttgaggggcctggctttggatatcaactgcgaactgactaggagctccggatgtatcatggaaacttaggacagaatcgcttctgcaacctgttaggtgtcttctgccggcacgatatatttttgtttggaatatgtaatgatgtcactgttgaatgtttgttctaccctacttctactgttggatgttctttggacctgttcattttgcacaaggattggagttccagtatcatgctactttggaaagctgttacatacattcgtagtacctgattagtacattgccaagttaatcgtac

SEQ ID NO: 5490 - DNA, 1297 bp, Setaria italica
  Peptide Sequence Number=SeqID_71464
gactcagtgtgagtagtactggacagtgaggtgaggtgttgtagtataccttgaacgaaccaaaacggacaattagcaatacccacgaaaacatctgatagctagctccttgaccaaagagctttagtactcccaaaacaccccacattatctgtcactgtcacgactatatatagttcatagcagtatggtaaaggcagtacgcgctccaacatccgaagtatttttcattgatcagagctctgccaagatgcctcaagccttgttggcaatgttgttggaaagccagtcaagcccctcgtacaaaccctcaccagaggtagcacatgtgctctggatgtaccaatgccgctggcgcagggagtgaaggccaagcttgtcggtgatttcagcagcattcatggcattgggaagatcttgtttgtttgcaaacaccagaagcacagcatcacgaagctcgtcctcgttcagcatcctatggagctcatctctggcctcaacaacacgctctctgtcattgctgtccacgacaaaaatgaggccctgggtgttctggaagtagtgcctccacaagggccggatcttgtcctgaccaccgacatcccaaactgttgagtacaagaacattagcttcactgtttgggatgtcggtggccaggacaagatcaggcccctgtggaggcactacttccagaacacgcagggtctcatttttgttgtggacagcaatgatagggagcgtgttgttgaggctagggatgagctccacaggatgctgaatgaggatgagctgcgtgatgctgtgctgcttgtatttgcaaacaaacaagatcttcctaatgccatgaatgctgctgaaattactgacaagcttggcctgcattccctgcgtcagcggcactggtacatccagagcacttgtgctacatctggtgaagggttgtacgaggggcttgattggctttccaacaacatcgccaacaaggcttgaagtctttttggcagggctcccaggaagaggaatatgcctgaacaacttattgctgcctttttacatgttataaagataatacaatctacgaatagatagtgtgggtgtttgtgaagaaaaagaaactcgctctcttttgaggggctagtaccagattcggttgtgtttttgtttttggcttggtattatcgcctgttcggttccacaaaactgactgaaacaatcatgtgtacctatacgttcagagatgtggtaatttaaattgatatgctttgccatagatacaaaaaaaaaaaaaaaaaaact

SEQ ID NO: 5491 - DNA, 1085 bp, Setaria italica
  Peptide Sequence Number=SeqID_71465
ttttcttcaccccgcccgaagtcgaggagagggggagcaggagctgcgagatcgcgcgcgcccgagatctccaggaagttgcggcaacatggggctcaccttcacgaagctcttcagccgcctcttctccaagaaggagatgaggattctcatggttggtctcgatgcagctggtaagaccaccatcctctacaagctgaagctcggagagatcgtcaccaccatccccacaatcgggttcaatgtggagactgttgaatacaagaacattagcttcactgtctgggatgtcggcggtcaggacaagatcaggccactgtggaggcactacttccagaacacgcaagggcttatctttgttgttgatagcaatgacagagatcgtgttgttgaggcaagggatgagctccacaggatgttaaatgaggatgagttgagggatgctgtcttgctcgtttttgctaacaagcaagatctgccaaatgcaatgaatgctgctgagattaccgataagcttggtctccattcccttcgccaacgccactggtatatccagagcacctgtgctaccacaggagaaggtttgtacgagggtcttgactggctctccaacaacattgcaaacaaggcctgattggacaattctgtgggtttgtggagtacatggcggttgcattttcggcagaaacagatccatgggtcgttttgaccttgagacttgattattatttcgttggaatgcttgtcaagtattgtatttctttgctaggcttttcagagagctggtttgtccttatgtggcgtgattatactctccaaatacctgttccaatattaagacactgtaattggccattggtactagatcgtttaccagtaatgcagttcatttcaaagtaaacgatctagtaccaatggccaattacagtgtcttaatattggaacaggtatttggagagtataatcacgccacataaggacaaaccagctctctgaaaagcctagcaaagaaatacaatacttgacaagcattccaacgaaataataatcaagtctcaaggtcaaaacgacccatggatctgttt

SEQ ID NO: 5492 - DNA, 1234 bp, Setaria italica
  Peptide Sequence Number=SeqID_71466
ccacccctccctctcctcccctcacccccacatcctcctcctcccccgatccccaaatcctcctccggatttcgcattcagcgcggcgcaggtggtgaaggggggtagagaaggggaagatggggctcgcgttcgggaagctcttcagccggctcttcgccaagaaggagatgcggatcctcatggtggggctcgacgccgccggtaaaaccaccatcctctacaagctcaagctcggcgagatcgtcaccaccatccccaccatcggtttcaatgttgaaactgttgagtacaagaacattagcttcaccgtctgggatgtcggggggtcaggacaagatcagacctctctggaggtcattacttccagaacacacagggtcttatcttcgttgtggacagcaatgaccgtgaccgtgttgttgaagccagagatgagctccacaggatgctgaacgaggatgagctacgtgatgctgtgctgcttgtttttgccaagcaagcaagatctgcccaacgctatgaatgctgctgagatcactgacaagcttggattacactccctgcgccagcgacactggtacatccagagcacttgtgccacaactggcgagggtctgtacgagggtctggactggctgtccagcaacattgctagcaaggcttgaggggcctggctttggatatcaactgcgaactgactaggagctccggatatatcgtgccggcagaagacacctaacaggttgcagaagcgattctgtcctaagtttccatgatacatccggagctcctagtcagttcgcagttgatatccaaagccaggcccctcaagccttgctagcaatgttgctggacagccagtccagaccctcgtacagaccctcgccagttgtggcacaagtgctctggatgtaccagtgtcgctggcgcagggagtgtaatccaagcttgtcagtgatctcagcagcattcatagcgttgggcagatcttgcttgttggcaaaacaagcagcacagcatcacgtagctcatcctcgttcagcatcctgtggagctcatctctggcttcaacaacacggtcacggtcattgctgtccacaacgaagataagaccctgtgtgttctggaagtaatgcctccagagaggtctgatcttgtcctgacccccgacatcccagacggttgtaagtcttaatgtttcttgtactcaacagtttcaacattgaaaccg

SEQ ID NO: 5493 - DNA, 184 bp, Setaria italica
  Peptide Sequence Number=SeqID_71467
ggtttgaccttcgtttcatagtaatagcagataggtttccaactactcgcagtgtggaagatctgaagagccgttattattctgtttctcggtctcttctaattcataggtctcggtcatttgatgatgtttctgggaattagaagagaccgagaaacagaataataacggctcttcagatctt

SEQ ID NO: 5494 - DNA, 716 bp, Setaria italica
  Peptide Sequence Number=SeqID_71468
aagcagcaagtgcttcagctggacttagagttatcaaaagggttgatcagacactacaagatctaggggtttgtcctatactttatgcacacctgattaagtcgtgtataacataaatgtatttgagcaaccatctttttttgtaggtgaatttgaagccaaaagttccaacaaaagcagtttgtgtagaacatcttgaattgcgaaatgagatactcacattgcttaacttacagaagcagctgcaaaataaagaggcagaagtttcagctaaccgagaaagttccttcacggaggcaccaagcacacctaagcgttctaatagagatattgatcggaccttcatccctgatacagttgggttttcaggtagttaaaaagcagacactttggtttactttgctcttcttcaatatgagagcttatgcttctttattaatatttcccatgatcctgcttcatgtgacctcaggtgaaagagcaggcaaacgggatcacaagcggaagaccactggaagatttatagacgcacctccgtcgccaacccagtccaagaggcctaggaagttgaagggatctgactgataatgctgttcaattagcgcgggcagaaacatttctttagtcaaacaacccactttcaggcttacatctagagatgaactagaacaaaacagcgcagttcctgctttggtggaagtcagttccgattggtt

SEQ ID NO: 5495 - DNA, 1221 bp, Setaria italica
  Peptide Sequence Number=SeqID_71469
taaaattacgtttttacccgaccgcattccatggctctatggcacagcatgctcatgataatcaggtagaaaagaatgcatttgcatgctagaactgtattattgttctagtagtgttgagcagtgcagttcttaaccattccacttgcattctcatggacttagcggtctatgtttcctttcaaatgtgaaatattacataaatatatcctatttatcttttaaaatgaatataatagtgagtttcatccattctgttgaagatggctgctcttagtgttacacacagcagaaacagacctagtataaatatgccactagtgacacacagcagaaacagacctagtataaatatgccactagtgaccactggtcatatgattgtattaactgcagtgtctaatgaaccatacaaagattgatacatctatttttataatttttttagatgcatttgacttgtatgctttcattttcagcttcgagtgtatttgagaacccatgcgcttgaccaaatggtccaagcagcaagtgcttcagctggacttagagttatcaaaagggttgatcagacactacaagatctaggggtgaatttgaagccaaaagttccaacaaaagcagtttgtgtagaacatcttgaattgcgaaatgagatactcacattgcttaacttacagaagcagctgcaaaataaagaggcagaagtttcagctaaccgagaaagttccttcacggaggcaccaagcacacctaagcgttctaatagagatattgatcggaccttcatccctgatacagttgggttttcaggtgaaagagcaggcaaacgggatcacaagcggaagaccactggaagatttatagacgcacctccgtcgccaacccagtccaagaggcctaggaagttgaagggatctgactgataatgctgttcaattagcgcgggcagaaacatttctttagtcaaacaacccagtaatgacatgtaaactcagttttttctgtgttatttaattcccattgcagcgctgaagattgaattttgcaatatttttgaatcatgcatagctttcaggcttacatctagagatgaactagaacaaaacagcgcagttcctgctttggcaagtcagttccgatggtccgtcttgcaggaatctgatttcgtggcttcaagatagatgtgcttgccctgtctctaatgcgcatcatctgggc

SEQ ID NO: 5496 - DNA, 934 bp, Setaria italica
  misc_feature (900)..(934): n is a, c, g, or t
  Peptide Sequence Number=SeqID_71470
ctcacaggaggggtaggaatggccccgctcatgccgaccatcgaagcatcacacttgaagaggcgacctgctgcggagaaggagaaggtagcatggcagtggttacctttcacgtcctctgcgcgaagtgacaaccttcaactctatcactgggttagagttgttaatggtgtcccaccaactggtgactatcagtttgcaaaatacaacaagaaagtggatgttctcaaatacacggatgaggagtacgagaagtatttaattgatcctgtaggcttggagcagggaggaaactgatcagctatttgaattatgtgaacggtttgaccttcgtttcatagtaatagcagataggtttccaactactcgcagtgtggaagatctgaagagccgttattattctgtttctcggtctcttctaattcatagctatccttcacaaggggattcccaattagcgtgggcagaaacatttctttagtcaaacaacgcagtaatgacatgtaaactcagttttttctgttatttaattcccatttcagcgctgaagattgaattttgcaatatttttgaatcatgcatagctttcaggcttacatctagagatgaactagaacaaaacagcgcacttcctgctttggtggaagtcagttccgatggtctgtcttgcaggaatctgatttcgtcacttaaagatagatgtgcttgccctgtctgtaatgcgcatcatctgggcggacctggaaccagatgatacatggtcgttgtgatgttcggttcggttttgtatttgtaatgtatgccatgtatgtagaggtaactgagatcaaaatcatacatgttcaactgatttctgagttgatcttggcgtcggttgtcttgtggttaaagaaaaacgtnnnnnnnnnnnnnnnnnnnnnnnnnnnnnnnnnnn

SEQ ID NO: 5497 - DNA, 743 bp, Setaria italica
  misc_feature (18)..(18): n is a, c, g, or t
  Peptide Sequence Number=SeqID_71471
atgttaatatgtaattcngtttttactttgaatgaagcgttgactacaactgaatgtcatagcttgtaatcagcagaactgcagttagagttgagcttgcctattcattcacggtgtgtttggtgaagattttttcattagttttaccacatacttgtgaaatgttacatttgttaccccctagcaaagtagttcaatttgcagtggatctctcatagaatgcagaagatgagtagtcttatctgtttctttgacactactggagctagggtactgttgtaggtgatctgacgaggccattttaacatcctatgcaggtagcatggcagtggttacctttcacgtcctctgcgcgaagtgacaaccttcaactctatcactgggttagagttgttaatggtgtcccaccaactggtgactatcagtttgcaaaatacaacaagaaagtggatgttcttaaatacacggatgaggagtacgagaagtatttaattgatcctgcttggagcagggaggaaactgatcagctatttgaattatgtgaacggtttgaccttcgtttcatagtaatagcagataggtttccaactactcgcagtgtggaagatctgaagagccgttattattctgtttctcggtctcttctaattcataggtctcggtcatttgatgatgtttctgggaatccccttgtgaaggatagctatgatgctgctcatgagactgagaggaagcgtgcatta

SEQ ID NO: 5498 - DNA, 2248 bp, Setaria italica
  misc_feature (2183)..(2248): n is a, c, g, or t
  Peptide Sequence Number=SeqID_71472
ttgttaaaaggttaatttagttactttgttagttactttttggtctagtaagtctaaaacgtctatttattggtaattcttcgttgtctcggtctcttctaattcatagggctcggtcatttgatgatgtttctgggaatcccttgtgaaggatagctatgatgctgctcatgagactgagaggaagcgtgcattatcagcacttctctcccaaactaaacagcaagaacgaaaggatgctgagactttggcagaagcaaaacgcattatggaatctcgtgctgctagcaaaaatctggatgaagctggaatgccttcgagctctgataatgctatggttcctgttgatggtgtatctcccttgagcggcactcatccaccgttaacacatccaaatacagctgcgaacagctccatacctaattcactacgaacagtaattctggaactatttcagattaagtcttagagttgattagttgtcatttcattttgttgtgctcctctaagtgacaccactcctaaattcagctcatcatagttgatgcatctgtgcgaccaccattcagtaacttctgaaggataatagatcagcatacattccagattcagtttatgcattttcaatgttagttcctgcattctagatctgatgtatcaccttgattttttatgatagtattctctcaggacacttaaggtagtgaggttgcatgaatattttatcccatcaaaacagtgaattcggataagtgccatgtgtgggggctcagatatcaacctcacaaccagtggcattttggaaaatgcatacttcacagttacactggcatttttgaaattgcctacttcacagtggcatttattcatgtttccgttaaaagttctgctgtcgtgttgaaaggcacatattagatatatttcaacctgccatatttgtaaattcgttttttcctgcattccatggctctatggcacagtatgctcatgataatcaggtagaaaacgaatgcatttgcatgctagaactgtattattgttctagtagtgttgagcagtgcagttcttaaccattccacttgcattctcatagacttagcggtctatgtttcctttcaaatgtgaaatattacataaatatatcctatttatcttttaaaatgaatattacagtgagtttcatccattctgttgaagatggctgctcttagtgttacacacagcagaaacagacctagtataaacatgccactagtgaccactggtcatatgattgtattaactgcagtgtctaatgaaccatacaaagattgatacgtctatttttataaattttttagatgcatttgacttgtatgctttcattttcagcttcgagtgtatttgagaacccatgcgcttgaccaaatggtccaagcagcaagtgcttcagctggacttagagttatcaaaagggttgatcagacactacaagatctaggggtgaatttgaagccaaaagttccaacaaaagcagtttgtgtagaacatcttgaattgcgaaatgagatactcacattgcttaacttacagaagcagctgcaaaataaagaggcagaagtttcagctaaccgagaaagttccttcacggaggcaccaagcacacctaagcgttctaatagagatattgatcggaccttcatccctgatacagttgggttttcaggtgaaagagcaggcaaacgggatcacaagcggaagaccactggaagatttatagacgcacctccgtcgccaacccagtccaagaggcctaggaagttgaagggatctgactgataatgctgttcaattagcgcgggcagaaacatttctttagtcaaacaacccacaggcttacatctagagatgaactagaacaaaacagcgcagttcctgctttggtggaagtcagttccgatggtccgtcttgcaggaatctgatttcgtggcttcaagatagatgtgcttgccctgtctctaatgcgcatcatctgggcggacctggaaccctatcatggtcgttgtgatgttcggttcggttttgtatttgtaatgtatgccatgtttgtagaggtaactgagatcaaaatcatacatgttcaactgatttctgagttgatcttggcatcggtgctgttagcgtaagacgtaaaaaaaaaaannnnnnnnnnnnnnnnnnnnnnnnnnnnnnnnnnnnnnnnnnnnnnnnnnnnnnnnnnnnnnnnnn

SEQ ID NO: 5499 - DNA, 1572 bp, Setaria italica
  Peptide Sequence Number=SeqID_71473
ccgccccgccccgttgccatccctacccctccaatgtcgcagtaggggtgaccaaaaccctaaccctaacttcctccaccgacgccctgctcgtgaggccgtaaacatggacgcgaaggacatcctcgggctcccgaagacccccttctcgtcctccctggagaagaagtcgcggccgcccaaggagccgcagcgcaagcccgatggcgtctcgcgcgaggtctatgcgctcacaggaggggtaggaatggccccgctcatgccgaccatcgaagcatcacacttgaagaggcgacctgctgcggagaaggagaaggtagcatggcagtggttacctttcacgtcctctgcgcgaagtgacaaccttcaactctatcactgggttagagttgttaatggtgtcccaccaactggtgactatcagtttgcaaaatacaacaagaaagtggatgttctcaaatacacggatgaggagtacgagaagtatttaattgatcctgagtggccctacccctgttgatcttgtagaggcttggagcagggaggaaactgatcagctatttgaattatgtgaacggtttgaccttcgtttcatagtaatagcagataggtttccaactactcgcagtgtggaagatctgaagagccgttattattctgtttctcggtctcttctaattcatagggctcggtcatttgatgatgtttctgggaatccccttgtgaaggatagctatgatgctgctcatgagactgagaggaagcgtgcattatcagcacttctctcccaaactaaacagcaagaacgaaaggatgctgagactttggcagaagcaaaacgcattatggaatctcgtgctgctagcaaaaatctggatgaagctggaatgccttcgagctctgataatgctatggttcctgttgatggtgtatctcccttgagcagcactcatccaccgttaacacatccaaatacagctgcgaacagctccatacctaattcactacgaacacttcgagtgtatttgagaacccatgcgcttgaccaaatggtccaagcagcaagtgcttcagctggacttagagttatcaaaagggttgatcagacactacaagatctaggggtgaatttgaagccaaaagttccaacaaaagcagtttgtgtagaacatcttgaattgcgaaatgagatactcacattgcttaacttacagaagcagctgcaaaataaagaggcagaagtttcagctaaccgagaaagttccttcacggaggcaccaagcacacctaagcgttctaatagagatattgatcggaccttcatccctgatacagttgggttttcaggtgaaagagcaggcaaacgggatcacaaacggaagaccactggaagatttatagacgcacctccgtcgccaacccagtccaagaggcctaggaagttgaagggatctgactgataatgctgttcaattagcgcgggcggaaacatttctttagtcaaacaacgcaggtaaatactagagatgagtaaaaactaacaaagtttttaactaagtaagttaaatttaa

SEQ ID NO: 5500 - DNA, 323 bp, Setaria italica
  Peptide Sequence Number=SeqID_71474
tgctgctgacatggcaattacaccgttcttaacaagctgcttcaagcaagcttcgtagtcgtccgctgctccctcagctgacaaggcatcatttatagcataaacttgcccaggaggaatcggcacctacaaagtggacagacagcacccagttaatgttacacacaaattacagacagcctgaaaattggcgagaacggaatgaccacacataagaacacaacttttatgtaacttccatactgatgctgtcatgatccgtctgagcctccacaaacatcagatcgtagacaagatcatattgagctcaagatatatttgag

SEQ ID NO: 5501 - DNA, 373 bp, Setaria italica
  Peptide Sequence Number=SeqID_71475
cactatgcaggcctcaggatcttttatttaagatgaaaggctttgagctaagataaagggcttcacttgttctgcaacatggacactgctggcttgtcagtgaaccaagtgaattctccgtcttgaagcacagccatctcaacaggcagcaggtcggatgaagtttgcttgtctgaaagtgctttctgtactgggccagccttcccagctccagtgaccaccattgcaatatatgcagacgagttgatcacaggaaatgtaaatgtgatcctttccggtggtggctttggagagtccttgatgtaggtgacccacctctctttctcgttaacaagagggtgaccaggttcgatctccagcttcttggaatggg

SEQ ID NO: 5502 - DNA, 1245 bp, Setaria italica
  misc_feature (1)..(80): n is a, c, g, or t
  Peptide Sequence Number=SeqID_71476
nnnnnnnnnnnnnnnnnnnnnnnnnnnnnnnnnnnnnnnnnnnnnnnnnnnnnnnnnnnnnnnnnnnnnnnnnnnnnnnntagttcttacttagttttttttttttttttttttggtaagaatagtcatcaaccgataaacttgaacatggttacaggtactaaaccaacacttgctgagcaatgtttcaaaactgttatttactaagctagaaccaacacatgaaacttcatccgatctgaaacacattactcagaacaatatactacatacagggctcaagtctcccttacatgaaatccatggagggcgaatgcaactatgcactatgcaggcctcaggatcttttatttaagatgaaaggctttgagctaagataaagggcttcacttgttctgcaacatggacactgctggcttgtcagtgaaccaagtgaattctccgtcttgaagcacagccatctcaacaggcagcaggtcggatgaagtttgcttgtctgaaagtgctttctgtactgggccagccttcccagctccagtgaccaccattgcaatatatgcagacgagttgatcacaggaaatgtaaatgtgatcctttccggtggtggctttggagagtccttgatgtaggtgacccacctctctttctcgttaacaagagggtgaccagggaagagagaggcaatgtggccatcaggtcccattccaagaagctggagatcgaacctgggaaacccagttgctgctgacatggcaattacaccgttcttaacaagctgcttcaagcaagcttcgtagtcgtccgctgctccctcagctgacaaggcatcatttatagcataaacttgcccaggaggaatcggcaccttagagagaaacccatcgaaggcgagcttgtagttgctatcctcatggtccttgggcacgactctctcatccacccagaagacgtgccacttgctccagtccaccgattctaggtacggcggctccgtcagcttgctgagcgcgtcgatgagggatccgccggagagcaccacagtgaaggcacccctctcggcggcgaacttcttcgacagatccgccgtgtacttcgccagagacactgcgaggtcttccttggtatcgaagatgagcagcttctgcttggcgggggcggcgccgtcggtggccatggccgcggcggggcgaatgggaaagggaagagagcaagaggagaagagacggggcctgggaccgattctt

SEQ ID NO: 5503 - DNA, 878 bp, Setaria italica
  Peptide Sequence Number=SeqID_71477
gaccaacaaccgatggaggacattcggctgccggcggacgtcctcttgtcggtgatctcccgcgccgccgcggggccgagggatgcctgcatcgtcgccacggtgtcgccggcgttccgcgcagcggccgactccgacaccgtctggtcacgcttcctcccggctgacttcgccccgctcgtctacccggcgcctccgccaagatccaagaaggagctcttccttcgcctctctggaaaccatgccctccttgaagacggcctcacgagcgcgtggctggacagggagaccggcgctaagtgctatatggttgcggccagggctatgaggattatctgggtggacacgccggactactggcgctggatcccgcgcgaagactcaaggttcccgacatgcgctgaactgttagcggtttgttggctggacatctccggtaccataacatgcaggatgctatcaggtgacacgcgctatgcagcctacctggtattcaagatgaccgatgactgctatggcctggattctcctcttcagcaggcatcggtcagcgtcggagagggcacatcaacccactcggtctgcctacagggctacgtgggcgacgaagagaacgacataagtgaggaaggacttccacctaggctcccacatgagaggcctgatggttggatggaggtggagctaggagactggtacaaccatggaggcgacgacatagaggttcgtgccagtgtgaaggagaccaggtttggaggcaactggaagaaagggcttattgttcagggccttgaatttagacctaagaactgattgaggccgagttgatcataaaattatgtcccagtttcgagtgcattcatttttcagttgagttg

SEQ ID NO: 5504 - DNA, 251 bp, Setaria italica
  Peptide Sequence Number=SeqID_71478
gtgcactacattggtgttggacctgggacaccaacaagctcctctatcctctccacatagaggcgcgcagcttggggaagttcattgtaacttctaatggaagaaatgtcactttgccaacctggcagcacctcatagttgacctgtacttgctccagggtgtcaagatccccagggaaggattgtagtttctgtccgtcggcttggttatatgaaacaccctggagcaagtacaggtcaactatgaggtg

SEQ ID NO: 5505 - DNA, 397 bp, Setaria italica
  Peptide Sequence Number=SeqID_71479
ctaatggagagcaaaatttcagcaagcatgcgcatacatcgatcgggtatctcattttcaccagaaactgaaaggcaggcaccagcagggtatccgatatagattcatatcacacattacaccaccaggcatggttcacaattagtgcaaaatatatgatgggccaccaaacaattggtggagttgaacatagtgcaaaactcatccttattcaccttagctgatgtttcagtagactttttattagtgcgcgcattagatcactccaccagtcagtaaccttgctgtatcacagctaccatggcaacgaagatgaataataagagcaaaatgctcaaggctagttagggctccattgttccgcccaatcgaggacaaaatgaagtggcttttactt

SEQ ID NO: 5506 - DNA, 1818 bp, Setaria italica
  Peptide Sequence Number=SeqID_71480
ctttgttgttgagttagtttttttttttttttttattttcggatatagattcatatcacacattacaccaccaggcatggttcacaattagtgcaaaatatatgatgggccaccaaacaattggtggagttgaacatagtgcaaaactcatccttattcaccttagctgatgtttcagtagactttttattagtgcgcgcattagatcactccaccagtcagtaaccttgctgtatcacagctaccatggcaacgaagatgaataataagagcaaaatgctcaaggctagttagggctccattgttccgcccaatcgaggacaaaatgaagtggcttttacttgtatatgagagcatctctcccaggtccaacaccaatgtagtgcactgggacaccaacaagctcctctatcctctccacatagaggcgcgcagcttggggaagttcattgtaacttctaatggaagaaatgtcactttgccaacctggcagcacctcatagttgacctgtacttgctccagggtgtcaagatccccagggaaggattgtagtttctgtccgtcggcttggttatatgaaacacccaccttaatttctgacagcccagacagaacatcaagtttggtcaaattaagtgaagagaacccattgatttggcagcagtacttaagtgcaacaatgtcaagccagccacatcgccttgggcgacctgttgtcgtgccaaattccattccagctttcctaaggcgatcaccttcctctccaaatagttcagttgggaaaggaccagagccaactcttgatgtgtaagccttgaccactccaatcaggtcaccaactacccttggggcaatcccaaggccagtgcatatcccgccagctgaagggctcgaagaagtcacaaatggataagtaccaaaatcaatgtccagcatagttgcttggcccccttcaaccagaattttcttcttctgttggatagattcatttaacacatgcacagtatcagcaatgaagggctccaagcgctctgcaaacctcttgtacctctcaacctcttccttgagcatacttttgctgtactcgaagccttgaaatcttgaagcagcatctttaaataagacatcaagtttatccccaaaagtgtccatgtgccttagatcacaaactcgcagtccatttcgagttaccttgctggagtaacaaggtccaatgcctctcttagttgtcccaataaaagaattttccagctcagcttccctaagtccatcaacaacctggtgcagatcaaacagcagatgtgctcgatcagagaccagtattcttccatcacagcggactccattggactcaaggccgtcaatttctccaaagaaccctggaacatggatcactgctccattgccaacaacacaaagtgtcccttcatggagaataccagatggaacaagatgaagggcaaacttcttgccttcagcgttgtagatggtgtgtccagcatttgctcccccctggcaacgcgcgacgatgtcgaatcggggggcgagcacgtcgacgagcttgcccttcccctcgtctccccactgcgaccccagcacgccggagacctggctcagcgccgaaaccctatcctccgcggaatccgcgtgaacagccgccgcggccgcggcggacacggcggcgggggcatggggccgtgtcttaggaagacgcgccgactgcgccgccgggaaagcaggggaaagggatttcccgctcccggcggcggcggcggcggcggcggccgggtggctgagtgtggagagtgacatgatgg

SEQ ID NO: 5507 - DNA, 1229 bp, Setaria italica
  Peptide Sequence Number=SeqID_71481
ccgcctccctccccgacgcgcccgcgcccgccgccgcctccaggtccgtggtcgccgccggcgtcggcgcgggcgccggagtggtcaagcggaagcagctccgtggggcgctgttcaagtacgggcccaagtccgcgcaggtagcattcagaactggtgattttaaccatcaggtgatcttcattggtggcctcacagatggacttttagctactgactacttggaaccattgtcacttgcattggaggttgagaaatggtccttggtccagccattgctttcttcatcatacactggatatggaatttccagcttagagcaagacgcattggaactagatcagctcatcagttacttaataaataaagaaaattctgaaggagtaatattgcttggtcacagtacgggttgccaggatattgtgcattatatgcgtacaaactttgcctgttcgaaagcagtttctggggtcattttacaggcaccagtaagtgacagggagtatagagcaactcttccagaaacagctgaaatgatagacctggcagccaaaatgattagcgagggtcgtggtatggatttgatgcctagagaagcaaacccagatgctcccattactgcctacaggtaccattccctttgttcatatatgggtgacgatgacatgttcagttcagatctaagtgaagatcagctgaggcagagacttggtcacatgtcaaccacacagtgtcaggttattttttcaatgggggatgaatatgtccctgaatatgttgataaggaggctctagtagacaggttgtgtagagcgctgggaggtgcagagaaggttgaaatagagtggggaaaccatgctctgtccaatagagtccaagaggcagttcgggccattgtagattttgttaagagggaggggcccaaaggttgggatgatccatggagctagatatagcagtcttatctcatttgtaactagtctatgattttctccttattttatttctccaattgtaacatttttcttttgcgttattgttggtccaatttttattgtagtgatatgctggcttatttctcagtatgcaccgtgttcagatatggtgtatctgttttgtaaattgcaatgagttccaaatctttttggttgccaaatcagtatttggtgattacaagttctgtgatatttcaacatggaaaccgtacaagacggtacaaaaaaaaaaaa

SEQ ID NO: 5508 - DNA, 1542 bp, Setaria italica
  Peptide Sequence Number=SeqID_71482
tcggtaaattatttctttcttactattcctttaaagttctacatccttaaagcatagccaaaactcattgactgagtcaaccaatgacacggaatcaactgtgttaagactaagcagccatcaggccacacttctgctctcatctatttgggctcaagcgatttctccaaaaaatactcctcaaaattatgaagctatcgctcatacttatagtttgcttctattatttctgggatcaaaggcatctatttttgaggctctttctcccagctttcagattgcattttctttactgagctattcacttggaacagattcattgccaccatcctgccgtcgatccttgtttactctggctacatccatgattgtttttgcttcaagaactttcgatgtggcacctcttttgccaatttgtaaatcaatgctcaatgatggaacaatggatccattccttcgtttagtacatgagaacaaacttcaggttgtgaaggattatctagaagacccatcaaaatcctatggctcaacagaggacaatgaaaatgccttgaggtctatttcagcagtagaactaacagagagaaactctcgagaatccatggtctctgcaattgtgaattccatagcatatataccagatgcagagttagaagatataagaagtcaactgctaactgacttctctcctgatgacatgtgtccaactagtgctcacttttttgaatcacctggcaaaaattcagagtcaaggcctggtgatgacgctgactatcaagaggccgaacttatcgatgtgacaaatgacaactatacatttgcggaagtctctgcaactaaaccaactgctacagacattcctgcgatcacaacaaatcttttgagtattgatgaacttctagaaacagtggtcaatgacacatcatctgagacccaaagatgctcagcaccagcggccccagacatcccattccaggagatgactagccactgcgaggccctttctatgggaaagcaccacaagatgtctgtcctcatgagcttcaagaacaacaagcaagcgcccatcgtgccaaacaatcagattaaccacgtcgaagcaggccatacctctaacaaccagaacacgaacccgttcctgcagcagagcctggatggctacccgcagagcatggctgccggcgagttacaggatgctgccggcgtccagcagcagcatttcctgaggctgccggcgtcgagcccgtacgacaacttcctcaaggctgctggctgctgattttcgcatgcagaaaccccctccgtgtaactgaaggtatatgtaacagtgtggatgctgagtttgctgctgatgggtcacaggcaaaagttgccattttgctgctgtttggctgtatccgtgtgacttcagtaaagggaaagcgaaaaaggaagcgcacccaacccaccgcgctcattgccgtgtgctgtgtatttgtaaaagaaacctgccatcgtcgaacttatatacaatctaaggggatacgaggtgttaaaaaaaaa

SEQ ID NO: 5509 - DNA, 258 bp, Setaria italica
  Peptide Sequence Number=SeqID_71483
ggtggaagggcacaagagtttcccgagtggccacacctcatggtcatttgccggcctggggttcctgtcatggtacctcgccgggaagatcaccgtgttcgaccgtcgggggcacgttgccaagctctgcgttgtcctcctgcctctggtcttggcggcgatggttgccatctcgcgggtggatgactactggcaccactggcaagatgtctgcgccggcggcgtcctcggattggtggttgcttcagtttgctacct

SEQ ID NO: 5510 - DNA, 370 bp, Setaria italica
  Peptide Sequence Number=SeqID_71484
tctattgttcaaatatccaaacccaacacaaatggcatttatttttttacttggagggagtaaacttccatatacatatcacactatagcaatgaaggctgtccacatgtaagtggcacatggtaataatatgtggcgtgcacttggactaaggcacgtgtcatcgtctagcctgctagatggcagacattttggtatgtacgtagaaaagtctttcacatgcattacggtgtttggcaatcataatgggcccgggctacaaagtaacttacacactgaggttgaatagtgtgctgtagtaatgcaagaccggcaacatctaaggctacgatgattagcacatcgtcccctccaaaaccactactacctt

SEQ ID NO: 5511 - DNA, 289 bp, Setaria italica
  Peptide Sequence Number=SeqID_71485
cgcagcacaggaccatcaaccatgcccgtagccggacgcggccgctcctccgccgtcctccgcgcgctcctcgccgcgccgaggacgaggccgcccgcgcgggccatccacgaggggcccgacaccatcgaggagctcctggaccggcacctcgtgaagaagcccgcggcggtcctcgacgacgacgcggcggaggccgaggcgcgaaggcggctgacgagcacccggcgggaggcgctgggcctgtaccgagacatcctccgggcgacgcggctcttcgcgtggcccg

SEQ ID NO: 5512 - DNA, 257 bp, Setaria italica
  Peptide Sequence Number=SeqID_71486
atggaggagagccccatgtacgccatggagaagagcagggggtacctgcgcccgttgcgtcttctcttcgtcttgttcatcgcgttcgccttcgtcgcacggtgcggaggagcaagaatgctgagaccagaggagctgctgcgtcaccaccactcttcctctgacccctactacagcacgccggtgatgcctccctacggcgacgtgttcggcggcacacccaaccctcctccccctccggctctcccaactgcggg

SEQ ID NO: 5513 - DNA, 514 bp, Setaria italica
  Peptide Sequence Number=SeqID_71487
gcggatgggcgcgatcagctcggagactaggctcacgctgtacgtgacggcggtcacgggcttgttcagaccggcggcaacggtgatcgggtcgaggagggtgcggtggttgcagacgtagaggcgccctcctgcctggtgcttctctgtggcgttcagcgatggggcggcgaccaggcgggagcgcatgccggtggccgcggcgagcgggacagagacgcggtaggggagcactgcgaatgcgaggctgcgaaagacggcaaggaagattccccagggaaggtaggtgtacatggcgaccgccgcgaagaaggtcggcctgaaggcgaggcggccgtcgtggaagaccaactttttggggtacttgtccctcggcagtagctgccacgccttcttgtcggcttcgcttaggacataggtctctttgcaatagcgagagatcacatggtgcatccagctggctgcccgaacaagccccacagctccatcacccttgctcctcatctcctccatt

SEQ ID NO: 5514 - DNA, 698 bp, Setaria italica
  Peptide Sequence Number=SeqID_71488
gtccacaaccacaagcagaggatcgtcacttcctctcattattcaaaatcaagacacccgtgggcgtgaatacgtgatcaccaccatttacgtaatactgattccccccgactcgccacgacggcgattctcccgtgcggccggcggcgctcaggcgaactcgccggggtgcgcgacgatgtactcctccaccttcttgatgaggcccaggtagccatggacgagcttggcctggtcctccggcgccagcggcgtgccgtccaggcgctcgtactccaccgtgaccttgcacacgcaggcgccctcgccggccggcaccaccttcagctccgacacctgcgacttgagcttcgccgccacctcgccgccctccaccaccatctccgacctcaccacgagcgccgccgcgtcgcgcgccagcaaccgggtcttgaacaccttcgcgtcacccacggacgggttgagcttcatggtggtgacgctcccgggcccgccgtcgccctcgacctccacggcgtcgatcatgccgacgcaggccttggtcatgatggacgcgtcgccggcgaggaaaaccttccacagcagctcggccgacacggccaccgggcactcctctgtgacgctgcaggcgaccatggtgctagtagtcagttgctcacaagttgtcactgatcagtgaagacgtactggtcactgat

SEQ ID NO: 5515 - DNA, 231 bp, Setaria italica
  Peptide Sequence Number=SeqID_71489
ggtcagtgacctgcattttgctccgccaaggtgcgccctgcgatcatttccgtcacggtctagctctagcatatgaagaactagcgaaagtgacacgcaaatagcgcggctatattcaatactatgttcttcttacaattcacttatatatatctttaccctcttccaacatttatttaagatagtctgtacatacggaccaaaaaaaaaaaaaaaaaaaaaaaaaaaaaa

SEQ ID NO: 5516 - DNA, 663 bp, Setaria italica
  Peptide Sequence Number=SeqID_71490
gtccggggctgcgagttcgtcgccatgttcgacgccgacttccagccggcgccggacttcctcgtcaagaccgtcccgtttctcgtccacaaccccagcgtcgcgcttgtgcagacgcgctggaagttcgtaaatgccaacgactgcttgctgacaagaatgcaagagatgtccatggactaccatttcaaggtggagcaggaagctggctcttcactctgcaacttctttggctacaacggaaccgctggagtgtggagaacacaagcgattgtcgagtccggtggttgggaggaacgaactactgctgaggacatggacttggcacttcgagcaggcctcttgggttgggaattcgtttacgatggcagcataaaggttaagagtgagctgcccagcactctgaaggcataccggtcccagcagcatcgctggtcatgcggccctgcgctgctgttcaagaaaatgttttgggaaattctttctgccaagaaagtgtcggtttggaagaagttgtacatgatctatgacttcttcattgcccggaggatcgtcggcacattcttcaccttattctttttcagcattctgattccgctgatcattctattccctgaagcgcagatccctgtgtgggaagttagaatactaataataccccaa

SEQ ID NO: 5517 - DNA, 492 bp, Setaria italica
  Peptide Sequence Number=SeqID_71491
tacattggccggttggatcgattaatagtgcaggtcctggacgactccacggacgccgtcatcaaggagcttgtgaagagcgagtgcgagcggtgggcggcggaggggatcaacatcaagtacgagacgcgcaaggacagggccgggtacaaggccgggaacctcaaggaggggatgcgccacgcctacgtccggggctgcgagttcgtcgccatgttcgacgccgacttccagccggcgccggacttcctcgtcaagaccgtcccgtttctcgtccacaaccccagcgtcgcgcttgtgcagacgcgctggaatttcgactgaaccagcgcaatagcgtatggttcagagcttcggatcatcggatgagcgtgatccagacctggagagaacagccgaacaggatcaatatctccgcttctgaactctgaagattcatatgtgttcattagtcagttcagtttcagctaaagtcatgctttgcgatctaat

SEQ ID NO: 5518 - DNA, 223 bp, Setaria italica
  Peptide Sequence Number=SeqID_71492
atcctcaagagtcatctccccaagcgttggctgccgctcccgtctcctccgaccaccagttgtgacatttctcttcggtgcatcttggatgcccttccacacctcatccacagtcttcttgctgagctcaggtggcatggtgatgctcccctgtcgcaagaggcccgaagtctgctcatactggctggtagtgccaccatcatgctccaggccatcaggaaag

SEQ ID NO: 5519 - DNA, 354 bp, Setaria italica
  Peptide Sequence Number=SeqID_71493
ccgtagatggacagggctgtgccaagcccgaagtaaatacgtcaccagaatgaaggtccactgtgtgtagtagtagaagatgttccggccatcggagataacaatgacgacgagcaggctgaggaggacgaagaaggagatgagcctgtacgcgagcagccacgccggatggatgtcccggaggcagggccgccacgcctcgtcgtcgtacagcaccccgggccgactccgcttcccgccgtcgaccccgttcgccgcccgccgccgaggacggggacgcgcccgcccgggcggcggtcggcgccggtgccctcgtgacgccagatgaggtaggaggcgacggacatgcagccg

SEQ ID NO: 5520 - DNA, 1287 bp, Setaria italica
  misc_feature (1262)..(1287): n is a, c, g, or t
  Peptide Sequence Number=SeqID_71494
cttgatgagccctgcgactgacgggaagccccatgctaagggggtgcatcaactggatattgagacagggaaggtggtatcggaatggaagtttgagaaggatggagctgatattaacatgagagatatcacaaatgatagcaaaggtgcgcaaatggatccatcggaatccaccttcttggggctggatgacaatcggttgtgccgatgggatatgagggaccggaggggcattgtgcagaacctggcaagcgcgactgaatcaccagtattgcagtggacccaagggcatcagttttccaggggaacgaattttcagtgttttgcatccactggtgatggttcaattgtcgttgggtcactggatgggaagatccggttgtattcgaagagctctatgaggatggcgaagacagcctttccagggctgggttcgccgattactcacgtggatgtgacatatgatgggaagtggatactggggacaaccgatacatacctgattctaatatgcaccattttcattgacaaggatggaaaggagaagactgggtttaacgggaggatggggaacagaattgccgctccaaggttgttgaagctcaaccctctggattctcacttagctggcgcaaacaataggtttcgggagggcaggttctcctgggtgacggagaatgggaagcaggagcggcacctggtggccacggtgggcaagtacagcgtggtgtggaacttcctgcaggtgaagaacagccaccacgagtgctaccagtaccaggaggggctcaagagctgctactgctacaaggtgatcccgaaggacgagtccattgtggccagtcgcttcatgcacgacaagtacgccatcagtgactctcctgaggcgccactggttgtggccacgcccatgaaggttacctccttcagcatatccagcaggcactagctccgtgctgttgctgcccccttttcgttgggcctggtcgattggttcgcatgttgtgccgtgtaactcacacctgcagataatctgttttcatttcgttttctgggtagacttaactgttataagcgtggtgactatcttcccgtttgattggtttccatgttctgtcgtgtaactcacacctgcagtagtctgtttcgttttgttttcttggtagacttaactgctataagcttggtcaccatcttgtcatgatttgttggaagatcgagaattctatgtatgatgacttgttaggggttggaaaaaaaannnnnnnnnnnnnnnnnnnnnnnnnn

SEQ ID NO: 5521 - DNA, 321 bp, Setaria italica
  Peptide Sequence Number=SeqID_71495
agggttttccacgcctcgaagcggcccgtgctgtgactgtgagtgaatcgcacgagccggcgggacagagagcaggacaacggatcctcgccgccgacgccgacgccgacgccgccactcgccactcgccacctgcccacctccgtggctccttgccccggccccccgctgcaagcctgcaacgcatcctcctcgcgctgcacattgcccggcggaccggccggtccgccctccctccgtcccgtacgcgcccctgccccatcccaccaaaccaaaccctagccgccgccaccgccaaagccggtagggatggcgaattca

SEQ ID NO: 5522 - DNA, 206 bp, Setaria italica
  Peptide Sequence Number=SeqID_71496
ctcttcttctcactcaacaattcttcgtccactaaatcaggctcctgcttcacatggacgatgatttccttatttgaatgtttctccttcttcctcttctcgctgccgattcctgctgaagagggaatgtgcgattcaacgccagcagcagctatgccctgctgccgatcctctttattcttcttcttcttgcttgcttcttcttc

SEQ ID NO: 5523 - DNA, 584 bp, Setaria italica
  Peptide Sequence Number=SeqID_71497
tgtacttggttctaagtaagtattgtattttagtcttgtagtaaacttgtaaacctttttgtagtttggtagtaattcttggatagaattaacttaattgagcacccagaaaaaggggaaaaacagaggctacgcatttcttgacttcagaacgcatgtggatgctgtggctgcttttctgaaactacaggaaagagatctatatcttggtactgattttagagcacacatatcattttcaaatactctttcacaagatgatgagatcatggaaaaggtgaaatctgttttcttggatggcttaccacctcactgggatgaagacaaagtgagagaaatgtttggaaaatttggtgaaattgataacatacaacttgctagaaacatgttcacagcaaagaggaaagattttggattcatcggcttcacgacaagaaagtcagctttagattgcattaaaatggtcaataaagagggtgttggtgaaggcagtggaaaggtatttattctctggtaccatttctaacccctgataccatttcttaccatttgatccagatgtgtattataattacttaattact

SEQ ID NO: 5524 - DNA, 614 bp, Setaria italica
  Peptide Sequence Number=SeqID_71498
cttttgcggagagtcgatactctagtaaatatccaagatacaggcaggaaatgcatgaagaacatatggagcgagatgcataccataggagcaaatatggacattcataccatgacagggtgcatggagcatcttgcccagaatgtaatttgagtggtcaaaattgtgattaccccaatggtgaggaattttctgcaaccagtggttgtgagcaggcctactataagacggaccgtgaccgtacgccttcaacgtctcaagtagcatctcattgtgaggattcttgctgcaagggcaatcagttgatgcctaaaagttcttctgtgatgtgtgattgtgatgattgctttgttgaacaagagtcaactcctagtccaagtgatcatgctagaactagatctaatcttcatcgccggtctgtcaaatcttctcgtgaacatcggagacttgcgcccgatgagcagtctgcttttgaggttgagtacactgtcagggaaagccgaagccggtattcatcttccagggatgcgtccagtacccactccaggaagcaccataggccagcaagataggctaactgtcacaagatagaagaaaatctcctagcagctcgc

SEQ ID NO: 5525 - DNA, 1820 bp, Setaria italica
  misc_feature (1782)..(1820): n is a, c, g, or t
  Peptide Sequence Number=SeqID_71499
gcggacgccggggacgttgaggaggtacccctcgtgcgggatccggcggaccagcgcctcaacaagggattcgctttcgtccgcttcgccgccgcctggcaggcgcgctgggcggccaacgacctccgcgaggctacgattaagggaaaagcatgtggaatatgcaagaacagtgaaaatgagacccttcatgtacggaatatatgctttgactggtcaagagatgatttagctgagaaactgaaaccttttgagttggagaatctggatagaattaacttaattgagcacccagaaaaaagggggaaaaacagaggctacgcatttcttgacttcagaacgcatgtggatgctgtggctgcttttctgaaactacaggaaagagatctatatcttggtactgattttagagcacacatatcattttcaaatactctttcacaagatgatgagatcatggaaaaggtgaaatctgttttcttggatggcttaccacctcactgggatgaagacaaagtgagagaaatgtttggaaaatttggtgaaattgataacatacaacttgctagaaacatgttcacagcaaagaggaaagattttggattcatcggcttcacgacaagaaagtcagctttagattgcattaaaatggtcaataaagagggtgttggtgaaggcagtggaaaggttctcataaaagcttgtttacaaaggccaagacaaaattccaagaagcattcctggcagggctctaattccatgttaggtgtcagaagaggatttgtagacaaaagttctagtagtagacaccactcagacagatataggcattttgaaaggcgtgattattcagataataatgctcatcgtcaccgctctatggatgttgatgaaaggcctatttctgtgcgtggatacagagattactatcgaagagattatgcagcctatgccccaagccctaaatatggaaggacacattcgggaaccaggttcagggaagcttatgcggagagtcgatactctagtaaatatccaagatacaggcaggaaatgcatgaagaacatatggagcgagatgcataccataggagcaaatatggacattcataccatgacagggtgcatggagcatcttgcccagaatgtaatttgagtggtcaaaattgtgattaccccaatggtgaggaattttctgcaaccagtggttgtgagcaggcctactataagacggaccgtgaccgtacgccttcaacgtctcaagtagcatctcattgtgaggattcttgctgcaagggcaatcagttgatgcctaaaagtttctttcttactttgataaaagttcttctgtgatgtgtgattgtgatgattgctttgttgaacaagagtcaactcctagtccaagtgatcatgctagaactagatctaatcttcatcgccggtctgtcaaatcttctcgtgaacatcggagacttgcgcccgatgagcagtctgcttttgaggttgagtacactgtcagggaaagccgaagccggtattcatcttccagggatgcgtccagtacccactccaggaagcaccataggccagcaagataggctaactgtcacaagatagaagaaaatctcctagcagctcgcttctgatattttgtagcatgatcgatatcatcgcgcttttgacatcctgtcgcgttgcagaatctgcttgaagaacagcagtataccgttctgaagttataaccaaatatctttttagaaccttaaaaaaaaaaaaaaaaannnnnnnnnnnnnnnnnnnnnnnnnnnnnnnnnnnnnnn

SEQ ID NO: 5526 - DNA, 704 bp, Setaria italica
  Peptide Sequence Number=SeqID_71500
ttttgagctggatgctacccattcgccacaacttctgaatcagttccttccctctccccacattctattactggttgggtggtgggatcatttcaccatctgccgtgagttttgacattgataccattcccttcttctactcccatagagaccggcgattccgtcacaaatataaattctggtccgctctccacatcaacaccatccatcagtttcttatagaatttcccatccttagcatcatataggttccctgtgcgcacctcctgcgcaagagcgcatggccagcagaacagccactgcacatagtctgtcaacgatgctgatccacagaaccacctgcttctgggcagcccaaatgtcttcctcatctggatcctccagaaacccccatatagcaggccaaagaaacacaggataatccccgcagcaccaatgaaatcacctaggatgtagctgtggatgttcatcgctgtgatgttgaacaaccagaatggcgtgacacacagcagcaggaacgtgaatgtgtgcacatacatgttgccaaacccaagtcgctccatgttccagccgaacacacagaacgtgaagaggaaagaaaggtagcaagctgtggggtcctcgctgcaatcaaacagcccacctgcccacgcgggattgctcaccactgttcttgtttctgatgacttcgtactaagtaactt

SEQ ID NO: 5527 - DNA, 604 bp, Setaria italica
  Peptide Sequence Number=SeqID_71501
tttttttttttagtttagacacaaagacacatgtgaagattttgttattccggtgattaggatatttacattagggggatccccatggatttatatactaggatactcgctctctcgtagagagcagtacttgctaagtagctcacaccaagtaggaatatgactgaacgaacagcttcccaagtacctgggttttatttcttagtttcatagagagtagacaccaagtaacaagatggtagtgcatcctcctccaggatgcagtgttgtcgcttcagttcaggccctggatggaagcgcgcagtttccaatccttggctcctcgtagacgacggaggcggcgccggcgaagtcgcacgtgccgctggccctatgcttacgctggtaatagctgttgaacgcgtgcgaggcgtgcgcaaccttggtgttgggttcgaagcatgccgcgccgggctgggtgtcgctgcagtccgcgccgttgctgcacgcccaattcagcgcctcctgcagccgcccgtccccgactgccgcgttcgccacgcaccagcttgcctttgcactgcacatgcttggctcctggtagacgacggaggcggcgccggcg

SEQ ID NO: 5528 - DNA, 533 bp, Setaria italica
  Peptide Sequence Number=SeqID_71502
ctctggcttcagatggccagccatgacaccagcttcgctccgggctccctgatcctcttcgggagtctggacttcctcgccaccggggaggggatcgagctgatccctctcctcgtcttgcccgctcgttccgccatccctggccccgccgccgggacagcggcgagcgactaggcgcgcgccggagggcccttcccaggtggtcggctcttcgggctgcgcaatgctgcgacgacgtacggtcgcctcctgacgcggtccatgaccgtgtcgctcgcgagcaacaagctcacaggcgtggcgaggacgatctccgacgccggctctagcaacgggagccgccacccctcgcgtgagtgcttcatggccgaagtgcactccgaggggtccaacgacgacggcgccgaagggagatagaggactcccccccccgcgcgccgcagctacgaccggggccttgccaagggccccagagcgccttcggcagccagaggcacgcgcagcgtcccgccaagaggtcgagcaccccagcc

SEQ ID NO: 5529 - DNA, 263 bp, Setaria italica
  Peptide Sequence Number=SeqID_71503
tttttttttagattgggttggatcagggcgcgtttcaaagatccgaaacagctgcaggaacttggctctgtccaactggttctggctccaactgacggtctggcagcctccagcacacgagcaccggggccactggtaatgttgttggagacatacagggcattgggtgtctcaatgtctggacggaaggttggagcagcaaatcagcaatggcatggttcactgtcacgacaccgatacaaattaggtattcgtgctttcat

SEQ ID NO: 5530 - DNA, 445 bp, Setaria italica
  Peptide Sequence Number=SeqID_71504
ccttgggggtacatctaataacaagctcaaagtgcccgagatcagagtccagtgtagtgggagtataaggcttgattacttcctcaccagcggcatcctgtcccctgcagcttatatgttgtcctattggaagacccaagacagaagtaggtgtcggaagcgcaaacttgaacttggcaacattatggctcagttgcctcttctcgacgagtttaaactccctgaaggtctcagggtccaagcaacccatgggcttcctgctgcggaggaagaggtaggcggcgccggcggccacggctacgacggcgaccgcgacggccaccgtggtctccagcctctgcccctgcaggaactccatgccccccgcggccaccctttcccttcctctcccgcgggtggatgcgcggttggttggtttggcacggaggggggagattcgcgggcg

SEQ ID NO: 5531 - DNA, 1250 bp, Setaria italica
  misc_feature (1218)..(1218): n is a, c, g, or t
  Peptide Sequence Number=SeqID_71505
ttttttttgtattggtttggtattctagggtcgtcgttttctaaagtattccgtaaactagtcttgtctaggtaactttggtcttcttgtccaactggttctggctccaactgacggtctggcagcctccagcacacgagcaccggggccactggtaatgttgttggagacatacagggcattgggtgtctcaatgtctggacggaaggttggagcagcaaatcagcaatggcatggttcactgtcacgacaccgatacaaattaggtattcgtgctttcatcgagagagatactttggtgctttgtggatgacgagctacgtctattggatctatatggcgacaggttcagactttgtccactcaaaggggaaggaaaacttgttccgtcgctgttattttggtatgcttcggcagaggcgggatcagaactggaactgcatttccttcgtgtagccaagatcgtccaggtgcgcggccatggctttgttcatgggaggaggcccgcatctcaacacctgaatgtcggcagcaggcgctgggcaatgggcttggatcatttcctttgacacgaacccaacaccgccgtcccagatttcaggaggctgattcaagacatagtagatcttgaaacgatcgggatagttttttgccatactgtccagttcttccttcagaagaatatcatcatatgtgacattcgcatagattaggtgaacttttgtattgtcttctgggttctcaagaattgcccttgtaacttggaacattggggtgatgcctgatcctccagctatcattccaaatgctctcacttgtccaggttggtacttgaaacggcccttaggtcccttcacagacaaatagtcgccgactttcatctcacgaaaatgatgagacattcttccttgggggtacatcttaataacaagctcaaagtgcccgagatcagagtccagtgtagtgggagtataaggcttgattacttcctcaccagcggcatcctgtcccctgcagcttatatgttgtcctattggaagacccaagacagaagtaggtgtcggaagcgcaaacttgaacttggcaacattatggctcagttgcctcttctcgacgagtttaaactccctgaaggtctcagggtccaagcaacctacaggaggagaaatcataagcgaaattaggaccaggttgtgatccctgtgtttcttaaaaggntgagttgcaaggttcaaaagcagtatgctcgc

SEQ ID NO: 5532 - DNA, 642 bp, Setaria italica
  Peptide Sequence Number=SeqID_71506
tgttctggtgttaaactggtgatgcttgagtcgaattgcaatagattttatttgtacaaagtgactaagtgagtagatgataatactattgaggcattgtagcctttgttccgtgacttgcccatcgcaggcgttttattctcaccagaacagtagaaaacgtctccttgttcattagtgaacagacaccatctcacttcttcctggcaacagcagctgcaattccaccaaccagaagtcccacagcagttgtcgctattcctatcccaataagaccatctttggcaattttatcttctattgccttcttcagagaaatggcctgcctccaatcaggttgaatctccaaacagcgttccacaagttgccggcttttttgagtagtcaccattcctgtagtgcccaacagccaacaagtacagcttttccctagtctgcagaggactgccagagttatccaaagaagcttcaagcatgctaattccacggtttacatcgtccgtctgcctggagtgcacaagggcccaagatagcctcataaggctatcattcctctgcccttcagttgaagcatcagcaagctctctttcacattcccgcgtattgtattgttcgtcggttcgtctacctaggggtattgtt

SEQ ID NO: 5533 - DNA, 2126 bp, Setaria italica
  Peptide Sequence Number=SeqID_71507
cccaggtggagctctggggtctctaggcgtgtgccatgtgttgctggtgctcctgcctggagtgcatccataacatccctcccctcaacctcctcttcctccacttctccgacccagctctcccaggcggaggaggaggtgcagcttctggacccgtgtccatggcctccatctcggttcccaacccggtcccttccgcgaccgaagacgccgagaacattcggaaagccgtgcaaggatggggcacggacgagaaggcgctgatcgagatactgggccaccggacggcggcgcagcgcgcggagatcgccgtggcgtacgagggcctctacaacgagacgctcctcgaccggctccactccgagctctccggcgacttccggagcgcgatgatgttgtggaccatggacccggcggcgcgcgacgccaagctcgcccacaaggccctgaagaagaagggcgaccggcacgtgtgggtgctcatcgaggtcgcctgcgcctcgtcgccggaccacctcgtcgccgtcaggaaggcgtactgcgccgcctactccgcctccctcgaggaggacgtcgccgcctgcccgctctacaaggaccccctcaagcagttcttggtgcggctggtgacatcgtaccggtactccggcgagctcatcgacgacgagctggcgagggcggaggccgcggcgctgcacgacgcggtggtagccgggaaggagccgctgcgcggcgacgtcgtgcgcatcgtcggctcgaggagcaagccgcagctgaaggcgacgttcgagcggttcaggcaggagcacggcaaggccatcgacgacgtcctcgaggaacgccgcagcgaccagctcgcggcggtgctcaagaccgcggtgtggtgcctggcgtcccccgagaagcatttcgcagaggtgatccgaagctccattgttgggctcggcacagacgaggagtcgctgacgagggcgatcgtctcgcgtgccgaggtcgacatgaggaaggtgaaggaggaatacaaggcgaggtaccgcaagacggtcaccagtgacgtcaacggcgacacgtccggctactacaatggcatcttgatcaccctagtgggtcctgagtaaaatggccatggatggattcatataggtttgagatatttgtctgtgacttgtagcttttcttgttttgtatgattgaacaaacatgaaactgtggtgccctgtgttgtcgtgatgtgtacagacagaactgctgagtgaaatggtgttatttgtgctgattcatttggtgagaataaaacgcctgcgatgggcaagtcacggaacaaaggctacaatgcctcaatagtattatcatctactcacttagtcactttgtacaaataaaatctattgcaattcgactcaagcatcaccagtttaacaccagaacagtagaaaacgtctccttgttcattagtgaacagacaccatctcacttcttcctggcaacagcagctgcaattccaccaaccagaagtcccacagcagttgtcgctattcctatcccaataagaccatctttggcaattttatcttctattgccttcttcagagaaatggcctgcctccaatcaggttgaatctccaaacagcgttccacaagttgccggctttttgagtagtcaccattcctgtagtgcccaacagccaacaagtacagcttttccctagtctgcagaggactgccggagttatccaaagaagcttcaagcatgctaattccacggtttacatcgtccgtctgcctggagtgcacaagggcccaagatagcctcataaggctatcattcctctgcccttcagttgaagcatcagcaagctctctttcacatcccgcgatgatgtcgcggtcgcaccaggggatgttgtcgccgccggtgaagaagttgcccacggactcgaagaagcgccccatcttcgcctccatcgatccggttggtctgcggagtcagttgggatccggaggagaaggcgccggagaggaaggctcttctaggcttgtagccttcgtgagcaaggatgggtcggattggacttggaggagcgctagatcgatgcgcaaggcacggcgggggggatccgcgcgtg

SEQ ID NO: 5534 - DNA, 1149 bp, Setaria italica
  Peptide Sequence Number=SeqID_71508
cacagcctggccaacagaaccaatctccagtacctggtcaatcattaaactgttaattccattcacagaatcagcaccttcatctaactcatgtaagaatctccggctaccaagataaccccaggcttcaccattaaaaacagcgaacacaagctgtttcttaaggttgcttagatcaggaatgtgagaaagagcatcgacagcagtgagcaaggcaatcaatcccagatatgggagaatctgaaccaatgctacggtcccgaaaaaacgatgcagagtcttgcgatgtgatagccaatattattggtttctgatgctctgcagatccatttttaattggcggtaatgaagcccatacactgtgtcctcctaagggcaagcatgaatgctctttgaggcaggatgctgaatcatgtgtttgagctttagttgtctgcataatgaggtcgaattctgcaacatttgctttatatccattgtcagtcttctcatttttttcagaaacctctcgcagagtctgagtgctctcctctgagagtagaaatacaggaaagtcatatctgttccacataatacctgatccagcaggattccaatcatggctgcgatttgagtagggtgcaaaagcatcttgtggaaattttctatccggtgacaactcttgcaagttattattggcaccatttgactcgatcagtacaccagacactttctggtgaaattctggattattggataccctcagaaagaaatctgacatctggtctaagggaagaagaacagtggatggttgaaccaaatgatcgctgccttttttgaatcttacaataggtgcaatgatcttttcgcttccaggattagaacagccaatttcaccagaaagattcagcagcctcacacaagggaagctttcaatgtttcggtacattgccttcacaaggtctggaactgactccaacgtggcaccatctccggagacagcgggagcgaggacggcaagggcgaggcagacggcggccgcgacgagggacagcgcggagccggctgccatggccgagccgagcgaggggccggcgatctggaggagtggccgaatgggagacttggtagcagtggaggtggaggaccggaggcagaggccgttcgttt

SEQ ID NO: 5535 - DNA, 248 bp, Setaria italica
  Peptide Sequence Number=SeqID_71509
aatttgttactcatcatgctaaatatatgaaaagaatgctaatagaagacaataaaaggaaaatgacacagcaacacataaggctacatgcataattaggttttcaaggattcaacttgatggttggtgcccatttctagaaaaaaaaacatcaacagcaatccatctggcacagcatgcaatgttagattgaacttgtctttggtttttttacagttggtatatgtgcagtagcaagtcctccacta

SEQ ID NO: 5536 - DNA, 259 bp, Setaria italica
  Peptide Sequence Number=SeqID_71510
gggcccgtttgtttcgcaggaattgaaacctattctaggaattatattctagacattggattccatcagaaataaattactcagaatttgattcaattcaatttttttgtttgggtgtggatggaatttttctccatgaattaaattccatattctgtttggataacccatatatctgatggcgcctgggacacctcacgcacgaagtccgatccggtaattggcactaaactgccaaatcgtgcggcttttgctgcct

SEQ ID NO: 5537 - DNA, 1163 bp, Setaria italica
  Peptide Sequence Number=SeqID_71511
gttgagaaaggttgtctggatattcaaatgctgtggatttttttttgttggaacttttcccatgcaattatacaacttccataatcatatctgatctctcaaaaaagagtaatgttacatctcaaaggttactgacaccaagattttactgcccccgattcacagatctttcactctaaccaccaaaccaggcacagatcagcaaacaagacaaaatcagtaaaatgcgataaaattcatccacacaaccacataagatcagtaagtggaaccaaacaggacctgccagctgagacaaactaacacaaacagtataagctcagtcgctatcctcttcctcccgctcttcatgctgggccacaaccttctctatgaacttcctgcgaacgccttctatgacattgtcccgggatgaatcgccaccgccatgcccatcattcagtaccgggtctgactggcaaagggctaatgcaacagattcaggtgtgcatctctttccaccgaacttttgcaaaccaacataagtccctttgacagcactgttgttatacaccaatattgtaggaacatttctatctgggtagttgggaatgcagtctgtggagataattttaacgaattttgtcgctgggtatcttgtagccaattcttccaaacaattctgaagcaacccacattcgggtatcccgtccttgaagaggaagaccacaacccagatatctgatggcgcctgagacacctcacgcacgaagtccgatccggtaattggcactatactgccaaatcgcgcggcttttgctgcctccctgagctctgcaagcctcatcttcctgtactgctcgagaaagcggtcgtcgtccaggtcgtcctcgagttcctcgagctcctcgggctcgcgcgcgtcgagccattccttggacttgggctgctcgtcggccgcgaccttgggggcgaaagccggcggcttgaagggctcaggcttcgggggtagattccccaggcggcgctggatgtcgtcccactgcgtgctcgtcccctccacgtccttgtacacgaagtggtagtccgccatggccgagcaccacgagcgcagatagagagagatgcgcaagaccgcgagggggacggcgagaagtggagaagcgaagggacgagacgacgag

SEQ ID NO: 5538 - DNA, 380 bp, Setaria italica
  Peptide Sequence Number=SeqID_71512
gtggggagttggagatggatggatcgatcgatcgcttttgccgaagcttctggggataagaacggggggcgaggagggagcttgtattatggttactgcagtatcagacggtgttgcttctgagctatgggcagcgaaggtcttttgcatgtatacaagttgggcacggaagcaaggttgcaaggttgggttgattgagaaggttccttcaaagaatggccatgtccggtctgcagcaatggagattgaatcagagtatatgtttggcatcctttctggagaaaaaggaatgcatcgaatgacatacttttcccttgaaaattctgacacttgtcaggtgattgtgctttctgtttttgtttgttagttttatcagaaat

SEQ ID NO: 5539 - DNA, 724 bp, Setaria italica
  Peptide Sequence Number=SeqID_71513
gtattatcgccaggcaatgatgatacacctcactgattgactgattatgttcccacatcgcgatcttgtacatttatttcttttctgatacataccacaccacatcaaaagatgacctctgtaaaatgtatcacatttcaagccaaaaggcatgacaccaggtatacaaaacaccatctgccccaagtacgactaaatttgtggttgtaggaccagctagaagtaaaatttggtgggagaaatctcaggacggctggcccggcccctccgcctcagctcagcggcatgtctttcgtgctgaatgcaaagaaacacaagtcaagtactgtgaactgatggatgaacattggttgtattgaagggatcagaaggactcgcccatggattgaagggcccacatcccaattttttaccgagcaaatgcacgagacatttcgtgggtgaatgaccatggactactatgccataaatgatttgcacaagcaccttgacttttgggcactagtgggcatgattgctaccaactagcacaaagggtctagtggctagtggccaccccgttaaaacccgtcactacaatgcatttgtgctggcgagtgtttatgtcaccacaaatgcatttcaatttatattgatgggagggctaaatgtttctaactagccaaaaacttaatcgtacatatctcaatatattttaacatgtactattagactaaaaaaaaaa

SEQ ID NO: 5540 - DNA, 1137 bp, Setaria italica
  Peptide Sequence Number=SeqID_71514
agacgctctctgctctggctgatgccatcagggtgcgaccatctaaaagatctttgcttcaaggctgaagaggcaaagttaataagtcaactatcggagatggatgccataaatggtgagctatttaagcaagcatacaaatcctcagtagatgctagcgagtatctagatcgctaccagatgcacaagcttcttaagggtccgtatgacaaggagggagcttgtattatggttactgcagtatcagacggtgttgcttctgagctatgggcagcgaaggtcttttgcatgtatacaagttgggcacggaagcaaggttgcaaggttgggttgattgagaaggttccttcaaagaatggccatgtccggtctgcagcaatggagattgaatcagagtatatgtttggcatcctttctggagaaaaaggaatgcatcgaatgacatactcttcccttgaaaattctgacacttgtcaggccttatcagctagagtcgacgtaattcccctgttcttggatagaccaattaatctgcacttggatgacaatgatatagagatcgcccccacaccttgtgaatataagaagcgtgatagcagaaattgtgctgctgtcagggttgtacacaaaccaagtggagtcactgctgaaagttcaggtgagagaagctactttgcaaacaagctaaaagctacgagtaggttgaaagcaaagctcctcttaatagctagagaattgggagtattagacatgaagatgatcaccaaacaggctatagaggacaagtgcaagcgtgaaacgcgaaggtacacatttgggcctcagaagctggttcatgatctcaacacaggcatccagttatcagatttgaacttggttctggaaggtgatatagagcaattcatcagaggccgtattatcgccaggcaatgatgatacacctcactgattgactgattatgttcccacatcgcgatcttgtacatttatttcttttctgatacataccacaccacatcaaaagatgacctctgtaaaatgtatcacatttcaagccaaaaggcatgacaccaggtatacaaaacaccatctcgcccaagcaaagaactaaaaaaaaaaaaactaacgaagaacgta

SEQ ID NO: 5541 - DNA, 245 bp, Setaria italica
  Peptide Sequence Number=SeqID_71515
gtcacggactgctgctgcggctgctcgccgggtggcggctggttctggacgctgggcgggcgcgggggctgagcgcaggagatgctgtgcggcttggcgacggggcgggcgaggaacgccggcgagctgcccaagaaagtggccatggcgatacggtgcttctctctcgggtgaggtagctaggagcctaggatgacgatgtcgatatttgccgtctcttttaccaaatccgcatttgtatgttt

SEQ ID NO: 5542 - DNA, 501 bp, Setaria italica
  Peptide Sequence Number=SeqID_71516
cgtcgtcgccgcatcttgcctcatcgccggattcggtctcttcttccagcagttgttcggccaatcttggattcatgggagactgcggaaaaagttcctccacctcctctaaatgatgtggttgcaggtgtcaccggcaagaaaaagtagcgaacttgcatgttttctcctgtcaatgttgtcccacatttttcttccccatgttttcttgcaaccagattgtaacttggaagttgcggtcttcaactcttagatgatatcggcgaaataatcattgtacctgaacctcataattcagcaatgcgacagttttgaatttttttgcttctcattagaaacaaaaaggttgatagaatgccagtaccttttgccttttggattgtgtttgccataaccatatttcttggtggagcagtcaagataagattgccttacaaatttcaataaggcccgtttggatccttggaattgaattccattttaataatcattaatttagac

SEQ ID NO: 5543 - DNA, 371 bp, Setaria italica
  Peptide Sequence Number=SeqID_71517
atctaatgtcgtcagagcacaagggatgactaaccaacacaaatccccaagcttagggtaacaaacctgagacaccagccaccggaactggtgcgcggcgactacagcctgctccttgggcggcttcacagccccaatctcgtcgttgtcagcgtcaacgcacgagtccttcaccacggccttgagtggaggcaccacctccggcatcacggccaccaccatcctccccgacgctcgcccccacccgcccaccgccgccatctcccccaccgcggtggcggccgcccccgagaggcccgctgggacccagtgcagcgcggggtactccggggaggccgcgaggacggcggcgcagaagaggaggaggtccg

SEQ ID NO: 5544 - DNA, 557 bp, Setaria italica
  misc_feature (482)..(482): n is a, c, g, or t
  misc_feature (523)..(523): n is a, c, g, or t
  Peptide Sequence Number=SeqID_71518
tccaagcaaataagtgtacaccacaaagtaaagagttaacggacaagtttagaagcctatgaatcccagagttttagccattaaagaaaaatgtattatgcggatataaacttgctactgccagcaacaggaaacatgtaagaccgcaaaaagactgcagagagagtaacaagtgtacaaataatttcttcagaaatattccgttgttatttgactggatgagttaaatctagataaaagtttgaccaaatggaaaaggggatcatataataagaaaatgaaacaatatgaagtgcctaaacaacacatagcatcacacaacaagccatctcccatctgatcagcaccataaataacttggccatatgaaacgggacagaccttcaactctttgatcttctcttgaagactctcatttgaatccttcagcttttgtgcttcgctacgcaattctcctaccacacgaatagcatcattcaatntagctgatttgccattttaggagtcttccctggctccaagntagcacccattcaaggatctctcattcagcttgt

SEQ ID NO: 5545 - DNA, 484 bp, Setaria italica
  Peptide Sequence Number=SeqID_71519
ccctcttcgcgcgcttcgaccgcgacggggacggcgccgtggggcccgacgagttccgcgccgagatgagggagctcatgctcgccgtcgccagcggcctcggcgcgctccccgtccagatggtcgtcgaggaaggaagcctcctcaggagggccgtcgacagggagatggcagccgccgccacggcagcgtgaccgaccgaccgtcggcgagggctcaccgtcgccgtgcctcggcgtgtcgtgaactcgtgatgcagttcgcagttcctgagagatcgagtttctgatgcggtgtctcatagtagactcgcaacgcatttgtacttacaagttactccgtattacgcacaagagtatttggagcggcgtcaagcgtgtgctcatgtaccattgtattaccgcagcgcgtgtactaactaatgcttgactgatcgagatttcagctgtgtaaccgtgacagtataaatgtactaatgtacgcc

SEQ ID NO: 5546 - DNA, 555 bp, Setaria italica
  Peptide Sequence Number=SeqID_71520
tacttaccaacctactcgactcctcccacgctgctccgctcttcctctcaaaagactccaatccgtcgataaaattgcgccattggatcgcggggaggtggattagacccagcactctacccttccccgcccgccctcagcgccggtcacgcctccgccttcctgacccaggcatccttccattccaccacggctctgcctctcctcctacagtcctactacccccgtcgtcgtcctcgcggccccctggacctcgcgcgcagtgaacgtccatccggactcgattggcttcttcttcgctgccttgctggtttgggggaaaaaataagaagactgctgctggctgagaagtgtaggaaaatcacggctcatatctaccttgagggagccggtgggagaaaagggagtggacagggccagatcacaagcatggacaaaactgccagtgtggtattggatattgagggcctgcctcaaccacctgataaatgctgctctggaagttccctaaaattgtatttagtagtcccttgttcgtcgttaagggtttctaaa

SEQ ID NO: 5547 - DNA, 814 bp, Setaria italica
  Peptide Sequence Number=SeqID_71521
ccttgctggtttgggggaaaataagaagactgctgctggctgagaagtgtaggaaaatcacggctcatatctaccttgagggagccggtgggagaaaagggagtggacagggccagatcacaagcatggacaaaactgccagtgtggtattggatattgagggcctgcctcaaccacctgataaatgctgctctggaagtcccaaaatgattagagccctgtcgcgtaagggttcaaatcgcatggagaggaggggtggtgaagagcaagagcaagaggatttggcaaaaaaacttatcatcaaagttgtaccatctcaactggatcagcccctggttcagaacaaggctctggttgctcctcactatactccctgcacacctgttcttatcgattctggtgaaggaaggagcaaaagatttaaccggttcacatcaatcaaccctcggaaaaattcttctcttctttgcaacgctgtcgagcatggggacgacgatcctgatatacttcacgctggggatcaacagcaaagcggaggcttagtcgttagcaggcaccatttacttcggcgcggcatcagtacattccaagctttgagtttgctccgttttcggattgtgttttgttttttgggaggaccaccggtccacagcagcaacagctgcagctagatgcagccagtcaggttcctacctgcgagtgagacgacgctgcttgagcggggtgctcgtcctcgttgtataccttcagctcctcgcctcccaaatttccttcatctgtatgtatagagattggttgttgtgaaaaaaaaaaa

SEQ ID NO: 5548 - DNA, 262 bp, Setaria italica
  Peptide Sequence Number=SeqID_71522
cagcagccggcggtggcgagggaggaggtgaggcgggccgtggcggagagccccgtgctggtggtggggaggcgcgggtgctgcctcagccacgtcgtgaagcggctgctgcaggggctcggggtcaaccccgccgtgcacgaggtcgccggcgaggctgagctcgccgggatcgtcgccgccggcgacgtcgcgctcccggcggtgttcgtcgggggcaggctcctcggggcctcgaccggctcatggccgtgcacatccg

SEQ ID NO: 5549 - DNA, 606 bp, Setaria italica
  Peptide Sequence Number=SeqID_71523
ccgccgaggcgccgcgccccggccgagtacgtgccgccggagcggccggaccccgacaccgactacgagagggcgcagcaggccaggcgcttcatgatctacgtccacgccaagacgatgatagtcgacgacgagtacatcatcgtgggatcggcgaacatcaaccagcgctccatggacggcggccgcgatacggagatcgcgatgggtgcgtaccagccgagccacctggcgaccaggaaccgaccggcgaggggcgaggtccacggcttccgggtcgcgctgtggcaggagcacctgggacaggcggaggcggcggcggcgggagagctcctcctccggccgtcgagcctggcttgcgtgcgcagggtgaaccaggtggcgcagcagcactgggacatgttcgcgagcgacacgttccagggcgacctccctggccacctcatggcgtacccgatcgttgtgggcgacgaaggcaagatcacggggatgacgacgcagttcccggacaccaaggccaaggtgctcggcagcaagtccaacgtcctcccgcccatcctcaccacataatttaatgatgatttgatgcaccgtgaactgcagccg

SEQ ID NO: 5550 - DNA, 374 bp, Setaria italica
  Peptide Sequence Number=SeqID_71524
tacttgagtctcatccaagcagccagcattccaccgtatgaacccccaaagagcaccaccgggctgccctctgcggataggttcctcttgaggtcagtgagcagcacagcgaagtcggcaatcgcctgctcggccgtgagatacgccaaggacttggaattgttgtacgccttggctttgctcccgaacggcatggactccccgtagtaacgatgctgcagcacacaagcgaaacgacacgctctgaaaaaaaaaaagaacaggaagcagaagacgaatacgagacgggaggcggcggggggatgattgcctcagcgaagacgacgagggcggcgaagacgacggacacacctacccaagaacgaacgaaagaa

SEQ ID NO: 5551 - DNA, 376 bp, Setaria italica
  Peptide Sequence Number=SeqID_71525
gttactaccaaacttttccaagactgtagtaatattatgcccaccaaaatttgtagtaatccaccgaggccttggcctgacaccataacttttgatgcaattctcagcataggaagcatagtcaaatttatatggtggatacatgctcctgtcttcactgtaagacattggcattaccatctcagtacaagcctgtttcaacaaagaatgaaccataagcagcacaatatagtacctcagcatagatcaaagaaatgcaatgcatagaaacagtttaaaactgtggtttcaggacctgccaaatcccatccaacccaattccaattagggggaattactaattacaattttaagtaattactaaaagtactaagta

SEQ ID NO: 5552 - DNA, 2175 bp, Setaria italica
  Peptide Sequence Number=SeqID_71526
ggcccgcgcccttctgctgatgccgagcccttccgtgcatgcgccgcggcggccgtcctctccagcgccgccgccgcatcaagccgctcacgcgccgccgccaccacctatttctgatcttgcagcatgatgcttgtactactgatgtaggttttcggtgatttttgtaggtgcttgaaacgggagattttgcggagggaagaaaaggtgcgcgcgcgctgaagattttgccaccatcgggaggaaaaattctgctcttgcgcaagggatccgcggggccgtcgacgaaacgcagcgggccatacaccgcgtgacgaaagcaagcgactcgcttcggagcacgagcccacgccgtcgacgaagtgagacgccggctccgctctctttcttcatttaatgatgtacacgtagacctcctcaactgatgtggcacaaaaagatgagggtcggctgtgggttgtacgtgcccttattggttgacagtggcacgacacatacattcaacctatgctcaggcagctcagcccagtacccgacctccaccaccattgcgaaagcgtcattacattatccagtgcgtttgtgacctcaccagcccatgcgcatgcatgcgccatctgatagcgctgcgaaccatatcattggtaatttggtatgtaccacaagacgcaagagcatatccagcatctgaccaacatcaagatcttcattctccattagaccatgatgacgcagcagcggccgtggctcagtggctgtggttagcatttgcaccgacgcaaatggagcccttctttatttctgagatcacgcatttgtatctgggcgagcgtaattccttatgatgcagaggagcccttgacagccactggctggaaaagtgcccctctcgccccatagtaatccgataaccagccagatatgatcttcagttcagattctctcaggcttaccagccaatctgggtcgtctgaagtcgccgggcgcaaatcgatgtgatgcgctcctaatggagccacaatagcaatgacactctcagatatattcttcaggacacctccaccactccacggatcaagaagtccgttgaagaatatgatgttactaccaaacttttccaagactgtagtaatattatgcccaccaaaatttgtagtaatccaccgaggccttggcctgacaccataacttttgatgcaattctcagcataggaagcatagtcaaatttatatggtggatacatgctcctgtcttcactgtaagacattggcattaccatctcagtacaagcctgccaatcccatccacccattccatggggatcatcatttagatcaaagcagccaacagtgccagtatagttgtagtatacatttactcctgcatatatgcgttccagaatactagtaccctcaggttgactgtcgatatttctgcacacttctttaataggattggctggcaaaggcatgagaaattctgatggaattgggtaatccaccatggccagataactgtatgctgagctcaaccaatctgaaaggtctccgcttgttttcagggtctggcaaaggtggaaagttttgcttagtttcagaagaccatcttgcccgtttccttggtcatctaatactttccaagagtcttttattgtctgaaagcagcttaaactttccctcctaaaatcatctgacactagatcatagaatatggtagaagggacgatgtcctcaaactgcaagattggagccgatgatgcgagagccccaacagcaatatgtggatacttgagtctcatccaagcagccagcattccaccgtatgaacccccaaagagcaccacggggctgccctctgcggataggttcctcttgaggtcagtgagcagcacagcgaagtcggcaatcgcctgctcggccgtgagatacgccaaggacttggaattgttgtacgccttggctttgctcccgaacggcatggactccccgtagtaacgatgctcaagcacacaagcgaggcgacacgctctgaaaaaaaaaagaacaggaagcagaagacgaatacgagacgggaggcggcggggggatgattgccttctagtcgtaagttacgttacgttagggttcggttcgttaagttcgttcggggttcggtccttccccaagtaacgtagt

SEQ ID NO: 5553 - DNA, 423 bp, Setaria italica
  Peptide Sequence Number=SeqID_71527
agcatcacaatcatggattacacccaagccacatggatccgtgagatgaaatatgccgtgctttcttgttgtgtcagttggtgccataacaatggcaattgcttcaggtagcatgatctgtagccaccaagatgagaaaaaacaatcaggtcaaacaaataaattgctcaaacaattttgaaataaaaaatagtggagagagtatttgcaaaagaaaacaaagtacacaggatgtgcttcaccacagaatttgtgatcatgctaaagacatttcagaagtcacaataataaagatataaataacaaaaaaacccatcattttacactttataaaacctatgttatgctggaaacaaaaacatgtaaataagatatgactcctagcaaaagtcaatcttcctgatactttccttgtattacttt

SEQ ID NO: 5554 - DNA, 1684 bp, Setaria italica
  Peptide Sequence Number=SeqID_71528
tttttttttttttttctttacccgtattattataaacgtaagtccttccattcaatacaaaaattctgtacataaaaatgggaaaaagtagctacgtacaaactgctgtgggtcttggatttgaaaaagtcgtctgtactcaatattcttttagcatcagtaaaagtgaataaactttgtggttcagtagaagtataactgacgatttatgccaaaagggaaccatggcttctcacacttcacggaggtcgaccatctcaaacttaacattcgggttcatgtacacatgggagcaatgttcgtagattggcgtaccatcttggggctcctcatgaggatggaatccagtagcatcacaatcatggattacacccaagccacatggatccgtgagatgaaatatgccgtgctttcttgttgtgtcagttggtgccataacaatggcaattgcttcaggtagcatgatctgatacgcataatgattatgaagatcaatggaagataggaagcaggtctgtgttggatgggtatgaatccaaccaagagataaaagtgagcccttatcctgaacttcaaaaatttcttcttcatttgtagcctgacatgaatctgatgttgatttctgcttaggaattatcagtgtcgtcacataaaaagttcgttttttcagggaaccagcgagaatcccacaggtttccaaattttttgttggtatttgcctcagcaacccttaggaagcactccattaatgccactggcacatgcaaattctgatagcatccggtgtcagagatagcaagtcctggtcttggatcagcaactcttgatggaggaattggtccacgttcagaatgcacctgagctaggacaggaaagggagaaggttgtctaatattcagctgggaaaactctgcttccaaaccaggagacactgaggctggttcttctactggtaaagaccatctgccatcatcaagtgagagaacagacagcatatcatcatttttgtcctgcgatactgtaatgggaccgtgcaagctgtcctggtttaagattgatggcactaaacttgagatatcagtttgggttaattcaggattacgtggatactcaatcctgataccagtaacagggcctgcccattggccatgaagcccatttggtcctagtatcgagtgtcttgatagtgtttcctcttttggataaggcaaagtggaatatggtttgattagttgcctctcaggttgaacattctgcaatgatgttgtttgatgctttgaactagagaacgatttctgcagtagtccagtagggcctccagccaatgactttggcatatatgggcttgggatatactgctccatcccactacttgcagcataggttccatttacaccgttaggttcctctgcacccccgcaattacggttggaaaattgttgctgaacaactggcttgagggattctagctcattgagaacactacgaagtttctgagagttgtggggacctttcttcaggaattccttttctctcgccttaaatgcattgtaatcgtgatgcttgggtatcgtttcaagcaacaagctcgaatatcttaggaggatgatgtacaggtccagaaggttattctcctcccgatacacatcagcctggcggaggaggttgtcagcgatgcggaagt

SEQ ID NO: 5555 - DNA, 1069 bp, Setaria italica
  Peptide Sequence Number=SeqID_71529
gccgacgccgtcaggctcaacacccgcgtcgtgcgcgtcgccatggcggcgccggcgccacgtgaagcctccggcggcgacgtcaaatggctggtgagatccgtacacgtccagccggacggcagcgaggacggggtggccgccgaggaggtgttcgacgccgtcgtcgtcgccaacggccattattcgcagccaagattgcccaagatacaaggaatgggggaatggagccggcggcaactgcacagccactcctaccgggtgccggacccctaccgcgacgagacggtggtgatcgtcggctgcgcggacagcggcctggacatcgccctggatctctccggtgtcgccaaggaggttcacctctcagccaggaccgtgggggacgccacgacgccggcggtgtccaatatcctcgccaaccactccgacatgcacctgcacccgcaggtgcaccgcctgtgcgaggacgggcgggtggtgttcgccgacggctcgtccgtcgtcgccgacaccgtcatctactgcaccgggtacctgtactcgttcccgttcctcgacacgggaggggtggtcaccgtggacgacaaccgcgtgggccccctgttcgagcacaccttcccgccggcgctggcgccgtcgctgtcgttcgtgggaataccgatgagggtgttcgtgccgtggttcctggaggcgcaggccagatggatcgcgcgggttctgtccggcacggcggcgctgccgccggagcaagacatgctgcaggcggtgcaggaggactaccgcgccagggagatggccggcttgccggcgaggtactcgcacgacatcggcatgttcaaaaccagtgagatcctcgagttcgtcaacaggtacacggacctcccaaacatggaggattggaagatggagctgttattgactaccttagggaacatgaatgacaaccgcgaaaccttccaggaccgtgacgactacagtgagaacgtcaatcagggttttcagagatggctctccttagctggtgcccaatatgaagctgccattgctgctgctggtggtggtggtg

SEQ ID NO: 5556 - DNA, 361 bp, Setaria italica
  misc_feature (1)..(25): n is a, c, g, or t
  Peptide Sequence Number=SeqID_71530
nnnnnnnnnnnnnnnnnnnnnnnnnactttactagccatcaagtcgttaattcagtgaaaagaacatataacatctaatgagtattgcatttttacattggttacaacatagtacaagtacacgatcaagaggcatgcatcgctccacacaagccattgaatcatcacagtctattccgtcccacaaaaggaaaaagtcgcatcgaccatcaacctataacaatctccacctcatgcatgcgtggtatagcacgcagcactcagatcgctaactccaactcctcatttgggggtgaaggcctgatcaagaacacaacaaaagttcactaatcagtaaccaaaccgtacagatcgaagctta

SEQ ID NO: 5557 - DNA, 1120 bp, Setaria italica
  misc_feature (1)..(64): n is a, c, g, or t
  misc_feature (1108)..(1108): n is a, c, g, or t
  Peptide Sequence Number=SeqID_71531
nnnnnnnnnnnnnnnnnnnnnnnnnnnnnnnnnnnnnnnnnnnnnnnnnnnnnnnnnnnnnnnntttttttttttttttttttgcagacctagtaacgcaatgtcattaacacgatcgccacgagcattacacagccatcaagtcgttaattcagtgaaaagaacatataacatctaatgagtattgcatttttacattggttacaacatagtacaagtacacgatcaagaggcatgcatcgctccacacaagccattgaatcatcacagtctattccgtcccacaaaaaggaaaaagtcgcatcgaccatcaacctataacaatctccacctcatgcatgcgtggtatagcacgcagcactcagatcgctaactccaactcctcatttgggggtgaaggcctggaagatggtggcgtggccggggtcggcgaggtgggcgaagaggttgtcgatggggccggtgccggtgtactcggcctgaaaccaggcgcccatgacggcgagcatggcgaggcggccgttcttgatctccttggtgcgcagctccttgatcttctccggcgagccgctgccccagccgagcgggtcaaaccacaggccaccagggtacccgacgtcggtgccggtgagcttgttgctggggaagatggggtcagtgttgacgctcccgggcttgatgatgtcggcccagcggcggccctcggcccagccgatgaggatgagctcgatgatgaagagggtggtggtgtcggtgaagtactgctgctcgccggcggtgtaccagaagggcgtgttgaggatgccgatcttggtcaggaactccgggatgaagatgcccgccgcgccgagcatcgcccaccggcagtgcaccagctccgcctgcacgttccaccgcaagctctccgggtcagatccaaggccccagggatcgaagccgaagtcgccggggaggctgccatcgagccacggcggcggggtgctgccggggaaccagatgggcctgtcggggtccgccgcggcgcgcacggcgaacgacggccgcgccgcctcgaagaacaataacgaacccaaaccggaacaaagtaaagaaaacaaaaacaaaaaanaaaaaacaaaaa

SEQ ID NO: 5558 - DNA, 1784 bp, Setaria italica
  Peptide Sequence Number=SeqID_71532
agagatcgaaagcattctttaagtaatatggttcataatttacaagtctcctagaaagtgacaaatcttaggaaggataccgccaatccaccagctaaaatggatacatggtcgttatggaacacacgcagtgaatttatacaatttcatcatgaagtatatgtatctgtacaagagcatattccattattcgtccgcgccacacaactggcaacactagcattgctgtaagcccgggaacctccacctgcagcctccttttgagaatttcactttcacccccattaaccacgatgctagtaagatgcgtgagcacctatgaccagggtaatcagaggaaaacacccacaagaaacatcctgtcggttcgtcacgtcacaagaactgacgatggtttcttgaagctggagccacttgctttattggacgatgtgattgccctatcctttggaacagggctgcctaaaacaaattctgaagaatttgattgctggttgttttcactctggtccggtctggcccagattttgatgaggccctcacggcagatggtgaggattgattcattagtgaacaccagaccagagaggggatcggcatgtactcggtgagcaacaaggggtgagagcttcggaacatctcgcattcttggagaaggttgaagaacacctgttggagggcatgcgttgtcccaatgtgcagaaggacttccgacgctaaatgttggcgaggcacatgaaggatgacgcagtgggacaactatctcatcaagtgccaggtcccatagaagaagctgggtgtcctgaccaacagaaccaaagcgatagacattttctccatttccatcagaacttggtggagaccaatatgaatcaaaagcaactccactaacccaggaattatgtccttcaccccatgcaacgatctttctatcatccatgctccatacctgcacaaggtcatcttcaccacctgttaatagatattttccatctgagctccaagtgcaacacagcagtgcaccataataacttcttccaccaaatattagctgttcctttgaaaaatcaaaaactctcaaataaccatctctcccaacagtcgccaagtatgcaccatctggtgaaaaggaaatcgcattgatcgaaccttgacagatatgccatctagcaactgggttgctcttactggactttgcatgtgcaaccataaactgggattgatccttcacagctggaaatgtacagtctgtgttcccatccttgtttttatcatacacatacaaatttccatcagtatggctaacgacgaaaatgccttcacgctctggcacccatgcaacagacgtacaccgactgccattggaggagccatctttatcacccttattataatgttgagctgccacgtgctttcttccaggatcttgtagctgttgcctcagtgacattgaatacacatcccctgatcccatcccaatgatcaggtcatgcccctctttggcctctggatcgaatgcatggcacagtgggtttgagttgctgaaatgaatggactttattggatccttctccagtgaattgagatcactgatgaatagcgtatcagcagcattgaagacaatgtatgtacccttgccatcataattcgcaaccccttgtgatccaccaaggctcgtagatgtaccaaggcctcctcctatacggctgcttccagcaacagcccggcttgcaccgttgcccccacaaagttaagtgccttgctaccattcccagtgcccagca

SEQ ID NO: 5559 - DNA, 231 bp, Setaria italica
  Peptide Sequence Number=SeqID_71533
tttactggatacaggacaagcctgaaactttgtggagttctatttctgatcccaacacccaatttaaatgaataatggatttgattggtgatagttcagactgatacatcttcaacaaagcttgacactttacaatatgttcatctcacatcatattttatatcagtaaatactatcaattagtatcaataagtgctgaatgtagcagcttattgttatgctgatacaaat

SEQ ID NO: 5560 - DNA, 1164 bp, Setaria italica
  Peptide Sequence Number=SeqID_71534
ttttttttttttttttttggttatgtaatgttgtcctttatttatggctatctgattgattacctgtacatgttagtagaatcgagtctcgtcgttgttgctaacaaatcagcagcatcctgcataaacccgccgtcgtgcaccctgagcccgagatcctgaccagaacgccgcgagctcctcggcgaaacccctttccctacccgagaccaccgtcgcgtggtcacatccagccatgagacggagctccgcgtgggggagcttcgctttcaggtgacggctgcagtcgaccggaaccacagggtccctgacgccgtggatgatcatcactgggatgccggccgcctcgacggcctccaggttccggtcctgcagcctcgcccctccgcagatgacgttgtgcatcgtgtgccacgcggagtggtgggtgtgcctcgtcaggtccctcacccggaaatccacgtccctctttctcgtgaggagcctgaagagccattcccaggccaggtggttcttgcagaagaggaagcagacggtcctcccgatgtgctcgtaccaggacatcaccgcggaaccgaacagcaatggcggccacagcttcttctcggcgagcctgctcagcgcgacctggctcgccttctgctcggacggcaggaagtacggtggcgcgacaagtgtgatcgatttcactcgggttgggtgcttggcagccagcgcgagggcgatgacgcagcccatggagtgggcaaccaggtggaaggagctcaagttgtggtgctcaacgaggcttctctcgatcgcctcgacgtggtctttcagtctgtacttgcagttggccggcttggggctctggccgaagccgaggagatccaccgcgaacaacctgctgttgagggtggaggactcgcggaacaccgtctcagcccagaaggacgacgacgacgtgaagccgtgcacgaagatggcattctcggcgctgatctcctcgctatctgttcctgcttcatctttggcctccggctctttcacggcgacgtgcagccggccgccgccgccccgccacgcgacgcacgacttgcacccgcagtcggaccacctcgggctgcgccatttgcacggagccgccgccggccccttctccggcgcccggctcttcctcaccac

SEQ ID NO: 5561 - DNA, 226 bp, Setaria italica
  Peptide Sequence Number=SeqID_71535
ccgacggcggcacgccggaggagcacgccgaggtggagaggctgcgtcaggacttcaccgaccaccgcttccagcgtagagagtctgctgatcttctcatgcgcttgcagtgtgcgaagcaaagcagccaccgacgggatctgccacggatcaagcttcagaaggatgagcaagtcactgaagaaattgcactgaactccttgaggcgagctctggatcagttctt

SEQ ID NO: 5562 - DNA, 354 bp, Setaria italica
  Peptide Sequence Number=SeqID_71536
gcccaggcccgcgcgtcgctcatcagcgcggacgggatcatcgagagcaccttctcgccggggaagtactgcatgctgctcagctcggcggtctacgacaccttctggcggttcgacaaggaggcgctgccggccgacctcatccggaggggcatggcgttccgaggggccgacggcgagctggagctcaccatcaaggactacccctacgccaacgacggcctgctggtctgggacgccatcaaggagtgggtgtcagcgtacgtgaaccactactacgcgacggcgtcagacatcgccggcgacgtggagctccaggcgttctggacggaggtgcgcacgaagggccacgcc

SEQ ID NO: 5563 - DNA, 662 bp, Setaria italica
  misc_feature (618)..(662): n is a, c, g, or t
  Peptide Sequence Number=SeqID_71537
cacggcctccctcgccctgacgctctccgtgggcacgcgcgcggctccggcggcggcgccggcgatgtgcctcgcgtcggtgctcgccgtcgtggccacgttctcggtcgggtacgcgctggtggtgaacacgtacagcgccgagatcctgccgacgcggctgcgcgcgcagggcttgagcatgggcgtggcggtgaaccggctcgccagcgggttggtgaccatgacgttcatctcgctcgccgatgcgatcaccatgcccgggtgcttcttcttgtttgctgggctgacggtggcggcgttcgtgttcgtgtatacacggctgccggagacgaaaggacggagcctggaggacatggacgagctcttcgacaagtgatgatatattttcccgctgatcctagatgtctggattattaggcatcgaattgaagtatacacctaatacaaactgtagttaaattcttggttgccattttcattttgctattggaaattttcatatttatagctcataatagtaacacgcgatgtatttttctccggtctctatatacgttctctcatgattgccacgaaaagcaaatccatgaaacttttttgagaactgccaaggcnnnnnnnnnnnnnnnnnnnnnnnnnnnnnnnnnnnnnnnnnnnnn

SEQ ID NO: 5564 - DNA, 325 bp, Setaria italica
  Peptide Sequence Number=SeqID_71538
atcccctcgagggctcacgcctcgcctccacgaccaacgacctactagacctatggcgcgccgccgtcaccgccgcagtcacacctccgcctcgcccacgcgccaccacgcctcgtcaacggccggccacgccgctgccacgccagtcccggcctcctccacggccggtggtggcaaaccctcagccgcaaacactcgctgcgccgcggtgacctagcgatggccggagaggacgccaccgtggccggtactgcggcggtaaagaggccccggaaggaggaggaggacgaggaagacgatgacgagttggacaatgttccaatcg

SEQ ID NO: 5565 - DNA, 220 bp, Setaria italica
  Peptide Sequence Number=SeqID_71539
ttctattcttgaatgtggactgtgatatgtattccaacaacagcgatgcaatcagagatgcgatgtgcttcttccttgatgaagaaatgggtcacaagatcgcattcgtgcagcatcctcagaactataacaatatgaccaagaataacatatatggcaactcattcactgttctcagtcatgtggagctaagaggtttcgacggtgtggatggacctct

SEQ ID NO: 5566 - DNA, 469 bp, Setaria italica
  Peptide Sequence Number=SeqID_71540
gcctccggctcagaacggctccctgcttcagcagcagggctcggataaggcggccgcccccgccgctacttcacctgtcgtgcagaacggcgccctgcctcagcagcagggtctggataatgtggaggcggcgctcgcccccgcgcagaatggcgcccctcctcggcatgggcacaataaggtggatgagccggttgctcctgctgctgtttcgcctgtggcgtgcaacggcacactccagggtaccctacctgagtcaggcctagagaaggcaggggaggatggagacaaggtggggaatggagaggcacaattgctgggtgatgctggcgtgccaccattggatggtctggaggggaacggggtggtcaaggtggtggcatcagccgtcgcggtaccggatagttgtggcgttgttggttctgcgcagaatgatggtgagagggtggtttgttggtggcagagggag

SEQ ID NO: 5567 - DNA, 388 bp, Setaria italica
  Peptide Sequence Number=SeqID_71541
gcggtgaagcagctcgctcaagatggtgtgcaggggaggaacgagttcttggtggaagttctcatgctgacagtgctcaaccatcccaatcttgtcagcttggtcgggttctgcgctcagggggacgagaggttgctcgtgtacgagtacatgccgttcggcagcctggagagccatttgttggtaacttgttctcatcaaactttctgcttcttgtctggagctaatgtgcagtgttcgtctacaaaaaaaaagtgtatgcagtgtgcttctggagttggtatgttcgggggtctgtatgttttatgtcaattgaaatggttggcttactttttccattggctttttgtgattacttctctgcatttgattccttgcatgttttaga

SEQ ID NO: 5568 - DNA, 1314 bp, Setaria italica
  Peptide Sequence Number=SeqID_71542
ttagttaactaaagggtacaaagaatcaatggccagatggtggcggtgaagcagctcgctcaagatggtgtgcaggggaggaacgagttcttggtggaagttctcatgctgacagtgctcaaccatcccaatcttgtcagcttggtcgggttctgcgctcagggggacgagaggttgctcgtgtacgagtacatgccgttcggcagcctggagagccatttgtttgatgtgcctcttggcaagaaaccacttgactggaatacacgtgtaaggatagctgttggagtagcagaagggctttcttacttgcacaatgtagctgatccaccagtcatttaccgtgatatgaaagctgctaatattctgcttggagaggatttcagtccaaagctttctgactttggacttgcaaaagttggacctgttggtgacagaactcatgtgtccacaagagttatgggtacctatggctactgtgctcctgactatgttgtgagtggtaaacttaccatgaaatcggacatctacagcttcggtgtccttctgttggaactgataactggcaggaggatttacgacgcgtcaaggcctaaaccagagcagagtttgctaacatggtcaaggccatttctgcatgacaagaggaagttctaccggcttgctgatccagctctgctgggctgctacccgtcatcagcgctgaaccagttagttgtgatcagcatcatgtgcctccaagaccagccccatgttcgccctatcatcgctgatgttgtgataggcctgaaccatgtcgcaagccagccatatgcccctgaacgcccgccggtagctatgagctcccctgcgaacagcgggtcaccgcaattcgtcggcacgccatccagaaggagaggtggtagaaggatggcacagtatgcatagccaagattgcatgcttgtctagaagaagagcaagatatctcagtcagatgagactgagactgttaggattgttgagattgaagccgtcaaattccatatagtcagagcctttttgattgaggaagtggtcttgagtgacctgcttgacagagttctagtatcttctctgaggctgatggtaggagttcaagctgaccatgactattgctctttccatgtgctttattgtttccagttttgaattctgtagctagtgtacataggatcagtgccctctgtggggcggcaaaaatgcatcagtcccaagtagaaaaggggaacagtgagacccttttgggatgttcttcaagttatcagtcatgtacaaagttctcctattgtttggttacg

SEQ ID NO: 5569 - DNA, 315 bp, Setaria italica
  Peptide Sequence Number=SeqID_71543
gggagagtggagagagagacaagcaagatgacgacgatggcggctgtccggtggtgggcgttggtcgtggcggtggcggcggcggcgacggtggcgggcggcgacatgaacgcggacaggacggagtgcgcggaccagctggtgggtctggcgccgtgcctgcagtacgtgcaggggcaggcgcgggcgccgccgcccgactgctgcggcgggctccggcaggtgctggggaagagccccaagtgcctgtgcgtgctggtcaaggacaaggacgaccccaaccttggcatcaagatcaacgccaccctgccctcg

SEQ ID NO: 5570 - DNA, 923 bp, Setaria italica
  misc_feature (894)..(923): n is a, c, g, or t
  Peptide Sequence Number=SeqID_71544
taaaaaaacttttaaaaaaagaaaaaacaaaaaagaaaagaactacctagacaataattacctaccggggacggggaggtagtggaggtggagacggccctggcggcgaagggaacgcggacaggacggagtgcgcggaccagctggtgggtctggcgccgtgcctgcagtacgtgcaggggcaggcgcgggcgccgccgcccgactgctgcggcgggctccggcaggtgctggggaagagccccaagtgcctgtgcgtgctggtcaaggacaaggacgaccccaaccttggcatcaagatcaacgccaccctcgccctcgccctcccctccgcatgcggcgccacccgcgccaacgcatcccactgcgcccagctcctgcatattcctccgggatcgaaagacgccgccatcttcagccccggcggcgacaagggctcctctgctgccccagccaaggacaactcgacggcgacgaccgactcgcacgcgctgcagtcgaccaacggaggcggcggcggcgtctccacggcggcgaccgccggcgttgcactcacggcggtgctcgcgggctaccttctcctgctcgtgccggagctgtcgccaagctcattctagacctctgtcaagtgccaccagaaatcgccgggatgtgttatgttgtagtagttcgtgacagacaatctgtttcgcgttggtgctgtgttgtttgtgttatgttgtagtagttcgtgacagacgatctgtttcgcgttggtgttgcgttgtttccctgttatgctactggtattaagcgtacggagtgtgtaaacaagctaaacgaatgggtttggctagcctggatttatgccagtgcctctggtttcggatccttaaaaaaaaaaaaaaaaaaacnnnnnnnnnnnnnnnnnnnnnnnnnnnnnn

SEQ ID NO: 5571 - DNA, 347 bp, Setaria italica
  Peptide Sequence Number=SeqID_71545
gcgggggcggggcgggaggagagctcctcggcgagggcggaggcgagcggggcgcggaggcgctcgagctcttcgatctgggcgacgacgacggtcttggagcggagcacctcctcctgctcggggttgagcttcttgccggcggcgagagactcctccatctgcgtgatgcggttgtacttcttccgcagcgcgcggaggcgcttcgagaccacgctgaggaccggcccatcagtggcctcggccgcggccgctgccgccgcggcggtgggagcggaggaggaagaggcggccatggcgaaaggctagggttttagggggcgatttgggggaaggaatggggggct

SEQ ID NO: 5572 - DNA, 226 bp, Setaria italica
  Peptide Sequence Number=SeqID_71546
catctccacttgtttcaggcctcgagagtttatttccagggccaggagaagatgacgacctcgattggaaatgcagcatttctcctgctgttgttgactgcttgctgcgccaccacccttgcctgcgaccctaatggcgcgaagttcgggtacaccggctcggttggtcctgaccactggggcaccctgagccccaacttcacgcaatgcgcgagagggacgaacc

SEQ ID NO: 5573 - DNA, 317 bp, Setaria italica
  misc_feature (306)..(306): n is a, c, g, or t
  Peptide Sequence Number=SeqID_71547
ccactgccagatgataggaaagataccatcacagaatgtgaagcacttgtaactttctcatttggatgctgtaggtatcttgtttgtgctaaggagcacatttttctacgctgaaaatcttggtaaacaaggtaaaaaaacaaataagaagacaatacaatacaatggaatataaaaaggatacaagaacatgattgaagccactttatcccgaatcatatgagctggaatgagtccaacacaagttggcacaacccgcaggtaaacagtatgcgtgatgtctgaacctcatctctgtgccaaatntatttgtccag

SEQ ID NO: 5574 - DNA, 809 bp, Setaria italica
  misc_feature (806)..(806): n is a, c, g, or t
  Peptide Sequence Number=SeqID_71548
agtttccttccgtttaatttcttaagttaaagttatttccttttagttcctttgtactaactaaggtcttattggtatacagaaaagaatggcagggctccctgcaggaagatgtcgaacaagtgctgcaactcctgatgctaatccgtcaaatggggttaccccaggataagcctccagagatctcttgatgtagtaaaagataagttgctctttcaaagctgttcgatcatcctgatcagtgccactgccagatgataggaaagataccatcacagaatgtgaagcacttgtaactttcttcatttggatgctgtaggtatcttgtttgtgctaaggagcacatttttctacgctgaaaatctggttggtttgtcaattcagcatatgaaggcattgactcaatgaacaaagcaatagctgctgcattctcttgattgacaagtacagcacgccggactgcctcagtgtactcaggaagacgcagtcgcctaagatgttccacagaagagaatgccaccaagattctagcagcaacctcaggttggaagctctctgaggacttagcatttagccggtgtttggtgacctcagctgcaaagactacaaccataagaaatgaggccttctattccttgtcttttccccggttgtctagtctaactagttgctgcacgaagatgacaataaatctcctgtgcatactcccacacacaagtttcaacaaaattttttagccttgtcattggcacatgaatactggttgcaaagaccccagtcaccgggcctgcctccttgaaaagacncta

SEQ ID NO: 5575 - DNA, 2306 bp, Setaria italica
  misc_feature (1)..(21): n is a, c, g, or t
  Peptide Sequence Number=SeqID_71549
nnnnnnnnnnnnnnnnnnnnncgttgaaatagttctccgaaccaacagagcccacaaacatagcatgctgttttcccaaacgcaaccgcaatttggaacaggacaaagcgaaagatacaatttactcaattatgtacttgcaacacgcacccgattttcgttactatgcactgcaaatctacaagcatgacaaaatagatatcacaggcgtgccatagttctgttcaaggtcagttcatcgcttcctacagatgaagcacttgtggccttgctacgagactcgctacgactcgactgcgagctgatgtaggagagggactgcagccacgacacaagcaccggcttcctagtgacatcatcagactccgcgacatgggcgtgcatatcatcgaggagcacatcctgggcttcctttggtagcagagtcacgaattcagccagctccttcagcagataagggaatgactgaatatccacaaggaagattagtctcagcaacagatccaatgttttcttacaaggttctgtgctctcttcccatgatctccataaagatttgtcctgaatcattgcagtatcacaaagatccttagccttgacaacaaggctatggatacagaaaagaatggcagggctccctgcaggaagatgtcgaacaagtgctgcaactcctgatgctaatccgtcaaatggggttaccccaggataagcctccagagatctcttgatgtagtaaaagataagttgctctttcaaagctgttcgatcatcctgatcagtgccactgccagatgataggaaagataccatcacagaatgtgaagcacttgtaactttctcatttggatgctgtaggtataagaacatgattgaagccactttatcccgaatcatatgagctggaatgagtccaacacaagttggcacaacccgcaggtaaaacagtatgcgtgatgtctgaacctcatctctgtgccaaatatattttgttccagccaagcttggtaaatctggttggtttgtcaattcagcatatgaaggcattgactcaatgaacaaagcaatagctgctgcattctcttgattgacaagtacagcacgccggactgcctcagtgtactcaggaagacgcagtcgcctaagatgttccacagaagagaatgccaccaagattctagcagcaacctcaggttggaagctctctgaggacttagcatttagccggtgtttggtgacctcagctgcaaagactacaaccataagaaatgaggcctcagcaatcttgtcaatctccgtaatcaagtcatcctgctttccccggtgcagcaacagtgctgcacgaagatgacaataaatctcctgtgcatactcccacacacaagtttcaacaaaatttttagccttgtcattggcacatgaatactggttgcaaagaaccccagtcaccgggcctgcctccttgaaaagaacactatcgaggtgttggttgacctgagccttgacaaattcagctgatttcccttctgcaatttcaactgacatcctgagcatatccggcaaagggaggagctcctttagtaatcccatacagatacactgtaacaccgactcatgaaacatgacctgcccacaccgtgtcaagcccaatgcgatacactgaacaaggatacgctgatcatcagcacgcctcccttctaaaacaaccctctcagctgcaaaccgaattgtccgctcaggcacctctttcaaccgtggatcgaagtccagccggtacctcgccgaagcaactctcagtgcccgcaacccaccacaggctgccatcaccactggaaacagcacataaccctcggtctcacacttctccggcaaaattatctcaaagagcacctgaaccttccgcatcttcctcgactcgacaaacccaattaccagccattccaccagcttaagcacccgaacaccaacagccaggctcccaatcctcccgcaaatcctaagcaaggacacaagaatccttctgaattgcacctcatcagcagacgccagagcgtaaccgatcccggcaagcgcaaggtgatcaagatcatcgatgctttggcccccctgctccacatcctcgagcatgcgacccacagccacaacaggatcattatcatcgtggccattggcagactcacccctgccgagattcttggcggtggaagcggaattccccgaactggaattgctggggagatccttggcgctcatggcgaaggcgcgggcgccgaggaggaggaggcgaggggagatggggagggagtccg

SEQ ID NO: 5576 - DNA, 235 bp, Setaria italica
  Peptide Sequence Number=SeqID_71550
accatcttagtgtgaacacagcaagccggttgccgccaccctggagtccctaggctgccttgggactcatggtgcgtgaatccttgatcctgcaatgtgtcgccatgtaacaccccatgcacattgacatctctctcgagaggaccctctccaactgtcagccatgtggacatgcctcactgtactacgttgtccctaggagcttgataggacaagtagtgagggggacttgcca

SEQ ID NO: 5577 - DNA, 736 bp, Setaria italica
  Peptide Sequence Number=SeqID_71551
agccaccagaagcctctagagattggtccaactacttctttttcccaccttgaaaatatggtcaccaccatcgtgtcaaccagccaccattgctgcttgtgccgtgtttcgacgatgtcccacgctgaattagccctagctatgccgggctaaccgccgcaggttgctgcaaggtgtgttgccggcacattgttgttgttgcaagctccatcttccgacgtggttccgcaccgcattagccgctgcaaaccaggaccaaccaccacgttccgctgcaagcaacttgaccaacacacatgtcgcaacctgaagccatcgccacgccatcgatgaaccagctccatctccttggtgttgtcatctcccaaagccacacaatgaaccaccgcggccttcagcaccggtacaaacactcaccgcttgctatagatgccagcatcaccgactggtagcaaccacaccaacgacgaggcagatccggtgagccaccgcaacacatggccgctgcacgccgcagctcacatggcctcatgccggcgctgcgcacgaccgcatgtcgcagcccaccccgctgatggccgcccgccgtagctgcgcgcagcattctgccaaggctaggaagaaccgcacgctgctatctgaacgctaggcgcccaccagctacccgagactagaatggcagcgcagggccaacgccagccagccccagccatggagcctcggctaccgcagcaca

SEQ ID NO: 5578 - DNA, 538 bp, Setaria italica
  Peptide Sequence Number=SeqID_71552
agtgattaacacctaagcatggtgctcttgtgagatgctgtgttgatatttatgaattgacagccaaaacacatgctcacaattcctttcctgataagtacatactattaatcctatcaaactagtaacaaatttacaacaaaactgaggtggtcacttgacgtgtcccaggctcacatttttgtttctggaagccaaccgaattacaaggtagctgaatgtaaaaccctaacgaagcgcacttgtatggcttgacgtcccttcatttctcctccagtctcatcaggacagattcggcaaatatgcgttgtttctcttcagtgtgtttgggactaggacggttgtgtttcagatagccatcccacggaacctttttagtccagctctagcggctatcatgtcccttactctctcagcaaatgcaattgccgtctctccctccctcagatattgaggaggtaagtaccaaacatcacacacaacagcccattgattgttctattctagtccggtacctaagttgttcttattttgttta

SEQ ID NO: 5579 - DNA, 443 bp, Setaria italica
  Peptide Sequence Number=SeqID_71553
ccgcagtccggtgagataccctgggagatcgggaaatgatgatgatcagtagttgagtacacggcagatgattcatggaaatggcagtagtactaacaacaatgaataatgggatggggggaaagtagatttttgctgccaatgcaattgtttgaaagtgccgatttaattttatcacaaggaaaggcatgcagaatctttatgttctgctggaagtggatgatagatagctcacaccacttcctccactatggtacttacagaaactcatctttctgaaagcccttacaagacaccgtaaaactttaacgtaaccattaaaaatgcttcacgacgagggggcagcacagtcttaggaaaaaaaaacggaggagcatgatttgtgcgaaatggtggggcgctgaagaactattgtatggcaaaagttggctgattgtagtcta

SEQ ID NO: 5580 - DNA, 2150 bp, Setaria italica
  misc_feature (2093)..(2150): n is a, c, g, or t
  Peptide Sequence Number=SeqID_71554
ggcgtcgcgggctctacgacctaccggcccccccgggtggcgccgtcaaggccaacgtcctcgccttctggcgacagcattttgtattagaggaagggatgcttgaggtagactgtccatgtgtgacaccagaagttgtcttgaaagcctctggccatgtggataaatttacagacctaatggttaaagatgaaaagacaggcaactgctaccgtgcagatcatttgctcaaggacttctgtaaggataagcttgagaaggaccacacattgtccccagagcagacagaagaatacaacaaaattcttgctatcttggatgatctctctgcagagcaattgggtgctaagatcagggagtatgggattgttgctcctgacaccaagaacccattatcagatccctaccccttcaatctcatgtttcagacttccattggaccgtcaggtttgagttcaggttatatgaggccagagacagcacagggtatctttgtcaacttcaaagacttgtactactacaatgggaacaagctaccctttgctgcagcccaaattggccaggccttcaggaatgagatatctccccgtcaaggccttctgagagtccgcgagtttacgttagcggaaatcgagcactttgtggacccagaggacaaatcccacccaaagtttggtgatgtatctgatctagagttcttgatgtttccgagagaggatcaaatggcaggaagatcagccaaaagacttaagattggaaatgctgtatctgagggaactgtaaacaatgagacccttggctactttatcggaagggtctaccttttcttgacacaacttgggattgacaaagaccgtctacgcttccgacagcatctgccaaatgaaatggctcactatgctgctgattgttgggatgcagagattgaatgctcttatggatggattgagtgtgttggaattgctgataggtctgcctatgacttgcgagctcactcggataaaagcggtgagaaacttgaagcacatgaaaagtttgcagaacccagagaagtggagaagttagttataaccccatcaaagaaggagcttggccttgcattcaaagggaatcaaaggatggttcttgaagctttagaagccatgggcgagattgaagcgttggatatgaaagctgtgttggagtccaagggggaggttgagttcaaggtgtgcacccttggaaaggatgttaccataaagaaaagcatggtttcaattaacatcgagaagaaaaaagaacaccaaaggaaatttactccttccgtcattgaaccatcctttgggattgggcgcattatatactgcctttttgagcactgcttctaccaaaggcctggcaagacagaggatgagcagttaaacgtatttggttttccccctcttgttgccccaataaaatgcactgtctttccattggtcaagcttgagaaatttgaggttgttgccaagaaaatttcgaaggccttgacagctgcagggatttcacatattatcgacatgacaggtaacacaataggaaaacgctacgcaaggacggacgagattggtgttcccctggcgatcacggttgacaacaccacgagcgtgacggtgcgcgaccgggacagcaaggaccagatccgcgtggaggtggatgaggtggcctcggtggtgaaggaggtgacggacgggcagagcacctgggccgacatcatgtggaggtacccggcacacaccgcctcggccgtcgatgatgaagaagccgaaccctgaacacagccgaagccatatccaacgatcgttggccttgatagcattacctgcttaacagaaacggaatgcgtggtcgtgtaagcctacggtagcattgattcctgcaaatttccagagatcgtttccttgtcaattgtggtgttggaccgtagattctgctgcttcgttcatctatttcacccttacgaactgcaatgtttgatgaagagaatcctttgcttgttagatcggaatgtacagtattcattttttatatataaaaagcaaagtacatagttaagtaaagaactagtaccaaannnnnnnnnnnnnnnnnnnnnnnnnnnnnnnnnnnnnnnnnnnnnnnnnnnnnnnnnn

SEQ ID NO: 5581 - DNA, 437 bp, Setaria italica
  Peptide Sequence Number=SeqID_71555
ccgcgcctcgcctccatcgacgagcagctccgggagcggcgccaccatcccgccgacggaggcgtcctggaaaatcacggcggtggtccgtccccgctcggcgttcaccaccaccctgtgctcggcgctccggtacgcgccgttggtgaggatgtggaggatgtcgccgacgttgacgaccatggcgcccggccgcggccgcacagggaaccaccgcccgccctgcagcatctgcagccccggcgtgtcgtcgacgtgcagcagcgccgtcagggcgagcccgtcggtgtgcgccgtgttgcctatcaccttctccgggtgccggcacggcgggtagtggtggatcgccatgctctgccgcttcccgctgaacgcgcccaggagcgccgcctcgccgacgccgaggtccgccgccatggaacccaacagctgcctca

SEQ ID NO: 5582 - DNA, 620 bp, Setaria italica
  Peptide Sequence Number=SeqID_71556
caaccagactagcatagttccaacatccaaataggctaagctcgtattgatgacgaattattaattcctcagctactcgacttcttgtcttcagagagttagcacggtccagataggtggctctctagtttcttctatgagcatgcagatagaagaaactagagagccacctatctggaccaggctagcatagttccaacatccaaatggctaagctcgtattgatgacgaattattaattctcagctactcactcttgtcttcagagagttagcacggtccagataggtggctctctagtttcttctatgagcatgcagatagctgtcgatttttgagcgatgcaccagaatgttatctgcacttcttgtttctgatagcattgcaacatgccaatcaaaacaggcagcaggagctatcttccatcgtatgatctctcatacaaccatatcattctccaacatgattggtccagttgagcaggtagagtttttgtggacatccagttgtcttcatcgccccaagtggatattggttccttcctagtaagttaagttacttcgtagtaactttttacttccctacgttgatagcacataaattagcaaaatgcccagtag

SEQ ID NO: 5583 - DNA, 707 bp, Setaria italica
  Peptide Sequence Number=SeqID_71557
taaaaaaaaacaaggtaactgaagtctggttgaaacatccatttacggtgtaaccaggctagcatagttccaacatccaaatggctaagctcgtattgatgacgaattattaattctcagctactcacttcttgtcttcagagagttagcacggtccagataggtggctctctagtttcttctatgagcatgcagatagctgtcgatttttgagcgatgcaccagaatgttatctgcacttcttgtttctgatagcattgcaacatgccaatcaaaacaggcagcaggagctatcttccatcgtatgatctctcatacaaccatatcattctccaacatgattggtccagttgagcaggtagagttttgtggacatccagttgtcttcatcgccccaagtggatatggtcctccagaagtaagtactcgagaactttactcccacgtgatgcacataatagcaaaatgcccagagtgttactcgtcttcctcaaagtccataagaaagtcagttaggttctcagattcatcaatggcttcgtttagtgacatatcacctttctttgatttttcctttggcttttcaacctgtccagtagactttagaacactccaattttggctcactttctcttctacttcctcagcatcatccccatcatcttcctcgtcctctagtgattcaggctgtgcagcagctttgtcaa

SEQ ID NO: 5584 - DNA, 286 bp, Setaria italica
  Peptide Sequence Number=SeqID_71558
tctctcggtgccggcgagggacgtcaggaggccgggcaaagggaggggcaagccttccgcggcgcggtccccgtcggcgtcgaggcggcacctgtcgtcgtcgtcctcctcctggggccgcgcgcggcggcccagcaggggcacggccgcgccgtacagctggtcgtcgttctcctccaccgcgacggacgacgaggtcgcgccgttcagcagcagcagcgacggggagggccgcggcggcgaggaggccgagacgaggacgctcttctcgtccctcagtttctcg

SEQ ID NO: 5585 - DNA, 410 bp, Setaria italica
  Peptide Sequence Number=SeqID_71559
gcgaaaaaccctccctattttttttgtttagcggggggcggcaagagcgaaggagattagagggaggcaggcaccgaggtcgcctctgctctccgcttcggctcgcctccttagtcgtcctggttccgctcacgctgaatttttggtcattgagaagcgttcctcctcggtcaatccgtgggagggattggagcccggaggggacagatggcgtcgagggatttcctgggcaggttcgggcgggatggaggagcaccggctgcgggcggtggaagcgccgccaccgtcgactcggacgacatcgagctcagcctcggtctgtccctcggcggctgcttcggcgccgacccggcgcacgagcgaagaagccgcgccttgtgcggtccacgtccatcccctcgatctgctcg

SEQ ID NO: 5586 - DNA, 825 bp, Setaria italica
  Peptide Sequence Number=SeqID_71560
aatttgctcttgcagtagtaatgcggaacatttttgacaaagatgatgccctgggacatgatccctcatgtttttggctggtagctactagtttccttccattgctgtcagttacagaattctttgatgtgcacgttagttttacagagatgctacgctatggctggacgcttagaccatatatagttaatcagcatctgcaatgataggcaagttgagtcattaggtagccataagtgtgattatgggattaatcattgtctgggctggtgtgtatggtctagtactaccctactacctttatgcattgtccattggggcaaagttcattatgatagaaattcacattcatatatattgaaacactagcacacgtcagagttcgtctcaccgcagctaatgcaggttatctcatttgaatctgaaagcttgtgcctctctgttcttgtagcatcagcaggtagtggagcagaggcgaagagccctcctgccatgaacacggcggagacctccggtgggcagagcagctccaggcccccaacggcgtcaggaaccgggaggccatcgaacggcaccaccggccgcgagcagccgccgctgcggacgctgcggtcgctgacgatgcggacggcgagcaccggcgacctccgcaacagcatggtggaggacatgccgatggtctcctacaaggtggaggggcccagcggccgcaagaccgacggcttcctgtacaagtacaggaaaggcgaggaggtcaggatagtctgcgtctgccacggcaacttcctgacgccggcggagttcgtgcggcacgccggcggcgga

SEQ ID NO: 5587 - DNA, 2132 bp, Setaria italica
  misc_feature (2116)..(2132): n is a, c, g, or t
  Peptide Sequence Number=SeqID_71561
ccacggcagcgcgccggagccgagccggcgcagcccctgccccggctcggctcgtggcggcccaacacgtgtgcgcattgtccgacacgtgtccgggtgccgtgcgctcgtagtcccatccgacgaacctccgcctcctcagtcctccccccactacaaaaaaccaatttccactccccattttcgccggaaaaaaattcagcgaaaaccctccctattttttttgttaagtgggggacgcaagagcgaaggagattagagggaggcaggcaccgaggtcgcctctgctctccgcttcggctcgcctccttagtcgtcctggttccgctcacggtgagggatctggtctctcgaattccgcttcgtttcgccgcgtctgttccactgttctcccgatttctcggtgtgggattcgggggggcagagggcgccggttgctgcctgctgcaatgttacatgcttggggcatgcgggatgtcaattctgtgttgacggtggaactcgtggcgtgtggggtgtttcctttcttttttgaaaaaaatctggttctgtttggtgctttgatgagccggaagagcgtaatcggttgctgtgttctctgtagctgaatttttggtcattgagaagcgttcctcctcggtcaatccgtgggagggattggagcccggaggggacagatggcgtcgagggatttcctgggcaggttcgggcgggatggaggagcaccggctgcgggcggtggaagcgccgccaccgtcgactcggacgacatcgagctcagcctcggtctgtccctcggcggctgcttcggcgccgacccggcgcacgaggcgaagaagccgcgccttgtgcggtccacgtccatcccctcgatctgctcgctgcccggcggattcccctccggcgaggaacccgccgccgtcacggcgccgccgtcggacctgctccgcacatcctcgctgcccaccgagtacatggaggaccggctccgccgccgcgcgatgcagagccagcggcggctcgaggccaagcgcaagcgcctcgagcgccggaactccatgaactccggcaggtcgggcaccaacgctagcgctgctgtctgccgcgacgaagccctggagcagacggtgcccagcggcttccagttccggcgcacggtcgccttgcaggggaccacctcgtccagcgtgccggagcaagcatcagcaggtagtggagcagaggcgaagagccctcctgccatgaacacggcggagacctccggtgggcagagcagctccaggcccccaacggcgtcaggaaccgggaggccatcgaacggcaccaccggccgcgagcagccgccgctgcggacgctgcggtcgctgacgatgcggacggcgagcaccggcgacctccgcaacagcatggtggaggacatgccgatggtctcctacaaggtggaggggcccagcggccgcaagaccgacggcttcctgtacaagtacaggaaaggcgaggaggtcaggatagtctgcgtctgccacggcaacttcctgacgccggcggagttcgtgcggcacgccggcggcggcgacgtcaccaacccgctgcggcatatcgtcgtcaaccctcagcagtcggtgttcttgtgatggcggcgggcatggttctgctggtacatgtaaacccttttagggggagatatgagatgaagtaggcacaggagaagcttaaaccctttgagcaggagccagaagcagaagcttaaactttttgagcagtggggcatgcttctgcttcgtccggtgcaagtaaatgtagggggagatgtcagaggaggcaggcacagtagaagcttaaaccctctgagcacgaggcagaagcagaagcttaaactttttgagcagtggggccagaagcagaagcttaaactttttgaggagcagacagaagcagaagcttaaacttttcttttcgtttcttggtaatcatatgattagttaattatgttagcgagctggatactgctgtaacctgtaagttaagagagtgagcgaattggagggatcttgaggttaacaatgtccgaaatggatgctggttcagttgaggcccaaggcacacagggataggnnnnnnnnnnnnnnnnn

SEQ ID NO: 5588 - DNA, 516 bp, Setaria italica
  Peptide Sequence Number=SeqID_71562
cttggaattagtggtatacttaaagatgtcctttcaggctctgggttggttgctggtacgacagtaacccctactttaacaagaccagctgatcagattattgagatcgtgaagcttgcagatgagttgcttcctccactacctgttggaaccatttcattacctatgtattctgatgttcacatgaaaggttcttctgtaaagaaatccacctgtagtaagcagggtgaacctggttcaatagaaaatgaattatcaggtcgggagaagttattgcgtgatcagcctgaactcctgcatcagtttggtatggatttgttacctatcatgacacaggtgtatggctctagcgtaagtggatcagtacgccataaatgcttatctgtcattgggaaattaatgtactatagctcagccgagatgatccaatctctccttagcacaacaaacatttccagctttttagctggcatttaggttggaaagatccacaagtgctgaatccctgctcttcag

SEQ ID NO: 5589 - DNA, 771 bp, Setaria italica
  misc_feature (7)..(7): n is a, c, g, or t
  Peptide Sequence Number=SeqID_71563
taaattntaattattctaggttcgggtagtaagtttatttgtcgttgtattctagatcagcctgaactcctgcatcagtttggtatggatttgttacctatcatgacacaggtgtatggctctagcgtaagtggatcagtacgccataaatgcttatctgtcattgggaaattaatgtactatagctcagccgagatgatccaatctctccttagcacaacaaacatttccagctttttagctggcattttaggttggaaagatccacaagtgctgatccctgctcttcagatagcagaagttctaatggaaaagcttccagagatatttttaaaaatgtttgtgcgggaaggcgttgttcatgctgtagagttacttatatgcccagagttctctggtcaggtcactcctcaaatgtcacagctggacaatcatgtcgattccattacatcttcttgttctaggcgcaaccgctgtcggaataatgctgtgaatactgaaaacaacttgcctgatgaaccaaaacgttcccattctgtgattgccaatgcgctactaagcacaactgaggttcaaaataatgatctttgtgctttagttagtaatcttgcaaagtcatttaaagataagtatttcccttcagagcctggctcaactgacatttcggtgactgatgacctccttaaactgagggtgctttgtgcgaaactgaatacaacagctgacactatcaaaacaaaagactaaaaggaaaatctaaggctacaatgg

SEQ ID NO: 5590 - DNA, 379 bp, Setaria italica
  Peptide Sequence Number=SeqID_71564
aatccccgacgacctccctcctctcgaaggccaaaacccaactccacgatctcccgcaacatcccagatctctaaccctcaccgccgccgctttctccccgatcgccgcggccatggcgaaggagttccccgtgccgccggtggtcttcacgccgtccaccccgacgcaccgccgccatcctgccccgggcatgggggcctcccctccgcccgcgttcgcgccgccgcgcccctccacctcgtccgctgccaacccgctccccttcatgtcgttcgacgtctccgctgccgcggcctcctcctcctccgcgccgcccctcttcgcggggcccatgggcgtcggcggctccggcgcatccttcgaggacgagccgcctct

SEQ ID NO: 5591 - DNA, 271 bp, Setaria italica
  Peptide Sequence Number=SeqID_71565
gccgccatcaccgggggtgtgggcaagctgcggcggcggcagagggggagggtgagtaagtaccgcggcgtgcgccggcggccgtggggcaagtgggcggcggagatccgtgacccacatcgcgccgtgcgcaagtggctcggcaccttcgacaccgccgaggacgccgcacgtgcctacgacatcgctgccatcgagttccggggccgccgcgccaagctcaacttccccgccgacgtgacccccgcgcccgcaccttcctgggcgccga

SEQ ID NO: 5592 - DNA, 2146 bp, Setaria italica
  Peptide Sequence Number=SeqID_71566
aagcagcgtctgttgtcccttcgcgtcgtctccgtcgctggcctgagccccccacgccgggtgggtgggggccgaatgtggcagctgccgaggatgctgtgggtagtggaggaagcagccagccacaccgtcatcggaggataacaagctgctcaagaggctgagcattgggccgaagatgcgtgatgcgctgctgttcaggcgatctggagagaaggatgaagaacaggaccgggatggattttttaaaaggcttcttagggacagcagagacaaggaggaagaggatggggacagggaaggttttttcaaaaggttactgaaggatagcagggaaaaggagcatgaggaggacgaaggggatagagatggtttcttccgcagattgctaagggacagcaaggaggaggacatagagctaacgccgagttcagaaggattgttaaagcgattcttccgtgataaggaggataggcatggtgaggacgacgagaaggagggcttttttcggaggatattcaaggataagaatgaggagaggagagacagcattaatgctagacacggggatgaggaaagagtgggcaagagtctggaggatgatgacagagaaggtttcttccgtaagatatttaaagagaagaatgaggagaggaaagatggagcacatagcaagcaggatgagagggaaaaggctggtgcgaacatagaagaggacaagagagatggtttcttccggcaactcttcaaggagaaaaatgatgagagaaaggaaggaagcacgccaggcaagaaagaggaagatgagaaaggccataaaaatacagatgatgataattttttccgcaggcttttcaaggataagaatgaagaaaagaaaggagctactcatgacaggaatgaggatgataagtccgaggaagctgataaggaaaacttctttcgcaaattattcaaggacaagcatgaagagaggagaactgaagggcttgagaaaaatgatgatgatggtaggagcaccagtggtattgaagaggaagataatccagagttcttgtcatttcgtaggttgtttagagtgcacccagaagatgctaagggtggaaatatagaaactagtcaacccaacaaccttacagaggggagcccaggatcggagagcttttttaagaggctatttcgagatagagatcgctcactcgaagattctgagctttttggctcgaagaaacaccctggtagcacaggaaccaatgagaagcaaagtggaaaaccacctttaccaaacaacaccatagcagaacttcgaaaaggttcttactatgcttcattggagcttgttcagtctttatgtgacacatcttatgggctagtggacatattccccgttgaagatcgtaagattgctcttcgagagtccctcgcagagatcaattctcagattgcttctgctgagaaaaatggaggagtttgctttccaatgggaaaaggcatttatcgagtggttcatatacctgaggatgagtctgttcttctgaattctagggaaaaagctccttatcttatatgtgttgaagttttaaaagcagaagcaccaagtcactctaaaggaccatcagatgcgcacaagctttcaaagggtgggatacccttggctaatggagatgtccaattaccaaaaccacctccatgggcatatcctttgtggagtcggcatgaaacacaaaattatgaaacagacagaatgctgaagtctacctctcaggttattgatcaagcaatggctcaactctgggagaccaaagtgaaatttgtaaatgttagtttctctgttgaaaaacttggccgttcaaggagcctagcaatctctgacacggataggccacgacatgcaaaaacagattctcatgatgcttcagaagatttccaggcaattgatgatcagccaatagaatgggtgaaagttactttgtctgcagttcctggagttagcatggatgatgtcgatgaaaatgagcccacacgtaagaaggaccatcggcgtgtccctagtacaattgccattgaggaagtcaaggctgctgcactaaaaggagaagcaccacctggtcttccacttaaaggagtagggcagagcaccctaaaa

SEQ ID NO: 5593 - DNA, 445 bp, Setaria italica
  misc_feature (408)..(408): n is a, c, g, or t
  Peptide Sequence Number=SeqID_71567
cgcgggcgccgagtgagccggggcgggaggatcgagatgtactcgccggctttctatgcagcgtgtacggccggcggcgtcgccagctgcgggctcacgcacatgaccgtcacgaccgactacgaacctacgtcaagtgcaacatgcagattgatccagctaagtacaagagcatctcttctggttttggtgttttgttgaaagagcaaggtgccaagggtttcttcaggggctgggtacccaccttgcttggatacagtgctcagggagcatgcaagttcggtttctatgaattcttcaagaagtattactcagacattgctggtcctgagtatgccgccaagtacaagaccttgatttacctcgcgggatctgcttcggctgaagtcattgcagatgttcgccctntgtaccaagtgggaggtctggtaggaacggtccgcgt

SEQ ID NO: 5594 - DNA, 739 bp, Setaria italica
  Peptide Sequence Number=SeqID_71568
tacgtacgtaaatcgcgaagcaaagccgccacgagaggagagggaggagccgaggaggatggggcggaagcggaaggagctgctgtcgtcggcgccgtggcggacgggggaggccgcggaggacgaggaggcggccaggctcagccgcgaggggaaggtcagcgtcaccaacaaccccggggagacggccaccatgaacgtgccccgcagcaggcgccaggacctcgacctcaccgtcgatgacttcgacgaggaggagatcgaccccgagctgcgctactccttccagcggaacagcaggtttttgaagagagttttcagtgtggacacacttgtcaagcctcttcctcctgtaatggcatacagtgtatctcgtaatgtaaactttttcttccggatcttcacgcagttctgggatgaagaaggaattgccaatgcacagaagtcccttggactggggagtgatgatggttcccgccggatgcgctgattgtagtcaaaccatgtttctgttctgagctcagaactcggttgtcctagacactggagatctgttatatgtatgcttcaaaagcagtgtgtgtgtgtgtgtgtgtgtgtggtgtttcttaagtttggattgtaattttgtttattctggtttttctttcatgcattttctgctagtaaaactggtggcatcatatattcaagttccagatcttgtactcacagtctgctcccctttctgcttgaactc

SEQ ID NO: 5595 - DNA, 218 bp, Setaria italica
  Peptide Sequence Number=SeqID_71569
cggatggatcgatgcaattctgcttcttgttgttatggaccatacatggcggttagttgccgcgtgtttacctgcgttgggagcataacaacaagaagcagaattgcatcgatccatccggcttgctctacccgcgcttggcgcgcacgctgacgacggcgacgtcgtcgagcacgggcccgcagagcgagctgaggtcgtcgctcctggtgctgtag

SEQ ID NO: 5596 - DNA, 471 bp, Setaria italica
  Peptide Sequence Number=SeqID_71570
cgatgcaattctgcttcttgttgttatgctcccaacgcaggtaaacacgcggcaactaaccgccatgtatggtccataacaacaagaagcagaattgcatcgatccatccggcttgctctacccgcgcttggcgcgcacgctgacgacggcgacgtcgtcgagcacgggcccgcagagcgagctgaggtcgtcgctcctggtgctgtagaacgagctgaagaagacgatcctcgtgcgcgccgccgcggcgcggaacggcagcacggcgcgcctggcgccgcccttcccctccgactcgtacgccaccttcacggactccctcccggcgtacgcctccacgacgagcgacccgcggcaggcgttgccggcgtccccgaccgtgaacgacagcgcgtaccgccgccccggcacggtccggacgccgagatgttcaggcgctccgcctgcgcgcacgtccgcgccgcgctgaa

SEQ ID NO: 5597 - DNA, 675 bp, Setaria italica
  Peptide Sequence Number=SeqID_71571
ccctccccgccagcagctccacggcgcgccggccccggggcaccgcgaagctcccgccgtcgacgtacctcaccgccttgagcgactccaccatccaccccgggagcggcgagtggtcgtccaccacccgcgacgggatcagcacgccccacttggtccccgggaggatgtagggaccctcctcgaagtccccgttcttcaccagggttcccggttggtccggcggggcgggttgagcgccttgacggcgacggagtcgatgagcgggccgcaggccgggtcgtcggcgacgccggggttgtggatggagacctcgacctcgccggaggagtcgacggcggcgacccaggcccaggcgtacgagtcccacccgttgctactgtacgtggtctggatcgccaggaggcccgactgcccggacgccgagatgttcaggcgctccgcctgcgcgcacgtccgcgccgcgctgaacgtgagggagtagcgggccccgggggcggcgcgaccgacggaaggacgaatggaggcctcgttcccgaggcgcacggcgtaggcgccctcggggaccaccaggagcatgtcgccctgcttctgccccgacgggatgtactccacgaaccccgacgtctgccacgacgggatcgacgacgagcccagcacccgcgtcccgcgaag

SEQ ID NO: 5598 - DNA, 1308 bp, Setaria italica
  Peptide Sequence Number=SeqID_71572
gccacatctcgcgggcacagcacagcccagcgcatcgacgacgagcgagggcagcaactgcgcaggagcaggatggtcggacgcacggaggacggcgctgccgggagcggggagacggtgtgcgtgaccggcgccggcgggtacatcgcctcgtggctcgtcaagctcctcctcgcccgcggatacaccgtccacggcaccgtccgcgacctgggtgagaagaagaccgcccatttgaggcagttggagaaggcatctgaaaacctgaagcttttcaaggccgatctccttgactatgacgccatggcagctgcaatcgtcggatgccaaggtgttttccatgttgccactccagttccttcagggaaaataaccgatccagagcgagaaatgttgggtcctgctgttaatggcaccacaaacgtactcaaggctgcctcggctgcgaatgtgcgtcgagtggtcgttgtttcatccatggtggctgttgagatcgacccgaaagattggcccaaggacaagatcaaagatgaaggttgctggtcagacaaagaagcctgcaggaataacgaggattggtactctgttgccaagatcacttcggaacaggctgcgcttgagtatgggaagcaaaccgggcttgatgttgtcacggtcaacccagccgtggtctttggtccccttctgcaatcaacgcttaacacaagctgccagttcctcgtctacttcctgaaaggaggccctgatcaaatgaggaacaagctttggcacatcgttgacgtccgggacacggccgatgctcttttgctggtctatgaggcacctgaagcctccggtaggcacatttgcgcacctcatttcatcagtgcccgtgacctgctggacttactgaagagcatgtacactgaataccctttcatgagcaaggagagcatctgtgacatggatcacccagctccaatgacgtctgacaagctgaagaagctggggtggaaggtcagatcgttgaaggaaactatcgctgatacaattgagttctgcaagaaggctggatttcttgaggacgtggcggggaatccctgccgtttccctgatatttacaacaaaatctagcttagcaaagaatccaggaccagaggaagcacatgtatgggcatcagtatggcaactatttagcttagctgcttgatgctgattgtttagcagcaaaaataatggtcttgcctcagaaacgccaataaagcccccttctcttttttcaatatgtttttatgtattctgatttaaactatgagaagtgcctcagtg

SEQ ID NO: 5599 - DNA, 404 bp, Setaria italica
  Peptide Sequence Number=SeqID_71573
cctatcccctgtgtgccttgcctatcctctgttgcgtgtctcagggataatctcacccccaattgtgttacttacactgtactgatcgatgcacactgcagaacaggcaatgttgacggggcagagcaggtgctgttgcaaatggaggagaaatctgttagcccaaatgttgttacattctcatcaatcctcaatggtcttgttaaaagaggatgcctcaataaagcagctgattatatgaggaagatgaaggacagtgggattgctcctaatgttgtgacttatggaatacttattgacggcttcttcaagttccaagggcaagaagcagctcttgatgtgtaccaggatatgttgcatgagggtgttgaagcaaacaactttgttgttgactcactggtaaa

SEQ ID NO: 5600 - DNA, 342 bp, Setaria italica
  Peptide Sequence Number=SeqID_71574
cgcggcaagccggcaacaccaccatggcgcttcttctccatccccgcctcccctcccaccctctccgcgcggccacccagcatcaccacgccatctcggatagctcttgcctcgttcccctccccggccttgcgaggaagcgcacgccgttcgcggtcacgtgccgggcggcacgggtcaaggaggccgctccgaccacgcgcgccgccgctcctcctacgccggcgtcgctggcgaaggaggcgcacaagtacttcgaccacgctgtggtcacggtccgcgcgggcgacggcgggcacggcgccgtgctcgccatgccgcctgccccctcgaccgacgccg

SEQ ID NO: 5601 - DNA, 1830 bp, Setaria italica
  misc_feature (1)..(44): n is a, c, g, or t
  Peptide Sequence Number=SeqID_71575
nnnnnnnnnnnnnnnnnnnnnnnnnnnnnnnnnnnnnnnnnnnntttttttttttttttttctagcgaaacagatatgttgaatattatgaaagtacaacagccagtagagtagcatacaaatttcttaaacgtcaaagcatgatcaagcactaagtaacttacgggaaaacagcaataaattcaagcacaattcaatctgtcttccagaaattattacacatcaaaggcataccataggcaaaagatcaccataaacgcctgtattcttgaatcaatgcagccagtgacttgtgcatgcatcatcaaatcttaatgtggcacacatcacctttcatgttgccatcactccaaaacaattcattcctcagcatccctaacttaccatcagttacttgaagaagttgctggacacgtctcatactcgggagacactaccatggcaacggatgacactggcacatggttccctttcagttccaaactcagtcacacctttcagttgtctgtttcccatgtcaacttcaagaacatatgccttaggctgccggaattcagccttggcaatcaagaagacaacatttgaatcatccatgctgggagtgggtagaaaaacagtgacgttctccaagtttcgccctgggtcggcagccacactgttgccctgtgatggtgccttcggccacagcagttggtactccagcatttgcttttgcatctgttcatttaacttgatgtcgtttgcgtggattggcgggtagtcagcctgccagtcctcaaaggaattggtcagattgcagttgctccatttggtgatctcccatccttcaaatctataagtgggtatccctctttccttgtctgaagcaggaaggcgtttgtaggtggtatccaaatcaacaaacctgaggcaacgcttttccttgctgaaggcaattccccggtacagctttggagatctaaacttgatccgagactcaccattaggtagatacattgccctcggcaacggcaaaggcacgcctcggagcttgggggcggggaggagcacatcgcagagaaggatacccctccagagatcgacccagcccatggtaccgtcttcacccccaagcgtgatcacggtgtttgtggtatgactcaaaagccgacaagcatccgtatcccttgggatctccattgggaactcgctctgtggcgcctccagagacacatccttggatgtccacctcccgatctctgattgtaacaagtgaagcgtgaacacctcatcgtcgcttgtgggcaccagcgcggcgacggtgtagtggttaccccgaggtaggaggccgatctcgtcgtcacggatgaagaaagggctggggttggggattccgttaagcgacgcgctgtcgacatggtagatgaagtagtcgcactcctcatagaggatgggctcacggcagcggatggcgacgcggaagaggattaggccttccaccacgcgcaggatgcggggaagctgcgagaaggcgctggattccagttcggggcagtgcacgtacaggcgggaggggagcggtgggcgctcactccagaaggacgccacgattatctccatcttcctcgtcaagctaacggcggtggtgtggttgggcttgtggccgatgtaggcatatccgtcgagaaggacctcctccaaggcacaggaggcgggaacaggggtggcggttgccatggacgggattggaggggcggatcgatggatgaaaccgcgggtacggaagagacgtagaatacaacggtagactttaagttaaggttaaattaagtaaacttaactaaaaaagta

SEQ ID NO: 5602 - DNA, 989 bp, Setaria italica
  Peptide Sequence Number=SeqID_71576
tccgcgtctcccgcgtctggcgccgccccgccgcgcgggggcgacatcatcgtcgagtggaacgtcgccgtcagcgtcgtctccgactgcctcccctcctacacctccagcgacaactccgccatcgtcgccaccgattccatcaagaacaccgtgtatgtcaaggcgaaggagtgcacggaagtggtgtccatggaggaattcgccgtgattcttggaaggcatttcacctcgctgtaccctcaggtctcggaggctacggtgaccatcgtggagcgcccatgggagcgtgtggttgtcgacggaaagcctcattcgcatgggttcaaagttggtgttgagaagcacagcacagaagtcattgtgaaaaaatctggaagcttgcttataaattccggaatccaagggtactctctgctaaagacaactcagtctggttttgaagggtttgtgacggatcgctatagacttcttcctgatacaagagaaaggatagtagcaacagaagtaactgcttggtggaggtacccttttgaacatgtttcgcagctcccgtcaaagccgttctgctttacgcaaagataccaggatgtaaagaaagttctgtctgatacgttctttggcccccctgatgttggtgtgtatagtccttctgtacagaatacactatacctcatggccaaagaagttcttacgaggttcccagacatatcatcaattcagcttagaatgccgaatcttcactttctgcctgtcaacttggggagcaaagaaaatccattggtgaagtttgctgatgatgtgtacttgccgacggatgaaccgcacggaactattgaagcaactttgagccgtcccatgtcaaaactgtaacaatctagtggtcaggctggtgcgaaactcctgttgcgtttacccagcattcccaggccaaaataaacaagaacctgtaaggggggtgggtggggtggggggggggggtgggtgat

SEQ ID NO: 5603 - DNA, 899 bp, Setaria italica
  Peptide Sequence Number=SeqID_71577
cgccagtccccgacgccatcagcccggccaccgataccgccgccgccaccaggttcgtgtacatctgcagcgacagcacccaccgcagcgtccgcgcccggatcaccttctcgaaggtggcctcgaagagggacatgatgagcgcgaagagcgccgacgccgccagcacgaggacgaacccgacggggtacttgccgcggggcacgccggaggaggtcccgtcggaggcggagcccacgccgaggagcgcggcggagaaggtgagcaacaccacggaattggcgatcagcgccgtgaagcgctgcgcgttgatgaggcgggaggtgacggcgttgaaggcgagctgcgtcgcggcgacgagcgagaaggtggacacggggaggtactggagcgcgtacgagtacatgaggttgtcgaagccgatgaggacgccgatgcccacgtagataggcagcatcttggacgccgccggctggcgctcctccgccgggggcgcgggggtcatgaggagcgggacgagcaggagcggcgagccgccggactgcgtgagcgtggccatccacttgctgttgccgccggagttgtagtacaggcggccgagaagggtggccacggtcgtcccgcagaggaccatgagcatgtccaccgccaccgtcatccaccatcgcaagccgcctctcgtcgtcggccggcgcgtggcggccttgggtccctcgcggccggcgtcatggacggattcctcgtctggagtgcctctgatttggagctgaatttcttgagcatgcgccatgctgccgggtgccaaggtcccgactgaaatccaacaccaggttgagagagaggctgcttctcttctcttctgcctcagctgtctccggtttgtttttctaacacttatt

SEQ ID NO: 5604 - DNA, 625 bp, Setaria italica
  Peptide Sequence Number=SeqID_71578
tctggcaaagattatgtgccagcaagacccagatttaatgttaagtatcaagaatacaaccagctgaggagacatgcctcagatctataactgaattactgccaataaatccaaacccgaaggttccatcctcatatagccaaatccttccctccacacttctcgcgtcatctaagggggtcgatagatgaggatcaaccacatcatgactggaattgatgcacaatatccgagagataaccctgttctcagagcatgcatggttggaagtcacaccttggatgtgatagcggttactataattatccagctcttgctcggagaatggtggttcaagaaatgtagtatctgccgtccaaaagacaggagagtagccagagttttgaccccttgtatcactaaatcgtcgacaagttactccaccaatgtcatcataggcgacaaggtaaaattccggagtcctatcctcacatataccctggagaacatggaagttaacgtaacatgaatggcaagctccactattaaaaaaataggtgatttaatgatatataaatcatacaaccatgtatatagtaatcctcaaacaggaaattaaaaaaataacattgtcttaagctaacag

SEQ ID NO: 5605 - DNA, 232 bp, Setaria italica
  Peptide Sequence Number=SeqID_71579
aatacaaatcaagccacgcaatgctgcagagaagaagaaactcgacgaggagaaggcccttctcttccagcatccatttgtagaggtggcgctgctcgtcttgggggattggtgggagctcctttctgggcacatttactggttcggcaggcttcccagcagatgaggttgatacggtggcaggatctgtcgcagggtcctttccagagtcctttcggtaggtccgcacaag

SEQ ID NO: 5606 - DNA, 408 bp, Setaria italica
  Peptide Sequence Number=SeqID_71580
tttttaatgtccatgttgcagcttgactaacaaagatggccgtatcgaagatgctgtgcctccaggtaaaaggtattttgtccattgctcgaggaagtcaggcaacttgatccttacatccatgccatattgaagaacacaaaccggatgataatgtactgtttcctgccaacattccttaaaagtatgggggaagatgatctacttgcaaatcttgcattcctaacagaaactgggaggagtttagcttctaaacctcatcaggaagacttttctgttgatatttgtacagttcttcagcttctaattgccaacaagagactggtgctctgcccaagcaatgttgatactgatctaatgtgttgtttctgcataaatttaatggcacttctccaagacaagagacta

SEQ ID NO: 5607 - DNA, 402 bp, Setaria italica
  Peptide Sequence Number=SeqID_71581
ggtggcgggcgtgtcggcagatccgccggcgatgccaggccccgccgcggagcacttggacgggtcgaccgggccgggcggggccggggcgtcgtcgtccgagccgggggaggctggctcgtccggggaaggcggggcggggtcggggtcctggtcgtcgtcgccggacccggcggcggccagcgccttgaaggtggcgtcgaaggcggccttggcggcggcggccgtctcggcctcggacttgagcttggcctcctcggcctggcgcacccagatgggcttgggcgccgccatgggagcgcggctgccgctgctctgacctagtccgcttagatgctcctcctgagcgctgcgggtcggctagggtttggtggaggagggggagcagatgcggcagatcgg

SEQ ID NO: 5608 - DNA, 198 bp, Setaria italica
  Peptide Sequence Number=SeqID_71582
cgagtcaggggtactagcttgtaaatttgatatggaagcggggggtacactggacattgcgtacccatggtgaaaagacgaaggcgacgacgatgacgacgtgtttgttaggtgttgtatttctgtagctggtgatgcggacctcaactccccatcaccagctacagaaatacaacacctaacaaacacgtcgtcatc

SEQ ID NO: 5609 - DNA, 343 bp, Setaria italica
  Peptide Sequence Number=SeqID_71583
caccaaggtcaagaactcctacaagctgccgtcggcgcgcgccccggccgccgacaagcccaagcccaagcccaaggcgaagccggccgccaagcccgcggccaagccgaaggcagtcgctgcgaagccgaagccagccgccaagccagctgccaagcccaaaccggccgccaagccgaaggccaagcccgcagccaagccgaagccgaagggtgctgccgccaagccgaagcccgctgccaagacgaaggccgccgcgccgcggaagcgcaccaacccgacccacccgccgtacgctgagatgatctcggaggcgatcacgtcgctcaaggagaggacggtt

SEQ ID NO: 5610 - DNA, 1408 bp, Setaria italica
  misc_feature (1369)..(1369): n is a, c, g, or t
  misc_feature (1376)..(1408): n is a, c, g, or t
  Peptide Sequence Number=SeqID_71584
tctctctctcctcttcctcggcacgcacgcgcgcgagcgagctctccttcctcgttgaggtgcattgatggcgaccgaagtggctgacgctccggtaccgctggcggaggcggcccccgacgccgccgccgaggccccggcggcggccgccgccgacgcgaagccggccaaggctaagaaggccgccgcgccgcggaagcgcaccaacccgacccacccgccgtacgctgagatgatctcggaggcgatcacgtcgctcaaggagaggacgggttccagccagtacgcgatcgccaagttcgtggaggacaagcacaaggacaagctgccgcccaacttccgcaagctgctgctggtgcaactgaagaagctcgtcgccggcggcaagctcaccaaggtcaagaactcctacaagctgccgtcggcgcgcgccccggccgccgacaagcccaagcccaagcccaaggcgaagccggcagccgcgaagcccaaggcgaagcccaaggccggcgccaagaagcccaaggccgccgccaagcccaaggccaaggcccccgccaaggtgaagccagccgccaagccgaagccggccgccaagcccgcggccaagccgaaggcagtcgctgcgaagccgaagccagccgccaagccagctgccaagcccaaaccggccgccaagccgaaggccaagcccgcagccaagccgaagccgaagggtgctgccgccaagccgaagcccgctgccaagacgaaggccgctcccgccccgtcccggacgacccgccccgccaaggccgccaagacgtcggccaaggacactccggggaagaaggcggctccggcggccaagaaacccgccgccgcggcgaagaagtcccctgccaagaagcctgctccagcgaagaaggcggcagcccccggcgaggaaggtgccggcccggaaggcgaagaagtagattgttcggcgtcgaggaatctagggtttcgttcttgtttggttcctagctgtttctctttctcttctcttcctttttccttagtcgagggcgagtcaggggtactagcttgtaaatttgatatggaagcgggggtacactggacattgcgtacccatggtgaaaagacgaaggcgacgacgatgacgacgtgtttgttaggtgttgtatttctgtagctggtgatggggagttgaggtccgcattgtgttgttaaagtttatcatgtggtgatagtatttgtcgagaaattaccttacctttgctaatttactgtactggtggctgctgttttggctctggcctgatctgatctgaattccagatctgaaatagaatgatttggtgtgcatttcgtgaaaaaactaaaaaanaaaaacnnnnnnnnnnnnnnnnnnnnnnnnnnnnnnnnn

SEQ ID NO: 5611 - DNA, 240 bp, Setaria italica
  Peptide Sequence Number=SeqID_71585
ccatgaattgcacgctctggacaggtttgagcaggattttagaaggaaatttcatgaagaggagtctgtgccagcggctagacgagagagcattatgatattgcatagtgagctaaagcgccagaggaagattgtgaaaaatctgaagaagaaatccttgtggtctaagactttggaagagaatgctaacaatgaattctcccgactgcagattgtggaggaaattgtggaaattgtaaa

SEQ ID NO: 5612 - DNA, 2108 bp, Setaria italica
  Peptide Sequence Number=SeqID_71586
tctccccctcgccgtgccgtgcctgcccgcgcacgcccccgcgccgagcttgccccgccgaccccgacgacgaggagctgagcgagcgagttgcacgccgcttctggtctgagatacctatctgtctgcctgactgattacccggccgcccggcggtgagttcggcttcagccatatcatatggggtgcgtctgctcgaggcggttccccgaggaaccggcgccgccgcggacgctcgccggcgcctacaccgcgcgccgcggccggtacgggcccggggacttcgactccggcgagctcgccatcccgccacccaagccgcccccgtcccacaaggtatcagaaacaggtacattcttgggaagagctagcattgctggtctggaaaaggctgttgaggtgttagataccctcgggagcagcatgacaagtttgaatcatggcagtggctttctctctgggggaacgaatcgtggaaataaagtctgtattttagcatttgaagtcgcaaatacaatagctaaagcttctggtttgtggaggtcatgctctgatgagagtattaaagagctcaagggagaaattttgcactcagatggagtgcgaatattggtttcctcaaataccagtgagctgttgcatatagctgctattgataaaagggaagaacttgctgtcttttcaagagaagtcatacggtttggcgacctctgtaaagatcctatctggcataacttgggacgatatttcaacaagtatgcccctgaaaagttaacaacagataatacgcatcaggatcattcaaaggagagtatggaggctactgtccagtatttgattaatttggcgcaaaacacttctgagctctaccatgaattgcacgctctggacaggtttgagcaggattttagaaggaaatttcatgaagaggagtctgtgccagcggctagacgagagagcattatgatattgcatagtgagctaaagcgccagaggaagattgtgaaaaatctgaagaagaaatccttgtggtctaagactttggaagagattgtggagaaacttgtggatattgtaatctttttgcataaacaaatccgagattcatttaatgaagctgttcctgcaggaaccgacttcgattccaagaatactcagaacaaaaggctaggttcctgtggtctggctctacattatgctaatattatcaatcaaattgaaaatatagtttctcggcccctttctcttcctcctagttctagagacaatttgtaccatggtctgccaataacagtaaagtcagctctgcgatcacgactgcaatcatataacacagaagaagagcgtacggtagctcaaatcaaagctgaaatgcagaaaactcttcgctggcttctgccgatagcagaaaatacactaagagcacaccaagggtttggatgggtcggcgaatgggcaaaccttgggagcgacatgggcaagaaatcaggttcccagcacagcatcacccggatccagacgctgcaccacgccgacaaggccacgacggagcactacatcctggagctggtggtgctcctccaccacctggtggtccaagtgaagaaccggggctacgggaacagcaagtcgaccaagtacgagcgttcccgatccaagggtgggccgacggacctgcggccgccggagacccggcacaacacgtcgccggtgagcgccgccagcgtggcgtcgagcccgctgtcggactgcgagcgcgcggcgctggcccggctgagcttcaggagggcgagctacggtcggagccagagctgcgagcccccacccgatagggccagggggagcagcaaggcgcaccggagctgggactcgtgccggagccagggcagctcgccggcgagggagcgcggcagggacatggccgtggaccgtgacgcggcgagggaccttgatgtaatcgatggcttggatttggatagactgacttcctcctactcgcacccgtcatccccaacgttttgctagagagatgatgatcatcgtaggttctcctgattcttttgctgctgctgctgctgctgctgctttgcccggctcatcatcgtata

SEQ ID NO: 5613 - DNA, 496 bp, Setaria italica
  Peptide Sequence Number=SeqID_71587
ctgcccacagctaagcctcctgcaacagtgtactcatctgcctagattgcagacccacccttgttcttgaagctgtaatcatggctggcactctagttattgccggcctggtactcctcgccgtcgccgccgctccggcgcacgctacggattacgtggtcggcggctcgtccgggtggaccagcggtgtggactacaccacctgggcgaaaggcaagaccttcagtgttggcgacaacctggtgttccagtacagcgcgatgcacacggtggcggaggtgagctcggcggactacagcgcgtgctcggccagcaactccctgcagtcgtacagcgaccagaacaccaagatcgcgctcactgcgcccggcacgcgctacttcatctgcggcaccccgggccactgcagcggcggcatgaaggtcgccgtcacggtcgccgccgcggacgccaccgccccggcggcgtcgtccccgcccgccacgacgcccgccgc

SEQ ID NO: 5614 - DNA, 390 bp, Setaria italica
  Peptide Sequence Number=SeqID_71588
ttccctttttttaggaggatgcctaagagttacatgaggagccaaggtacaacagtacttcccagcacatgtgcatcatgcaaggattgcaatgatttatgaaatcaccaaaggcagcgggatgtggttcccacaagatggagtctggacagactacagttaatatcagctgcagtgaagatttgagtagtgaggaccacgtgcagcaagaacttatctctttatctgtaaccccacttgtgggcttacttcagagactcagactgcaagaacttatcccttcatctcttaccctacaggcagcttctgaccaattggactattatattataaccaccaattttgaccaagagctcacacattcccaaaagatacgtccaaagaaggtat

SEQ ID NO: 5615 - DNA, 1441 bp, Setaria italica
  Peptide Sequence Number=SeqID_71589
tagcacctttagtgaatgtggactacaatttaatatccgatattgccctgaagagggtgaagcaggatctaacaatgcatggtggtcaagtctgcagcagcattgctgcagctactcatttggttgtagtttcagttttacagaactacaactttgatatcctgtacaagagcttccctcctgctgaaagacgttatctacatgacaaaagattgcatgttgtcagtaacaagtggttggaagattcagtggagaaacaaatgaagctgtctgaaactgcttacaaccttaaaccagatacactagaagaactagaaattgaaaggagtgaggaaaatattcgccctctagatcataagtttgaggaacacaaggaggttgaaagagcgcatgtcaaacatgcgccaaggaaaaggagcagggcagccagtatttcaagggtcgcaaaagctgttcctagaccagctcggcgaatgagggcaagaagaggaaaccagcaagcaaaaatagatgatgatgttgaatctgaagaaagtgcccctggtgaatgtcaagatgaccaaaatatggacacagattacaactctaaagagattggaaaaggtatcagcaacaaagatcaaggaccgccccgagctgctttcagaccagtcccaagaacaagggctaggagagaatatcagcaagcgaatatagatgatggaggatctgaagaaagtgggcctagtggaactgataaagaagatcaaaagttggatgtggattacatctctaaaacggtaggagataatagtgataaagacctgcacggaccacctccaggtgcccagtttgtcactttgggggagcaagagcccaaaggtgtcgaatcaaatgccatggaggagaaaccaggcagtcctttccaaagaacaagtgctgctgaagtgacgagcagtgtgccgggtgagaagatagaacaaatggttgatccattgcacgcaatgcttctggatatgataccaacgctgagccagacaaggacagaaggtgcaagcagggtgccgcccccaacgatagttgagaaggctccacctggggtaggaagtaacacatccaaaagttctgatattctggtgccagatgcaggaacatccggggttccagccccagacccgaatgcagctcctcccccaaagaagaaaaaggtcagttacaaagatgtcgctagtgagcttctgaaagattggtgattgagctttgtcaagtggggataacctgtaatgctgaatgttttttttacctatcgtagccagtagtcactatcttgtaaataggaaagctacatgtaaatatgcctgttcgtagcataactttggttggtcgtcctgctctctcgtagtgcttgttttgcctgttgagaaaagagactgctgagcctagcaaacactccaaaaaaaaa

SEQ ID NO: 5616 - DNA, 766 bp, Setaria italica
  misc_feature (1)..(67): n is a, c, g, or t
  Peptide Sequence Number=SeqID_71590
nnnnnnnnnnnnnnnnnnnnnnnnnnnnnnnnnnnnnnnnnnnnnnnnnnnnnnnnnnnnnnnnnnngttttttttgtcattccaaacttcatcccattgccccattaaggcatcaatctcactgatggcatataatgacactagctacgacagttcacagttctataactatacatacatcctttgcattgcagctcaagcatactgcatgtgcctcatctgcagctgggccttcctctagttccagttacaaattcttttctttcacattacagaggtagatgaaacacaagaaccatatgcataaatgaaaatatagatgtatcatattatggaatgaagagcagtgtatagtagcaccagctattgcagcatcagacattgctgaaaagcctggtcccaaccttggaggccacaccgccaatcatcccctgttcccgatgctcggcacatgcagcagaagatgcttctgatcgcgatcgtctccttccccctacctgttgagatcgatctctgatgagctgccgtcctctgcttcagcgtccgcgtccgcgtcagcttcctctgccccgtggtcgtggctctgctgcaggaaggtcctcttaccctgcgccggctgctcgacagcgcacgtgcacggccgcttggaccctgcggcagcgtggctctcggcctcccaggaggaggaggacgtgacgcagctgccggcggcgcggcggcgcggcggggacggcgagaggaaggaggaggaggacaggcacccgc

SEQ ID NO: 5617 - DNA, 428 bp, Setaria italica
  Peptide Sequence Number=SeqID_71591
gccgggactggtgcctcgcgacctggaggcacagttgcaccttgcatgcgacgacggcgaacctcggtctttcgcggaggccgagagacacgcggcatggcgcgctgcgatgcagtcggagatggacgcggttgagaagaaccgcacctgggagcttgctgacctccctcgtggtcaccgcgcgatcacccttaagtgggtgttcaagctgaagagggatgaagccggtgccatcgtcaagcacaaggctcgcttggtggcacgcgggttcgtgcagcaagaggggatcgacttcgacgatgctttcgccccgtggcacggatggagtccatgcgactcctccttgcgctggccgcccaggaaggctggcgcgttcatcacatggatgtcaagtcggcgtttcttaatggcgatttgaaagaggaggt

SEQ ID NO: 5618 - DNA, 335 bp, Setaria italica
  Peptide Sequence Number=SeqID_71592
ctgttcagtagccaacttgtcatgtcgtcggccgttccagcaagctcggcggcagcgccacatgtcgtcgaggactgcctcggcctcgtccagctgctcagcgacggcacggtgaggcggtccacggactactcggtgttcccgctcgtgggcggcgtgccgccgccggacctgcccgtggagtggaaggacgtcgtctacgacggcgcgcacggcctccggctccgcatgtaccggctctccaccgccggcgctggcggcagggtggaggagaagaagctgtccggtgctcgtgtacttccacggcggcggcttctgcgtcgccagcttcgagg

SEQ ID NO: 5619 - DNA, 636 bp, Setaria italica
  Peptide Sequence Number=SeqID_71593
cttcctctggaatatggataattttaagatggataccaaaatagaagaccacacaaactttatcacagacataaggttcaaaactaattccactcagttggctacatcatcttctgatggaactgttcgactttggaatgctgctgatgtgagcaattcttactgtcatatatctgcaagatcagttacgactatattttatttaattgttaggtggatgcctatttgaaaccaagaaataaaccaaatatgtcaagctgaaggtactatgtaggaaataaatgttagcatttttggatggtgtccacgtagtgcaacacctttttgccaaactttgcctaaggtgtggctaacaatttgtctgcgaggtttggctaagatacgaatccatgacgggtgggctatagagttgagaaagtatggcatgcaacaattgtagcggagaacctaacacttgcctaagaaactgtggcgcacctaacctgtgtcgtgacaagtagtggacaccatccaaacaggccactgacgagtttgaatctggcagcttccttagattattctagttacttcatgtcttcaaatccctctggccctgtctctgcagcctcttttttaaatatacctaaaaaattacag

SEQ ID NO: 5620 - DNA, 502 bp, Setaria italica
  Peptide Sequence Number=SeqID_71594
ccttagtttgaggaaggctgcctttttctttttgagtctcggttggtgaagtatttctgtaatttatgaaattatttttctcaactctttatgtattgatgttttgatgatgttataggtcttcctctggaatatggataattttaagatggataccaaaatagaagaccacacaaactttatcacagacataaggttcaaaactaattccactcagttggctacatcatcttctgatggaactgttcgactttggaatgctgctgatgaaagtggcactttacaaacttttcatgggcatacctctcatgtaacgtcagtagattttcacccaagattgacagaggttctttgctcttgtgatgacaatggagaaattcgcttctggaaagttggtcaaactacatggacccatgttttaagggcgaagcagggtggtaccggaagagtcaggtttcagccgcgaagtgggcagctcctagctgtggcaggtggaagcatg

SEQ ID NO: 5621 - DNA, 2049 bp, Setaria italica
  misc_feature (2023)..(2023): n is a, c, g, or t
  Peptide Sequence Number=SeqID_71595
ggaccgcatcaggaaccccaacccggccgactctgacgcatcacagcatctcctagacgcaaataggatcgcacttctcaagtcaccacctaaccaaactgggccaccccctatgcagcagcagcagattcacccaagaaaccagcaacttgacatcaagcccgatgttgctatgccacagagaacagtgccagcggaccattcttcattatatgcatcagggatgatgcacccaaaacctccattactcgccactggactaaatcaagctggaggaagtgtgccgctcaaaggctggcctctaacggtcacaggtatcgaccaactccggtccaattttggtgcgcagaagcagttggtgccatcttcaaaccagttccaacttttgtcaccacaacaacagttgattgctcaggcacaaacaccgaatgaccttactagaatgagttctccagcaccatctgcttcaccgaatgttcgatcagatgatccggattatttgatgaagttgaagatggcccagatgcagcagccctcaggctaccggcctatggaattgcaacagccgcaacaacagaacactagaaagcggaagccaacttcttctggagcagctaatagtactggcacaggaaatactgttgggccttctcctccatcaactccatccactcatactccaggtggtggggtaccagtgactagcaatgctaatattttacagaagagttcaatgatttgcggcacggatggaaccagtggacttgcctcgtcctcaaatcagatggatactttggatagttttgttgattttgatgaaaatgttgattcattcttgtcgaatgatgacggagacggaagagacatgtttgcagcattgaaaaaagggtcttcagagcacaattcagagtccttaaagggtctctccttgagtgaggtaggtaacaaaacaagcaacaacaaggttgtttgctgtcacttctctacagatggaaagttattagctagtgctggccatgagaagaaggtaaaatgttctaactttggatatacctgatagtttctcttgcagcaagttgccggtaagtttcaggtggttcgaacgttatctttgtaatgcaaactttatttttaaattacgatgatgcatttcaatttagcatttagtttcatcaaagttgtcactgctgactatattcacaattatgttttcacgtcccagtaagaaaattgtttacatgtcatatcttctgtacacatttttcatcagtttatttttgaagccgaacaattttttttctgccttagtttgaggaaggctgcctttttctttttgagtctcggttggtgaagtatttctgtaatttatgaaattatttttctcaactctttatgtattgatgttttgatgatgttataggtcttcctctggaatatggataattttaagatggataccaaaatagaagaccacacaaactttatcacagacataaggttcaaaactaattccactcagttggctacatcatcttctgatggaactgttcgactttggaatgctgctgatgaaagtggcactttacaaacttttcatgggcatccaaacttttaccctttcttcctagtctaaagggttctactaactagttgaggtaaactgtgtgtgctgggatgaaagtggtgaatatctggcttctgtaagtcaagacactgtgaaagtgtggtcagtatcgtcgggagcgtgcattcatgagctaagatctcatgggaaccaatatcagtcatgcgtgttccacccgagatacccaaaagtgttgattgttggtggttatcagacgctggagctatggagcttatcggataaccagaggaacccaatccaggcgcacggaggggctggtagctgctctggcacactccccgatcacggggatgattgcctctgccagtcatgacagatacgtgaagctctggaagtagctagaaactaaggtgatggatggattgattgattgattanacactcactagtcgtctatctagtcc

SEQ ID NO: 5622 - DNA, 752 bp, Setaria italica
  Peptide Sequence Number=SeqID_71596
ctaaagctttctagcgatcgtcttcctggcgttcctcttccgattcgcctcctccgtttgcggcggataggatttggattttcggatcgaccgacgaatccatccatggcgcggaccaactgggaggccgataagatgctcgacgtctacatctacgactacctggtcaagcgcaaccttcaggccaccgccaaggccttcatcgccgagggcaaggtcgccaccgaccccgtcgccatcgacgcccccggcggcttcctctttgagtggtggtccatcttctgggacatcttccactcctccaccgcaaaaccagcctcctcctccgcctccggtcctccccttcacgatatcaacaagtcgagggagcaccagatgaggctccagctactgcaccaacacaacgccgcccaactccacaccagaggacctgacgtctccgccgtcctcgcttccaaaatgatggaggaccgcatcaggaaccccaacccggccgactctgacgcatcacagcatctcctagacgcaaataggatcgcacttctcaagtcaccacctaaccaaactgggccaccccctatgcagcagcagcagattcacccaagaaaccagcaacttgtaacataccccttccaccttttatctaatctcctctcattgcaagcaaacttgttcaataccccttatactctatccatcaatcttcaaggacatcaagcccgatgttgctatgccacagagaacagtgccag

SEQ ID NO: 5623 - DNA, 1387 bp, Setaria italica
  Peptide Sequence Number=SeqID_71597
aacggaacaaacggaataggaaaccaagtaggaacttagacctacgtacctaggtaattgacaggatactttggatagttttgttgattttgatgaaaatgttgattcattcttgtcgaatgatgacggagacggaagagacatgtttgcagcattgaaaaaagggtcttcagagcacaattcagagtccttaaagggtctctccttgagtgaggtaggtaacaaaacaagcaacaacaaggttgtttgctgtcacttctctacagatggaaagttattagctagtgctggccatgagaagaaggtcttcctctggaatatggataattttaagatggataccaaaatagaagaccacacaaactttatcacagacataaggttcaaaactaattccactcagttggctacatcatcttctgatggaactgttcgactttggaatgctgctgatgaaagtggcactttacaaacttttcatgggcatacctctcatgtaacgtcagtagattttcacccaagattgacagaggttctttgctcttgtgatgacaatggagaaattcgcttctggaaagttggtcaaactacatggacccatgttttaagggcgaagcagggtggtaccggaagagtcaggtttcagccgcgaagtgggcagctcctagctgtggcaggtggaagcatggtgaacatttttgatgttgaaaagcaggcaaacttaccctctccagcaaagggtcacaacagtgaggtaaactgtgtgtgctgggatgaaagtggtgaatatctggcttctgtaagtcaagacactgtgaaagtgtggtcagtatcgtcgggagcgtgcattcatgagctaagatctcatgggaaccaatatcagtcatgcgtgttccacccgagatacccaaaagtgttgattgttggtggttatcagacgctggagctatggagcttatcggataaccagaggaacccaatccaggcgcacgaggggctggtagctgctctggcacactccccgatcacggggatgattgcctctgccagtcatgacagatacgtgaagctctggaagtagctagaaactaaaggtgatggatggattgattgattgattatacactcactagtcgtctatctagtcctcctaataattataaaatgtacttatgatgatcagtttacttgtgttacatagcgcctgttcattcctttggtgacttgattagctatacacttttgagttttgagggctgtacatgaatgattatattgggctgataggctataatttgtgctactgtgctggtgtaactgtatgtagcagagaaggacaatgaatacagaatttcatttctcatgagaatataattgataggataaa

SEQ ID NO: 5624 - DNA, 360 bp, Setaria italica
  Peptide Sequence Number=SeqID_71598
accaaacccaattaaacccgacacccctcgccgccgccgcctccgcctccacctcgccgccggctggtacacgtctcctccagtctcctcgccgccgcctcgcggcacgccgtcgctttccaccatgctgcagagcaagtcattcgtgaagaagacgaagcaaggccgcatccaaaaggtcgtcagggagcactacctccgcgacgacatctactgcggtttcgtcccctgctccgcctgcgacgcggccgcggagcgcaaactcgttgccgacgcggccgccatcctcgtcgtcgacaccaacgtcgtgctccaccagatcgatttgctggagaacccggcgattgaggatgtcgtcct

SEQ ID NO: 5625 - DNA, 982 bp, Setaria italica
  Peptide Sequence Number=SeqID_71599
atccttctcccctcccctccgcctccgccctccgccatgccgccggccggtagcctcaccgctgaccagctcagcttcttcgagaccaatgggtacctcgtgatggattcgttctccagtgaggaggaggtgcgggagatgcgggaccgcatggccgagctcgtcgctgggttcgacggtgccaacaccagcgttttctccaccaaggaccatccacagttaaaggatgactatttcttcaagagcgcagagaatatctcattcttctttgaggaaaaggcgtatggagatgatggatgcttgaaacaggcaaaagaactttcaattaataaagttgggcatgcattacatgaacttgatcctgtgttcaaaaagttttgttcctcgaagagtatcgctagcttgttctcttctctaggctacaagaggcctgcagttatgcaatctatgtacatctttaagcaaccaggtattggtggtgaggtggtgccgcaccaggatagtacattcctttacacagaacctagaacatgcacagggttgtggcttgcacttgaagatgcaacaattaacaatggttgcctgtgggcaattccaggatcacataaaaagggtctggtaaggcgaatgatcagagatgaaaatggtactcattttgatcgcccttccccatcctatgatcagaaagaatttgtaccgctggaagtaaaatcaggggctttggtggttatacacggtgatcttatacatcagagctttgagaatctttctccagcgtcaagacatgctttcagcttacacgtagttgatactgaaggatgtgaatggtccaaggacaactggatacagaggaaaactgccccagaaccgctttatgtatcttagacaaaccatccagttaccagtagtgctgtaaaaaaacagagattcccagcaagtgatttgtgtcgcatatcattgtcgacaaatataaattgggggt

SEQ ID NO: 5626 - DNA, 1340 bp, Setaria italica
  Peptide Sequence Number=SeqID_71600
taggcgctgatcgccgggaccgacttctcggaggaggacgcggaggccacgctgcggctgctgctggaggagaaggacgaggcgcgcatcgccgccttcctcgtcctcctcagggccaagggcgagacctacgaagagatcgtggggctggcgaacgcgatgctgagctgctgcgtccgggttgacgggctggacgacgccgtcgacattgtcggcaccggcggcgacggcgcggacaccgtcaacatctccaccggttccaccatcctcgccgccgcggccggcgccaaggtcgctaagcaagggagcagggcgagctcgtcggcgtgcggcagcgccgatgtgctggaggcgctgggggtcaacatcgagcttggacccgagggtattaaacggtgtatcaatgaggtgggcgtggggttcatgatgtctgcaaattatcatcctgcaatgaaaattgtcagacctgtgaggaagaatctgaaaataaagacagttttcaatatccttggtcctctattgaatccagcaagggtgcctcatgctgttattggtgtttaccatgagaacatagttaccaagatggctaaggctgcacagaaatttggcatgaagagagcattggttgtccattcaaagggtttggacgaaataagcccactaggtcctggatatatccttgatgttactccaggaaagattgaaaaaatgctcttcgatccattggactttggtattcctcgctgcacattggaagatctaaaaggaggtgatccagcatttaacgcaaaagttcttcaggatgttcttgctggtcaaaaagggtcggttgcagatgcgcttgtcctgaatgccgcagcctctcttcttgtctgtggtaaagtcaagaatttacatgacggtgttgcactagcacaagagacacagcggtccgggaaggccattaatacacttgagtcttggataaagatttcgaatagttccaagtgactgagcgatgctgatttgcaatagaaggatttctgcaataaggcgagaggaatggtggcaaataaggactcaccaagtccatccgtcatccatgtattattaggttttttcttttttctcccatttgttcatgatcggccgtgtcacaacaatagatggcttctagtctggtttatgtatcagcggtgctgttgtctcgagaaatctccatcaagacgggattgtaaggattgtaagttctgcttgaccggggtagatggacataggttagatgatgtgatgccgcattacattcggaagcgattggaaattttgcaaaacgcatcaacctgaaagaagctagctctgcg

SEQ ID NO: 5627 - DNA, 2886 bp, Setaria italica
  Peptide Sequence Number=SeqID_71601
agaactatacttagctgcatcattccccttgggtttgtacaagcagatttttcttccacctgaaatgacagtattaccaacaagcttaggtgcctccacatgcatattcagttcagatatcttgcactacgagaaggttatagatcagataattggcacaagaatcaaactagcttatgcccttgcaaggcaatggtttggaatatacacaagtgcagaggagcccaatgatgaatggctgttggatggtttggctggttttcttgctgaattatttatcaagcgtttccttgggagtaatgaggcacggtataggcgtttcaaggctaactgcaatgtatgtgagtctgatgttagtggtgcaactgctttgagctctcctgctgcttcaagtgatctatacggaactcaaacgattggttcatatgggaaagttcgtttgttgaaggcagtagctgtacttcaaatgttggagaagcagatggggccagactcctttcggaagattttgcaggtgatagtggctccaaatcgtgcctcgagaacacttagtacgaaagagttcagacaccttgcaaataaggttggcaacctcgaacgcccattccttaaagaattttttccacgatgggttgaatcttgtggatgtccagttatgagattgggaatctcatatagtaaaaaacggaatatgattgaattagccgtttcaaggggttgcactgcaaaagctacacctgattctgatagtcataccaacggtgacactcgagaaggtgatgctggatggccaggaatgatgagtgtacgggttcatgaaactgatggggcttacgatcatccagttctgccaatggctggtgaagctttgcaggtggtggaaatacagtgtcattccaaactagcagcgaagcgcgtttggaaatcgaaaaaaagcaccaaatttgatggttctgatgacaacatagatgtccctactcaagaaaaccgcacaagcgtggattcacctttactatggattagagtagacccagagatggaatatctcgctgagatccattttcaccaacctgttcagatgtggatcaatcaattggagaaagacaaggatgttatatcacaatcgcaggcaatatctgtactggagaaattacctcagctttcttctgctgtgattaatgccctcaataattcctaaatgacacaaaggccttctggagagttagaattgaagcggcatatgcattagcagttacagcatctgaggcaactggtttagctgggttgcttcatctggttaagttctataaaagccgccgttttgatgcagatattggaatgcccaggccgaacgacttccatgatatcccggagtactttgttcttgaggtaatgctttgaggcaatcccccatgcggtagctcttgttagatcatcagacaagaatagcccaaaggaagccattgagttcattattcagctcctgaagtacaatgataacaacggaaatatttactctgatgtgtactggctgtctgcaatggtccaggcaataggcgaactggaattaggccagcagggcatggggttcctatcctctctactcaagcgaattgatcgactcttgcaatttgacaactttatgcctggttacaatggggtcttgactgtcagctgcattcgtacccttgcacgcatagcaaggagggtgtcaccttccatatgccttgatcgcatttgtgaactaattgccccctttcgcaatatggacaaaccatggaaagttcgaattgaagctagcagggttcttattgatcttgagttacaccataaaggccttgatgcagctcttttattgttcttgaaatatgtggatgaagaaaagtctttgcgaggggcgacaaagttggctgttcacgtcttgcgtttatgtcaagcaagtattgttcctcacggtaatgatcaaataagtttgacaactctaattggtcttcttcacctgcttgctggcgcaaaggcatacaacaacatatttcttcgtcatcatgtgttctgcatattgcaagttgccgctggaaggtctccatcattatttggtgttccaaaggttgtcacgccctctctggtggtccaggacatatgtagtgatcagcacactaaagctgattcctcaattcctcaaccatcgagacctcaagaaccttccactagcactcctagtgtgcgtgaggtcttacctacctctggacccagtaaagatgctgataatatatctaactgcagtgaaagaaggaacgttgtcaaaattaaggttaagcttactgcatcttccagtaaagcatcggatgctgaccacagaggccattctcatggtggaagaaatgaaaatgaagcgggtccatgtagttctatgtcagtggacgccccaatggttggagcagcaactgaaccattaaatgtaagcaatcataacattgaggagcagaactcctgtcatgaccgtgaatcaaggatgtcagcaagcgttagcaatgctaaactaatggacaggcatgaattttccaaggaactacagtgtactgctgattcgaggctggatgttcttcctaaggatcagttctctcctgccattattcctctgggtgttgtagacaagcctggtagtcagcttgaagtagtctccaccagctatgatggaaatcaagctccagagtccgtgaatggactggaaacaaaagagaggaagaaaaagacaagaaagataaaaagcggaaacgtgacgaaaaacgagataagaaagatgatccagagtatctggagaaaaagcgaacttaagaaggagaagaaaggataggagaaagagacagccagaagctgctggaaggt

SEQ ID NO: 5628 - DNA, 949 bp, Setaria italica
  Peptide Sequence Number=SeqID_71602
cgtttcttttacgttttttttttttttttttttttttttttttttttttttttttttttttttttttggtttctactcatggacaaccctagaactcgatttcaattaccctagaaattactagggcagcagcaatgtttttttacagcatacatcagccattaatgaaaaactgactactcatggtacaacctacaacatacccacattttaacccgctgtacagtaatccttacaaatggcggcagcctgaccacaattcttcaatctgtttcaactcccttcaggttttcttatcaagggcttgactctgatctttatccgtggtttggctgctgtccgtgcagtatctacagtcgtttccttgcttgatacttggggttcagagcttcgcattggcgctggttcagcactttgcgatggggctggttcagcacttcgcactggagctgctggtggccttgccagcaaaacttcctgtgaccctgaagttttcactgttttttgctgttcagaaggagtagctcctccttcaccttccagcagctttctggctgtctctttctccatccttttcttctccttcttaagtcgctttttctccagatactctggatcatctttcttatctcgtttttcgtcacgtttccgctttttatctttcttgtctttttcttcctctcttttgtttccagtccattcacggactctggagcttgatttccatcatagctggtggagactacttcaagctgactaccaggcttgtctacaacacccagaggaataatggcaggagagaactgatccttaggaagaacatccagcctcgaatcagcagtacactgtagttccttggaaaattcatgcctgtccattagtttagcattgctaacgcttgctgacatccttgattcacggtcatgacaggagtttcttgcttccttca

SEQ ID NO: 5629 - DNA, 541 bp, Setaria italica
  Peptide Sequence Number=SeqID_71603
ttaaaaaaccttaccttacgtacttacctaccgcacggccgccgcccacacgcgcctccctcctcgccatgtcgcgcccctctcccttctcctgcttgcaaattctcgccccggctgaatgattgatctaggggcacctcctcatccgatttgtaagtgctcctcgctccatgatggttagggttttggtgttcggtattggggattgtttcttggtaattttatctcctgtgaaaggatgatgttgtgagcggtcctctttccccaattttctcttttcatccacactcccatgcggctcctatatgcaaggttctccctccatgccggcgtccctttgctccttcccaatatgcagattcggttccctggtcaatactctttgtgcatatggggttccggcgcccctgcttttgggaagcccggattcactggcagggatcggcgacgatgataaccgacatggattggagttacttctctcaattttccctatcctatctcacatgttatttttttccaaatgagtaaatttggttga

SEQ ID NO: 5630 - DNA, 407 bp, Setaria italica
  Peptide Sequence Number=SeqID_71604
ggccacctcacaggccttctcgctgagcaacaggttctcctcgagcttcgggcacggcgcgacgaggtaccatcccacgagcttctccttctccaactccggcccgagcgcgctgtccggcgccgcatggccggcggccggcggtgccgggtacctgagctacgggtcgccagctgcgtcgctgttcaacggaaggcaaaacggcggggagctcccggcggtgctccaccagcagcagcagaaggcttccgcgagcgggagctcgcctccggcgggcgtgctcaccgacacgatagcgaaggcgatcacgtcggacccgggcttccacacggcgctggcggcggccatcacgtcgtacgtcggcacgcagggtggcaagtcgccggctggaggagacggcgggagcc

SEQ ID NO: 5631 - DNA, 1263 bp, Setaria italica
  Peptide Sequence Number=SeqID_71605
tcgggatcctcagtaccggcctcacccacctcgccgtcacgccgctcgacctcgtcaagtgcaacatgcaggtggatcctagcaagtacagggacattccgtctggctttggtgtcatgctccaagagcaaggccttggtgggttcttcaagggctggatggccacgctggttgggtacagttgccagggcgcctgcaagtttgggttctacgagttcttcaagaagtgctactccgacattgctggtcccgacaatgctgaaaggttgaagacattgatctaccttgcagcttcggcgtctgctgaggtgattgcggatgtggctctctgccctatggaggctgtcaagattcgagtccagacacagccggggtttgctcggtgcctgaccgatgggcttccaaagattgtccaatgcgaaggtgcctttgggctttacaaaggactgcttcctctttggggccgtcaagttccctacactatgatgaaatttgcttgctttgaaaccattgtcgagatggtctacaagcatgcagtgccaaagccaaaggaccaatgcagtaagccactccagctagcagtgagctttgcaggggggtatattgctggggtcttctgtgctgctatatctcatcctgcagataacctggtgtctttcctcaacaatgcacaaggagccacagtggcagatgctgtaagaactcttggaatgtggggccttttcacgcgtggccttcctcttcgtattattatggtcggtactctcacaggagcacagtgggcaacatatgacgcgtttaaagtcttcgttggattgccaacatctggaggagtgagtcgtagttgtgctgctgcctcccctttgcaccgagtggctcacgaaaagcagaactgactctgctgagagcctgagaagatgttgtgccaagctatccaaaaccaaaaactgaagtagatgaattgtgcggttgcaccaattttcacaagagctctgaagatcggatctgagttttagatagcagaacgttcattttcaaggggcttttctttcaaacctcttgaacgagacaacattgtaatgaacgagcatcctttagaaatgtattgggcattttgggccatcgcaagctgatctgatgttcgagtgcactcttttgttttttttgtgtcactgctgcatgtcgaccggcctggtgccctgtcttaatcaatcagggtaagaacacctgcttgtgcacttagctagtgttcctctatcccaa

SEQ ID NO: 5632 - DNA, 527 bp, Setaria italica
  misc_feature (501)..(501): n is a, c, g, or t
  misc_feature (509)..(509): n is a, c, g, or t
  misc_feature (513)..(513): n is a, c, g, or t
  misc_feature (517)..(517): n is a, c, g, or t
  Peptide Sequence Number=SeqID_71606
ttttttccctttttgttttgtttgtttgtatcgggaagctgaaatagaacagtttaagccacaagagtattggacagtacagacagacttcaaaacaaactttggaattcagaacctttatacgggatggaatattcattccatcccgtataaagcttctgaattcaaaaaagttggatcaactttccatatgttctcaagaagaagcgcgagctatagaaaagaggattcattcttctcagtttgaagttctaggtgttaaaagaagtaaaattcacaagaatcccccgatgccatatattacatccagcctccagcaggatgcagcaaacaaactacattttactgcagggtataccatgaaggttgcccaaaagctttatgagggtatcaacctttcctcggaagaagcgactgggttgataacatatatgagaactagaatagggttaccaataatttactaaataggaagactagacaagaaagaacaatacttanaattaganaaanaaanaataatagga

SEQ ID NO: 5633 - DNA, 579 bp, Setaria italica
  Peptide Sequence Number=SeqID_71607
aagaaatgaaatcctcttttctatagctcgcgcttcgtcttgagaacatatggaaagttgattcattcttctcagtttgaagttctaggtgttaaaagaagtaaaattcacaagaatcccccgatgccatatattacatccagcctccagcaggatgcagcaaacaaactacattttactgcagggtataccatgaaggttgcccaaaagctttatgagggtatcaacctttcctcggaagaagcgactgggttaataacatatatgagaactgatgggttccatatttctaatggagctgcagaagacatccgttcattggtcaaagaaagatatggtcaagagtatgcttcagagaacatcaggaagtatttaaagaaggtgaaaaatgctcaagaagcccatgaatccattaggcccaccagtatcaggaggttgccatcatctttggttggagtacttgatgatgattctctaaaactgtacactctaatatggaaaaggacaatggcttgccaaatggaagcttccaggactgatctgattcaagtggatattggaactcctggaggagacctg

SEQ ID NO: 5634 - DNA, 1171 bp, Setaria italica
  Peptide Sequence Number=SeqID_71608
ttttttttttgtgccagcaaaagcgcaatttattggattaccggttacacgtacacttcatttctgccacagttcagacaaagttattcttgtacgcctggccaagtaatttttcccccttgacctgcccgtcagccactcagatctcgccatcccaaaactcctcgatggacttgaacacgccttccgggtgcacgaagaagtccccgcgaatcaacctctcctgctcgatctcggagagcttggcgagcaggtcgtccgggatggaccaatcgtagacgtcgaggttggccctgatcctctcctcgttggtgctcttcgggagcacgctgtgccccatctggatgccccagcgcagcgtcacctgcgccggcgtcttccccagcttctccgccgccgacacgacggccgggtgctccagcaccgcgccggccttcactgaggccgtgcccggcgagcccaacggcgagtaggccgagaggtgtatccctttggactcgcagaaggcgcggagcttgccctgctgccacacggggtggcactccacctggtccactgcggggggcacgcgcgccacggcgagcaggtccgccagcttcttggaagagaagttgctgacgccgatggcgcgcgccttgccggcgtcgtacagcttctccatcgcggcccacgtcgccggaatatccgacgggatgacgctttgcgggccaaagccggcgcctttcttcatcctgactggccaatggacaaggtaaagatccacatagtcggtttgcagggctttcagcgtgccgtccagtgcaacagggacgtcctccggcgcatggttggtgttccagagcttggaggtgatgaagagatcctcacgcttgactacgccctcgtcgagcactctcttaagacccaatccgacctccttttcgttgttgtatgcttgtgcacagtcgatgtgcctgtaacctgccttcacggcggcgtagacggcgtcgccggcgacggcagggtcggcctgccaggtgccgagcccgaccgacgggatcttggcgccggtgttgaggacgaagtgggtggccatacgctcgctatccgcgctgcctttggagccacacaacacaacaggacccttggatggtaccacgtaatggaaagccagtcgcgcgcgacgagtcgt

SEQ ID NO: 5635 - DNA, 485 bp, Setaria italica
  Peptide Sequence Number=SeqID_71609
gcttcttcgctttcgtgccgattcttgaggttcccaacgggaacggcgacgagtacgtcgtcagcttgaagaagggttttctcctggagtggacaacggtgccggggcattgcccggactgcatggaaagcggcggggaatgcgtgtacagcgacaccgggttgaacttcgcgtgcaaatgctccggcaccttgctccctgagaagtgcggtgagttcaggatattaaaaacacactgcgattttttgtttgtttgggaaagagaaaattagtcattagtctacctactaatctggaagtagaagtaaaatcggccgacgctaaatgcaaagagatggtaaaaattacacatacaagaagggggtgaaaatacacagagaaattcaagaacaattttaatagggatgctttacttctagtagtcgattaccagtagttcttagatcatgcatttcaagcggtaatcggattcaatgatgctgtag

SEQ ID NO: 5636 - DNA, 1224 bp, Setaria italica
  Peptide Sequence Number=SeqID_71610
taggttctttcctttcgttccggcttcggacgacgggcggaatttctcaagaagccacatccagggcggcatcccgccgggctgcttcttcgctttcgtgccgattcttgaggttcccaaagggaacggcgacgagtacgtcgtcagcttgaagaagggttttctcctggagtggacaacggtgccggggcattgcccggattgcatggaaagcgcggggaatgcgtgtacagcgacaccgggttgaacttcgcgtgcaaatgctccggcaccttgctccctgagaagtgcggtagtagaaatggaactggaaggaagataatactaatagttttgatgacagtagctgcaagcttgctcctaccatgtatatatgtgcttgtatggcatagaaagagaggaaagctacattttttcctatgtgaaaagactagcagaaacactgaaaggaacattgaggccctaatagttttgcatggatccctagctccgaaaagatacaagtattcagaagtaacaaagataacgtcttcctttagtaataagcttggggaaggtggttatggtgcagttttcaaaggaaggctagatgatggtcgtcaagttgctgtgaaattcttgcatgattccaaaggagaaggggaggagtttgttaacgaggttatgagcattggtaggacctctcatgttaatattgttaacttatttgggtttgtttggaaggctcaaagcgggccataatatatgagtacatgcccaatggttctttggataagttcatatactcagagaatcctaaagcagttttaggatgggataagctctacacaatagcgattggaattgctcgaggattggaatacttgcatcacagttgtaatacacgcattatccattatgatatcaagcctcaaaatatccttctagatgaggatttttcacccaaaggttgctgatttcggtttggccaaattgtgccataccaaggagagcaagctttctatgactggtgctagaggaacagttggtttcatcgctcctgaagtgcactctcgaacctttggagttgtttcaactaaatcagatgtttatagttatggaatgatgctattagagatggttggaggcagaaaaattgtgaattcaattgctcaaaagtcaagtgaaaagtattttccacattggatttatgaccattttggtcgaggtgatggattacaagca

SEQ ID NO: 5637 - DNA, 545 bp, Setaria italica
  Peptide Sequence Number=SeqID_71611
gactttggcacttagaaatgcaacagcgagaatgtaacctcttctgagtccatattgcctctgccccccaacggaatttcaccaagtcattaatcagtgagggtccgacataggatgcactggcacttaatactgcaaatcctgcgttgatcattgctttccgtctcataaatagaaacattgctctatagattgacgaagtacttaaaccatgcctgcgttcaacatcatctatgatctttttgaatgcaggcatggtttaagtacttcgtcaatctatagagcaatgtttctatttatgagacggaaagcattaatcagtgagggtccgacataggatgcactggcacttaatactgcaaatcctgcgttgatcattgctttccgtctcataaatagaaacattgctctatagattgacgaagtacttaaaccatgcctgcgttcaacatcatctatgatctttttgaatgaatcagacagatcatagatgatgttgatcattgctttccgtctcataaatagaaacattgctctatagattg

SEQ ID NO: 5638 - DNA, 267 bp, Setaria italica
  Peptide Sequence Number=SeqID_71612
ttgatcattgctttccgtctcataaatagaaactttgctctatagattgacgaagtacttaaaccatgcctgcgttcaacatcatctatgatctttttgaatgaatcagacagaaactcagcggagtctttgccatcaacatctggcacatcattcttctctagaggtttcttgtatccaatagcaaagacagggttcatccaggagaatgtgacaagtccaacaatacttgctcttccatatggacatgcccttttggcttcagcc

SEQ ID NO: 5639 - DNA, 286 bp, Setaria italica
  Peptide Sequence Number=SeqID_71613
aacattttgtttgcctcttccccctcgcaatggcgatggacgtgggcgagccgctcgacggcggggcggccctgcagctgcttcgggatgcggacccggctcaacttcctactccccgtccgccgacctcgccgccgccgcccgcgcggcctcgcggcacatctactcttcgcttgcgccgctctcccccgcgcagccgcccccgctccctggcctcctcgcgggccccgccttcgatgctgagcagatttggtcccagatagagctgctctcccgcccactcctc

SEQ ID NO: 5640 - DNA, 1816 bp, Setaria italica
  Peptide Sequence Number=SeqID_71614
ggcatggcaaagctgaggtcattcaatgccattaagtgccctattagcatgttgtcgcagctagtgagcttccagactctacgcgtgctagtgctggaaggatgtgagatcatggaaggctatcacctcaagcatcttgggaagctacgtcagttgaggtacctcggattgaaagacacgcgtgttgctaagctcccaagggaaataggggatctcgtgcatttgttggtactggatgtcagggacactggcttggaggaactgccagagactgttcgtgagctaagcaagctcatgagcctgcgtgtcaatgatagcatgagctatctgtggctgctttgggtgggcaacctgacatccctgcaagagctggtgctgggaaatgtggtcatgtcgccatggttgatcgtggagctgagcaaattgacggagctgaggatactcgagatttcatttttggagagtggagagcacatggagtccttgctggaggctctgcgcggtctgtgcagaatccggatcctgatgcttcgattctggcctgatgaagtcctggtgagctcctgggaaggctgggagccaccacggcagctctgccagtttgtgatggaaggtgtctgcctggctcgactgccagggtgggtgaactccacgtgtgtcccgcatctctcctacctacgccttaaattgctggtcatggaagcgcaggactgggaagtccttgcacggatgcctgagctccactccctctgcatatatagcacgttaaggttgagctcagcagggagcattgagagccccatctacgatggctacagctggaggatgtatgggcagaaggagattcctggcgccaagcacccacggggctactatctgtgcatgcaccgccagtcccagcgatgcacagcgacaaagcaggtgcaatgccgagatgaggactcaactctcttcgatgtcatctaccatggcacacacacctgtgttcaaagaacatcggtagagatctcagcatgccagaatttagtggaagagaattacatgctggtcgagcaggggccagactgggacgtgcagagcctcgcctcactattcttggagatgccgacttcaagctcaattacagatgacaccaacaggcctttcaaacgtagcaagaagaggcggagtcatatggagatgcagaaggtgaaggtgagggtggtgaaggtgagggtggggcggtgagtggtgagggccccgccgacgatggctacagctggaggaagtacggccagaagaaggttcttggagccaattacccaagggcctactaccggtgcacccatcgccactcgcagggatgcgtggcgacgaagcaggtgcagcgctgcaatgaggacccgatggctttcgacgtcatctacatcggcattcacacctgcactcagagtgccgtggccatgcagccaccgctggagcagaacccgagtgccagtggcgggtccacacagtgacgagggtccggcggctgccatgtctgccctgtggtggacctccacattccctctttcttcttcccgaggtgccagacctgtccagccatgcgtgagtccgtcctcttggcatctgtgtaatgcccaggtgcctctgttgatctaagttacaaattacaatgacggagcaccggagaagtcaacacttatctagaccagtattgagcctttaaactcaacacctttgcagccagctgctagcccaacccacaagggcggtcaatgttgcaaatttggatgctaatggagcggtcggcagccgcgtccgtcatcctgggggt

SEQ ID NO: 5641 - DNA, 450 bp, Setaria italica
  Peptide Sequence Number=SeqID_71615
ggagtccgccggtggagaagcggaggaggaagcacgccacggtggagcccagcagctgggcgatccagtacaggatgccgcggaagagggtgatgttgccgccgacgaaggcgccgaaggtcacggcggggttcacgtggccgccggagatgttggcgccgacggacacggcaacgaacagggcgaaggcgtgggcaatagccgcggcgatcaggcccgtgggggtcgagccgcctggggacagcttgctgaaggccatgccggagccctggccggcgaagacgaagatgagggtggagatgaactcagcgaacgccgccttgagggcacccgggtggtacacctcctcatggctcccgacggcgatcctgttgatcggcattttcactgccctctagctctctcactctctaaccacagaagaagacgactgtgcttggaggatgagat

SEQ ID NO: 5642 - DNA, 948 bp, Setaria italica
  Peptide Sequence Number=SeqID_71616
ccggatctccccggctttcccgagaggagggctcgctcgcgctattccaacgtctgcgggcgcgaggtctgggaggatggcggtggcggcgctgccgcagaccatggacgcgctgtcgcggcgggcggccatgctgcgggactcgctgcggcggagccaggggaacacggacggcatggtcgccatcctcggctccttcgaccaccgcctctccgcgctcgaggccgccatgcgccccacccaggtgaggacgcacgcgatccggacggcgcacgagaacatcgacaggacgatcaaggccgccgacggcatcctctcgcagtttgaccttgcgcgccgggctgaggcaacgatattgaggggtccccatgaggatttggagagctacctggaggcagtggatgtgctgaaaggcatcgtccgcttcttttcctcaaataagaacttcaagagcagtgaagtagtcctgaatcatgtcaacaatctgttagctaagtctactctgaagattgaggaggaatttaaacaactgatgagtacatatagcaaacctattgagccggatcgcctgtttgattgtctccccaagtctctgcggccaacaaaaggtgaccacgagactgatggagggagccgctctgatcatccatcgaaaggcttggagactgccatataccggaccccaactctggttcctcccagaatattgcctctcatgaatgacatagctcagcagttggttcaggctggaaatcagcagtcttgctacaaaatctacagagattcccgtgcttcagcactagaagtgagccttcggaaacttggcgtggaaaagcttagtaaagatgatgtacaaaaaatgcaatgggaggctctggaggctaaaattggaaactggatacacttcatgcgaatagctgtcaaattaactaactaagacaaggggga

SEQ ID NO: 5643 - DNA, 274 bp, Setaria italica
  Peptide Sequence Number=SeqID_71617
agcgtcaccatctagtctcagttcagcagacatgggaggataacgagatgatttggaagtgagaaatttccgctcattatactcgggcggggagaaatcttagcagaagaagattacttttgccataattctccccatttgattcggggtccggataggatgaatattttgacatgggtgggaggaattgatattgtagagtgggtgtaaataacacaatcaatggaatatagtcgtatagagttctcaaggaaagttatccagtaaaaaaaaa

SEQ ID NO: 5644 - DNA, 253 bp, Setaria italica
  Peptide Sequence Number=SeqID_71618
ctcgctggcaaggacggggagctgcttcgccgccctcgtcgaatgataaaagctaagaatgaagaattgaagatgctgagaaccaaaagagtgaaaaacatcaaggaatgctacccgcagttagtagaatccaagctcaataaacatgtgtatatatggggaagagccacaaactatatgagaaatggaagtaattccacgtttttctcaggtatggatcagtgaatgtacattcctgggttctgaatgtttt

SEQ ID NO: 5645 - DNA, 554 bp, Setaria italica
  misc_feature (447)..(554): n is a, c, g, or t
  Peptide Sequence Number=SeqID_71619
cgcaggctggggtccccgccgcacccgccggcgccgaggagggcgcgctccactcccagcagcccgaggcgcgacccgctccccaccatcgcgtcctccgtcgcggccgtcgccaccgccgggggcgccgggagctcgctggcaaggacggggagctgcttcgccgccctcgtcgaatgataaaagctaagaatgaagaattgaagatgctgagaaccaaaagagtgaaaaacatcaaggaatggtagtctcttgtagctcccgtttttcatcgtcttttgcaacgcactgtaattttctgccatgctttttacctttctctagctacccgcagttagtagaatccaagctcaataaacatgtgtatatatggggaagagccacaaactatatgagaaatggaagtaattccacgtttttctcaggtatggatcagtgaatgtaaannnnnnnnnnnnnnnnnnnnnnnnnnnnnnnnnnnnnnnnnnnnnnnnnnnnnnnnnnnnnnnnnnnnnnnnnnnnnnnnnnnnnnnnnnnnnnnnnnnnnnnnnnnn

SEQ ID NO: 5646 - DNA, 462 bp, Setaria italica
  Peptide Sequence Number=SeqID_71620
ttttttttatgtataaggtctacttattattgattaaaccaagcttacgacggacaccacaggtcaactgatgcaccaactgcgaacaaacatcacgctgtctctcgacacggaccaaaggcacaacaccagggtgacaacccagaaccagcttacattctattacatacatatataaattctaaatccttcgctaaaagaagtatgacaggtcctgcttcttcctcgacccgcctttgccatagagctcgttccactgcctgatctcgttcatgacagcgccttcactggaaaagcttgtggcgacttcttccttggccttcttcaagtcctccatggttaacggcctcagggcagctgtctctttggtttcgcccttggcaccttcttcccctgattcgactttcttggctttgctgctttctggcttttccttcccgttccttggtttgtcggctcctc

SEQ ID NO: 5647 - DNA, 258 bp, Setaria italica
  Peptide Sequence Number=SeqID_71621
tcgttgtctcttccggcggggtaggaggaggaggcggaggcgcggtgcgcgacgacgacggcgagcttgggcgcggcgggcgcgaactgcagcgacgggtgcgcgtccgggggcgcgaggtcggcggcggggccgaaggaggccgcgaggaggcggttgccggcgctcagcccgatcaccgccggcgtcgccgtcatggcgtgcgagccccttcacctgcgcttccgaggcggtggcggaggcagcggcaagaacaag

SEQ ID NO: 5648 - DNA, 1155 bp, Setaria italica
  Peptide Sequence Number=SeqID_71622
ttttttttttttttttaaacttttgactcattcctattctcaggggtgtaaacttgactaatatggcaccttgttgaggaacagagatattgtcaaatacagagaaattactttgttcaaaatggcatgtttacggccacaaagtaaggttacatgatcttgaaaacaaacaacaagacaagtatagataaaaaaccatcagctgcagaatactagccctacctagaattacgatctagttcactcaacctgtgccagttcacctgccttacctagagttcagatcaagctccccagatctgcgccagtcctcttgcccatctgagttcccattctcgggttcgttctcatcgttgaggaaatcctcagatggatcttcatcatcgcgctgagcatttccccacccatcttcagcgtgttcttgttccatgccacgactagggccatcctccccttgtgaagccacagcactgccccgaatggggccatgattcatcatctcagagtgtgcttgggcctcagcccgagcatgctccattgccatgcgcatcttagcttcggctgcctcgcgaccggctttctccctcgattccatctccgctctcagtcccagcatagcctgtttttcctcctgtaacaaggcttgctccagcatgagccgttcctctgatctgaactcaccgatggcccttttcttggtcattatgttgtatgccaaaacttgtttctcaaacgttgtggtgaactcggcaatcttcaccagaatgttatggtcccattgctgcaggcgagaaggaatctggccagttgcatcactgtcaaggattctgtcatcttcttcagcctcatagtccgcaacaacatggtaaggcaataacctgttgacggcgtcctcgatggactggaagggggtcttgatgtccgggttgcacacccgcatggcgtcctgcagcgccatctccatctcggggctccggaccctggccgcctgcgcctgtgcctgcgcctgcgcggccgcctgctgctgctgctgatgctgatgctgctggtgatggggcgacgcctgctgcggcgccccctgcgatggcgactgagagggcccctgggagtggggcggctgggacggctggggctgcggctgctgctgctggggcg

SEQ ID NO: 5649 - DNA, 460 bp, Setaria italica
  Peptide Sequence Number=SeqID_71623
aggtgttgtcgaaggcggcctcggtggcgtcgaggccggagccggcggcgcgggcggtgttgttggcggggcaggcgcggcggagggaggcggcgaaggaggggctgagggcagggtcagcgccgccgccgccgttggggctgcggatgcggtcctggaaggaggagcagtgcgcgaagcccagcgtgtggccgcccgacagcacgacgaggtccttggtggagaggccccgggcgtggaaggcctgcttgagctggtcgaagctggccctgggccccggcagcgccgacgacgtctcgctggccagggagacacggccgtcccggcggccgacgggaaccacccaggacggcccaccggacaaggcgacggcgtctctggcggcgagcgctaggatgtcggcgcaggagacgacgccggggcagagggcctccacggcggccttggcgttgtcgatgac

SEQ ID NO: 5650 - DNA, 410 bp, Setaria italica
  Peptide Sequence Number=SeqID_71624
gccggactagacatctcaagacccatcctttagaatcttagaatcttgatgtttggatccatggactcaggtcacatcgaatgtttgataccaattagaggactaaacgtgaactaatttataaaactaattgcatagactaattaggcttaatagatttgtctcgcgaattagtcttcatttatgcaattggttttgtaattaatctatatttaatactcctgattataatatctaaatattcgatgtgacaggactaaactttagtcagaaaggctttggtgtcacgtttgttctgttcctttctctagactggacactgtttgtttttcatatatactatatgttttcatgttaatcaaatgctgtttctgaatgcagggatggttaccgtcacctttgttctccat

SEQ ID NO: 5651 - DNA, 1637 bp, Setaria italica
  Peptide Sequence Number=SeqID_71625
gttttagtttgctacatctgaataactggctcggctgtagcattgttacagttcaaattcacagcaatacagggaatgtttagttgctagccaccatttgccacacctaatctttggcaagtgtggcaagccacaaaaagtgtgacaaataaatttgaagccacactttgccatggcaaagaggatcttaccatactttttgtttctatgacatgtggagcctaaagaatcctgccatttgatgtccaaccaaacacttgccaccttgttcaaacttgcctaaggttagatgtggcaaactgtggctgggaaccaagcacccccttaatacgaagttgatcttaattatacaggtgttccacaggacgctgacaagcgaacacaaccttagtttcaattacaacacaccagttgtacacacaagggcggaatgtgaaagccaagaatgaattgcctgaaaacagcagacctacccatagcattggacactcccatggactcctgtgcccgcattgcgttctgccaggacctggtaccaagctcattcaggtgaacgaaccttggaaagccttgcacaatgaatgcaacgtcgctaagatggcagcgcggtgcagggccaggaatccggtctcaagtgcctatgcctgtggacagaaaccactgttctaggatgcaagacccctacttcatgcctcgttctgtcgtagctgtagtaagtcaggagggacatggagatgctctgagtgttggtctcctttctcaggatcaccattaccgttgggagaaccattgtcaattttctttgtgttcaggaagcgtcccccatttcctctcgcccttctcattgcgtgttgatgacgagactcatgaaggtagggcttcctggttttgaccacctttttctcaagttcagccttggcacgtgactgccttcgccttaaaattccatggtactgctttgcatttacataaacaggctcctccgatacttcaaggggtaatggcatgcgagagtgggctaatccaggtagctggaaatgagccacagcttgagtgccataaggaggaaccatgccagtgtagtaaggatctgggtactgatatgctgccgaagcaattgattggttcagttccagctgtgaatatggtgccaaatactctgacaccaaagcaggcatctgtgatgtggcatggttcttttcttgaccagcacttccatcttttggttccccagatttccgtgaatcctcgctgctctcgtcactcgcggcgcctttggacgccccggcaccaccactaccacctaccgggctgctcgacaggctaatccctgccccgctccttggcgccacaacggccggcgacaccgcaccgagcccggccccggaggtcgtccaccacggctgcatcgccgcgccgaccgacggcagcgcggcgccctgccctctgggctccaccaggttcgttccgcccggccgcgactccatgatgctgctcggtgctcaccctcgcaggagcctcgccggccgcgtcgtcaaggtccgcgctgctctgtttcactgggcgcggaggctcgccggaggcggcggccaataggcgagcgcgtcgtctccctccgccccccttctctctctatc

SEQ ID NO: 5652 - DNA, 457 bp, Setaria italica
  Peptide Sequence Number=SeqID_71626
ctgatggcagaagtgctgacgctaagaaagggttgaaccatctcttgggcatcctagtccatcatgaaaacttctgtaccatgccgtagcatcgtcatgattgcaggccgtgtcatagtttcactttttggttgcaggcagtgccacaaatttcactgaagctggtgctttcctttcttcggattacacagccagcctgcagcgcaaatcacctgtggagcattccacatttgtagtataaccacgagcatgcgcttggaagatgactcatttcacaagcagttcatggcctgctggaatgcagccagcacgctttacatgcgaactcagcctaccgaccatctcggatatctgctctgactctgggtgctttccgtccccaactgtgaactcgtggaacgcctcatcgagttctatccagcttgagcctgctgttttctgagaccctgtttctttc

SEQ ID NO: 5653 - DNA, 364 bp, Setaria italica
  misc_feature (347)..(347): n is a, c, g, or t
  Peptide Sequence Number=SeqID_71627
tcgagagcgcgcgccgtccggccggaggacgacccgttcctggccgcgtacctggcgtgcaccaagagcagcggcaggaggggcggaaaggacggcggcggcggcggcgcggcgaggggggaggccaagggccggcggcggttcacgtggtccggcctcgggctctcctgcaagagctccaccggagccgtggagcagagcatggtgaaggtgaccaaacggccggagccggatcctactagagattcttaatccatcgaccggccagttcatccatcgcctcttcttcgtagtcacttgctacttttgttggtcaagtgtgaagcttgaattagcgaggcttttangtgtgtgagtgagggaa

SEQ ID NO: 5654 - DNA, 463 bp, Setaria italica
  Peptide Sequence Number=SeqID_71628
ttttgaagtggggttcctgtcagcatcagcctttgacgagcatgttgcgcaacagccatcaggtttctccatcggaagctgcccttatctttcagaacatgtgcttcatccatcaaaacacaactccattgccatcttttgagagccttacgatcatccttttgttgagcacttcttctttcaaaaagtgtgtagccaacaagaagcacgttaaatggggctggacagccagccttgcctaaggagcttaattcctttgaataggcagtccttccagctccatgaaacattatgattgaaaacgaagggcaccacttcctgagttctctttcccaattttccaacacagaagctgggcaaactatcagatgtggacctgggtcgttatatagatgccgcaacagagtaagataagtgacagcctgcactgtcttcccaagacccatttcatcagccagaattg

SEQ ID NO: 5655 - DNA, 853 bp, Setaria italica
  Peptide Sequence Number=SeqID_71629
tttttatttgttgagatcattgcacatatttccattaagaaatcagacaaaaaggaatgaacattagaatttacaacagtttgtacaatgaacagggttcagatagtactcttgattcactcagcgctgttgccttcggaattggacaaagcgcgacggcctccaccaaatccatgtgatgttatatacatagataagagttgaagcaaatgcttatacaattggattacacaaattgggtatacatatgtacattgccagtggaaatactttctgcagttcactgatcacaattgtaacacaagatgcagatcatctgttctcaaggttggaggcccaacaagttacctgacgagatcagatgtgcggcagaaacatattcataattgacacaatgatccagagcaacgcgaatttacaaactcatatgctgagaacctggcagctgatgagttcagcaactgcaatattcttcgatgcgatggctttccaaacatctgtttccttctcgaaggagacatctggattttggcaagttgtgccagccgaaggggctgccgaatcagtaggcttcagaaggtctgtttgcataatgattgtgttatccacatccttgatgatcaaatggagcttcccaagaaatcctgcaagcaggtacggactttccgactcagcgaagtccccaacaggtacctggcttactgcaaccttccaagtatccccttgaggatcatagatctttatcttaccactgtcagaagaagttgatggttccaaggcatacaggtccccatcaacaacagcacttaattttgttccagcctgccttgcaggccaaccctcacccatgccc

SEQ ID NO: 5656 - DNA, 234 bp, Setaria italica
  Peptide Sequence Number=SeqID_71630
tagccaagaccctggagcatatatcgatttccttcggtgaagagctgctagcttattcacaatgcgagggcctgcgggatcttggtaagctcaccaagctggagatatgcgggtgcgacgagctgacatgcctcccacagggtttgcagcatctttcatccatcagaatcttgaggattgacaactgcagcaaactgaagacgttgccagattggttggagaacccttaccttt

SEQ ID NO: 5657 - DNA, 417 bp, Setaria italica
  Peptide Sequence Number=SeqID_71631
caaaatgctaaactctcggcccctagcactcggatcccaacaggcccttgctctcgaagcgcctaggcctagcgccctctctcctcgcccgcgccgtctcccaaaccctccgatccccacccaacccgcgcacccgcagcgagagccgagccgaaccctcgagaagcttccgtaagccgcgtcgtcgatggcggccgaggggggcggcggcggagggcaggaggcgttcgaggcgcgggtgaagcgcctcttcgggtcgcgcctcttcgacgccgtcccggactcctcgttcccggcggcctcctggtccgtggcctcgggggacgtcgagcgccaccgctgggcgaagccgtcggaggcccgggacgcggaggaggaggccgcgggggaggcggggcgcgccgacacgccctgcgg

SEQ ID NO: 5658 - DNA, 264 bp, Setaria italica
  Peptide Sequence Number=SeqID_71632
gacttcttcgcgctcgcgcccaagcctgtattcgtgttcgcaatcaggtcacgcacgcgcgcacagatatatatgaacaaatctacagcatagagagctagctagagtagtactagtgcctaccgtttgattccgccatggctgctgagaccaggacggcctggagaaccaggatggccaggacggtgctgctgatcttcatcttctccccacgctgcttgctgccgacacttagcttggagcaacaaggcttcttttgagttg

SEQ ID NO: 5659 - DNA, 600 bp, Setaria italica
  misc_feature (1)..(19): n is a, c, g, or t
  Peptide Sequence Number=SeqID_71633
nnnnnnnnnnnnnnnnnnntttttttttttttttttttttttttttttatcatcgcaaaacaaaaggctttattaaatccacgagcgttgtcgagaatgaactaacagtagtagtacagcaagacgctagcgcgcctgacttaatcttattctatgcatctcgaccgagaagatcagagacacacacacacatggaaaaacagcaacggattattgatgtcttgcaagttgcaacgagctcgaccgatggatcgatcagttggccttgcaggggcatccctcggggaggaagtcgcggcacctgtagcgggtgcccttgtcggtgggcacggcggcgcagttctggcaggtggcggcgcacttggtcagcaggtcgtcgcaggtgtacacccccgaccagctggtgcaggagttgcagcacgacttcttcgcgctcgcgcccaagccgtttgattccgccatggctgctgagaccaggacggcctggagaaccaggatggccaggacggtgctgctgatcttcatcttctccccacgctgcttgctgccgacacttagcttggagcaacaaggctcttttgagttgtcactggcactgcg

SEQ ID NO: 5660 - DNA, 407 bp, Setaria italica
  Peptide Sequence Number=SeqID_71634
ggggaatcactatattgtttatgagctgatggagaagggatccctggatacacagctgcacgggccttcacatggatcagccctgagctggcacatccggatgaagattgcactcgacatggccaggttcttgtgatcttatccctgcactttccttcaaaatgagtgaattggtgatgaattttaaattgaagtgctgctgctgattggctggctagtagtttataacatgcattggtgaattaaaactggcaggggattagagtatcttcatgagcactgcagtccaccagtgatccatagggatctgaagtcatctaacatacttttagattcagacttcaatgctaaggtacacactgcttctctttttcttaaggtctaacttattattcatcttgactgca

SEQ ID NO: 5661 - DNA, 1221 bp, Setaria italica
  Peptide Sequence Number=SeqID_71635
ggggaatcactatattgtttatgagctgatggagaagggatccctggatacacagctgcacgggccttcacatggatcagccctgagctggcacatccggatgaagattgcactcgacatggccaggttcttgtgatcttatccctgcactttccttcaaaatgagtgaattggtgatgaattttaaattgaagtgctgctgctgattggctggctagtagtttataacatgcattggtgaattaaaactggcaggggattagagtatcttcatgagcactgcagtccaccagtgatccatagggatctgaagtcatctaacatacttttagattcagacttcaatgctaaggtataggtacttagacaagtgagtatattgacaagggaactatgaatctttctggaaccttgggctatgtagctcctgaatacctattagatgggaagctgaccgagaagagtgacgtatacgcttttggagtagtgcttcttgagctgctaatgggaaggaagcctgtcgagaagatgagtcaaactcagtgccaatcaattgtgacatgggtatgatgcacaatttactttgaacattgctaatctttgattaagtcaaactgaatgattgaaatgttcagtaacactattgtcaccaatcattcttgcaatgtgcactgcacggtttgactaatgtagaaaatatagatttcaagatcagtgctaacattttagcagttaagttgcaatttatctgtgtgctaatattttacgtgctgcaaaatcataaacaggcaatgccgcagctggctgacagatcaaaactccccaacatagttgacccagtgatcagggacacgatggacccaaaacacctgtaccaagtactattatgattacctgttaatgttctttatttcagatatagttatctttctagctattttgattgctgttctgtacttctgcaggttgcagcagtggctgttctatgcgtgcaaccagaaccgagttacagaccgctgatcaccgatgttctccactccttgttcctctagtgcctgtggagcttggcggaacactgagggttgcagagccaccttccccaaacctaaaacattctccttgttgagatgtcctcatgacctcatcgggggaagcggagcacagattcaccctgatgaagttggatctctgtttattgtataacttattgccctagatgcg

SEQ ID NO: 5662 - DNA, 1061 bp, Setaria italica
  Peptide Sequence Number=SeqID_71636
caacaatgttggtttctgtgttcatgaggggaatcactatattgtttatgagctgatggagaagggatccctggatacacagctgcacgggccttcacatggatcagccctgagctggcacatccggatgaagattgcactcgacatggccaggggattagagtatcttcatgagcactgcagtccaccagtgatccatagggatctgaagtcatctaacatacttttagattcagacttcaatgctaagatttcagattttggtcttgcagtgaccagtgggaatattgacaagggaactatgaatctttctggaaccttgggctatgtagctcctgaatacctattagatgggaagctgaccgagaagagtgacgtatacgcttttggagtagtgcttcttgagctgctaatgggaaggaagcctgtcgagaagatgagtcaaactcagtgccaatcaattgtgacatgggcaatgccgcagctgactgacagatcaaaactccccaacatagttgacccagtgatcagggacacgatggacccaaaacacctgtaccaagttgcagcagtggctgttctatgcgtgcaaccagaaccgagttacagaccgctgatcaccgatgttctccactcccttgttcctctagtgcctgtggagcttggcggaacactgagggttgcagagccaccttccccaaacctaaaacattctccttgttgagatgtcctcatgacctcatcggtggaagcggagcacagattcaccctgatgaagttggatctctgtttattgtataacttattgccctagatgcgtgcctgaagatgacagttccaacctgctggcctggttgttggttggatcaagagagaattctggtctgaaaagagttgcctcctatgtttgtacaaagaagtgaaagaaacaccactcttttctttagaacttagggtcctgctgtacagatcaaagtttctccaaacaccgtaacttgaaagaatttgagaaagttgtgcttttggctccacatgggtaccaaagcactttggcttgctag

SEQ ID NO: 5663 - DNA, 3770 bp, Setaria italica
  Peptide Sequence Number=SeqID_71637
gagaggatgaagctgctgtgcagcctgggcgggcgcatcctgccgcggccgggggacgggacgctgcggtacgccggcggggacacccggatcgtgtccgtgccgcgcggggtgtcgctgccggacctcctcgcgcgcctcgccgacgcgtacggcggcggcacgggcccgcacttcgcggtcaagtaccagctccccgacgaggggctcgacgcgctcatctccgtgtcctccacggaggatctcgacaacatggtcgaggagtacgacaagctcagcggcgccagcccgaagctgagggtcttcatcttccccatcctggatgcggcgggcggcagcggcgccgcgggggaggagttggagggcgggagcttcgacgccggcctgcggtatctggaggccgtcaacggcattgtgcggaaggacagcatcgcgagcctctcgtcgacgcagtactccgatggggggctgccccctccggcgccgtcagggggtggcggcccggggtctccggctgcgctctcccccacctccactagctccaatgatgctgcgagatcgaacatcagtggggctggggcggcgcctccgccgcttgttgatgtcttcagcaatgctgctcctcctcctgtacaggcgaagccgcaggagattgctgctgaagggagggctccccaggcgaatccacatccacatccagaggtggcaacacatccgcatccacttccggaggtgacaaggtaccggcagccgctgtcgcagctgccaccgctgccacccgtgtttatgaacgatcatagagatgccatgcagggtctgaatcagccgccaccagggcatggggcgagatttgatgactgccatatgtgcttgaaggcattgcctcacgctcactctgatccggtgatgaatgaatatggcaatgaggtgcacggaggggcggtgcctgacccggggcctgtgttcatgagcctgcggcctgaagatgtggcaaggattatggtacctgaaaggtctgctcaggctccgatgggggcttatggatacacgcatatgcatccagtgccgcaggagagggtgtatgtgccgaaggtggaaggggttacaaactcagtgctcattgatccaactggcttgcatcagcatgtgtatctgcagcagcagcaggtgccatctacctatgggtttagccatatccctgtgattcctagcgagaaggacagagtagtttctccaagttcttcccatactgatgtttcgagctctcattatcaatttgtgcagcagccgcaacagcaattgccttctggccatccgatggctcagtatccagcgaagccacctagtcctaataatccgcttgctggtgaaggtagtttaagtggcaatgcaaggcatcgtgaggatgggcagctgcatcgtgacaatgtgtctctggttgcacctgtggctgtgccaaattatgtggcaaatgtggacaggatgatggattccctccgggtgagtcccagtgaggcttcaggatctaccgagcaaaggaaacccgccatgtctcctgacagtggtttaccccagaatgcaataccagaacactctcaggggctcccagagaatagtatcagtaccaggccagatacccgagcaaaagaggttcatccaagcaacaccaattactttttttgatgtgaatgaaccaaaggtactgattcaaactgaatcaatgccaccaccatctgtggccagctcttatttgcataacgtccagcatgttaatatgagccacatgccacacatgatgagcattggaggaccctatcctagttacgttgttgctacggtcgggcctggtggggtgcctcaatcgacctatggtattgatctagtctatccaaatgccactgttaatacagtgagtgagcaaagagatgttccgcctgaagcttatcaccaggaagctccacatgaagtcgttgctcctccaagtacagctcaggtaccaacaccagcattggcaaatcatgctcctaatgtggatcaatcagctacaaatgcgcatgcactgccaccaagacctaagagggtagcaagcagggagaacatcagcccaagggatccccatacacacaactctttgctgaattgcaaagggccagatctgaatattccagctgaggatgtttctctccagctacagtcagatcacaaaggtgatgatatctctaacccagatttactgggtatggaggatgggtttgctacatctaaagctcagccatctgatcaccaacctcctctgctgaatgaaggagctggggctgttgctaataaagtagatggtgaagttcacccgaacgaggttgccaagaacaggccagcagattggatttcaggatttccagctacagatggacgtttgcagattataaagaacaatgaccttgaagagctccaagagcttggttctggaacctttggaactgtatatcatggtaaatggagaggcactgatgttgcaataaaaagaatcaatgacagatgttttgctgggaaaccatctgagcaagaaaagatgcggtctgacttctggaacgaagcatctaaccttgcggatctccatcacccgaatgttgtcgctttttatggtgttgttctagatgggcctggaggatccattgccacagtcacagaatatatggtcaatggctcacttaggacggctttgctgaagaatgccaagactcttgatcgacgtaagaggttaattattgccatggatacagcttttggaatggaatacttgcacagcaaaaacatagtgcactttgacctgaaaagtgacaatttgcttgttaatttaagggaccctcaacgtccaatatgcaaggttggtgatcttgggctttcaaaagtgaagtgtcagaccctcatctctggtggtgtcaggggaacacttccatggatggccccagaacttctgaatggtagcagcagtttggtctctgagaaggttgatgtgttctcttttgggattgttctctgggaactcctaacaggagaagaaccatatgcagatttacactatggtgttattataggtggcattgtgagcaacactctacggccgcaggtgcctgactcctgtgatccagagtggaggtcactgatggagcaatgctggtcaacagaaccatccgagcggccaagctttacagagatcgcaaacagacttcgctccatggccacatcccagaaggtacagcactaaggttcaccaacatccagatattgtgccgggaccagttcgctaccctgccatatatgccaaggatctgttcataccccccacctccatttattcccgtatattgtaatcaaaagttacctgccggcgtgtctacaagtgtcgcaatggacgcagcagatgcctattcattcattcataccgttttggtcgagaggtgcgttcaataagttactagtctagtgtccgttataggggagagtccaatatttattatttttctctttcattttcttcttcctttaacaccctttttctgggtaataatcgggttacttggaaacatgtcagtcagtcggtcggtcggtcagtcagaatgtgaactggttgttgctgggtaagtatggtttgtaggagtatattacaagtttgggaacagagagtgaggtcctgcttgtaactagacctgctttggttttgtgattgagttatagtgttatactgaaatcaaaaaaaaaaatccccccgg

SEQ ID NO: 5664 - DNA, 275 bp, Setaria italica
  Peptide Sequence Number=SeqID_71638
ttcatcaccacctaaacaatccatcgacaagaaagcagcatcttctataccatcaatggctgccacctcggtcctcttccttctcctcgccaccttcgcggccggcgccagcgccgccaccttcaccgtcaccaacaactgcggcttcacggtgtggccagcggccacccccgtcggcggcggcaggcagctcaacccgggccagaagtggaccttcggcgtgcccgccggcaccagctccggcagggtgtggggccgcacggggtgttccttcg

SEQ ID NO: 5665 - DNA, 511 bp, Setaria italica
  Peptide Sequence Number=SeqID_71639
atttgtagcgctgggcttaattactggagctggaaagcagtgatgtggcaggatggctgtatttgccagctttgcggcttcagatgtttcagcacctacaaatatattttagttaaacattttcttgccaactcttgtccttagcacaggacttgatcacagttaatatcgtatgaagcaactaaaagaaatcatgcaagcaagtccaccaaagaaggcgtcatagaagagtacaaattgaccaatgtgggcaatatgagataattaaaattagctaccagcatctggctctaacaagtcttgtaaagtgggattgtggagaaatagtgatatcatgacatctatgagtattgaatgagttgtttgaaaaggaaaataccaggtccatcaactaagctccgtttcctggaagttttgttcaccttctgatcgtttacatcgctggagccctctgcactgtaatcttcactggatgacattgttcttttactgttaccgctgccagcagata

SEQ ID NO: 5666 - DNA, 1459 bp, Setaria italica
  Peptide Sequence Number=SeqID_71640
taaacgactagaatgatgttatggtgagcagcatgagctggcgacatgccgacatccccaggccacatgcatgtgttgtattagccggcctctccgtgccaggggaaagagataccgtagatcagcgttagcttacggcggcaacatctgtcgacggattggagtcgaggagctgccggagcttgggctcgccgtgctccgtgtgccggctgacgcccggcgcgttcgtgctgtcaatcatcgacaggaaattctccgcggcggcggcgccgggagaggacgaggatgtggctgctttgttcggagatggttctgcaggggtcggcgctgcagtgtccttcagcttcaccatcagagcggaattctcgaatcttagtttgtccgaactctctgttagcctgccgatttcagatctaagggatgtgttttctgctgtaagagactccacttgcgtagccagctcctctgtctcagcctgttttctcagtcttgatcgtctagcagattctctatttgattgcttcctcttttctcgcttcagttccctctcatccttgattgataagtcagttggtcctccagtatgaggcggaacaatcacaccaggagatggagatatcgttgcacccattgcccttgagttagcaacatttgtagcgctgggcttaattactggagctggaaagcagtgatgtggcaggatggctgtatttgccagctttgcggcttcagatgtttcagcaccaggtccatcaactaagctccgtttcctggaagttttgttcaccttctgatcgtttacatcgctggagccctctgcactgtaatcttcactggatgacattgttcttttactgttaccgctgccagcagatactgcagtccgatcaatttctttaagtttcttactggaacttttctccttactgtttgcagacttggtttgctccacgctcaatggatttgataccatgggtacaagggggtgtgggtaagctgcaccatgtgggtacattgcagcatatggtgtcccaaaagggtgtggcattagaggctgaggaccccacatatatggcggtggatgacctggagctattgctggagcaaaatatgttggtggcaagacaccgtggccatagtatgcctgcatggttgaccaatcaggatatggagaaggagctggttgatcctttggagacgatgctgtgtttccagtcttctgggtagccacagcttcatcatgagccattactttacaaatatctgctagtctcgccaaatcaggtgacgattccgctcggcagcgcggctccgtggatcagccggagacggaaagccgaattgatccaatcaggaggtgtgtttgtgtagcgagaaggtgagaggcggagaccgggaagggggaggcggtgggcgagggagtcagggagaggacgaacggcaggggagcggggccgag

SEQ ID NO: 5667 - DNA, 1134 bp, Setaria italica
  Peptide Sequence Number=SeqID_71641
tgagactctgttacaatgtgaatcaactcagtgcataacttacttccttgcttttttgctcttgtgcgtattctcaggagttgaagcatccaacttgcgtttctttgctagttccttcacctttcttgcagccacagcaggtcgcttccctttgcgagcactagctccagcttcattagttttgctctgcttcactgggttgctgggacgctggttcactttcaccttcttcacaacaccagatttgcttgatctcagtccttgataggacaaagctgatgccttacgtttcgctttgtcactgccttcattagatttgctgcctggtgttgaaacctccttgtgttttggcacacgttcctttttccgggcttccattgtcttctttggtgttgtgtcaaccggttttgcatgggtcagcctcaaagagcgatctttaatcttcagatcctttttccttacaatagcattagcagcttcccttgttttgaataaaacatatgcgatacccttccctaggcttgaatttggatctctgataacacgtatagcttcaacatcaccttctgatccgctggaaccgcagaacagctggtagagttcttcatcctttacatcaaatggaaggttcccaacaaacccagttctgtttctgtcataaagaggcccttctcctcgaagctttttacgagggggcatgccatatcaacacggatgtgattgccaccgaactgtgccatattatgagacaaagcagctcgtgcagactgctcatctttgaagacaatgtaggcatgcacgttgtcgaccaattcattgaccttcccctgtatgacggcccctttccttgtaagcttggtgtcgaccagtggcacggagcggatcctgacggactcgatctctccgaacgcggcgaactccttggtgagcaccttgcgcttggtccgcagcggcaggttccccacgaacaccgtcctgagcagcttggtctcgtcgtcgaacgcctcctcatcgtcctcccccgcccccgccgccgcaaccgcggcatcgtcgggggccttcctcttcccccaacgccgggcagcttctccttgcccgcgccactccgccgcccggggcctgcctcgacctcgt

SEQ ID NO: 5668 - DNA, 247 bp, Setaria italica
  Peptide Sequence Number=SeqID_71642
acgatctaggagcttgttgtcaaagttgcttcaagtccccacttttcaagttgcagacaagaaagataacactgaagaccaaatggaaccatcgattttcgcacctgatcttatcaaattgttagaggagtctatcctaactttccgccttttcctgaagaaagacaagaaaaagaatagtgcccatatgagtgctcatggccacactggaagctcaattcatcaagtgcaatcctcactcgataag

SEQ ID NO: 5669 - DNA, 442 bp, Setaria italica
  Peptide Sequence Number=SeqID_71643
tggcactgggtcagcgtcgcccgccgccatccactcgaggaggctggattcgtggcgtccgcaacaaaggacaacgatccactcaggtgcgtctgcatcttcgccaacaagtacacgcgcatctacgccacccactgggcttcccccaccgacgccgtcaacacccgttccatcaacgcctgcaacgtcctcgcgctctcgtggatggccgcgccgtcacgcctgcactccacgacctgccgcgccgccgtcactcggaatccactttaatagggcgcaagccgtcaagcatgtgcatctacatttccaaaatctgcttcagaccatggattgattgtagcaaatggaacctatatgcttactgctggcacctgtgtgcagtgcagctgtggaccaggcagtctcaatttatattgcacacctgcttcattatcaggatcat

SEQ ID NO: 5670 - DNA, 854 bp, Setaria italica
  Peptide Sequence Number=SeqID_71644
cgagtgaacggaaatcaggtttcttaatagttgaagattttagttatttcgaacatatgatttggctcatatgttagtccatttccgaaatgaaggcacagaatcctactgtcataatttttagaagctaccaattagttggtaggatagcatatgtagcacattattctgaacattaacatgtttagatgttgttcagtccttaagtttcggagatgtggagcctgtaaaaaagcgtaagcaccacattgtggtgaataagcagttattcagtatatgtatatttttaaggacactttgtcgtgttgaacttattatgcaattgcagaccttctttttgttcttttctgaacataacccttcgaacaattattctgataatggtggtttatttctgcatcagcatgtgcatctacatttccaaaatctgcttcagaccatggattgattgtagcaaatggaacctatatgcttactgctggcacctgtgtgcagtgcagctgtggaccaggcagtctcaagtaagtgggattagtatcgtcattcttttcagatgatcttagttgtactgctggatttaacttctgtatcattatgcctgttttctgttctatcagtttatattgcacacctgcttcattatcaggatcatgtccaagcatgcagtgtcctaacagcaatgtgatgcttagcaatgtgagcacccatccaacctgtgcaggatgcaatgtctcttcttgcagctacggaggttttgttaatggaactattactacttcataagcagcattttgcccaatgttcattttattcccattcttgctgcgtgtggcatttctgcttaaattgcacga

SEQ ID NO: 5671 - DNA, 593 bp, Setaria italica
  Peptide Sequence Number=SeqID_71645
ccgaaggacggccccagcggcgctccggctccgccgccgtctccgttcctggaggtgacgtgccggagctccggcaaggtccggcggttcgcggcggggacgacggcccggtacgcgctgcacgccatcaaccgcaagctggaccccggggccccgccggcgctgcacgtcgaggccgtcagggacggcgaggagcccgtcagcttcggccccagcgccgccctcgccgactacggccgcggctggcggctgcagaccgtcaccgcgcaggacgcgcccgggatccatcacgcgacgcgcgatgacacgaaacggggtgagacgcaggctgccgaggatgccgttgccagagagaccacgaggagcacttccgtctacatcgccaagatcgtgctcgcgttcgtgttcatcttcttgctcggcgggctgttcacatacatgctcgaggtgctccccgacatgctccagacttcaccgacgcctgaatctctgtaatgaaacccgctgactgcagatgaatcacacatgtaccattccagcgacatgttcccccctttctgataagatcgtgtgcaaccttccatcgtagtcga

SEQ ID NO: 5672 - DNA, 379 bp, Setaria italica
  Peptide Sequence Number=SeqID_71646
taaccgggtagtattttccgcgcgtgacgacggcagtcgcgcagagcaaagtagaggcgcagagccgagcgccggacccgactctccccccatcccccccgtccccccgcatcacacaacgttacatagatttcccggctcgaccggagcgtcgtcgtctcgtttcggccggctcggcggcggactcgatctcgctcgccggcgccatacatggggtgcgcgtcgtcgaggcagttcggggcgcgcgcggcggggtgcaaggagctcgccgcgctcgcgtccgggacctcattcacggtgaacgaggtggaggcgctgtacgagctgtacaagaagatgagcttctccatcatcaaggacggcctcatccacaaggagg

SEQ ID NO: 5673 - DNA, 341 bp, Setaria italica
  Peptide Sequence Number=SeqID_71647
gctttgtagtcttgcgatataagttgcataagctggcattgccatccctgccatttgcaatgctggcattgctgcttcctccttgggcaggccacactttttgcagttctttcggtgcagatccagtccccggcgcgggggagccacttggagtcgcgcggtgtgttggggtcgacgaggaggcgcggctgcttgcagcggttgcagagggagcggaaggcgtagttgcggttgccgcagccgccgcagtcccagtcgccctcccgaccgcctccgccgcctaccggaccccgacccgtcccgtacgtacgtagtcccgttcgttcctttgttcgttcctt

SEQ ID NO: 5674 - DNA, 412 bp, Setaria italica
  Peptide Sequence Number=SeqID_71648
gcaaggctttgtagtcttgcgatataagttgcataagctggcattgccatccctgccatttgcaatgctggcattgctgcttcctccttgggcaggccacactttttgcaataccggagcggggcgtggtgattgttactgcaaccggtgcagatccagtccccggcgcgggggagccacttggagtcgcgcggtgtgttggggtcgacgaggaggcgcggctgcttgcagcggttgcagagggagcggaaggcgtagttgcggttgccgcagccgccgcagtcccagtcgccctcccgaccgcctccgccgccaccggaccccgacccgcccgacgacgagcccgcgcctgcgccgccgcctccggccatcgggaggttacaaggggtggggggtggaggtggaaatggag

SEQ ID NO: 5675 - DNA, 1733 bp, Setaria italica
  Peptide Sequence Number=SeqID_71649
aaactggagttgtccgaaacaagaacaattgtatagttccctttttaacccgacgagaagtaaaacatgaccagtgaccacaaaactttaacctggtgcgctaacactcttccagagttgtgataaaagcccaatattacagtccatcaccattgcctcgttacacaactaatctgattattcgccaaaatccagatagtagaacggtactctccggaaacattttattcaagcgctttaccataaataaatcgggaacttcaaccagcacaagtgaaacaccaagacacgtttgggagcagcaagagcacagcagaatcaaaaaaactcaaaccgcagtcttgataaaggagctagaatctggtagcaacatatcccggaaacctcaaaatggtccagagcgctatgaaaaggcgcaagcaagctatagcacaccagggtgaactgccgattctttctgtgttttgcacctgttgcaaaacgcacgagatgcataattgtgattgttgcagttgctgcacatccagtctccgtcgcgccattttgccccttttcccataagaccagacattgcctgcccagatggtaatgctattgagctcccattgtcaaacttggaaaaagctgcctggccattgctgcttccagctccttgctcaatacccaaaaacaaattattagtgcctgctgtcgagagcggataattgtcatttcctggatttagccttttattatcccagtcattggcaagttcctctgatgccaatcgcttagttcctaacgtggaagaggcatctgacgtagttttcattgttgtggagggaatgcctgatggtacaggtgcaccacactctttgcactgagtacgagatgaatagttatggaatccacagctacagagccagtctccattgcgccagtcctttggaacacctggaaactgatttgtggtgttgttgccaaatggccaaccagaagactgcatcccatatctaccagccaacccataggaccagtttgcatttgcaagtagttgctgctgcaaaggtgaattggcagccatcccaaagttcatcttataggcagaagcagcaaggctttgtagtcttgcgatataagttgcataagctggcattgccatccctgccatttgcaatgctggcattgctgcttcctccttgggcaggccacactttttgcagttctttctggatgcataattattgttactgcaacctattcatccatttgccgcataaaccaaccagcacagtaggcagaagaagaatgcaccgaagcacacgcacacccaccaccaccaccaccacgaccagccatcccgcacaaacccatagaaaggaatagacacacgcacactagtcattactcagcacacttattggtaattttctgatcttgtctacatatagaagcattcaatgaacaaaataaacagcaggaggcattaaaattttctaataagtagcagtaacaattcacgcacaaacaaaaatcatccaagagacacttccagaagttgttgtgccaattttttttattttttagatcaaagagcatgactggcctggctcttatagaaagcttaacgagtgccagtcaaataattttcagacttcccttttaagtttaaacaaagcctctatttcctctacaccctttttcatttcatactcataaagtaggagtaactaacttgcctcattaacatatcc

SEQ ID NO: 5676 - DNA, 314 bp, Setaria italica
  Peptide Sequence Number=SeqID_71650
cacgtcagtcatcgaccaaccaaaacccgccgggcggcgtcagtccagtcaccacgcatcgcggcgcctccgttcgccgcgccatggcggggtggatctcctccaagctcaaggccgccgagaccctcctccatcagatcgaccagcaggcggcggagtccctcggcaagtccccctccgcctccgacctcgccgcgctgcacccctccgcctaccccctaccgacggaacgaccttacctacgacgtgacgcccccgcgcaggccaccgcaagccggcccgcctccctccctcggcctccgcctcgccgcgaa

SEQ ID NO: 5677 - DNA, 988 bp, Setaria italica
  Peptide Sequence Number=SeqID_71651
cgaacgcgagtgagtccacagactgccaggtccccaaaaagatccccatttttttctctcccaattcgacctcagtttcgaacagctcgattcctcgcgcccgactcctcagatcccgccaccccgcgccaattccatgcggttctagggttcccgccctggactcgcgtggagaggagatccatccccaccaggctcgagttcctcttttgctgggttctgcgtaaggaggggaggcggaaatgttctactcgcagttcatcttggccaagaagggccccctcgggacaatatggattgccgcgcacttggagcggaagctgcgaaagaatcaggtcgcggacacggacattggcgtctccgtagattcaatcatattccctgatgttccaattgcacttcggttatcaagtcatcttatgttaggcgtggttagaatctattctcggaaggtgaactacctattccacgactgcagtgaagctttgctgaagataaaacaagctttcaggtccactgctgttgatctaccccctgaggagtcaactgctccttatcattctataacactgcctgagacatttcatcttgatgattttgaactgccagaagctgcgtttcaaggtgacactgatcatcatgtgagcacaaaagaacagatcactttgcaagacaacccagagaaaacagggtattcaacatcccagtttggcctagatgaaagatttggtgatggcagttcttcacatattggcttggacttggaggaggaactaatgctgaacaaggatcactcaattcatcttgagtctgatgatggcattatcattcaaggtcgaccatcagttccttctaccgatatggacattgatgataaccaaagtaaagacgaaacagctgaaagatgcaacaacatggatgatgggccttctagtcaaggaaagactaagtaccaactagaatgcagatgatctaggaggaaacagta

SEQ ID NO: 5678 - DNA, 872 bp, Setaria italica
  Peptide Sequence Number=SeqID_71652
attagaataaacgaataaggcacaatctgtcttgatagtgttattaatctcttatattttgataaaagagcagcctgactctatggtaccagcattgatacttcctctttaagagctgattatatttatttgttatcaggaactaatgctgaacaaggatcactcaattcatcttgagtctgatgatggcattatcattcaaggtcgaccatcagttccttctaccgatatggacattgatgataaccaaagtaaagacgaaacagctgaaagatgcaacaacatggatgatgggccttctagtcaaggaaagctaagtccactgaatgcagatgatctaggaggaaacagtattcctaactggactggttacaatgcacagacaccagatttgaatgatatgctattgcataatgaaggtattgcaggaccatcagcttcatactatcaacccagccccttcccttgtgatgaacctgcatcaccagagtttattagtgctcaggccccagctacacctggtttaattggagaaacagttccttccagagtccatgaaagtcctgttctgagtccacagagaaaagcttcaccatcaagcaatgatgaaaccgtgaaggccagcactcccgctgctccaggctcagattctctccattcagccacagcaaatgccactgatgttgtgggtgctgaggctactgaacttggattggcaaagcctgtgcaagttgagtcttctgctgttgtgcaggatgatgttgtattgatgcaacaaggcacaacgtgggaggatttgccatcccatgctcaaacatcaaacctggaagctgctggtgataagttgatctgtctgatgacatagctgcatc

SEQ ID NO: 5679 - DNA, 422 bp, Setaria italica
  Peptide Sequence Number=SeqID_71653
tagaatgaagtcacaaacactccctggggtgagagggtgatgtttaccttccaaccggactctgatcttatagcgaagcccttgcatgtcagcccctttatggatatgctcggcaactggagtattcgtgctgatgcccctggggatagcctttatgttgtcatatcagttcagcatccaacacttgggaactatttcactgcagctctgcacgccaaattagttggacacacaagtaattctttgaggctggcaaccttcttctggctgatgccacacaaagttgctgcatggatatactgggaggccctcagactttggctgaagaacgtcaaattcctggaccatcccaggtatctgaacatgagttacagggatgaagcactgaagcgcgatctcgagctccgttcctcttgcagctt

SEQ ID NO: 5680 - DNA, 455 bp, Setaria italica
  Peptide Sequence Number=SeqID_71654
gcattattgccgctgctttgggagtagcagacggtcatgttcaaggtgggatgactggtgatctttccctaatgtgcccagaatttgtccaggtaccattgtatataatcatccaacactataatcatttggttggaatttgcttaatatgaacttactgcactgtttggtatttggaatccaatcttcagtccttctttgctggcatagctgcatcaggtgcaataacctcggcactgaggttcttcacaaaggcagtttttgagaattccagagatggtcttcgcaaaggagctagtatgttgtaacaactagagttgcatttactgttttatgaaagccacaactactgatacatctgcgtaaacttcatatttgatggcagtgttgttctcctcaatctcatgcttctttgagctgctatgcgttctactttatgctttcgtattcccaaa

SEQ ID NO: 5681 - DNA, 1529 bp, Setaria italica
  Peptide Sequence Number=SeqID_71655
ccaaagtatatggttcaatactgtaaattaatagaaatggatttccatatgcggctctatactaccagtttgactcttgcctttcttcctgctgcttgttttattggtctctagggccatcagagtgaattaggcatggagtatgatgacgaagacactgaagctgctaaaaatcagggaaagtcttggggcatttttttctgttggcttcttggaaacggatgtttatttgggttcaatgggatgcttacaattgaagattactatacgtacctcttcccgaagtaccatccaacaagaattataactctcacctatcagccctttgttctcgccacaaccgccatattcacgtatcatgaggcaaaggtcaacactagggtgcgcaacttggcaggatacgtgctattcttcttgagttcatttggagtgattattctggatgtcttatcttcaggaggcggtggaattgccccattcattggtgtatgcattattgccgctgctttgggagtagcagacggtcatgttcaaggtgggatgactggtgatctttccctaatgtgcccagaatttgtccagtccttctttgctggcatagctgcatcaggtgcaataacctcggcactgaggttcttcacaaaggcagtttttgagaattccagagatggtcttcgcaaaggagctatgttgttctcctcaatctcatgcttctttgagctgctatgcgttctactttatgctttcgtattcccaaagttgccaattgtgaaattctaccgttcaagagcggcctctgaggggtccctgacggtcactgctgacctagctgctggaggcatcaaaagtcaaccaaattcactggctgaagaagctcctgctcacgctgagcgattaagcaacaagcagttgctgcaccagaatatggactatgctctggacatcttcctgatctatatcctgacactgtcgatttttccagggtttttggccgaagacactgggtcacatagcttgggttcttggtacgtgcttgtcttgatcgcaagctttaatgtgtccgacctaatcggaagatacctgcctctgcttgagccaatcaagctgacatccaggaaggggctactgatcgcagtcatctcaaggttcctgctcatccccgcgttctacttcactgcgaagtacggtaatcagggctggatgatcatgttaacgtcgcttcttggattgagcaatggacatctcactgtttgcgtcctcactgaggctcccaaaggctacaaggggccagagcaaaatgctttagggaacctgctggtgcttttcctcttggcaggtatatttgttggcgctgtttctgattggttgtggctcataggcaaagggtggtgaaggcaaacttttttaaccctagctgtatccatgcaaaccagcagatcatgcaactgatatctcgctttagtagtttgcagaaaattaagtgtattttctcatggcaaattctaaattattgtaattgtattcttcta

SEQ ID NO: 5682 - DNA, 1690 bp, Setaria italica
  Peptide Sequence Number=SeqID_71656
ccggcctgggcgctgccgcggcgccgagcaagctgcggttccaccacaacgtcagcctcaccgtgtcgctcgccgtcggcacgccgccgcagaacgtcaccatggtgctcgacaccggcagcgagctctcctggctgctctgcgcgccgggacgccaggggaacgcgagcaccgccgccaggggcgcgtcgttccgcccgagggcgtcgggcaccttcgccgccgtgccctgcggctccccgcagtgcagctcccgtgacctgccggcgccgccgtcctgcgacggggcttcgcgccggtgcagcgtgtcgctgtcctacgcggacgggtcctcctccgacggcgcgctcgccaccgacgtcttcgccgtcggcgacgcgccgccgctgcggtccgcgttcggctgcatgtcctccgcgtacgactcgtccccggacggcgtcgccactgctgggctgctgggcatgaacaggggcacgctctccttcgtgtcgcaggccagcacgcgccgcttctcgtactgcatctccgaccgcgacgacgccggcgtgctgctcctcggccacagcgacctccccttcctgccgctcaactacacgcccctgtaccagcccactctgccactcccctacttcgaccgcgtggcctactcggtccaactcctcggcatccgcgtcggcggcaagccgttgccaatcccggcgtcggtgctcgcgccggaccacaccggcgccgggcagacgatggtggattccggcacgcagttcaccttcctgctcggggacgcctactccgccctgaaagctgagttcttgaaacaaaccaagcccatcctcccggcgctcgacgaccccaacttcgcgttccaagaagcgttcgacacctgcttccgcgtgcccgccgggcgcccgccgccgtcggcgaggctcccggccgtgtccctgctgttcaagggcgcggagatgtcggtggcgggggacaggctgctgtacaaggtccccggcgagcggcgcgggggcgatggcgtgtggtgcctcacgttcgggaacgcggacatggtgcccctgacggcgtacgtgatcgggcaccaccaccagatgaacctgtgggtggagtacgacctggagcgcggccgcgtcgggctcgcgcccgtcaagtgcgacgtagccagcgagcggctgggcctgatgctgtgacgcggcttggcgagaagtaactgctctgggccagggttggttcctcttcctccagggcctggaggaaccgctgcctttgtaggataacctaacgtttcagtttggaacttgcttatcctgatcgtgcgtgtggcatgtacagtctgtagtgtaatctggaaattaagcgtgcgatgtactgatgtgttcaccctttgactgagcatgtagggttgtgctttgtatgtaaagaactaagatcgatgtgtacatgtacatcatgcaatgtacggtctgaagcttgactttctttgcttatttggttggttctgaacgtctgatgcagcatctcagatgatttagctgaatttagcaggcgtagcgttatcagtaacccatcaattttgctgactgctaacgcaaacatgagacgtgatctctcgtagagcatcatctgacacaatgtattgccatgtgaagctactaagtaacaaacaatacctttaatttaaaaa

SEQ ID NO: 5683 - DNA, 1104 bp, Setaria italica
  Peptide Sequence Number=SeqID_71657
ggaatcacaacgggctacatgggaagccttaccactttcagtgggtggaaccagaaaatggttggcttgtcttccagaggccactgggtatatgctatagcaggcatagtactaggaatgttcattgtcaatgagtccatcacaattggtgccgagacaggcgagcgcctacggagtttgatcctgaaatacatcagggagaggagttcaataggtcacaaatatgactgggagcagtggagggttgataccaggactaagcagtctgtgcttctgtcagtgatgatgatattgatgtctttcttatggattctgagcattgcgttggctgtagtaaaggtgcgtagtcttgctgatggtgctgtactctggatgggctgctcggtagtgcctccaggtgtttggctacgctggtacctggcaaggctcaatggccagggaattggaaagcaggggtccttcaaatggctgcccattgggacccttgcagccaatgttcttgctgcaggcgtcatggcagcacttgctgtaacatccaaagtggtacatacaaaacaagcgatgacaattcttagtggcatacagcttggcttccttggttgcttaagcacagtgtctacttttgctgctgaagtttacaccatgagaagaagcggacagattgcgagggcctttgtttatgctgcatccaccttcttgctctcttttgtgctgggaactctaatatactctgtgccagtttgggaaaagcattatggatgacctttggcaacttctggattcatcatgttagcagatggctcaaatacgcaatgcaacctttgagaacatgtaagattgtgtcattgtcctttgaaagaacgtcaaaagctaaacaggagtacagggtacggagccgaagagcttgaaggctcatggctacaggagagaaacatggtcaaatatgtaatttagctgcacaaatttctgcagaatagaccaataatcacaatacatacctggctaggaaaaggagttcagctttaccagtagaattcatgtagtatggatgaatttttgactaggagaatgaagcatatgtatgttcaaaatgtgtacatctgt

SEQ ID NO: 5684 - DNA, 486 bp, Setaria italica
  Peptide Sequence Number=SeqID_71658
agacttaatacaactaccttaggaaactaataccgactacctgatggctacatggaaggtagctcctgctctggctgctggttgtacagctgtgttgaagccatctgaactgtcatctgtgacttgcttagagcttggtgatgtctgtaaagaagtcggtcttccttctggtgtcttgaacattgtgactggtttaggtcctgatgctggtgcttcctttggcagcgcacccagatgttgacaaggtctcttttactgggagttttgaaactggtaagaagattatggcagctgcagctcctatggtcaagcctgttacactggaacttggtggaaaaagtcctatagtagtatttgatgatgttgacattgaaaaaagactgttagaaataggaactactagtttagggtagacttttaggaactaaataggtacaagaatttagacaagtagacaaacaatactacgtacttacttagtaccaa

SEQ ID NO: 5685 - DNA, 461 bp, Setaria italica
  Peptide Sequence Number=SeqID_71659
caaccccgcaaccgaggcccagatcggtgagatcccggcgggcacggcggaggacgtggaggccgctgtggccgccgcgcgggcggcgctcaggaggaaccgcggccgcgactgggcgcgcgcgccgggggccgtccgggccaagtacctccgcgccatcgccgccaagataatcgagaggaaacctgagctggctaagctagaggcgcttgattgtgggaagccttatgacgaagcagcatgggacatggatgatgttgctggctgctttgagtacttcgcggatcaggcggaagccttggacaaaaggcaaaattcaccagttacccttccgatggaaacttttaaatgccatcttcggagagagcctatcggagttgttgggcttatcactccttggaactatccgctcctgatggctacatggaaggtagctcctgctctggctgctggttgtacag

SEQ ID NO: 5686 - DNA, 460 bp, Setaria italica
  Peptide Sequence Number=SeqID_71660
tgtcttgatgttatgacatctaactgacaccttgcttgtgttgttttttcgctacaggggcatcgataactacctgaacatcaagcaggtcacggagtacctctctgatgagccgtggggatggtacccggcccccgccaagatgtaaagctggcactgataacttttgtctgtcccattggaaatccggaataaacgatgctatgcgacgaatgaacccgtgtaacaaatggaacatatgacactgtgaagtgttgcatctgaggaataaaattagatgcccgagttcagttttactgtacgcttgcacttgcgacgttatgtgtgcatactgcataggttattgttatgtgagcgttggatttttttattttatttttattgtcgaaatgtgagacgttgaattcgtcgtcgcagcatgccattcgtatgtgccaacattggtgggtatgactacgtg

SEQ ID NO: 5687 - DNA, 723 bp, Setaria italica
  misc_feature (89)..(89): n is a, c, g, or t
  misc_feature (643)..(643): n is a, c, g, or t
  Peptide Sequence Number=SeqID_71661
ggtgtgatggggcaccaggcaatggcaactcctggaccatcatctccaggtcacaaagtgggccagcagcaggacccaagagcggaggnggaaatagtcgcattggcagcagaagggctgttgcttttgcctcgccaactgcaggagttgttgatatgcaactacctggagctgagcctccactccaatccacttaatgacaacaaagaagatggacggaccgggggaggaggtgggctccaagatctgagctccctccgacggttggacatatcaacttgccccaagctcctctcttcctaccactcgtcttgtttccccttaccgacctccctggaataccttgaacttgaaggcgtggtgggcttggagacaattgtgcctctatcaaacctcagctctctcacacatttatcaatatgcgaatgtgacggtctaagagtcaagggattattatctctcctagcccagggccatctcaccacattacgtgtcacagaaacacccaatttctttgttgattctgagccctcacgcgtgcatgaacaagtgcttccatctcgttcctccacactgcaggagctcagcatggatgatgtggctggagtcactgctgcacccatctgtagctctcttttttccncgctcaccacacttggtattttttagggatgcaaggtggaacacttcacagaggagcaagaggccctcctgttcatcaac

SEQ ID NO: 5688 - DNA, 453 bp, Setaria italica
  Peptide Sequence Number=SeqID_71662
cgatggtggggcccggtaccgtggccgcctccctgctggcgccgtaggcgaagacccgcgtcgccggaaggtcgcggtggaatttccaggtggtgtcgtacatgccgatggtgaggttgccggcgacgagcgcgccgccctccgtgacgccgtacccgcgcagcctcggcatgtccggcagctcgtccacgaacttctccagccttcgcgggtccagaagtgccccgccaccgctccgctcgcccccaccgagcaccgccgccgccgccgcctgcaacaacaccatcgccaccgcgagcaagcaagcggacctcctctcccccattgctgaaacgccgagcaatgtcaccgagtcactgacggtgtggaggacgaagacgaagagaggtagccaaggattggaggggagaggggaggggagattcttggtagagagctcggagtttcctgccg

SEQ ID NO: 5689 - DNA, 365 bp, Setaria italica
  misc_feature (360)..(360): n is a, c, g, or t
  Peptide Sequence Number=SeqID_71663
ggctgcagtgaaagaagagggggcgccgtggctcggcgtgaactccgcgctcagcctgagctgaagaatctgatcgaggacgcatctagagagaccacacaagggaaactgttacgtattattactgcctactagtactactattttccctaaaaatatcttcaggattatgatacgtgttttcttcccccttgacatttacaccagttactggttgcttcaggggaattagctagctaattatgattggttaattagtctgtctgtctgtttgagaattctttggtgacaaaagaattctttttccatgctgatattcatctgcaaggatatgaaactaaaaaaaaaaaaaaaacaagngacac

SEQ ID NO: 5690 - DNA, 635 bp, Setaria italica
  misc_feature (1)..(1): n is a, c, g, or t
  Peptide Sequence Number=SeqID_71664
ngttttctgcagacaatcacgagcttggagttctactgtgtctttttctgaccttgatgagaagggtgatatggacattgacgatgattatacagattcaaagagagagttacagcctcatagtgtagatcccaaaaaagggttgggcattccgcggcgtgcacagggctatcatctgcggcaaagttggacaagtgcctgtgcaaaaaattttaaggaatggacgtacagtaactgtttttaccgttggaactggtggtatgtttgaccagagggtaattgggcctgaggatttacccaagccagctcagtggcatcgaatagctgttcataatgaccgcctaggtgcttatgttgtccagaagctggtgaagaattctgcagtctatgttgagggtgacattgaaaccagggtctacaatgacagcattaatgatcaagtcagaaacatacctgagatatgtgtacgacgtgatggcaaaattcgtttggttaaatctggggacagtgctgctaacatatcattagatgggctcagagaagggctgttctagttatagttaaggatgccaatgcaagcagatcatgaggttgcttcttgcttgaggcccattgtatcttgagcagtgcactag

SEQ ID NO: 5691 - DNA, 1679 bp, Setaria italica
  misc_feature (22)..(22): n is a, c, g, or t
  Peptide Sequence Number=SeqID_71665
tggggcttatgcatgttttacngatggtatttacttgactttgaacatggttcaatcaaagatgattattgtggaggaaggactgggtacaactcggaactactgaagatcatgggaactaaccaatctcctcctcgcaagcgactgcggagggatcgaaaccgcgagaaggcaccctgctcaaatgctactgaagtgatgcaacatgagatttggaaagagttccctgaagatctttttgaaactgtcattgcaaggcttccagttgctgcaatttttcgattccgcactgtctgccgtaagtggtcttctctgttgggctcagacagtttctctcgtcagtactctgaagctccccatggactgccatggttctatacaatcacccatgagaacgcaaacaacaatgttgcaatgtatgacccatcattgaagaaatggcaccacccatctgttcctcttgctcctacaaaaatagttattccagtggcgtctgtgggtggtcttgtctgtttattggatctgagccacaggaatttctacatttgcaaccctcttacgcaatcactcaaggagatcccacccagatcagtgcagggatggtcaagagtcgcagtagggatggtgttgaatggaagaagttctaacgatggctacaaagtaatgtggttaggaaatgatgggacttatgaagtttatgactctacaaagaacacgtggtcttgtccaggagtttttcctccaagcatcaaacttccacttgctctgaatttcaggtcacagcctgtggcggttggcagcacgctatacttcatgtgtgcagaaccagatggtgttttgtcatatgatgtaagcaacgggatttggagacagtttgccatcccactgccattgcatctggctgaccacacacttgccgagttccagggaaaggtcatgcttgtgggtctgctgtgcaagaatgcagcgacctgcgtctgcatatgggagttgcagaagatgactctcctctggaaggaggtggacagaatgccaaatatctggtgcttagagttctatggtaagcacatgaagatgacatgcctgggcaacagtggtttgctcatgctctccttgaaggcgaagaggatgaaccgccttgttacatacaaccttttgaaaaaggagtggcagaaggttcctgattgcatgctcccatgcagccgtaaaaagcagtggatagcatgtggcacagcatttgatccgtgcccctcagccttggcctgataggtctttttaccttcttcgaccaagcatgtcgaaattgtagccatttcatatcattggcctatctttagatatttcgatgttgttgtcacaaggttctgtgttacacacaaatccatggcactggtttgttttgtatcgcgctcaaacaatcaaactatttccttattcacctgtcggaatttgggtcggcaagctacgatatcaactgggcaagccgacctgaacatgttaatggttattgtagtccaaattggaatagtggttctgtatggtcttggtgttggtatgtttggttatcgtttcaagtttgtaatatttctggatgtgcagttatctgcccagaactgagtttatacaataataaccgggatattaatgttttaaaaaaaactacaacaactagaagtaca

SEQ ID NO: 5692 - DNA, 1562 bp, Setaria italica
  Peptide Sequence Number=SeqID_71666
gcgattcaatgtgccatacaaacaacatcatactacgaatggggcgaaattccagacgtacaggttgcttcgcgtattaacaggttatacattctcggtacgcaacggaggaaaaatgtatgtgatgctttcagcgcagcgcagcacataaccattaacaggttacattacattgcagatcagaggattctccatggatctgtatagcttcaaggtttgcagattatgtggcaagtgccgttaactctcctagggaacagaacacaatgctaggaatacgaccactgtagtatgagcttcacaagtacttggacaaccaaggaagatcgggagattccttgagggcaaaggttatgtcgtcacttgggtagttaagttgcagcttctgcaacttgtgcttactaccttcttcacagaggatgaccttgctttcaccaagcttgcagcagattttcatgagggtgtcgtatccaggcaagagttctctattgacttggcaccaggagagaactgttgtcgctaacttatcaaaagttacttcacctagtccacttttgtacaattcatgaaccatagcaaccaaaataacttttccaaacttagggcagttcttcatcacttgaatatgtggtgcctgaaatacttcctgaatagcagcttctatatcacccatgcaaacaacaccatctcctttatttgcagaagtctttccagactgttgagactgtttgacgcggtagtctgcgaactctgctgcccgtctacaaatttctaaagctcgcctagcatcacctgacatagcagctacctttctagaagcaaattcaatagcctgttcctcaaaggcatcaataccctttagacgacttgttataatttcctgcaattggcgaaaattgtatgggccaaaacacagtcgttggatacccatccgacttgatatacgaggcaataacttttccgggagatccattgtgtttgctatgcctataacaactaggttggaatttggtttggtgggccaatcaagaatgttatacagcaccgactggtttcttgtcaaaagaagatcaagctcatcaatgagcaaaataattggctggtttgcttgctttccaattttagaaacacctgaaaaatgctccgttaaatagtgaagagcctttttccacccaaccctatgcccactcaactgttcgtatataaccttgtagatattctcgggagaagctaatttaagaccattaatttctataaaacaatacggcttcagagttccggaatcaaattcagatctcagcttcctcataacagcaagtacactcatagtcttgccagtaccaggtacaccatggatataaaggcagcgtcctagacactggtccttgcaaattgcatccttcacaaatgtagatatctcctccatttctttatccctgcaaggcaatgacttaggaagagtagccagtaacagggttgctttcgccttctccagctcagtcttttggtggcaccgaacatgctcaggaattttcgtatcccaatttttgtaggccatatat

SEQ ID NO: 5693 - DNA, 371 bp, Setaria italica
  Peptide Sequence Number=SeqID_71667
ggccctcctcgtcgccctcgccctctccgtttccatttccgcctccgccgccgctggcgcggaccaggttgctgatggcgctgccgcgaatggcaccggcgctggcgccgcccgcctggaccgccgcacaaagatgttcctccacacggcgcgggcgcgcggggccgcggcgggggcgcaggagccggggctggggctcttcgatgctttcttcgccagcctgtccatgatcgtcgtcagcgagattggcgacgagacgttcatcatcgcggcgctgatggcgatgcggcaccccaagtcgacggtgctctctggcgcgctgtcggcgctgttcgttatgacagtgttgtcaactgggctaggcagaattg

SEQ ID NO: 5694 - DNA, 243 bp, Setaria italica
  Peptide Sequence Number=SeqID_71668
ctctagtttccatatctccaaaagtgtggacacagggctatcttcaggccaccaattagtttgactgcaaagattcagccctcttcccccatgtcatgatccatggcggtgaacagtattcttatggcttggtcgtgtcgcaatctgaacagtgtggaattgtcgctcacatcaagagttgagcagctcagcagcccttgtggagcagcgagctccttggtgatgcagcagaaatctcttcta

SEQ ID NO: 5695 - DNA, 495 bp, Setaria italica
  misc_feature (1)..(57): n is a, c, g, or t
  Peptide Sequence Number=SeqID_71669
nnnnnnnnnnnnnnnnnnnnnnnnnnnnnnnnnnnnnnnnnnnnnnnnnnnnnnnnntttatcttagtactggaaatcttagccttttttcaagcaccagaggtgttgtatatcattatctacttttacagcaatactagaacagaaagagtttcagaataaaactcaagaactcagcctctcaacaattattattcgacgaaatacagcctaatggttcacatcaacacaactcaacaggtgttcttccaatacaaaaacgaatgtagttgctaacaatgaacacatgaaaataaaatctgagctgaaaaatcaaacggaatttcagaccacaaactgaggcatccaaagctactcctgcttttgctgctgatcatctccatgccaggcccagacaatgtccttcagcgctggccggatgtgctcttcgaatagtttctgatactcaagtgaatcaccgcttgtttgtttcatctcaacaagatgatgaaatgg

SEQ ID NO: 5696 - DNA, 475 bp, Setaria italica
  Peptide Sequence Number=SeqID_71670
aaaattcttttattctctcatggttagagttaattgcctgtatggcagaaaagttcagtagcaagcattgcttgttgaattactttgaacatgctagctctaaaagaacacaacagagccagtcgtatatttttctatttttattaaaatatggttacttggttagtttgcatttccctaacattttaagctatttgatgaactaggtgttacaaaaagatatgtctacctagccaaaaacttgttccaatccataggtctgtcgtaggttcctttagatttcagtaatgattaggaaacaattttgagagttctataggggtgaacgagggagcttctggatccatcagtttatattttataaaaaaaacaggcatgcagatgagtctgtagtttcaagtaactcttctcatttaaagcagattaatcaattggttcttgtgatccccaagttaagttaggtactaaggtacta

SEQ ID NO: 5697 - DNA, 378 bp, Setaria italica
  Peptide Sequence Number=SeqID_71671
cattaacacggttaaagctaaactgcttgaagtccgggcaaaagggggtacgtctttctacaactacattagtctcgaaatgctttaaacgggaaatagctagtgtggaatttatctgatatagaacactcatatcgataaaatagtttgaactatttactagaagggcatccagccctttttccaatgccgaatcgacgacctatgtataaaagagaaattttttggatttgaagaaaaaataaaaggaattgtatcaatttagattttccatttatttagtttgtttttcttaatgaaattgaaattattaactaacagagcaaacacaaataaagaaacaactttgctgaccatgatagatttttatctagttgg

SEQ ID NO: 5698 - DNA, 413 bp, Setaria italica
  Peptide Sequence Number=SeqID_71672
ctcccttcctcgattcgatccagcatcaagccgccgcccgccgacgaggacgcgcgccgagccctagagcgcagccatgcgacgtgacgacgccggcggcggaactgggctccacgacttgttcgactccgtgcgccgctccatctccttccgccccggcgccgcggccgccggcccggaggcccctgcgggcccgttcggcgcggggggcggagggatcggcgtgcggatcagctcctgcatccggaagtcccgcgggatggggctgctagggctcatcacgaagaacccctcgccgccgcgccgcatgctgccgccgatgcccgacgaggcgggcggcggcagcggaggagggggcggggctgcggcggagctggagaggagaacccgcgatccggtggcgggaaggggga

SEQ ID NO: 5699 - DNA, 326 bp, Setaria italica
  Peptide Sequence Number=SeqID_71673
ttcgttcttagtcccttcggtcgttactagtcgtcggtcctagtctttgttccttgttattcttgccaaaggaatgggtctggcctgccgaaccggtagagcatcgcgacgacggtgacgttgccgtcgtcgctggcgtggaccatgtggagctccacggggaacctctgcccgttgatggtgtgctcggaaggcgagtgccagtgcatctgcttcagcctgtactgcttaccgtcgacggtcacgctcccagcgccgccgtcgaagcgcagcccgacgttgaagatgttgtcgacgagggtgccgttcgcgacggtgtagtccct

SEQ ID NO: 5700 - DNA, 243 bp, Setaria italica
  Peptide Sequence Number=SeqID_71674
gcacggcggtcagcaccaaatcagcagagagatcacacctgcagcgagcgacgacagagggtgcgataatggcgacgccggcgctggtgctcctgccggagtggggctccggccacctcatgtccatgctcgagtcctgcaagcgcgtgctcctcagcggcggcggcggcggcaaggccttctccatcaccctgctcgtcgtgcgcccgcccaccgacgaggccacctccgaggtggaggccg

SEQ ID NO: 5701 - DNA, 252 bp, Setaria italica
  Peptide Sequence Number=SeqID_71675
tctcctcggtctacaatagtcgtgatatggtcgacttgttacaggggaccttttattcatcacactctttagctatggctttgagtggagtagccatcgaaaccataatggctccggacttttcactcatgtcaataccgttgtccttgacatcattaggaagcctccaatcaaagtggtacaacagtgacccaagaaccaaatgcaccattctatatgctaaaggcagtccaaggcactgacgacgcccag

SEQ ID NO: 5702 - DNA, 1239 bp, Setaria italica
  Peptide Sequence Number=SeqID_71676
ttttttttttttttgtctagtagtttactattacacatacaaacatggtcttccattgtcctgttaacttgcaacacgcccactttcacctcccctctttgttacatggcgagcggcgagtgcatgaacaacctatagggtcctctgaattaaccccacagatttgttgagactgttctagtacattacgaattacttcaattaatttgcatgacgaaattaaaggttacaaaactgctagaaatgtgtcggccaccacctttgatgatctcgtcgctctagcagggcttgccgggcttgcagtcgagggagcctgcaaagcgcgtgagcctggtgacgtaggagccgggcttgggcttgatgaggtccttcttgttgaactgcctgttgatctggccgccggtgacggtgaagtaggcgccctccatgaagaggtcgtcctccgagtgccacacccagttcttccactccgactccggcgcgtcgtgctgcttggtgacctgcttcgcggcgaggttgggcggcgcgatgtagcggttgccctggctgatgatggtcggcgccttgctgccgccgatggcgtacatgagccagtgcgtgtagtcgttgttcaccacgtggaagaatccccaccggcacctgggcatcctctgcacgagtcctctgccgaagtggttgaatgcgacggtgatctgcatgatctggtcctcggggtgcttgtcgctggagctgaagagcatgacgtcattgtggttggtcatgtggcagttggagatggtgacgccggtggacttggctatgacgtcgatgaggccgtcctggcagttggagagggagaggtggtcgagccacacgttggtggagccgaagacggtgatgccgtcgccgtcggagacggtgcgccagccgaagtggtccggcgagtcccggatgttgccgccgttcttgttggaggagatgatgtcgttgatgtggatgttgtggatgatgacgttgttggcgaactgcaccgtcagctgcgcgccgttggcgatgcgcacctgcacgccgcgcccgtcgatggtcttgtcgccgcggatgatgagctcctccttgagcgtgatgatcatcgtcttggcgaaggtgatccacagcggctcgatctggatcacggcccaccggagcgtgccgggacgggggttcaccacgtcgtcgtcggtgccgtcggtgaccacgtagaacttgccggcgagcccgcgg

SEQ ID NO: 5703 - DNA, 945 bp, Setaria italica
  Peptide Sequence Number=SeqID_71677
tagggtaagtaagtaaagagtgagggaagataagaaggctcacgcgcaggaagaaccttatccgcggaggaaggaccttggcccgacaccatgctcccaatggccgtccaccccgccaccacgccggccctcgccccgcgcgctcgcgtcgccccgcccagaccttccacctccttggccgccgcctcgtcctcctcctgctctcgcatcgtcggtgtcaagaccaggaggctgccccttcgctcgctccgcagcgtcgccgccgccgccgctgccgacgccgtcgaggaagaggaggtgcaactaggtggggctgcggatgcgttgtacgaggaggaagcagaggagtatgaggtgaaggtgcccgaaagacaggatcctatgctggtactgaagttcatctggatggagaagaacatcggcatagcacttgaccaattggttcccggctatggcagcatcccgttaagcccgtactacttttggccacggaaagatgcttgggaggagctgagagcgaaactggaggagaaagagtggatctcgcagaagcagatgatcattcttctcaaccaggccactgacatcatcaacctatggcagcagggtggcgggagcctgtcgacatgagtccctctccttcctgttcgtccagccttgcgaccttgctttttgttggtttcgttacatgccctcactgttgttaatgttaaactcacatggtacatggccttgtagatctgttcagtctgttctcggatatggttttgtgcattaaaatgatcatatgatcgatcttcgtgaggcgaaaaaaatcagactgcctacttaatggctagcaaaatttcattatgatttgagtcagttttcattacaaatgcaaggaagccacgtaatgagctataaatgtgccaaataaaaattgaatgttttctttaaaaaaaa

SEQ ID NO: 5704 - DNA, 478 bp, Setaria italica
  Peptide Sequence Number=SeqID_71678
gtgatgtgctcgatttccaccatcgaattctctggccttaaaccaaatgttctctcacaaattccatcagttgtctccttatctcaactgcgtcctcccttggccccctgatcccaatcaagacatgcgaaccaaatcgaaggaaatccatcttccttgtcttctccttcccagccgatggaacaaactcaggccaagcgggattgtggcacccctcatcacctgcctccttccaaatcgaatcatgcttggacgggcaaaagtactcattaatcttctcctccatccaccaatccagctcgttaaggcacacattagcaagcaaaggactaattataccacaatgcccataattcggcacatggcatgcctgttcaggagcaaacccaaagaacagcctcaaccaataagggtcaggcttcggctcattctcgttaagcaccttcttcttcctgctcttcctgagcaccttcctttt

SEQ ID NO: 5705 - DNA, 371 bp, Setaria italica
  Peptide Sequence Number=SeqID_71679
ccccaggccgcggtccgcgccgcctcctccgaccgcctcctcaacgccttcctcctcctttgcgcgagtccaggaagatgagcccgtgcgcggcgacctcagcaacggtggggatggacgcctgcgctgcgacgcgcacgcggtccaggcctgcggaggacagggaggcgagagcggcgtcgagggcctggacgttggtgatggacagccgcggggtgtggtgcgagccgccgccgccggcaccagcgcagccgtgcgtgttgcctctccgaccacggtccgcgcccctggtatggaactgaaagagagggaaaggcccctggtatggaactagatgtcgcgcgtgttgcttaatttcattccatttgtaa

SEQ ID NO: 5706 - DNA, 764 bp, Setaria italica
  Peptide Sequence Number=SeqID_71680
ctcctgtcagatactgtgatatggagcttttcaagtacttgtattcttcagtgagtccatagccactagctaaaggaaccacaacgttgtcaatcgcccaactctgtaatgatgccgtgaaaagtgatgagctcttgttaaaatcaagaatagacgctcttgatcctgtctcgatcctagtttcaggaccctaaatatttcttgcattgctctggatttgtcaaccacattgcgcaatccatagccaatcgtgacagcatcaaagtagcagtctgtgaacggcaaatcaagtgcatcgccctctatccatttgatattcttgtagcacagtttccagcgttgctcctgacggtcagcagcagtttgcagttgctgcctcgagaaatcgacagccatcacctctccatctaagccgaccttctgagacagcaggaacgccaaatccccgctcccgcagcagagatcaagaacccgatcccccatcttcgccctcgaccaagatacgcagatgcgcttccacgtccggtgctgccccaggctgagcacgtcgttcaggtggtcgtagacgggggcgattcggctgaagagggcttgccgctcgccggccgtagaggacgagcagcgaaagacggcggggccgcgccgtcgtcggcggccggctgggcgggacatcaccgccgcggcggcggatatggaaatcgacgcggtcacggtgcccatcgtatccgttcgctacttcgctcgctccccgaaccgtgattagg

SEQ ID NO: 5707 - DNA, 619 bp, Setaria italica
  Peptide Sequence Number=SeqID_71681
atagtaaacagtggcctcaagttaatcctgggttcaagttgtggcctccacttctgaaaagggcaccaggtcgaccaagggagagaaggtacaaatcagctgcagaaggggactctggaaagagaaccacaagtagccctgttcatgggttcagggaaaccgggaaccagcccgcacccaaccctgctggacctgtcattccggttcctagcgcgggttggaccctgacccgcgtggacccagatgaagcaagcggggtcagctggtttgcggttttaacccgtcaaacccaccgaggctagcatcaagggaaaaaaagggcggcggcggcgaagatgccgcgcgacggtgtcgctcaaggccttgagctggaggccgcgctagcagccgaatcagcttcccggcgggaagcggttgcctccatgggtgggtccctcgatatggacgtcgactcgccgccacttctcactgtggagctcgtcggcgacgggtcaatccccactcccgatccatccaagctgacaaggacggtgaagaccaatctttggaggtccctgctacaggcctttgaagatagcaatgagagattgaataggttaattgctatgcagaaaggtta

SEQ ID NO: 5708 - DNA, 558 bp, Setaria italica
  misc_feature (37)..(37): n is a, c, g, or t
  Peptide Sequence Number=SeqID_71682
cgccaccgccagcgcctaacagaaaaataatcttcanagggtcaaggttggcaacagtgctctttcccttcctcgcttcgaacaaaatcaaattcggagcggcgaagcgaaagatccccacgcatcccttccccttcgattcagttcaaccgcgagggcactgatcgggaagctaatgcagcgcgagtcgcgggatctgtagcgccacggggcttcaccggcggcgcggcgggcatggaggcgcagaacggcggcggcggcggcggcggcggggcgccggtggtgctcaacgtctacgacctgacgcccatgaacaactacctctactggttcggcctcggcatcttccactccgggatcgaagttcatggcatggagtacggatttggagcacatgagttcccaacaagtggggtatttgaggtggaaccaaaaagctgccctggcttcgtctatagaaggtctgtgtggatgggcacaactaacatgtctaggacagagttccgctcgttcattgaaaatcttgcaggaaagtacaatggcaacatgtatcatttg

SEQ ID NO: 5709 - DNA, 992 bp, Setaria italica
  Peptide Sequence Number=SeqID_71683
ctttacttgtcttgagcactgccctattttgctggtagggttgtacttgtacgattcagttttcacttgctctttaagtcttacctgcatttggtagcttgcattgttctatccaactgatttatacaggcttaaactcaaagattgttgtactgtctgctcaaataaacagttcatggcatggagtacggatttggagcacatgagttcccaacaagtggggtatttgaggtggaaccaaaaagctgccctggcttcgtctatagaaggtctgtgtggatgggcacaactaacatgtctaggacagagttccgctcgttcattgaaaatcttgcaggaaagtacaatggcaacatgtatcatttgatttcaaagaattgcaaccattttacagatgatgtctgtaagaatttgaccagaaagtcaatccctggttgggtgaatcggctagcaagagtaggttcatttttcaactgcctcctaccagaaagcatccaagtttctacagtcagacatgtccctactcatcctgcattttctgatgatgatatggattcgatatcttcatcagttgtcggggacagtgacttggaagagttggaccaacacctgctgccatcagacgtccattctatagatgtatcgccaaagctagccaaagatcttctctgaactactccacccttttggattccatatagcagtataacttcaactgcagcagctggcatccacgaagtgattctccaggttgatgcaggagtgtagactaatcctgctgattgtattgattctttgccactgagtttgctgtttacacgcacatataccactcgacagcaacgacatgctttctaattctttgccttttatgatcttgaccgttggtatcttgtgcttggatgatgctgtatgatcgtgatgaatactgtcattatttgtggcacaatcgaactagcctgatgtacttagcaaaagttaaaaaaaaaaaa

SEQ ID NO: 5710 - DNA, 2178 bp, Setaria italica
  Peptide Sequence Number=SeqID_71684
aggacggcggcgaggacgggaatgcggcggtgcccagggcctcctcccggcggcgggggcccgtgcgggccagcctcgacgccgacgagttcatcgcgctgatgcacggctcggatcccgtcagggtcgagctcacccgcctcgagaacgagctgagggacaaggagagggagcttggggaggcgcaggcggagatacgcgcactacggctgtccgagagggcgcgggagaaggccgttgaggagcttactgatgaattggagaagatggatgagaaactcaagctgacagaatctttcctagacagcaaaaatcttgaagttaaaaggataaatgatgagaaaaaggctgcaatggctgcccagtttgcagcagaagcaactttgcgaagagtacatgcagcccaaaaagatgacgacatgccaccaattgaagccattcttgcacctcttgaagccgaactaaagctttctcggcaggagatttcaaagctccaggatgacaacagagctttggatcgtctaacaaaacaaaaggaagcagcactgctagaagcagagaggactgtgcaaattgctatggcaaaagctgctatggttgacgatttgcaaaacaagaaccaagagttgatcaagcaaatcgagatctgccatgaagaaaacaagatcttggacaagctgcatcgccaaaagattgcagaagttgaaaagcttagccaaactgtgggagatttggaagaggctttacttcaaggtggtcgaaacgctaatgttgttcgagattacgagcgcagatttcaagaaatgagtgaagaaaagagaacacttgaccgtgaacttgcacgtgcaaaggttacagcaaatagagttgctactgttgttgccaatgagtggaaagattctaatgacaaagtgatgccagttaaacagtggcttgaagagcgtaggttcttgcagggggaaatgcaacaacttcgtgataagcttgctgttgcagaacgtacagcacggtctgaagctcaactaaaggaaaaatatcagttacgtctgaaagtattagaagatggactaagggggcttccaagtggctctaatcggccacctacggaagggaagagctttagcaatggcccttcccgccggttatcacttggcggagctgataatatgtctaaattgtcaccaaatggcctattgtcaaggaggtctccatcttttcattcaagatcatctcttttgtcaagcagcagcttggtcctaaagcatgctaaaggcacttcgaagtcatttgatggaggaactaggtcactagatagggggaaggtccgtgtaaatggagctcatttactgaacagatctacagatgctgttagagataaggagagtaccgacaattggaagggaaatgtagatgagagaactagtgagagcgcagacagcaacgcagatgagaaaagtaatgaaaccacaaataacaacttagctgagacagtctctggtttcctgtatgatatgctgcaaaaagaggtaatttctttgagaaagtcatgctatgaaaaggatcagattctaaaagataaagatgaaaatattgagattttagaaaagaaaatagacaccttaaacaaagcaatggaagtggaggctaaaaagatgagacgacaggttgcagccatggagaaagatgttgcagctatgcgtgccagtaaagaacaagaaaccagagccaagcggcttggtacgaaaagccctggaagttcacagctgcttcctggaagaaacgcaccacgaagtgggttgatgcgcaacttccagtgatggcagcactaacaccaggcagcattcttggatagatcctttgtcttccaccctgtatttcttccattcctatcctattaattttgtggctaaaatacctagatcaagggtaagagtaggctcggaccaggtgcagccattgcgtgagtggacctgaggtgtctaaccttgtggcgccccctcttgtttcgtttagtccaggaagtgcacttggtgcttgtataggctgggcgatcttggcatgtctcgtcttcagtgctcggttccgcaggaacccgttgcccaggttgtgaatattcaatattgtatcctcacatgtttgttgccgctgctctaattgccctgtgtttgggttgggaaa

SEQ ID NO: 5711 - DNA, 263 bp, Setaria italica
  Peptide Sequence Number=SeqID_71685
ttagcactgcgaggccttgaggagcttctcgcccttctcgacggagaaccaccgccggaagaccttctccacgccgcctgcctggaggatcctcgcccccagcgacagcttgcccttcacggtctcgtagagttttggcccgagggtcactgcaaatcaggcaagaacacggtcagactgaattcgcgatggcaaaggatgaaaggagacatcagccatccgatccaaaattgttggagagaagaacttaccatgttctttca

SEQ ID NO: 5712 - DNA, 535 bp, Setaria italica
  Peptide Sequence Number=SeqID_71686
tttttttttgttgcaaattcatgaatttttcctcttccccaacccccaaaaagatcacatgccctgatcgatcgcctgtaaccaacttgctagccagccgattttaatccacgaggcgaccgatccccaaatatacaacgacatgttgcatccctacacatacacagacagaactatcccaactacacaacgaagacacacggcgcgcacatgaagaaaccactcctcaccagccatcagcctagcctagcagcagcagcagcagcagctccaccacgcgtgcgtcgagcgcccgcgcccctgccgtcattgcgcctgctgcgcgtacgcgacggcctgctccaggtgctgcagcgaccggttgtagctgacgaagcccatgaaccagaactcgaagccgtcgttggtgacgagctgcacgtacttctgctccggccggtgcttgttctcgctgggccggacggccttcatcttccgcagcgggatcgtcaccttgtagggcacgcgcgccctgtcgccgcgcggggaggacacc

SEQ ID NO: 5713 - DNA, 603 bp, Setaria italica
  Peptide Sequence Number=SeqID_71687
tcctaagggaccggttcgcttgcggaaggccacccgcgccgtggacacgaagagcaggccggcgatcggcccggccgtcgtcgagaggtagcactgcgaggacctgagcagcttctcgttcttgtccacggagaaccactgccggaacatcttctccacgccgccggcctggaggattttcgcgcccagcgtgagcttccccttcaccgtgtcggaaagtttgggaccgagggtcacgtgttctttgatgccctgagcgatgttgtctcccttcctgccatgtttgctcgtcggccgatcggcggtcgtcgagcggttagcatcatagctggattggaaggaactcgggaatcctccatgatcgggcgtctcttccgcaaggaactccggctcctcgatgccgtaagccaagtccggctcctcgatgccgtaagccctgctgctcaccgggatggggaactcatccggctcctcgattccgtaaaccctgttgttcaccgggatcccaaccacatgaccttcagtcgtcgatccctccatctctgaatcttttcaacgaagacttggcagctgctctgttcttgcctcgatacctaacgtgcg

SEQ ID NO: 5714 - DNA, 1276 bp, Setaria italica
  misc_feature (1)..(38): n is a, c, g, or t
  Peptide Sequence Number=SeqID_71688
nnnnnnnnnnnnnnnnnnnnnnnnnnnnnnnnnnnnnntgtccagatttgcaaaacagcaaaccgacaagtaggatcagtactagaaataaaagtgtgatcagaattcagttcacaatctagaaatttcacaaacattttttgtttctttattccatttgtaaaccgcataagcgccacttcgcccgtggcaccatagcagaattacccaacatcacaaatctctttgacctaaatttcctcctatcatgtatatcggacttgctccactgccaaaaacgccaagcaatccaccaagaattttaagcctactactgcgtatgcacaacagattaaccaagacttcaaacacgcgacgcccgaccgaactgagccgaccgacggaccacaaaggcctcaggtcattgcgactgcgcgatggccttctccagttcctgcagggacacctggtacctgacgaaccccatgaaccagaactcgaatccgtcgtccgtcacgacctgcacgtacttctgctccggccggtgcttgttctcgctgggcttggccgtcttgaccctcctcagcgggatggcgaccttgtacggcacccgcaccgtgtcgcccctggcagaggtcagcgccagcgaccggtcgctccggaaggcgatcttctccgtggatatgaagagcatgccggcgatcgggccggcggtggtggagaggtagcactgcgaggccttgaggagcttctcgcccttctcgacggagaaccaccgccggaagaccttctccacgccgcctgcctggaggatcctcgcccccagcgacagcttgcccttcacggtctcgtagagttttggcccgagggtcacatgttctttcaggccttgggcgaccctgtctcccgtcctgccgaattttccagcccgcccaaaattggttgggttcttggcgtcgccgtgataggcgccccctttgctcgggaaatccgccggctcctcaatgccgaacgccctgttgctcactgggatgccgatcacatgctcgcgcctggccttctccatctcttcttgatcgacgcgacgaccgaggaacaccgaagacttctcttttctttgttgcttgctgaatccgcggctgagctcccggactctgcggtgaggtggttgctggtgagcgggtgggtggcctgttggtgcgtgcgtgggttgttgctgctcgagcttggtggacttgctccactgccaaaaacgccaagcaatccaccaagaattttaagcctactactgcgtatg

SEQ ID NO: 5715 - DNA, 676 bp, Setaria italica
  Peptide Sequence Number=SeqID_71689
aatctttgtaggtacttctccctttggtcagcagaaatctcaggccttccacgaaattgactagtttcactttgattttgaaatgcagcagcagtttgaggtctccattgaaccccagaaacaactggaggagaaaatactcttcctccaagaatagggttttcatttgtgctagcagaatcagagctaattgcatcattagtcctgggaagttgctgtggttgaactttattaccaagaggcgaaaccaactgctgagaaagaccaccactgttaattctctcatcagtgttcaatagatttcttttggacaagtcatttattgcagggagtgcactaaccgatccatttccagggactggaccaatacttatgggagctgtacctaatgtctgactagttactccacgggctatgcccctgccaattccaatttcagtaatggcaggagatggtcttcgtggaggaaaactcatgctgtcatcatccttcaaggtgccagataagtttgcaggaattgaggttacaacaggtgtactctcaggagcacttcgtggagtagcagaagaaagtattgcagccgctgtggtaggaacaggttggccgcacgaggggaattaatggtttccgcgagggcagaaacaggcacgctaccagtactgatagcaatgggcac

SEQ ID NO: 5716 - DNA, 2935 bp, Setaria italica
  Peptide Sequence Number=SeqID_71690
tttttttttaggtacaaaacagaaacttgcaaaatttaaaagcaaaatcactcaagattaaacagaaattaaacacaggggcaaaggaagatccgaaacaaatttcggagcccccatgactctgacatgcagatcagaacagccatgtacagctgagacacactggtttgttcactttgttgacataacccacatgagcggtgcaccagaacctaaatgcacagggtagcaccaacttcacccattagtttacagctagggaattgttctatagagtcccggattataacagctaagacaccttccgaaagttacaagattcacattggacacaatggctcgattagacctactgccatggcagatggcactctaatttgtctgtaccgatagctcatcctcaaggtagttgtactcaaatgtgaagtcattcttgattctttggcaccatcctgagccgtcctcggtgacatggaaatcgaagtacacataggagccccgctcatactcatcggttgtaacttgtggctccacatgccgctggaaccaagtattgtaccttctgtgaaatctccatgattgcttcttcaattctctagcagctaagtattgttggtatgtgttctgctgatagtagaatgcaaagaacagcatatccgtagctaatgtgtcactaccaattctttcccaaaaggtaggattcgatacaatcggtgcctgaatttgggggtaactagcaggggtgactgcagggtgccgcggaacataatttttagcacgctctgagtccttgggttgtggaagcctgtgaaatgcagcttcgagcatttgcaaattataaagctgatcatgaccagaacttgcagaagttccagtgaggttatctccgattgcaccaagatcagatacacttcttcggccaataacaccaacagcagatgatgacattccaggttgcaaaggctgcccaggcgatagatcagtgtccctaggcagctgagtgttttcagttgcaggtgctgaaggattcggataaggaatctttgtgtcatcttcacttgtttgtttatttgctccagttgttgcagcagattcaacaccaacatcttcagccaaactttgttgttgttcttcactttttacatgcccagcatctgatccttgagctccaagcccaaggttcacttgggaagatatagaagaactctgtgagttaaactgttgcagaaggggatttggctgctgtgttggaaattgcttctgatttatgccagctatatgaggaacattaagaagactgccttgctgctgctgtacttgctgcaatctttgtaggtacttctccctttggtcagcagaaatctcaggccttccacgaaattgactagtttcactttgattttgaaatgcagcagcagtttgaggtctccattgaaccccagaaacaactggaggagaaaatactcttcctccaagaatagggttttcatttgtgctagcagaatcagagctaattgcatcattagtcctgggaagttgctgtggttgaactttattaccaagaggcgaaaccaacgatccatttccagggactggaccaatacttatgggagctgtacctaatgtctgactagttactccacgggctatgcccctgccaattccaatttcagtaatggcaggagatggtcttcgtggaggaaaactcatgctgtcatcatccttcaaggtgccagataagtttgcaggaattgaggttacaacaggtgtactctcaggagcacttcgtggagtagcagaagaaagtattgcagccgctgtggtaggaacagttggccgcacaggggaattaatggtttccgcagggacagaaacaggcacgctaccagtactgatagcaatgggcacaactggcactgaaggtccaagatttccaccttttgaaggtggcgtttgtggcatagattcaggattgctttcttgtgaagccgtctcctctgtttgatcttgtgatgtactttgtgaagtagttgttgatacagtaggctgagtagatgaagttgcaactgaagaagtcttcgtgctcaaaactgcactggtggaaacagaagcaacacccttcacaagactggaaggagcaagtgaaaccatgtcttcaagtgcttcaaccttctccataggcaatgtgctatagagatcctcaacgtcactgaattcatcaaagtcttcctgattacgttcaacgtagtcttcaaggaaatctttaacatcattgacttgctcaggactcaactcatcattatccaaaagtctcaagattgactccaatttctttatatgagctttatgccgcgtaatagacttctctaaatgtaccagtcgaggtggtctttgttttccctttttaattgaaagcccttcaacctctgcttcaaagttatcaatctggctttccaaatcactaaccacagtattaagccaatccctcgtttcagctttggccttctctttgggatcagtttttggttgctgacctaaccttcttttgagaaggccttggtttttgttccttctcacaactttaaatcgttccatctctcgttcaatctgcttacgggcatccatcagagcctgctcataagaggcactaaccttcttgtccttgatctcgctggattggatccacgtcttgatctggtccctgtaccgctgcagcttcttgatctctttcttgaggtccgcctcgaacttctccttctggttcgcattctcggtgtcgtagaccttgttccagatgctgtcgaagacgtcgacgccctcctggaccttcttgaggacgcggtcgatctcgccctgcagcttccgactggcgcccatggcggcggcgggggtgccctcgcgctggggcgcggctagggtttacgatttgggagcg

SEQ ID NO: 5717 - DNA, 573 bp, Setaria italica
  Peptide Sequence Number=SeqID_71691
cagagagaagagaggaccaagaatgctggacaaaacaggagaatacgtacatccatggttgagatggatgcaaggacagctggtccattaagggggcccgggcctattgatagaatctcagatcctggcaaagccaccaatggcaattctgcagtcacagaagaaaaaatcagaggtttggcaactagtattgatggttgggagaagccaaagatgaagaaaaagcgctctgccattaaggcagacatgtcatcggctggtgtttcgaggagtgttgatgtagaccgggagtcgaagcaaggcatgccacacaagtttagtggtgatggtagggcaagaatggcaagttcccctagtttcaggtctggaactgttgcatctggcacaagtaaagcagatttgctttctccacaaaatggtcttgttggacgacccttaaataggaatgaccaagacagtggtttccatcctactaacaaaagggagcgtcaagttgttttagataaagaaatgcccaatccaagaaccattagcaagcctaatgaggatgacagtggaggtaacatcacatca

SEQ ID NO: 5718 - DNA, 393 bp, Setaria italica
  Peptide Sequence Number=SeqID_71692
tcaagctccccctccgtccctgattcgaaggaggacgctcacaagggaatcaccttgcagtccctcacattcagctatgatcttgtcaaagacggcgtcaagctgcctgtgtgctcgccacatcctaagcctctgcccagtgataacgtcaatgaacctcagcgatgggaagaggtccccgaatgtgaagcccccactgaacctcatcgacacttcaatcccagacaggaactgctcgcggagctcgctgctgcaagcatgaccgaatgccgcctttgccgtgatcatgctcgagcaggataagagcaaccttccgagattgactggctcgccaccttggccagcgacttggatatttctaatgagggactaaagttcttcttttaattacta

SEQ ID NO: 5719 - DNA, 258 bp, Setaria italica
  Peptide Sequence Number=SeqID_71693
gttgtttctgctgcgaagcaatgccaagcaaagactatattcatagcagcgaaattcttatacaccaagaaatcttaactgttttgttgttatccaattgtagggaattatattgaaggaaaatggtaaagaaggtgatgcagaaagaatgtttattcaggtaccattttccatatggtgtgacattgaaattttcttgaaaatacgtagatgttagtttttttttaggtctcatcagtagaaagatgatatgtatca

SEQ ID NO: 5720 - DNA, 1002 bp, Setaria italica
  Peptide Sequence Number=SeqID_71694
gcggcgtccgtcgtccccgcgaggggcgggtgcacggcggtggggttgtgcgccgcgcggccccggctgcggcaggggcggtggcggggcgcgtccgtggtggcgaagatggagggcgggctggggaagggggtggtgcccaccacaaactacgtggtgccgctcgacaaggccaccgggatgacgcgcccgctcgtggagatcctgcgggacctcaacaagcgagtccccgacaagatcatcgaccccgacaccaacaccgtccactggtatcatgcaaacagaatgcttagtttttatgcaccaggttggtgcggagaagttcgtgatgttatttattctgcgaatggaactgtaaccgtggtctatcgagtgatactgaaaggaactgatggagaggcatacagagatgctacgggcacagcgcaggtccatgagggccgcagggaagacgccgttgcagccgcagaggaagcagcattctgcaaagcctgtgcacggttcggttttggcctgtacctgtaccaccaggatgacacccatcacgaggaccacttccattgaggctcctttcgcaccggattccggagctgctcacaagtcgcaacgtgcttaggatatgccctggagaacttcgcatccagagaaatttttgttctttgtgtagtatcatattcataccacaagcgacaatgcgtgcttccacctgaatgtgaatgtagatacaaagaagcctgtaacctgttcctgttcctacctttgttgttgatcgagtcgatggttggatgccatcctgcaagaacctgtccagataggaaaccattatggaaattctgttgttactttattgttgtattcttcctgtcctccatctcatgcagcataggtgtatttgtaagattctatttgcttctctttgtgtacatgagaccatgagtgtttatttagctatcgatgatgttgttgcagacttgtgtaaatgatacgtcattcattttgatc

SEQ ID NO: 5721 - DNA, 461 bp, Setaria italica
  Peptide Sequence Number=SeqID_71695
ccttatcctataccagtctccattcccacttgtcataaataaaagacgcacggaatggattcacacgcttaatcatttgccaatgcccaagtagcacatcgctgcccgtcttccctctggccttgcagtatagcgagtctgatcttggtgatggaaaggagcagcttccccaatccttctgacaaaaggcatccctgcagatctttgctcgtgcgtacaaatcaaaatttacatctcagctttgtgtggattttgtttccagggttgctgttgtcaccggtgggaacaaaggaattgggctggaggtatgcaggcatctagcttccaggggtgtcatggtgatcctgacggcaagggacgagaaaagggggtcagaatcagtggagatgcttcatgagtccgggctgcctgatgttcagtttcaccgtctggatgtcagtgatccatccagcgctgcccgt

SEQ ID NO: 5722 - DNA, 574 bp, Setaria italica
  Peptide Sequence Number=SeqID_71696
accgtctgtctgcaagactgcaacttccagcggcgtgaaatgtttttaatttcccttttcttggtctctttgacttgaagtggtaactagacttaacttggtgcatgaaacagctcgtaggtaagagcacaatggagagactgcaatggttgctgcagcgctccacggaaagttatgaggaagcagaagaatgtctgaaaataaactacttcggcaccaaatatgtgaccgaagcactactccctatccttctgtcctcctctgatggacggctcatcaacgtgtcatccaacttaggactcctccgagtacgcctctctgaactagcacagctgtcagtgttatcagaccttctctgtgtactaatctgtagaatctttgatccttgcttattgtggttcagcatttcagcggcgaagaccttaagcaggagctgagtgacgttgacaatctgaccgtagagaggctggatgagatgtcagaactgttcctgaaagactacaagaatggccagttgaaatctcatggatggcctgcagattctcactacctggcctacaaggtgtccaaggct

SEQ ID NO: 5723 - DNA, 340 bp, Setaria italica
  Peptide Sequence Number=SeqID_71697
aaattccagttactactatacagattaaatacacgacatcatttactgttcttcatcgatttattgccagattatttcaataagaatatttctgcattgataactggacaagttagatgaggactgggttcatcaacattaatgtgcaaactgcaagcccaaaacttgaacgatgcttgatctatttccatcctactaatcttgtttatttccaagtttaagaactttatgtgaaaagccatgcagtaacctaaaaagaggttagcttggatgattttctgctttgaagagtgacaaactacaaccaatatatactgatgataccaatactggtcagtat

SEQ ID NO: 5724 - DNA, 381 bp, Setaria italica
  misc_feature (380)..(380): n is a, c, g, or t
  Peptide Sequence Number=SeqID_71698
tcggttggcggagattgaccaaggattgacgatctcggccatgaactccttcatcccctgcttcgactctggcgacacccgcttaatagcaactgtccgatttgaatggggaagtagtcccttgaagacactcccaaaacctcctttaccaaggagcatcttgtccttgaatccacttgtggcaatcagtagatctttgtaggtgaaggatggaagtccgtactccctctgccactccagttcatttcttcttgcatctaatcgcctcttcatatagagcttgaaaagagtggcagaaacagctatggcgataccaacagttggcaaaagagctgcacataatattattgtcttgatcttgttggtgtgtgtgtgtggtnt

SEQ ID NO: 5725 - DNA, 258 bp, Setaria italica
  Peptide Sequence Number=SeqID_71699
gggggaaattaatgatgtcaataacactttgtgatttgtttcttgtcctaaccacaggagctcgtttggccaaggtaaatactgatgctgttttcgacgcttcagctgagaccgtagttctgtaccctgagaatggagggaatttgcactgttttactgcgttgaccccttgtgccgtgctggatgtgctgggccccccttatgaccgtgatgatggaagggattgctcatactatgatgaatcaccgttcttgagtt

SEQ ID NO: 5726 - DNA, 339 bp, Setaria italica
  Peptide Sequence Number=SeqID_71700
agcaaataccgctagcttggtgtagatatctgtagccgtgaagacaaacaacagtgggtactggaaagactgggccgggccggttgcgcaggctaggaaacttgacatttatttgactttatttcgtctgggttgaaacaaaacaatctcttgtgggttgggatgactctgcttctcttatgctaccagagtggtctaatagcataagagaaactaaaacgtaatcctcttgtgggttgggattgactctgcgttactacttatgctaccagagtggtctaataggcgcaattcgaatttgggttttggccatgatcatttttctgcctacagggaaac

SEQ ID NO: 5727 - DNA, 613 bp, Setaria italica
  Peptide Sequence Number=SeqID_71701
ttttctcagggctcacccggaaggtccattgatttcttctgggaggactattgacaagactaaaccatcaaatccattcacaatggctcaaattccaaattttcctgagggactggcttctagtggtgtccctattgagttgcagaaaagtatacagggtggagcaaatttatttaatgctgggttttggctggaaccaaaactcacaagttccaattatgaagaattctcaagggcctaatcacaatttagtgagttctggagttaatgttgaagggaaagtgaatgtaggggcacaaggagcttttaactctacttctgcaccacagatgggatttcccccgattcctccttacaactcctcttcctttggaggtagctcacagtttctggacaaaggcaaggaattggcttccagcagtactggcactgaacttcattcgacaccgaaagttgcatctcagcctgggatgcctcatggaaatcccatccaagaaaggcaaggtattatcagagcaccacaaagagctgaggcatctttccaagaaggcagaccatctgcacttccgaatagaaatactgggccaagtccaatgtctcacccctcttccaa

SEQ ID NO: 5728 - DNA, 974 bp, Setaria italica
  Peptide Sequence Number=SeqID_71702
tttgttttgttttcttttccgtttacttttctttagttttggtttgtgtctccgactcagtggagtagtattcattctcgtaagcttgcacgaaaatgtatttgatgcatgttccgatgaatctctatgaggatgcctcaactggttttctaccaggttgatcatttggctggtggctggtgcaacctgcttcaaccagagtcattttgaagagctttttgtttgctcatctgttcatttatatttgtacctgaaatagttaatgcaatcttcaagagttcttatttgagacaaatgtaattcaactttacagggaaatcccatccaagaaaggcaaggtattatcagagcaccacaaagagctgaggcatctttccaagaaggcagaccatctgcacttccgaatagaaatactgggccaagtccaatgtctcacccctcttccaacataccattcaaagaacagcagctgaagcagctcagggcacagtgcttagtatttcttgcatttagaaataatttgcagcccaggaaggtgcatcttgaaattgccttgggtagagtacctcctgcagaaagtgatactgcaggtcagaggggcagtgagagcagagcgcctgatggtttgggaaaggaaactggaagcagtcgggagaactctggtgtttttgggtaggcaaggtgatgtctctagacttccatccacgtctgcaggaagtattgcagaagttgattcctttccgaaagacccagaaaatgctacaaagaagatcaaggtagctgaacaggagaagtctttgatggaagtagaaaacatccaaaaagcttctgttatgcagggagctagttctgaaatgcgttcccaggaaactgcatctcccattccatctggaccacagcagtcatactttcagggagatacgagaagaattgctcctgatattcatagaaatgatgctgaaaatttgaattcg

SEQ ID NO: 5729 - DNA, 1541 bp, Setaria italica
  Peptide Sequence Number=SeqID_71703
acgaaccgtagacaataacgcaagctgcggacgcgtactccgagctgcaatccaaatacgtcgaccgaccgatgcagcactagagctgagatgtgagagcttcagagttcagaccacaccactacgtagaaggctaggggcaatgcagtttttaatcgtgccgttaccatacaatttcatgggatgattataaattgcaggaagagtgcaagaggagttcatcttgattcaaagggagttaagaggctaagattaacaattagcagcacgacatgagactactgcgagatcagttgcaacggcagtgagagcacgtgctccaactgcaagtagatttccagctaaattatagaaacgctgctgtagtttacttgcacaaaacatgatggtacatctgagattcgcttcatactttctacaggttacaatgaatctagaacggtagcaccatatataggagtttggagaggaaagaagcgttcatctttcctcctccacgaattacagtaagctggtgccccaaattcatctactgctagtatatcatacttatacaacgtagcgctctccattgctggccacagtttcattcagagatcattcatcttcagaactttcatcagattgatcaggtccttcctcaggcagggcagatacgattgcagcacagcagaaagagtcgcgatccttcaggaggaggcagctcccatctgagttccacttcaagtcgacgatccggaaattcggcaagggtatgttgacgcagcaggcaccggacggtgtccacatgtacaggtgagggctctccgtgcacagaaccaagcgtgtgcaggtagggtcccaagcggcagcacggattgggtctttctgcacaagcacagcagcaagctcaaggcggcagatatcccatatccaaagagcagttggcatgttgtcattccgggtgaagaaatagtggctgtcgctgctccatgatagcataccaattccttgtttggggttgggcttgtcagtagctggtttcgtcgaaggtaaggtgatgggaacatccatcacagcatattttactctagaacctcctccctcagtgccattttcagcaccattgtcttgcatgttacgagagaagccatcactaagacataactctgacatatcaagttgccacggatcatccacttccttaaatatagctgcattacagggacttcgaatagaggctgcatgtgtgaactccgcaaaagttttccatgtcaggtggttcaaagtacgcactgcttgatcatagctacccactgctaaaaactgtccacatggtgaccaagaaacagatttcacacctaacccactttcataagctaaatacttgaacaggcaccttccatccggagaatatatcagaaccttgtattcaagaagtgaatcccagacaacgatagcactatcatctggtgaccactcaacaccagctaagtctactgtatcaacagcaaagacactcattatctcccaggaatgacatgagagcaaatttatgtagt

SEQ ID NO: 5730 - DNA, 898 bp, Setaria italica
  Peptide Sequence Number=SeqID_71704
gttctcggtatcgttctctccacacaactgagtacttgaggcaaaaaccctagccgtcttcctccatcttccatcccaagcctcgcgacaccatggccgcatccaacagcggcggcggcccgatctcaacccaggcggcggcggcgcttgccgagggcatcaatctggtgttcgggcgctggacggcgctgcagatggcggtggagaaccagtggggcggccgcgactcccgcgccaaggcggaccagttcggcgagtccctccactcctggttctgtcgctccaggggtccgcattattttgaagacttggtggatatgatgtacgagaaaatatctgattctttcaatgctgacttcgaggataatagtgttgaggaggtcgctgaacaattattgattatgcatgaagaatgcctgcaaagcaactattcatctatagaggtgttaaggaactcacatgttcaggggagtgctgtttctcaaagtagacagatatcagctgatggtgatgacagtgatagctcagatgatgacgatggcgacgcgtcaatgatggaagatgaagcagcagctgcaccagaggagatggcggtggacagaccgaggccctcgaagcctgcacctgatgctgatgggtggaccgtcgtgcctcctaggcatggtggtcgctcccgcggcggcaagaattaggcagggggccggaaaccttgacgtatacatacatgttgctatctgccgattttgttactggatgttgagtgttgcaggtcttgcttgggattttatcagtgatattgggtgttttgcctgccaccatattggtatttcgacatggtaattatagataacttgcgattgggtcttaagaattccgtgctcagttaatcgcagtcaaa

SEQ ID NO: 5731 - DNA, 409 bp, Setaria italica
  Peptide Sequence Number=SeqID_71705
agcgcgcgcctgagcggctcgtcgtcggcggctgcagcaggaggaggtgaaggatgcattaccatccccgcgaggtccgcggcgccggcgagcacgcgcatccaggccttccggccctcgtcgaagcgcgcgtaggatgcctcggtgcggaacacgaggagaagcgcgagcgcgggcgcggtgagctggtaggggagcgaggacgcggtgagcgcgtggtccgggaggagcgtgttgtaggtggcgatggcggcggcgaaggcggtgaacgcggagacggggggcgcgagggagaggatgacgcgggaggagagcgaggtgaggaagtggcgcaggtggcggcgggagctgcggtgctcgcgccaggtggcgtggtcgtagagcgggcggcggtcgcggaggcggcgct

SEQ ID NO: 5732 - DNA, 262 bp, Setaria italica
  Peptide Sequence Number=SeqID_71706
caaccaccacgccgagcgcggcaaggccgcgcaccacgccaagcggaccagggagcgcgccgacgagttcagcagcgatgggggcgagtactgctcctacatcaacagcggcggcagcggcggcgggggaagaagggccgcggcggaggagggagctcgggcgcgtcggactaccgtaaggatcgggaggagtggacggacggcgccatcagcagcctcctcgatgcctacacggaccgattcgagcagctcaaaccggggg

SEQ ID NO: 5733 - DNA, 678 bp, Setaria italica
  Peptide Sequence Number=SeqID_71707
cgagatcgcacacaggatcgagtcctacgtcaagagcgtggagatgccggtggtgaagatctcgcggaccttcagcgttgtcggcaatggggttctgtctcctagggtcgccgcgttctcgtcgagaggccccagcatcgacttccctgccataattaagcctgacatagctgcaccgggagccagcatcttagcagctgtgcgcgggtcataccagctcgattctgggacgtccatggcgtgcccgcacgtctcggctgtcgtcgcgctgctcaagtcgattcaccctcactggtcgcctgccatgatcaagtccgccatcatcaccacaggcacgtgcttattatcatgaattccataaaactgatggtgtttcttcatttcacgtactgtcggttaatggcatgcagcatcggtggctgatcgtttcggcatgccaatccaagcggaaggggtcccaaggaaattggctgaccctttcgattttgagggggcagatcgaccccgacagggccatggatcccggcctggtctatgacatagacgccggtgaatacaccaagttcttcagctgcacccttgggccagacgataattgtgtcacctacatggggcagctgtaccagcttaacctcccatccatcgccgtgccggacctcaaagagactgttaacggtt

SEQ ID NO: 5734 - DNA, 1374 bp, Setaria italica
  Peptide Sequence Number=SeqID_71708
ccgatctcgcgcaacacaacagcaacatactcgagcagtacaccaaggcctgcagccagtacttcatgccctgcgtgttagtggacttcgagatcgcacacaggatcgagtcctacgtcaagagcgtggagatgccggtggtgaagatctcgcggaccttcagcgttgtcggcaatggggttctgtctcctagggtcgccgcgttctcgtcgagaggccccagcatcgacttccctgccataattaagcctgacatagctgcaccgggagccagcatcttagcagctgtgcgcgggtcataccagctcgattctgggacgtccatggcgtgcccgcacgtctcggctgtcgtcgcgctgctcaagtcgattcaccctcactggtcgcctgccatgatcaagtccgccatcatcaccacagcatcggtggctgatcgtttcggcatgccaatccaagcggaaggggtcccaaggaaattggctgaccctttcgattttggaggggggcagatcgaccccgacagggccatggatcccggcctggtctatgacatagacgccggtgaatacaccaagttcttcagctgcacccttgggccagacgataattgtgtcacctacatggggcagctgtaccagcttaacctcccatccatcgccgtgccggacctcaaagagactgtaacggtgagacgcacagtcaccaacgttggcccagctaaggcagcatatcgggctgtggtcgaagctccaccaggggtggctgtgtcggtggagccttgggtgataaagtttggtgagggtggtagcaaggaagcaacttttagggtgacattcacggcgaggcagagggtgcagggtggctacacctttgggagtttgacatggttggatggtaacacccactcggtgagaatcccgattgcagtccgcactgtgatccaagacttcattgccgacacatcatagatccgatctatctacggtcagtgtcgatcatcctgctgcatcagtatggtgttggtgcgtaccatcatgagtgttagctcccaggttcctgaataaagcaatccactctccaaataatttgttgggtcgtagatactagctagatccaacggttggggtgagtggcagctattctgttttgtctactcatcaaaatttggttgagatttactttcttctcaatcacttttccccaaacgtgtagatgagttttcatctagatgcaagaaaaaacagaatttctaaatgaaaacaacatgaaagaaagttctgatgatgtgataacttgatgatgtgaaacaacagaattttcccttgggaaatatatgagaacatgtattgtttaggttattcctgctgtaaaaaa

SEQ ID NO: 5735 - DNA, 1699 bp, Setaria italica
  Peptide Sequence Number=SeqID_71709
aacaaacaaaacaaacgcaaacaacgtaaaattatccttgaaatcaatcatggatttgctatcagctgcctgctccgctttgcttctggtgctagtacttatgcttcccctttcagctaatgcatcgagtaaactgtatattgtttacatgggagagaagaaacaggacgatccatctgtggtcaccgcatcgcaccacgatgtactcgcatctgttcttggaagcaaggatgaagccatgaaatccatactttacagttacaagtatggattttccgggtttgcggcgatgctcacgaagtcccaagccgagacaattaagagtctacctggggtcgttagtgttaagcctaacactcgttaccaaaccgcaacaactcggagctgggattttcttggccttcactactaccaaacgtcggcaccagacctcctccggaaagcaaagtacggggaagatatcatcgttggggtagttgacacaggcatatggcctgaatcacgaagctttgacgatagcggatatggccctgtgccggcgaggtggaaaggcgtatgtcagattggtgccgagttcaacgccacgagctgcaacaggaagatcatcggcgcacgctggtacaccggcggattggatgccgagaagctcaaggtcgactacttgtctgccagggacatggacgggcacggcacgcatgtggcctccatcatcgccggtagcctagtgaggaacgtgagccacggcggcctcgccgccggcgtagcgcgtggcggggcgcctcgcacgcggttggccgtctacaaggcttgctggctgacggccggctgcgacgttgccgcgatcctcgctgccatcgacgacgccataaacgacggcgtggatgtgctgtccctgtcggtggctgcgccagaaacagagctccccgggacgctgcacgccgtggcgagagggatcccggtcgtgttcggcgccggtaacaacggccccgcagcgcagacgattttgaacgccgtgccgtgggtcttgacagtggcagccaccaccatcgatcggtccttcccgaccgtggtgtcgctcgggaacaacgagaagctagtggggcaatcagtcaactacaatgcatccttgaatagcgacgatttccacgcgcttttatttgcgggcagctgcgacgaacagacgctgtcgtttaccaacgtcaccggcaacgtcttgctgtgctacgccccatgggaggcgtcctccaagccgccgccgcaaggattcagcagcgccgtgaccggcgtcagcaaggcaggggccaagggcctgatcttcgcgcaacacaacagcaacatactcgagcagtacaccaaggcctgcagccagtacttcatgccctgcgtgttagtggacttcgagatcgcacacaggatcgagtcctacgtcaagagcgtggagatgccggtggtgaagatctcgcggaccttcagcgttgtcggcaatggggttctgtctcctagggtcgccgcgttctcgtcgagaggccccagcatcgacttccctgccataattaagcctgacatagctgcaccgggagccagcatcttagcagctgtgcgcgggtcataccagctcgattctgggacgtccatggcgtgccccacgtctctctttgttcgttcgtcgtcttgtcttctaagttcgtatttctaccct

SEQ ID NO: 5736 - DNA, 418 bp, Setaria italica
  misc_feature (392)..(392): n is a, c, g, or t
  Peptide Sequence Number=SeqID_71710
actgcagttccgttttctcctctgcagtctccactccccctttccctttcccaccccgccacacccacacctccccgcgcatcaccggaacccgtggcaccagaaccccggcaggcgcgtgcgcctgtcccgaacccgcctcgatccggatggagtccgggagcggcggccggaggctgcggaagacggagtcggcggagatgcggtgggtggtcccgggcggcgcctgcgaggaggacgagatcgagagctccgacgacggcggcggcggggccgacacccccgcggccgccttgggctcccgcggcggcgggtgctcggacgacgacgacgacgacgacggctacgaggaggacgagatgctgcgccagcgcctcgtgcgcacgggcccngcgcggactccttcgacgtcgaggcg

SEQ ID NO: 5737 - DNA, 265 bp, Setaria italica
  Peptide Sequence Number=SeqID_71711
tttacccagagccatacacacgaaagcacctacaacaccactacaaacctcacaaacttgctgtctgtctctccggctacggatgtggccttttgtctccctctgttgccaccacgaaagacctcgtgaactggacaaactagcagttctcggagttgagagacaaagcggatggcccacctcggggctccttggaacccgatcctctcaccagcgagtcagacagagtttcttcggacctggagctcagggcgccagggttcta

SEQ ID NO: 5738 - DNA, 585 bp, Setaria italica
  Peptide Sequence Number=SeqID_71712
cttgtggaccatgctgcagaactcgttccagggatcatcaccaaccagcatcatgtcaccttcattgtcagtgaagacaaccatccagttcttgtgaggactgctcagctcaccaccaaagtcaaacatctgatccagttcagcaattagttcactgtagcaagtgaactttgtcagatcaatcgacctgccgagggcactgccttgcttatgcaccttcttgcagcttcgggtggaactactttgcactttgttctgaacattctgggtagcctctgggcaaggatgattattctccctaacagaatctgtctgaggaccatcaagaggcttaacagtcttcgaaggatcagaataatcatccacttcaattatgtctagctgattcctttgtgatggagatgtttgaagctttccgtcatatgcaacacttggtggggataccagaggttcagattttttctgggctaccaagaggaaacccaaatagcttgaatgaagtgcctttggttttctggacatcagtttcaataaccaaaggccggggattgatcaaactcgattgattgtctacgatttattgta

SEQ ID NO: 5739 - DNA, 693 bp, Setaria italica
  Peptide Sequence Number=SeqID_71713
ggccaagcaccaactacaaactgggtactgcggggctttacccagagccatacacacgaaagcacctacaacaccactacaaacctcacaaacttgctgtctgtctctccggctacggatgtggcctttttgtctccctctgttgccaccacgaaagacctcgtgaactggacaaactagcagttctcggagttgagagacaaagcggatggcccacctcggggctccttggaacccgatcctctcaccagcgagtcagacagagtttcttcggacctggagctcagggcgccagggttcatcctgcccacctcctcccttgtgtagatgaacatcttgtggaccatgctgcagaactcgttccagggatcgaccgccaggccaatcacgtcctacaaaactggggtactgcggggctttacccagagccatacacacgaaagcacctacaacaccactacaaacctcacaaacttgctgtctgtctctccggctacggatgtggccttttgtctccctctgttgccaccacgaaagacctcgtgaactggacaaactagcagttctcggagttgagagacaaagcggatggcccacctcggggctccttggaacccgatcctctcaccagcgagtcagacagagtttcttcggacctggagctcagggcgccagggttcatcctttccacct

SEQ ID NO: 5740 - DNA, 556 bp, Setaria italica
  Peptide Sequence Number=SeqID_71714
tagttgagagacaaagcggatggcccacctcggggctaccttaggaacccgaatcctctcaccagcgagtcagacagagtttcttcggacctggagctcagggcgccagggttcatcctttccacctcctcccttgtgtagatgaacatcttgtggaccatgctgcagaactcgttccagggatcatcaccaaccagcatcatgtcaccttcattgtcagtgaagacaaccatccagttcttgtgaggactgctcagctcaccaccaaagtcaaacatctgatccagttcagcaattagttcactgtagcaagtgaactttgtcagatcaatcgacctgccggggcactgccttgcttatgcaccttcttgcagcttcgggtggaactactttgcactttgttctgaacattctgggtagcctctgggcaaggatgattattctccctaacagaatctgtctgaggaccatcaagaggcttaacagtcttcgaaggatcagaataatcatccacttcaattatgtctagctgattcctttgtgatggagatgtttg

SEQ ID NO: 5741 - DNA, 665 bp, Setaria italica
  misc_feature (262)..(262): n is a, c, g, or t
  Peptide Sequence Number=SeqID_71715
ctctggttttatgatgaatcaacaaaattatctgtcaatgcctgaagctgcacttcctcaaagggctgaaattgcaaaatttagtgggaaatcagctttcacttcgcttcagggccatggcattgatcggtgctgctcaggctggattggccataatcgtgcatcatcgagtttgatcaatccccggctttggtattgaaactgatgtccagaaaaccaaggcacttcattcaagctatttgggtttcctcttggtagcccngaaaaatctgtctgaggaccatcaagaggcttaacagtcttcgaaggatcagaataatcatccacttcaattatgtctagctgattcctttgtgatggagatgtttgaagctttccgtcatatgcaacacttggtgggataccagaggttcagatttttctgggctaccaagaggaaacccaaatagcttgaatgaagtgcctttggttattgaaactgatgtccagaaaaccaaaggcacttcattcaagctatttggttttctggacatcagtttcaataaccaaaggccggggattgatcaaactcgatgatgcacgattatggccaatccagcctgagcagcaccgatcaatgccatggccctgaagcgaagtgaaagctgatttcccactaaattttg

SEQ ID NO: 5742 - DNA, 277 bp, Setaria italica
  Peptide Sequence Number=SeqID_71716
gttggtgcttggcctggcggtcagtttcttgttcaagttttgggtgtgccctgtgttggggttaaccggtgaagttatcgtagcagagcacacccaaaacttgaacaagaaactgaccgccaggccaagcaccaactacaaactgggtactgcggggctttacccagagccatacacacgaaagcacctacaacaccactacaaacctcacaaacttgctgtctgtctctccggctacggatgtggccttttgctccctctgttgccaccacgaaag

SEQ ID NO: 5743 - DNA, 439 bp, Setaria italica
  Peptide Sequence Number=SeqID_71717
tgtctaaaagtctggtctggcttcttcaggtgccatgtcagtcacgacttgtcaacagtacactactacgcttcagagcaaggctatatttacaaggaagaaagagaggagggccaagcaagcgcgaccagggattttgtttgcctgctttctgctgctctgctacgataacttcaccggttaaccccaacacagggcacacccaaaacttgaacaagaaactgaccgccaggccaagcaccaactacaaactgggtactgcggggctttacccagagccatacacacgaaagcacctacaacaccactacaaacctcacaaacttgctgtctgtctctccggctacggatgtggccttttgtctccctctgttgccaccacgaaagacctcgtgaactggacaaccagcagctcgcggagttgagagacaaagcggat

SEQ ID NO: 5744 - DNA, 698 bp, Setaria italica
  Peptide Sequence Number=SeqID_71718
cggggctttacccagagccatacacacgaaagcacctacaacaccactacaaacctcacaaacttgctgtctgtctctccggctacggatgtggccttttgtctccctctgttgccaccacgaaagacctcgtgaactggacaaactagcagttctcggagttgagagacaaagcggatggcccacctcgggggctccttggaaacccgatcctctcaccagcgagtcagacagagttcggtaggacctggagctcagggcgccagggttcatcctttccacctcctcccttgtgtagatgaacatcttgtggaccatgctgcagaactcgttccagggatcatcaccaaccagcatcatgtcaccttcattgtcagtgaagacaaccatccagttcttgtgaggactgctcagctcaccaccaaagtcaaacatctgatccagttcagcaattagttcactgtagcaagtgaactttgtcagatcaatcgacctgccgagggcactgccttgcttatgcaccttcttgcagcttcgggtgaactactttgcactttgttctgaacattctgggtagcctctgggcaaggatgattattctccctaacagaatctgtctgaggaccatcaagaggcttaacagtcttcgaaggatcagaataatcatccacttcaatttatgtctagctgattccttt

SEQ ID NO: 5745 - DNA, 457 bp, Setaria italica
  Peptide Sequence Number=SeqID_71719
acttagaacctgaacaactagctgaccgccaggccaagcaccaactcaaactgggtactgcggggctttacccagagccatacacacgaaagcacctacaacaccactacaaacctcacaaacttgctgtctgtctctccggctacggatgtggccttttgtctccctctgttgccaccacgaaagacctcgtgaactggacaaactagcagttctcggagttgagagacaaagcggatggcccacctcggggctccttggaacccgatcctctcaccagcgagtcagacagagtttcttcggacctggagctcagggcgccagggttcatcctttccacctcctcccttgtgtagatgaacatcttgtggaccatgctgcagaactcgttccagggatcatcaccaaccagcatcatgtcaccttcattgtcagtgaagacaaccatccagttctt

SEQ ID NO: 5746 - DNA, 408 bp, Setaria italica
  Peptide Sequence Number=SeqID_71720
ttgtctgcaaggaaaacttcacaatttattagcatagaagaatacaaactagcaggttctttttttcatcagtggaacctgcgataaaattagcttctagatacagccaatttgttgcagaaggaatcctatcaggaaattccagccagcaagcagcagtacatagcttcattgaagcatacttcgaaaaatattcactaaaggatatggacccagtatgcattttatgtatcaggaaatgactagcaaggaaaaaggtccataactagcgaggaaaaaggtgcaatgtgtggtgaaccttcttgcagcttcgggtggaactactttgcactttgttctgaacattctgggtagcctctgggcaaggatgattattctccctaacagaatctgtctgaggaccatcaa

SEQ ID NO: 5747 - DNA, 475 bp, Setaria italica
  Peptide Sequence Number=SeqID_71721
cctctgggcaaggatgattattctccctaacagaatctgtctgaggaccatcaagaggcttaacagtcttcgaaggatcagaataatcatccacttcaattatgtctagctgattcctttgtgatggagatgtttgaagctttccgtcatatgcaacacttggtggggataccagaggttcagatttttctgggctaccaagaggaaacccaaatagcttgaatgaagtgcctttggttttctggacatcagtttcaataaccaaaggccgggattgatcaaactcgatgatgcacgattatggccaatccagcctgagcagcaccgatcaatgccatggccctgaagcgaagtgaaagctgatttcccactaaattttgcaatttcagccctttgaggaagtgcagcttcaggcattgacagataattttgttgattcatcataaaaccagagttatgaggcattaaagaccaa

SEQ ID NO: 5748 - DNA, 467 bp, Setaria italica
  Peptide Sequence Number=SeqID_71722
taccttcttgggcaaggatgattattctccctaacagaatctgtctgaggaccatcaagaggcttaacagtcttcgaaggatcagaataatcatccacttcaattatgtctagctgattcctttgtgatggagatgtttgaagctttccgtcatatgcaacacttggtggggataccagaggttcagattttttctgggctaccaagaggaaacccaaatagcttgaatgaagtgcctttggttttctggacatcagtttcaataaccaaaggccgggattgatcaaactcgatgatgcacgattatggccaatccagcctgagcagcaccgatcaatgccatggccctgaagcgaagtgaaagctgattttccactaaattttgcaatttcagccctttgaagaagtgcagcttcaggcattgacagataattttgttgattcatcataaaaccagagttatgagg

SEQ ID NO: 5749 - DNA, 440 bp, Setaria italica
  Peptide Sequence Number=SeqID_71723
ctgggttatttcttcccttaactagtaattcttctgtttgaggaccatcaagaggcttaacagtcttcgaaggatcagaataatcatccacttcaattatgtctagctgattcctttgtgatggagatgtttgaagctttccgtcatatgcaacacttggtggggataccagaggttcagatttttctgggctaccaagaggaaacccaaatagcttgaatgaagtgcctttggttttctggacatcagtttcaataaccaaaggccggggattgatcaaactcgatgatgcacgattatggccaatccagcctgagcagcaccgatcaatgccatggccctgaagcgaagtgaaagctgatttcccactaaattttgcaatttcagccctttgaggaagtgcagcttcaggcattgacagataattttgttgattcatc

SEQ ID NO: 5750 - DNA, 731 bp, Setaria italica
  Peptide Sequence Number=SeqID_71724
ccatacacacgaaagcaactaaacacccctacaaacctcacaaacttgctgtctgtctctccggctacggatgtggccttttgtctccctctgttgccaccacgaaagacctcgtgaactggacaaactagcagttctcggagttgagagacaaagcggatggcccacctcggggctccttggaacccgatcctctcaccagcgagtcagacagagtttcttcggacctggagctcagggcgccagggttcatcctttccacctcctcccttgtgtagatgaacatcttgtggaccatgctgcagaactcgttccagggatcatcaccaaccagcatcatgtcaccttcattgtcagtgaagacaaccatccagttcttgtgaggactgctcagctcaccaccaaagtcaaacatctgatccagttcagcaattagttcactgtagcaagtgaactttgtcagatcaatcgacctgccgagggcactgccttgcttatgcaccttcttgcagcttcgggtggaactactttgcactttgttctgaacattctgggtagcctctgggcaaggatgattattctccctaacagaatctgtctgaggaccatcaagaggcttaacagtcttcgaaggatcagaataatcatccacttcaattatgtctagctgattcctttgtgatggagatgtttgaagctttccgtcatatgcaaccattggtggggatacc

SEQ ID NO: 5751 - DNA, 2362 bp, Setaria italica
  misc_feature (9)..(9): n is a, c, g, or t
  Peptide Sequence Number=SeqID_71725
agctcaccnccaaaagtcaaacatctgatccagttcagcaattagttcactgtagcaagtgaactttgtcagatcaatcgacctgccgagggcactgccttgcttatgcaccttcttgcagcttcgggtggaactactttgcactttgttctgaacattctgggtagcctctgggcaaggatgattattctccctaacagaatctgtctgaggaccatcaagaggcttaacagtcttcgaaggatcagaataatcatccacttcaattatgtctagctgattcctttgtgatggagatgtttgaagctttccgtcatatgcaacacttggtggggataccagaggttcagatttttctgggctaccaagaggaaacccaaatagcttgaatgaagtgcctttggttttctggacatcagtttcaataaccaaaggccggggattgatcaaactcgatgatgcacgattatggccaatccagcctgagcagcaccgatcaatgccatggccctgaagcgaagtgaaagctgatttcccactaaattttgcaatttcagccctttgaggaagtgcagcttcaggcattgacagataattttgttgattcatcataaaaccagagttatgaggcattaaagaccatgtgccaggtagcatgttgtggtttgcttgttgggttggataatgagcatcaactgtgtcccaggtatttgagtggtttccagatatttgactaggaaaagaacaaagtggattctgcgcatctttcagtggttgaaatgccgatgacagctgattgtaaccctcaggtcttcttgtttgcgtccaaccctctagacttagctttgtctgggcagcaatattgtttctctcttgctcaattcctgaagaccacatggtgagatcctgagcggacttcagatcactgctatcacggaatcgactagtcaattgtgcccttccttgactgtgcaaggcccttgggagactgttttgttgagagtccgccatgactttagaagcaacttctctggttacagttggcatgtcagatggcgaagcattaacatttgaacgagacctcttgaatctgagtggaagagggttcacaggagatgggctaacagcagcaggttctatttgccaaggagagactctttccggacgaagaacagcagaagcttcatcccatcgcaccttaagggaacgccatttggagtcagcccatccagacggatcagaagcacctattccaactattgttccagtgaatttttgctctgccgcctcttcaccttcaaatctcatcttaaatctcatccctattgtataattttgtttcagtgattcatagtacctatcgcgcgagaccacaaattcagctggactagtccttggcttgtagtagatagtgaacatactcccagtgttcactgcatgccatgctgttgcaagaacaccaagatgcatactgtggcttgatatgaccgaagatgggatggtggtttggtgcctgagtgcccgccgaactccaacacgtagctccccattctcacctctgagaaatatgaaggcatcaccagcaacaagacgcttggcgctaacaaaaacactccaaccactctgaagaaggtgtctacgtggctgacctcgaaagatgtgacgaaagcgccactcgaccccatgcaggtccttggccaccagttcttgatttggaggatgctgactcatatccagtggagggaggcactcatccgcatgccgacgcagcaccgagaatccaccatgcgtgcttgtgtctgaggcagtcagtgtcttgcagaaggaatggatgagaagctgctcattggtggctggtggtgcaacaggcacgacctcatcctctgcagcatcactctccactgttgtagtggtattctcatctcgcttcttatcagggagcagggtgagctgagcgtacacctcatcagtatctggctccgccttcagctcgatgttcatgagcttgcaggggatcttccatggcaggttgtagagcggtgtgccctgctgctcagcaagctggttcgtcgacgcctccacctgctcgatgtgcccctgcgggaagtagtagaccttctccccgagcggcgggatgctggagaccggccccgcgcaggccttccacagctccacgaacagcgcgtccttctctccgcctccgccgcctcctgcctccggacctccccatccacctccacagccgccggccgccgccgccatcggatctcacatgcacttccccaaccccaacctcctcgccggccaaaaattcctcgcgaaattccgccgcccccgaagcgttacgaaactgggcgggcga

SEQ ID NO: 5752 - DNA, 834 bp, Setaria italica
  Peptide Sequence Number=SeqID_71726
acgtgagagatatagcgcccttcttttctgcacgactgtccaatttccacagcgtgggaaactattgctttcaagtttgaacatcttcgtccatgcaggtgaactgcaactgcggactgtgtgccagtagatcaaaccaatattgtggcagctgagctgaaggcacctgtaaagcaactctcgggcagtcaggctccagtcacttcatcatcatgccgacaagcacttccttaggcatttcaaaggtactgcatattcatacttccaccagatgattgtgcaatctcacgaaatcatccaatgtcaggtcagaaggtctagctgtaactggaaggccgaggttgtgtagtgcggcctcgatctcagaagaagagcataggtgctgaagagatttcctaagcatcttccgcttcccattgaaagcggaattcaccatggaaaagaagcttttggcagaaccaactggcggatactcctcagctttctttagtttaaagctgataacagctccatcaaccttcggccgagggaaaaaattctctctgtcaactctgaacttgtattcaggttctgaatagaaattcacaaacacattgataggtcggtactccggagtttgtattgaagcacctgcaaggcgcactgccgtttcatcctgaagcataagcaccacgatagagaaaacatcccccattgggagaagtagtttgacaacttcggtgctgacattgaatggtaagtttgaaacaacctttgcatgttttttggtggcatggtattcctctttcatgaaaggaagaaaatgggagcgaatgtgaaattttgtgatgtcta

SEQ ID NO: 5753 - DNA, 1201 bp, Setaria italica
  Peptide Sequence Number=SeqID_71727
ttgcgtgtctcagtacgtcaccgccggggctaggaggtgggccgtcctgggccccgtttgtctcgctgatggggaccatttcaccgacctcgtctaccatggcgaaggcaaggtctactgcctcaccaggtgcgggaacgtgcatgtcctacacctccctgagcgccgccgccggcaacctgccacggtaaatggttcagagttttctcttctccaaactcctgaacacattcgaaggtggatatctgctcctggagctccagatccaatgaagggaatggcgattgatttactgcaggatgtatctgacctgtttatgagacgttcacctgaatgtcaaggagaggatctaaatgaaggagccaccatcgagcccttgttgtccgcagggaacgctgggtccaaccctgtcattgcctttgctacgccctatgacattgtgtctgcggtcactggtgctaagaacttggtgatgtgcgagggtaatctgtaccaagtctggaggaacacaagctgcaccgtttctcttcagcttcctggaggaggtcggcgtcgcaccctggagaatgagatatttgttctaagatactatccccagcgccagccttgctgggatgtggtgaaggacttgaggggctactccttttttattggaaggaacaatgcaatgtcaatgtgtgcagagggtgtgccgggaattagggccaactgcgtatactggattggtgggaatggtgaggatcagggcatggtctttgacatggaaactgggaggtctacatcttgcataactcctgtcatcactgtacctgggcatcaacagcgtacagtatgctggtacttattgaacgatatggttaccaccaccagcagcagcagcaacaggggaagaaggaatacgccgacagcagcaacagaatgaagtgatcttagtcttgcaggatccatggtattgcggataacctttctagtgtgaggcagtttgcttgaatgtactatgtatgtctttctttgtcaattgatatgaataagtttcaatttatgtggtaatctggatgatcattctacagtgaggcagcagtttgcttgaatatgctttcataatatccttagttatccattaataatttatttattctgcaaaactgtgtatttctataatatggttgaagtctattttcttcaattttgaaccaaaaaa

SEQ ID NO: 5754 - DNA, 461 bp, Setaria italica
  Peptide Sequence Number=SeqID_71728
cggcacggcggggagttcacggaggggctgcagctcgttgccgtcctgctagccggcaagacggccgagacgttggcgtcgcaccactacgagttccagggccagaagctggggatgcgcatccacgccgcgttgctcgctgccgtgtaccgcaagtcgctgcggctgtccacgggcgcccggcgcgtgcacggcaccggcgccatcgtgaactacatggaggtggacgccgagcaggtgtccagcgtcatgcacgagctccacaatctgtggctgatgccgctgcagatcgccgtggcgcttgccctgctctacgcccacctcggtcccgccgtgctcaccgccgtcgctgccatcgtcgtggtcaccgtggtcgtggctttcgccaacaagctcaacatcgggtaccagaccaagttcctcgggaagcgtgacgagcgcatgaaggccatcaccgacct

SEQ ID NO: 5755 - DNA, 718 bp, Setaria italica
  Peptide Sequence Number=SeqID_71729
accgacatgcccggtgcctggcggcgcggctgccggcggcgacgtttgagctccaggcctacgggttcaccaatgacggcgtcttcttcacggggtacccggtggtggggttccagcaccggatccaggcgtcggggacctgcatcgacggccgcgacgacgccctcctctccgcctgcacgtgggactcccgcatccggggccccttcttctaccagtccggcttcagcgtcgccgtgtccaaggtcccggcgttcgtcgccgacgtgcagcggctgcgcgacctcaacccgcgcgccttctgcgggatggacgccaagatgggggtgctcatgcgctacgtcaaggcctcgtcggcgtacctcggcaaggcggaggactcgctggacttcgacgtcacctactaccggagctacgccgagggcgcgccgcgggcgcacgccgacgtctacgacgagctcgagcagatggcgctgcgaaagtacggcgccatgccgcactggggcaagaaccgcaacttcgccttcgacggcgccatcgccaagtaccccaaggccgccgagttcatcaaggtcaaggacaggtacgaccccgacggcatcttctccagcgagtggagcgaccaggtgctcggcatcaatggcagccccaacgtcgtcggggcacgctgcgccatcgaggggctctgcgtctgctccgacgactcccactgcgcgcc

SEQ ID NO: 5756 - DNA, 879 bp, Setaria italica
  Peptide Sequence Number=SeqID_71730
ttttttttttttagtaagtaactaagtaaccctaactaacagtatttctttcttcaggaaaagagaagcagagtcacacatcagttcaaaattccagaccgaccgccgaagatgagatgaactttaaccacactgaaaatctcaaacaagcatagttaacctttgtaatcatgtattcatgggaaaaccatcgatgtaacatgaggaatcatatcattctcctaatctgattgcaaactcaagttcccaaaagcacaaagagagtactacaattctgttgcagtcaccatcttgcagggaaggccaagaaagctatctgtcttcatctctacacgcttcaagcttgatgttgaagaccatgcaccagaaacttgagctccttatgcgccctgcattcctgctagagtgtagaacatctcgaagggaaagatagtgttggagtctggggtcctgctgaatttgctgactctgccagacctcatctggacactggagattacgccatttacacttacgaagatggtaccagacatctccgcaaagccgatcaccttgagctcggtgatggggtctccgatggtaaatggtatcgacaccctgggcggcgcccatccgccagcagccttccaggaccagaggtggaggctgtatccctccacggcggcaacacccagccccccgtcctcccccgttaccaggaacgtgtccctcctaaccaatggtggaggttccatcaccgacagggcgcccccgcccaaatcgtacctgagaatggtgcggttgttgaggaggtccagggtgaagtagagcgcgtcgccggcgagcaggctcgggcccatcacgtcgggggactccatgagggcgccggggtagactgtg

SEQ ID NO: 5757 - DNA, 343 bp, Setaria italica
  Peptide Sequence Number=SeqID_71731
acggcggaggcgccgaggagcaccacccgccgcgccagcacgtacgcgtccgccgccgaagtagacgggccgccatcgggcgtcgaggcggacgacgcgacgaagaaggccgcgcctcgccgcgcgcggctgcggcggcaggcggcgccgccgaaggaggaggaggggtactggaaggcgagtggcggcgacggcgacaggagaaggtagcccatccagcgccttgacgaaccctagctacctcacggcgccggcctcccgcgtgctagcgggtttgaagttttggggggaggcagtggaaggaagcggctgtggcggtgaagggcggattaggagtcagcca

SEQ ID NO: 5758 - DNA, 648 bp, Setaria italica
  Peptide Sequence Number=SeqID_71732
acccattcggatgcacgacgtagtgtgtcccctccaacaccttagtcgcaatcagcagaggcttcccctcgctgtcctcctcgtatgagagcagcaagaagaagagagccttcctgggcttgcactcatcctcgggtcgccctggaggccacccgaatgtgcctccccacagcccggagtactcccttcctggcacgggcggttgcaccgtgagcttgtagagcgcaaagcggttgtcatgcatgctcggccatgcacggtaagtggacagccgcattctcgcgccgcggatgctcaggccgacactctcaccggtgtgcaggaagtcagccaacagcagatgttttggtgtcgatgtactgagtcctggaattcgctgacactgatcgtgtcaccatctggcgcaggccgttcctgacggccactgctacagcggagaggctcctccgcaggcgaatcctctccccaccgtcgctcggtgacgacggcgctgccttcttcttggcttctagtaggagcccctggacctccggcgtgcgcaccatgcccccgccagcctccctgtgcagccgcagcatcgcctcccgtcgcgccgcgagcaccgggaggtcctcctcggagcgcgcgaagagcggggccgcgacgaga

SEQ ID NO: 5759 - DNA, 300 bp, Setaria italica
  Peptide Sequence Number=SeqID_71733
ccaccgctgtagtgattcaggatcgggacgtactgcgccatggagccggtgacgacggtgtcgaggtacttggtgttgggccagatccgtgcgataatcccggccccgctgtcgccattggaccccgagccctcggcgcggacgaactgggcgagctcggggtccggccggaggatgccggcgaccgcctcgcgcaccgacgggtcggtgacgcggtcggtgagctcgccggcctcgatgtcggcggcgagctgctcccagttctgctggaagagcggacggcccggaggacgccggagg

SEQ ID NO: 5760 - DNA, 333 bp, Setaria italica
  Peptide Sequence Number=SeqID_71734
gccgccgctggccaagctcctgccatgcgcctcgcggttgagctgagctcatacctcctggaaccgccggcccgccacccaccagggacgagctcaagcacaagctaaaattcttcgattattgaaagaagtagtagttgtatttctgagattgatggcacgcacgcgtatgatgagcaactactgcacggaggttcgggagctcaggttcttggagagcctgggtctggagccaagctacatgaaggagatgatgggcgagcaggagcatcacatggctgtcaacttctacccatcgtgccccttgccggagctcccctacggccgcccagc

SEQ ID NO: 5761 - DNA, 946 bp, Setaria italica
  misc_feature (931)..(946): n is a, c, g, or t
  Peptide Sequence Number=SeqID_71735
cgaccggttccggcgagccgcaggcggcgaagagggggaagcagcgacctattcgagcaagccgggagcagggcagagtcgaaagcggcgatgtcgaagcggctggtttcgcggctactggggatgttccagtcgcggacgcaggtgggcgtcgacaagaccggcaaccgctacttcacccgcgtcgaggaggtcgacggcgccatgaaggagagacggtgggtggagttcaagggcgccgaccaggactcgaccaccgttccagtcgagtggatttgctggttgaatggccaaaggaagaaagctccaacgccagaagaattggctgagctggaggcgagacgggaacgtgtcaagcaaaacattgaacttctcaaaaagaaagaagaggaggaaagaaaaggccggcctccgaccagtcaagaaaattgggaaatctgaatctccaaatctccagagttttgtgaagcagcagttccctggtactctagatcaacagaaagggcctgaggaggtatctaggcctaaggatgcaactgatacagaagattctacaacagataatgagaggacttccgaaccaacagggactggtgccacttttaaaccagggacttggcagccaccaacatgaacggcaacctgaatttcagcagatggcgatgctttacctgagcatttttcctttcagtttgctctggaagaatcagttacatgaatttcttcgttcgttggtcagcatttgtgggagtatttggttatcaggaagccatgttgcccctgtatttttgccaaattctcctgtgtaattttgatggaccgttgtaacaactataataagctttaagcaaaggtttaaatcataactctactaggctttataaaacaaaaaaaaactaaaaaaaaaacgtaaagaacgtaacgtacgaannnnnnnnnnnnnnnn

SEQ ID NO: 5762 - DNA, 739 bp, Setaria italica
  Peptide Sequence Number=SeqID_71736
acgaggtggaggcgctgtacgagctgtacaagaagatgagcttctccatcatcaaggacggcctcatccacaaggtgcgccattgtggatacccatctccgtcagaaaaaatcggcttacgctcattgcgctgatccatgatgttttgctgttggtcaggaggagttccagctcgccttgttcaggaacagcaagaaggcgaacctcttcgcggacagggtcttcgatctgttcgatctcaagcggaatggggtgatcgatttcgaggagttcgtgcgatcgctcagcatattccaccccaaagcgcctacatcggagaagacagcgttcgcgttcaagctgtatgatctaagggggacaggttacatcgagaaagaagagctcagggagatggtcttggcgcttctagacgagtcggatctctgtctttcagatagcaccgtcgaggcgattgtggataatacattcagtcaaggggactcgaatggagatggcaagatagatcctgaggaatgggaggaatttgtgaagaagaacccgtcagcattgagaagcatgtcactaccatatttgcaggacattaccatggcatttcccagcttcatagtgcgttcagaagccaatgactgacggaaatactcgggtagagcagagtataagcaagcacaatctcatcagctccgctatgcctaagtcagaacgtagctgcaatgggttgtggcatacactgcagcctaac

SEQ ID NO: 5763 - DNA, 1328 bp, Setaria italica
  Peptide Sequence Number=SeqID_71737
ttttttagatgcaaaggaattccattgatcattttgttcagaagaatacactttttaacagtagtctggacatgaattcctgtaaatagaataacagatgttgacagcaagtatcaaaaaggaacatcccatgttaatacatcaaacactattgacaatcgatctgaatcatgcataagaattagtagtgtaccattctaatatcatttgactttatcatataaatcattactcggccaaaaactcaggatgatgtggggatccaaaaataaaccaaagaaaggcattctttctcggcttcttttgtcctgcctaactattgtaaccagtgatcaattctaggacttcgatgtaactccgagttaaggccagctaaatgtccaacagatccaactgctgctcatcaccagtttggccatcattgcaaaatgcacttccttgcgacgaggggacagacagagtctgttggaatgaacttatgtatgcatgactgttactgttagggccaagccggagacagtaatactgagatacagctctttatacacataatagaatccacctgtgcgcgatgccccagagatttagttctgtgctatttacatgattgagcatatgcaagtatccagatattcgtcatctgagtcgcttgagtcactaggttggaactccaagacctcggtgagcttcttgccatgactatccttccactgcacacgtcggttggacggcttgcggcccttccgcgccatgccgccgggaggctgccgcggcagaagtgccttgcgctcgccggcagctgcgtcgtccttggagccggcgcccgcgaccgacgcggaccgtgacaccgccacaggagaggaagggggcgggttcttaccgctgccgttgcacgacgcgctcctgaggatgcggcgatccatcgccgggtggcatcaactaggagactgattcattcgattcgcttcctgcggctcgcgtccgaagcctctcaaattggcaactagtattcgatgcgaatatcgtagggtaaaatctgagccggatcttgaggtcgagtcgaatttggcgcaaaatcggaggagggcaggggatttccgaatcgaaggaggtggatttggagccaaaggcgactcaagattgcggaaattttgagatgctggattgggttgggttggagaattggtggggaggaatcgcgggcaagcgaatcaggcgagcgcgttgaggcagcgcactagggagggaggggggcgcggcgcgggcaacgccttggccctttgggggtggcgatggcgacgcctaacccgcgcgcgtgtagcttctct

SEQ ID NO: 5764 - DNA, 488 bp, Setaria italica
  Peptide Sequence Number=SeqID_71738
tagtgaccagcagaactaccagacaaaaatacactccaatctagtggtctccacagttcctgggtgcaactgcaaatgcaaggtggaaagaattacacggtgtctgtctataatgccctattcacatttcagggtacaatcgacggcgcaaaaagtcctacgaggattattacaacatttactgtgtcagagaacatctattgcttgggtgctcctggtggattcgacttgttagcagcaccactcgcggctgcgccagcctggctgctggacggtacatttgctgcactgttagaaccattcaccgccacactaacctggctgctggactggggattcgccgccctgttagcgccattcaccaccacactagcctgtctgctggactggggattggccaccctgttagcaccattcaccgccgcgctagcctggccgctagatggtggattcgccttgctaccaacattcaccaccacgctagcctg

SEQ ID NO: 5765 - DNA, 836 bp, Setaria italica
  Peptide Sequence Number=SeqID_71739
cgccgccgctgcctccgcactgccccttcttcatgttcgacaccagcagcgtcagcccgccgtcgtcgctgacgtcgccggtggcccagctggcgcagcacccgttcctcaccttcgcggcggcgtccatggacgcgccgggctaccagctgcctcccctggtcgacggaatgggcatgggcatggcagccatggattgcggcttgggtgaggaaagcagaggcaacaatagccaagcggcggcggccatggcgaacggcggcggctggcagcagcagaagcaggaggaggagcagctagggcaagaccagtgggacgaggagtcggcgcagcacctgctgatgtgggacgatgaccaagaactaacaccgtccaacctggaagccatggaaagtggtgctcactccctcctttttatgggaccaaatgaccatgaatgatatactaagctggtgtgtgcatatgcatttttttcaattccctccttgatacctttcttgatctgatctgttctgatcccttttctagctctcacccgatcgatctgatctgtctatacatgaaataatgaggttttccaaggcgcataatttatttgatggattttttctctctttttttttccattttgattgatttaacctttgttttcttttttggtttttggagtgaagactaaaggagtgtgagttaattgggtttttgtaaagagaagttattgcatggatgcatgcatgcatatgttcatgcatggcattgcgcttggagtgtaatttgattgatgtatctaagtgaatttaaaataataagcaaagatgacacaaaaagagaagaac

SEQ ID NO: 5766 - DNA, 371 bp, Setaria italica
  Peptide Sequence Number=SeqID_71740
acgaataggaacctacgcgctcgccgtggcggcgctggcgctgcggtgcgtggcgagggagccccgcgcgcgcccggccatggacgaggtcttcgtctccctctcggcggtgtacaactcgacgctggactgggatccctctgattacggcacctcaggatcttcgatggtcgggaggtagaagagattagcgtataaattgagtttgcatagaatgaggacgagttgggatcgagctgtactatagcaagaacgaagaaatgtatcattaattcatcaatttttgttacaaacttacaattgctccagggaaaatgtaaagaataatctgctgaatatctggggtcttggaattgatcaactaaaaaaaa

SEQ ID NO: 5767 - DNA, 1458 bp, Setaria italica
  Peptide Sequence Number=SeqID_71741
agaatacaatcaaacacaggaaatgggaaaaacagaagtacacatgtgttcaacagaggaacaacaaattggattatgaatgttttcatgaaatcattcattgataaatgcggggggaaagaactataatctcttttgttacagagatcaacacaattactattgactcatggtggaccatatgaatcttacctcatctgaactaatgaaaagaatactagttaggacctccaaagtaacgaggttgtttaccaattctgggcagctgctttcagctaccaatctctgaccgaatgctttgctgaagaccaccatctctgactttgggaacaaaaatttcaagaatacaaaagaatattattatttactaggacaaataactattcttcggtaactaatccagcaaaatgaaggtttcatccaccttggcagtaaaggcctcccttaacagttacttcggctccaagtgcatttgctgctcaagccaagaagcaatcatcgtctgatccactaaatcaccctgactgctcaggtcaggcctactcattggtcgagaggccatgcctgccatttcgcccctcttgccattcagctcagcattgttcaccagtgactgcacccatgacacatctggttcctctcctgcagctccaggttgcgcaggatgcctcaaacggaccagctcttcgttatcaacaccccagtcaaccttactctttggggtaccaatgttaccccatgaagcattaagattccgtggcgaaccaacagatggcaactgatgcttgttcatggaagagaaatgatcaaacatatcacgctgtggctgtgtgacagtagctccaacacgggcacttaggggagatgttggctccatggtccgaggggaccgaggagacatgccaccaaatggagaatggataattgacggatcgagaccccttggagagaacatcctgttggtattaacaggtgacaggagacccttttgttgatgatgaaacttgtttagaagggccgatttgtgtgctggtgagtaaactgagtgagcttggtcattggtgaaccttggtgacattgccacgtctgaagcatacatctcctcgaggttagatggagccattgctgtcggatgaatgctcagaccagtagaaagacggggctgggatcggctgctctgtgggaggctgagcgctccaaggtattgtgattcccattcaaggagcgcgccaaggtcatcagcctgtgcatcccttgcattgaaagaagaacgcagcctgctaccttggagccaatgagcagcagctcctccaccattgttagcagcagatggcgacagagggggtggcacaaagtgcctggtaggagatccaggtagcagcccaagagcagcagcagcagtcatgtcaatagatgaagaggcacggggagacagcaaacctgcgccactattgtgag

SEQ ID NO: 5768 - DNA, 668 bp, Setaria italica
  Peptide Sequence Number=SeqID_71742
tcaccgccgcggccttcgcgccggccgccgtcgtcgcggcgcctggggcgggcggcgcgggggctgccgaggaggcggccccggtcgagcagacggagttcgatgtcgtcatcgatgaggtgcccagcagcgcgcgtatcgccaccatcaaggtcgtgcgcgcgctcaccagcctcgcgctcaaggaggccaaggacctcattgagggcctccccaagaagctcaaggaggccgtcagcaaggacgaggccgaggacgccaagaagcagctcgaggaggtcggcgccaaggtgtccatcgtgtgacactagagcaatgtgagtaaacccccttttcgtttgacatggcgtgtatgttccaccaattggagaatgatgtactttccagatgcatatatctacttagggagctgaacgccggagttggttgtgaaaattatgtgttgtaatcctagattgtttcaagagttccattcgtcgaagccgttgatgcttacgggataccttacatcattgtattttctacataatcttttagtcttaaagttgtatttacatcaaaacactagttcaccggaacgtgcaggctacagccaaaatccttggcatggtatcctgtcaggtggcatgcagcgagcagcccaagcccagttcggatttgtcaaaaaa

SEQ ID NO: 5769 - DNA, 848 bp, Setaria italica
  Peptide Sequence Number=SeqID_71743
gaaccgcacttacatggacgtcgtccgatcatgcctcgggcctagagatgtggtggtgtgcgggctcgcacagtacgtgatcctctggggaacgatggtgggctacaccatcaccactgccacaagcatcatggccatcgcgcgcacggactgccaccactacaggggccacgacgcggcctgcgtctcgtcggggacgatgtacatggtggcgttcggcctcgccgaggtggtcctgtcccagttcccgagcctggagaagctcacgctcatctcggtggtcgccgccgtcatgtcgtgcacctactcctccgtcgggctgttcctgagcgccgccaagctcgcttccaaccaccgggcgcacggcaccctcctcggcgtcaagattggcgccgccgccggcgtgtccgcatccaccaagacgtggcactcgctgcaggccctcgggaacatcgccttggcgtacacctactccatgcttctcatagaaatccaggacactgtgaagtcgccgccgtcagagaacgtgaccatgaagagggcgagcttctacggcatcggcgtgacgaccatcttctacgtgtctctcgggtgcatcgggtacgcggccttcggcaacgccgcgccggggaacgtgctcaccggcttcgacgagccgttctggctcgtcgacatcgcgaacgtcgccgtggtcatccacttggtcggagcatatcaggtgtacgcgcagcccatcttcgcgtgctacgagaagtggctggcggcccggtggccggagtcgtccttcttccaccacgagtacgcggtgcgcctgcccttcgtcagcggcggcggcggccgcgcggcgc

SEQ ID NO: 5770 - DNA, 307 bp, Setaria italica
  Peptide Sequence Number=SeqID_71744
cgctgttcctggcgacgggtacacctcggggcggatccaccgcttcgaccacgacgccggcgtccgcgtcgtggtcgaagcggtggatccgccccgaggtgtacccgctgttcctggcgacgggcgcggccgtcggcatctgcgcgatgcagctcatccgcaacatcaccggcaaccccgaagtcaggtaaggaatccgaccaataatctctcatcgcggagctcttttcctctaaattctataggattttggttgagatcgatgattctcgaaagcacgagctagccgcgatgttatcgatctata

SEQ ID NO: 5771 - DNA, 653 bp, Setaria italica
  Peptide Sequence Number=SeqID_71745
gctagtcttgcgagccacgaaagaaacagatctagtatttgctagccagttcgtctctcgccgccgccggccgtcttcgagatccgatccggtcgatcatcccatggcgtcggcgtccgcgtcgtggtcgaagcggtggatccgccccgaggtgtacccgctgttcctggcgacgggcgcggccgtcggcatctgcgcgatgcagctcatccgcaacatcaccggcaaccccgaagtcagggtgctcaaggagaagcgtgcggcgggcgtgctggagaaccacgaagaggggaggaggtactcgcagcacggcttcaggaagtacatcgacggcaagaagccagagatcatgcagagcctcaactcgtggatggcggacccaaaggagtagatcgtcgtggcagcagcaccgatccataccggccgacggatgatttggtcggccgcaccatttgatataattcttcttgatgatgatttgataagttgttaccgtgtgattgtcctctcggtacgtttttgtatcaccatacatatatatatgttcttaacaaacaaacatgcatggcatgatgtggtggcctggctgtgaacaggcctgttgaaagttttgatctcatatggacgcagatataatgtttcgtctcaaaaaa

SEQ ID NO: 5772 - DNA, 908 bp, Setaria italica
  Peptide Sequence Number=SeqID_71746
gtctccccttcccccccttcgcggctaagtgctcgagccccgaacaaatctcgcggcgattggaatccccgaacgccgagagcagaatcagcggaagaccacgccctcgcttctgatctccggccggcgcgaccccaggccaatcggagatgcagcagggggacggcacggaggcgcaggtcacgtgggaggaccagcagaacatcaaccgcttcggccgcctcaacaaccgcctccacgagctccaggacgagatcaagctcgccaaggaaacaaatgaaaaccttgacgatgctgggaacgagctcatcttgtcagatgaagatgtggtgcgcttccagattggagaagtgtttgtccacatgccaagggatgacgtggagactaggctggagcagatgaaggaggatgcggccaagaagctggagaggctagaggaggagaaggaatcaatcgtcgcccagatggccgagctgaagaagatactgtacggcaagttcaaggatgccatcaacctggaggaggattgacagtgagtccttgagctgttgcgcgatagtttttcaggttctgtttttattcccccgtcctcccaccacattagtctggtgatgctagcttgtgtaacagaggagagtttgaagcttcggaagctcgtttaccccacaggatgcacgaacttggttggagtgagtggtttgattccgagcgtgtttatgaattgaagtgaatgggcgtgagcctcaggcgtacatccagtcatgatcttttcgtcagtttgatttttcactcgtgcaggtcaccaaacattttcccagcagacatgttgatcaaaatctgtgtgaatctgtgatccgtctgtgcaagaaaacactgaactttggcacgtcgtgctcctactaaaaaaa

SEQ ID NO: 5773 - DNA, 406 bp, Setaria italica
  Peptide Sequence Number=SeqID_71747
taaaatcagtgttgtgatggctgagaaatcagcacccagagcaccctcgttatggtcatggtggtggccgtggtggtggctatggtggcggtcgcagggacagttacagagatgggggtggacatggacccaatagaaaccagggtggtggttcgcgttcacgaccatactgaaaacagcaaatgttattattatgattgtcttctgtgagaaaccatttctattcctgtcctatggacttgtactctcatacaggcgcataaggtaggttgtcagctttcattattagacttatgttaaattgtcatacaccagtcttggtcggatgtttgtttgtccaaaagtgattgatctatgttatatgaatttttgcatagaggcagatggatataagctccaaatgctg

SEQ ID NO: 5774 - DNA, 480 bp, Setaria italica
  Peptide Sequence Number=SeqID_71748
gtcttctgtgagaaaccatttctattcctgtcctatggacttgtactctcatacaggcgcataagaggcagatggatataagctccaaatgctggtaggtttgagatgttatttcagccggtggatcactcctgtaagctttggattttgctgcgaagaacaggcaggccggttttgtcatgtgataggtttatcaggtgtatattaaacgtatcaactagcatgcacagaatgcaccaaatccgttgcaattcacacggacgtgggattgaagtagaatgtagcatgtactaagtttaggttcctgctaacttctgatttcgtataggtagtgtgacttgtatgcctcggtaaaattttgatcgcacagaacctttttcttttggggtgttgatttacatatttacatggttctgccctagtgaaaaagaaaaaaaaaaaaaaactaaaaaaaacgtaaaaaagagaactagaccaacg

SEQ ID NO: 5775 - DNA, 1472 bp, Setaria italica
  Peptide Sequence Number=SeqID_71749
acggatccgacgactaccgtggaggcggaggcggcggctttggtggcggaggccgaggtggaggtggaggtggccgaggcggtggtggccgcgggggaggacgcgagggcgattgggtttgccctgatgcgagttgtggcaatgtgaactttgcgaggaggactgagtgcaataagtgtggagcaccttgcccaagtggaggtggaggcggcggcggcagtggtggttacaataaatctggtggaggtggtgggagctacaaccgtggtggtggtgattacggttctggaggaggttggttttgacagagatggtggtggtggtgggagaggaggatacaaccgaagtggtggtagtgaccgtggttttgatgaccaccgtggtggcagaggtggcagttatgggggacgagatcaggaaaaccaaaggggcagtgaaggtggctatggacaagctcctccacaagggcctccttcctatggtgggcctgttggtgactacgtggcgcctccgagctcctatggaggcaacaatgcctatggttcagattctgcagtgccacctcctaatagctatagtggtgccccaggctcatacccaccaagctatggtgcccctcctccaaaccaatatggcggtggcgccccaggagggcaaggtggtctacctcctacatatgatggtggctatggtggtcggcccatgcctgggggtggaggttctgggggtgcaccgccaccttatcatggtggtggcggcggcggaggcggtggttatactggtagtgctgcttctgagccagctgcaaaggttaagcagtgcgatgcaaactgtgatgagacgtgtgacaacgcaaggatttacatctcaaacttgcctccagatgtcactgttgaagaattacaggagctatttggaggaatcggccaggttggaaggatcaagcaaaaacgtggctataaagatcagtggccctggaacataaaaatctatactgatgactctggaaaagcgaaaggagatgcttgccttgcttatgaagatccttctgctgctcattcagctggtggattctacaacaattatgacatgagaggctataaaatcagtgttgtgatggctgagaaatcagcacccagagcaccctcttatggtcatggtggtggccgtggtggtggctatggtggcggtcgcagggacagttacagagatgggggtggacatggacccaatagaaaccagggtggtggttcgcgttcacgaccatactgaaaacagcaaatgttattattatgattgtcttctgtgagaaaccatttctattcctgtcctatggacttgtactctcatacaggcgcataagaggcagatggatataagctccaaatgctggtaggtttgagatgttatttcaggtgagtgccgaactgttatgattgcttacctatatatttctgttttctcctcttctt

SEQ ID NO: 5776 - DNA, 244 bp, Setaria italica
  Peptide Sequence Number=SeqID_71750
aaatcaccgacggagagctcgccctagtgaaggttgtggaagtcctgaagcgcgtagacggcgcgctggctggtgttgttgaggaagaggccacgcacattgagctagagtaagtgcgccgtggtgcggcgctagaacaccatgtcacgaatggtcttggacacggtgaggtagatccaggagacaatatagtggtcgatctgtgtccactcgacgtcgtgaagacgaaggcgtgcgtcgacag

SEQ ID NO: 5777 - DNA, 246 bp, Setaria italica
  Peptide Sequence Number=SeqID_71751
gaatgtcgccactttcctagttcaggctgggattgcgaagaaagagaacatcaagattcacgggttctaagggacctgctgtaaatgcgtgcgtgcacaatattgtgcgctaccgcatattgggaagcttgaagcagtaataatatagttactgcttttccatataagaacaaagaagtattgtgctattatcaagtgtgttttgcttgatgcaagttgtgttttctcctcattatgcgccaccag

SEQ ID NO: 5778 - DNA, 243 bp, Setaria italica
  Peptide Sequence Number=SeqID_71752
ctgtagtccaggacccagagctaggccaggtcattcagctccaaggcgatcagcgtaagaatgtcgccactttcctagttcaggctgggattgcgaagaaagagaacatcaagattcacgggttctaagggacctgctgtaaatgcgtgcgtgcacaatattgtgcgctaccgcatattgggaagcttgaagcagtaataatatagttactgcttttccatataagaacaaagaagtattgtg

SEQ ID NO: 5779 - DNA, 275 bp, Setaria italica
  Peptide Sequence Number=SeqID_71753
ctaccaatcatacgaatcatagggggaaactcgcacgcatcccggagactacgatccgagatccgttcgttcgcagagctaattcgaggcgtgacgcgatcgaaaccctccagatccccaaatcccacgggctaagaacgaggcggattgaatcagggagaagggggagggggaaagggcgttggtgctcacctttctcttgccgggaggagggagagagccggcgtggagcgcacgcggttggaggcgagaggcggataagacttgaccaggag

SEQ ID NO: 5780 - DNA, 294 bp, Setaria italica
  Peptide Sequence Number=SeqID_71754
aagaaagagaacatcaagattcacgggttctaagggacctgctgtaaaatgcgtgcgtgcacaaaagaacaaagaagtattgtgctattatggaaaagcagtaataatatagttactgcttttccatataagaacaaagaagtattgtgctattatcaagtgtgttttgcttgatgcaagttgtgttttctcctcattatgcgccaccagcgtatgggtatggcaacaatggagtgttattattgccaacttaataaaagtactctctgtttggctattaaaaaaaaaaaaaaa

SEQ ID NO: 5781 - DNA, 237 bp, Setaria italica
  Peptide Sequence Number=SeqID_71755
atcaagattcacgggttctaagggacctgctgtaaatgcgtgcgtgcacaatattgtgcgctaccgcatattgggaagcttgaagcagtaataatatagttactgcttttccatataagaacaaagaagtattgtgctattatcaagtgtgttttgcttgatgcaagttgtgttttctcctcattatgcgccaccagcgtatgggtatggcttttattaagttggcaacaataacac

SEQ ID NO: 5782 - DNA, 299 bp, Setaria italica
  Peptide Sequence Number=SeqID_71756
agttcagctacaacaagatcctcaaggatctcaagaaggaattctgctgcaatggtactgtagtccaggacccagagctaggccaggtcattcagctccaaggcgatcagcgtaagaatgtcgccactttcctagttcaggctgggattgcgaagaaagagaacatcaagattcacgggttctaagggacctgctgtaaatgcgtgcgtgcacaatattgtgcgctaccgcatattgggaagcttgaagcagtaataatatagttactgctttccataatagcacaatacttctttgtt

SEQ ID NO: 5783 - DNA, 262 bp, Setaria italica
  Peptide Sequence Number=SeqID_71757
gacctgctgtaaatgcgtgcgtgcacaatattgtgcgctaccgcatattgggaagcttgaagcagtaataatatagttactgcttttccatataagaacaaagaagtattgtgctattatcaagtgtgttttgcttgatgcaagttgtgttttctcctcattatgcgccaccagcgtatgggtatggcttgtatggagtgttattgttgccaacttaataaaagtactctctgtttggctaaataaaatactcacactaaaa

SEQ ID NO: 5784 - DNA, 331 bp, Setaria italica
  Peptide Sequence Number=SeqID_71758
taggaagtggcgacattcttacgctgatcgccttggagctgaatgacctggcctagctctgggtcctggactacagtaccattgcagcagaattccttcttgagatccttgaggatcttgttgtagctgaactctttctttagtccctgaacagtagtcagactctttctgccgttgcgttgctggatgcgcacatgcacataatcctttgttccgggaccagctgtaaatgcgtgcgtgcacaatattgtgcgctaccgcatattgggaagcttgaagcagtaataatatagttactgcttttccataatagcacaatacttctttgttc

SEQ ID NO: 5785 - DNA, 405 bp, Setaria italica
  Peptide Sequence Number=SeqID_71759
ggatctcaagaaggaattctgctgcaatggtactgtagtccaggacccagagctaggccaggtcattcagctccaaggcgatcagcgtaagaatgtcgccactttcctagttcaggctgggattgcgaagaaagagaacatcaagattcacgggttctaagggacctgctgtaaatgcgtgcgtgcacaatattgtgcgctaccgcatattgggaagcttgaagcagtaataatatagttactgcttttccatataagaacaaagaagtattgtgctattatcaagtgtgttttgcttgatgcaagttgtgttttctcctcattatgcgccaccagcgtatgggtatggcttgtatggagtgttattgttgccaacttaataaaagtactctctgtttggctaat

SEQ ID NO: 5786 - DNA, 421 bp, Setaria italica
  Peptide Sequence Number=SeqID_71760
ggtgctggtcccggaacaaaggattatgtgcatgtgcgcatccagcaacgcaacggcagaaagagtctgactactgttcagggactaaagaaagagttcagctacaacaagatcctcaaggatctcaagaaggaattctgctgcaatggtactgtagtccaggacccagagctaggccaggtcattcagctccaaggcgatcagcgtaagaatgtcgccactttcctagttcaggctgggattgcgaagaaagagaacatcaagattcacgggttctaagggacctgctgtaaatgcgtgcgtgcacaatattgtgcgctaccgcatattgggaagcttgaagcagtaataatatagttactgcttttccatataagaacaaagaagtattgtgctattatcaagtgtgttttgcttgatg

SEQ ID NO: 5787 - DNA, 380 bp, Setaria italica
  Peptide Sequence Number=SeqID_71761
aaggattatgtgcatgtgcgcatccagcaacgcaacggcaagaaaagaagtactagaactaactgttcagggactaaagaaagagttcagctacaacaagatcctcaaggatctcaagaaggaattctgctgcaatggtactgtagtccaggacccagagctaggccaggtcattcagctccaaggcgatcagcgtaagaatgtcgccactttcctagttcaggctgggattgcgaagaaagagaacatcaagattcacgggttctaagggacctgctgtaaatgcgtgcgtgcacaatattgtgcgctaccgcatattgggaagcttgaagcagtaataatatagttactgcttttccatataagaacaaagaagtatt

SEQ ID NO: 5788 - DNA, 503 bp, Setaria italica
  Peptide Sequence Number=SeqID_71762
ttgttctttggttactttaaaagttaaagttagttttcttagttctttactaactaagtattccttctaaggtattcttcaagaaggaattctgctgcaatggtactgtagtccaggacccagagctaggccaggtcattcagctccaaggcgatcagcgtaagaatgtcgccactttcctagttcaggctgggattgcgaagaaagagaacatcaagattcacgggttctaagggacctgctgtaaatgcgtgcgttcacaatattgtgcgctaccgcatattgggaagcttgaagcagtaataatatagttactgcttttccatataagaacaaagaactattgtgctattatcaagtgtgttttgcttgatgcaagttgtgttttctcctcattatgcgccaccagcgtatgggtatggcttgtatggagtgttattgttgccaacttaataaaagtctctctgtttggctataatcctaagaaaaaaaaaaaaaaaaaa

SEQ ID NO: 5789 - DNA, 444 bp, Setaria italica
  Peptide Sequence Number=SeqID_71763
caaccaagtttcatgtctgatctcgacgtccagcttccatctgccttcgatccgtttgctgaggcaaatgctgaggactccggtgctggtcccggaacaaaggattatgtgcatgtgcgcatccagcaacgcaacggcagaaagagtctgactactgttcagggactaaagaaagagttcagctacaacaagatcctcaaggatctcaagaaggaattctgctgcaatggtactgtagtccaggacccagagctaggccaggtcattcagctccaaggcgatcagcgtaagaatgtcgccactttcctagttcaggctgggattgcgaagaaagagaacatcaagattcacgggttctaagggacctgctgtaatgcgtgcgtgcacaatattgtgcgctaccgcatattgggaagcttgaagcagtaataatatagttactgc

SEQ ID NO: 5790 - DNA, 443 bp, Setaria italica
  Peptide Sequence Number=SeqID_71764
tgaatgacctgtagacgggcaaacacatcatcagtaccacaaccagcagagaacattgtgaacttgaaaagcattggtgcttcattgtacctggcctagctctgggtcctggactacagtaccattgcagcagaattccttcttgagatccttgaggatcttgttgtagctgaactctttctttagtccctgaacagtagtcagactctttctgccgttgcgttgctggatgcgcacatgcacataatcctttgttccgggaccagcaccggagtcctcagcatttgcctcagcaaacggatctatcaaaagaatgacatacgatcagacaagcatgcacacaaacaatactaaacagaagcatatccaagatgaactaatttatgcacgttctcactcattcagtaaaacaatagaaagccacatcatcatgccatctgaaa

SEQ ID NO: 5791 - DNA, 936 bp, Setaria italica
  Peptide Sequence Number=SeqID_71765
gcttcccaatatgcggtagcgcacaatattgtgcacgcaacgacaatttaacaagacaaggtcccttagaacccgtgaatcttgatgttctctttcttcgcaatcccagcctgaactaggaaagtggcgacattcttacgctgatcgccttggagctgaatgacctggcctagctctgggtcctggactacagtaccattgcagcagaattccttcttgagatccttgaggatcttgttgtagctgaactcttctttagtccctgaacagtagtcagactctttctgccgttgcgttgctggatgcgcacatgcacataatcctttgttccgggaccagcaccggagtcctcagcatttgcctcagcaaacggatcgaaggcagatggaagctggacgtcgagatcagacatgaaacttggttgttgaagttggattggcaccgagccgatcaggctttgatctgttggtctttatgcagaaactttctcttgccgggaggagggagagagccggcgtggagcgcacgcggttggaggcgagaggcggataagacttgaccaggagatgtgcatgtgcgcatccagcaacgcaacggcagaaagagtctgactactgttcagggactaaagaaagagttcagctacaacaagatcctcaaggatctcaagaaggaattctgctgcaatggtactgtagtccaggacccagagctaggccaggtcattcagctccaaggcgatcagcgtaagaatgtcgccactttcctagttcaggctgggattgcgaagaaagagaacatcaagattcacgggttctaagggacctgctgtaaatgcgtgcgtgcacaatattgtgcgctaccgcatattgggaagcttgaagcagtaataatatagttactgcttttccataatagcacaatacttctttgttc

SEQ ID NO: 5792 - DNA, 574 bp, Setaria italica
  Peptide Sequence Number=SeqID_71766
caaataatgcggtagcgcacaatattgtgcacgcacgcatttacagcaggtcccttagaacccgtgaatcttgatgttctctttcttcgcaatcccagcctgaactaggaaagtggcgacattcttacgctgatcgccttggagctgaatgacctggcctagctctgggtcctggactacagtaccattgcagcagaattccttcttgagatccttgaggatcttgttgtagctgaactctttctttagtccctgaacagtagtcagactctttctgccgttgcgttgctggatgcgcacatgcacataatcctttgttccgggaccagcaccggagtcctcagcatttgcctcagcaaacggatcgaaggcagatggaagctggacgtcgagatcagacatgaaacttggttgttgaagttggattggcaccgagccgatcaggctttgatctgttggtctttatgcagaaactttctcttgccgggaggagggagagagccggcgtggagcgcacgcggttggaggcgagaggcggataagacttgaccaggagctgtcccgtttccacccc

SEQ ID NO: 5793 - DNA, 497 bp, Setaria italica
  Peptide Sequence Number=SeqID_71767
acgtatcaccttcatgctaacgccatcaagtaactcagtgaaagcgtcagccagtgtggggtagatcatgatggagggccctgtcggatcccctcggagattatgtcatggattaggccagataatggtcaaacatccattaattaactgagggagatccacattgggttttgctcactggctaaacccagcatgcagcatagcgacataaacaagcaatgccgctcgcacgcgcgcagacagcaccagacgactccatcagggcaaggtacagcacaccataaggcaacttcatggagctacaggtgaattgaaggattcagggtgctactgctcctttatgcatggatgaactacaggtttgacagtctgaagactaatatagtctcatgttacatctattgcacgtgtagataataataagtgagttattttacaagaaagaattacattgcgaaaaaatataatcacatgaaactctagctttaagacaaggg

SEQ ID NO: 5794 - DNA, 268 bp, Setaria italica
  Peptide Sequence Number=SeqID_71768
tcttgtacttctcatagatgtgagatagttcagtgtagtttgctgttgttaacccacattgagaagcaacgttaacaatcagcaagaccttattcttgaactttttaagaggaacatcttttccatcaatgtccttgacggtgtagtcgtagatgctcttctcggttgcggcggtggcgtaggcgacgccgggcgcccgcctgcgcgccgtccgcggcgccgcagcgacggagggcccagcccagcccgtcgggtggtgacgggagcc

SEQ ID NO: 5795 - DNA, 841 bp, Setaria italica
  misc_feature (11)..(11): n is a, c, g, or t
  misc_feature (29)..(29): n is a, c, g, or t
  Peptide Sequence Number=SeqID_71769
ggtctagttcnctttttttagtttttttntttttttttttttttttcttattttgaattgaaggattcagggtggctactgctcctttatgcatggatgaactacaggtttgacagtctgaagactaatatagtctcatgttacatctattgcacgtgtagataataataagtgagttattttacaagaaagaattacattgcgaaaaaatataatcacatgaaactctagctttaagacaaggcctatgtacagatactcaactggaagacttggaagtacttatgccgcaatgagtttctggatgtccttctcaatctggaacggtgaagttgtaggtggatatctctccacaactttgccattcttgtccactaagaacttctcaaaattccacttgactagatcgcccaaaaatcctccagcactggacttcagaaatttatagatgggggctgtattaggtccattgacatcaaccttgtcaaaaataggaaattcagctttaaatcttgtacatgcaaactgctttatctgagaattcgatccaggttcttgtgcgccaaattgattgcatggaaatgcaagaatctcaaacccttgagtcttgtacttctcatagatgtgagatagttcagtgtagtttgctgttgttaacccacattgagaagcaacgttaacaatcagcaagaccttattcttgaactttttaagaggaacatcttttccatcaatgtccttgacggtgtagtcgtagatgctcccctctgccgccggagcggcagcctccttcgtgcggctcccgcaccacccgacgggctgggctgggccctccgtcgct

SEQ ID NO: 5796 - DNA, 442 bp, Setaria italica
  misc_feature (32)..(32): n is a, c, g, or t
  Peptide Sequence Number=SeqID_71770
cgatggccaaacaacgcaacacctttgtgttnccggggtcgaagagggagaagaggcagtaccggagcaaggcgacaacgccaccaatgagggggaggtcggtgtcctcctcttggctcaggatttgctcctccaggtagtcgatttcaacgcggcaagaagcggcgtccgagatgccgatttgggcgaggagggatttgagcttggaggggtcgggcggctggccgagctcgaagtggcgcagggcggcgaggaggcggtcccggagagcggcctcagcgaggtcgtggtactgacccggcgcgcgtcggcggcagcgggcgcggagcaggtccaggtgctcggccgcgtctcgcgaaaggcagagcgaggcggcgggaagaacgtcgaggacgacggcgagctcggcgtcgaggtcccggaaggaagcggcgaggtgggg

SEQ ID NO: 5797 - DNA, 412 bp, Setaria italica
  Peptide Sequence Number=SeqID_71771
tgtagccactagtgagagtgagaccatcagaagttcagagtcgtcagacacaaacgaagtccaatcatatagaaaagtcgccctcagtttgatattcaggagctatgtagccaaatgttccgacaactcgcttagtgtttgccttttgctggttttcgccaaatatcttggccataccgaaatctgctattttgggtctcatctctgcatccaacaagacattgcttgctttaaggtccctatgtatcactgtcagccttgaatcttgatggagatacagaagtcccctagccacgcccttgatgatcccgaattcttgtcggccaatccagcagagatttcctttcgctgtcgaaaaggatagcatctaggcctttattggccaagtactcatatatcagcaacctctcag

SEQ ID NO: 5798 - DNA, 1092 bp, Setaria italica
  Peptide Sequence Number=SeqID_71772
aacaaagagtggaacattttgttttcaagtacaagctgctgagagagccaggacaacctgatggttttgcaatttggaagatgtcccagaaatggctagagaatccaacaactagaggcagtgttttacaccccgatctatcttctggtgcagaaaatctcccagtgtttcttgttaatgacattgacaatgatgaaggaccgcatcatttcacctatattactcagatcaaacacttgaaaccacccagctctataaaacctgtacagggttgcacatgtcttagtgtttgtctgcctggtgatgccaactgcagttgtgcacagcgtaatggaggcaacttaccgtatggctcatcaggattgctagtctgccgcaagcctatggtttatgaatgtggtgaatcctgtcggtgttcattcaactgccgtaacaaggtgacccaaaaaggagttaggatccactttgaggtctttaagaccggaaatcgaggctggggtcttcgttcatgggaccccatacgagctggttcatttttatgcgagtatgttggtgaggctattgatgatgctaaatgtgatttgaatagtcatgaggatgattatatgtttcaaacattgtgtcctggtgagaagactttaaaatggaattacggacctgaattgataggggagcaaagcacaaatatttcagctgatacctttgagcctctgcctcttaagataagtgcaaaaaaaatgggaaacgtctcgcgtttcatgaaccatagttgtgctcctaatgtcttctggcaaccagttcagtttgaccatgaagatgatcatcgcccgcatatcatgttctttgcattgaagcacattcctcccatgacagagttgacttatgactatggtgatattggaactgattctagtggtgttcctagagctaagaactgcctttgtggatcctcgaactgccgggggttctttatctgactacagaagatgtgcattctatctaccaacattaccatcagttagatctttttgggcgttacagaagtaaaagcaggaccggttcaaacggcttacgccaagactgccattgtgg

SEQ ID NO: 5799 - DNA, 312 bp, Setaria italica
  misc_feature (280)..(280): n is a, c, g, or t
  Peptide Sequence Number=SeqID_71773
cgtgccgcagacaggtttgagaagagtcgtcctagtccacgtgctgcgatggtgcattcggatcctcatgccccatacaggtttgagacgagtcgtcctagtcctcacgactagtcctcactggcggtgaaagcaatggacgtggactcatgccccaacttgacggtgatagccatcgcggagaaatccccctgccttgatccccgtcttcttcgcaaatcgagtgtggttataacttataaggaaataattaaagatgggtggtgccctcctgtaaacntctattgtacgctacaaataactgtgcttata

SEQ ID NO: 5800 - DNA, 603 bp, Setaria italica
  Peptide Sequence Number=SeqID_71774
gccgtgccgtctccgcctccgcgccacgcgccgtcgcagcgaatgctcctcagctaccgaagcatggcgacggctgcttcgcttcaccgcggggcctcgttgagccgacgcagccgtcgctttcgccgaggagcgcgatccgagtcgaccacccacgacgattgcggtatgcttgcttgccctggggatctagggtttgatcccggttcgcttgctttgccttggattggaattcctggattcgattcgattgcttcgtgtagggtttaggggtttgcccccactgttgtgctgttcgtggtgactcgcagcttctctgaattgcgacgtggctgctctcctcgtcggttagctagttttggcctgttttgatctattgcgccctcaccctatggttccggtatttctcgtcgtaaggttcaatccggcctagattgaaaatgttgctgcccgttttgttggcttcagatgtgttaggctgttgtattggacaagaattgtaactgttgtgtggtacggtttgatagtacgggatgtcttgcagtgcgtattatttgaaactctgcatattttgatgctttagattgtaaactgtaaaccatg

SEQ ID NO: 5801 - DNA, 299 bp, Setaria italica
  Peptide Sequence Number=SeqID_71775
ccgcgacgccatggcgcaggtgtgccgcgccatcgaggagctccggctccgcgtcatcaccgccagcatcaccgccgtcgccgggtgcctcatgcacaccgtcttcgtcgaggtagatcagattgatcaggtccggatgaaggagatgattgaagttgctttgacccagctcgacgctaccagaagcccccctagttccatgagctgttagaaggagggctaaccatactaggctacgatggtttgccgtctagtttatcgatcgtcaactccgtcccgcgttcataaggagtatgttg

SEQ ID NO: 5802 - DNA, 728 bp, Setaria italica
  Peptide Sequence Number=SeqID_71776
cggttccccggccctgtccggcccgacctggtcctggaaggcatggtggggaacccggcgaaccccggccaggcgatccctgacatgcccgccgccgccgatggctccaccattgacctcgcaatgctgtacgccaagttcctcaaccacccggcggccgaggcaggcgccggtgccgtgacgccggagtcggcagggcaggtcgacgaggcgttcgacacgttcagcgcgtccagcgacctgagccccggcgtcctggcgccggcgcagttcgatccatgccacgacgggttcggtgagtggttggggccagtgagcagcactgaccccacgagtacggcggctagtactagcagcgcaaccaccatgctgtgcagtgacgtgagcgtgcaagctgcgctcggcgagctcaacttcgccatggatcagagctgcttcgactcgctagggttgcccacggacgtcggcaacctctcgtcgtggtgctcgatcgtgcccagcttgtcgacgttggaggacaccaagtatgactcgctggattctttccccgacgacgccctcagcctccatgagggcatgattagcgggcctgacaatcatgattggagcgtggattgccaaggattggaggctctctacatgccgtaactacacgatcaatttcttctcttttgccaattgatggtgttcttgtgtattggtttgttactatttttttcctttttttt

SEQ ID NO: 5803 - DNA, 789 bp, Setaria italica
  Peptide Sequence Number=SeqID_71777
tatgttccctcattgaatattttaaagacctccatcaacgaagcttcaacttccctagctacaccagcaagcaaacgtgacaacaattcctgctgccttggaccagaaaatatacgcagcccaagaatacacctcctgcttcttgcttttctacatgctgcccatcgcctgtatgcatcagacctgaaaaattctccatagtaataggataaaacttctcccattgtcttggtttccataaattttgtcacctgaacaagattttttcccgaaaatgtagagaccaagaagaaaactttgtgcctcttcatcactccaggagtatcttggcatcccaggcaatggtaaacaatcatcgaattttctctttacacaagaacaacctaaaacttcccttctttgtgagcaatgcatgtcttgtccatcagatcctgctaatttctcaccttcctcagcatatttaactttacagccaagacactctgaacaaatcctgtcctgatgtaaatttaccggaaaattttcactgctttggatgggggcttcatcttgtgaaggacatgaactgcgtcgtgacaaccccccatgctcttcttttacacgagtgcttgtattttgggtccacgtgactggaatagctaatcctacacccacagggtactcaaaaccaaacgctctgctgtcataaactgttgatgaccttagtttcgcctgttcctcttcagttagtagatctggaacttccacctggtactcaccccctacacgagggtatattcgtgtgtcttc

SEQ ID NO: 5804 - DNA, 556 bp, Setaria italica
  Peptide Sequence Number=SeqID_71778
gccgatgtcactttggctaagctgttagaagtagatgtgtttgttgctggactgtcagaaggccgttgcctagcaccaactactccaacttcacgctttatagctccaaaagttccagctgattttgaaccaggtgagggtacatggattggatctgatgaggaacagcaaagttccccaccaaaaattatttttcccggatggcggagtggccactctgttctggctgccctttcctgaaactttgtcagcttgagctgctccatgaccattaacattgggagtaaccaaatggtgttgtgcagctagcttttcagttgagcttttatctccaacatttgaaacagtatgttcattgctaggatccctgttatgagatgcttctggcaaagtctcaacagcctctttctgtttacttctgttgtccttgacaatacgaaattcctgtgtgaatccatgctgactttgagagtagcctcctctgctaatgtttctattgaaaactcttccaggtcttgccactccgggattagtgatttcttttcgcaatggcaca

SEQ ID NO: 5805 - DNA, 756 bp, Setaria italica
  Peptide Sequence Number=SeqID_71779
tcagtggatgtgatggagtcaatgctgctgtctgacttggagaaggatgatcattcaagtcttctgtagtcacaacagtatgggatgctgttaccgatgcctttgggtcaatttctggttcaaaagtaccgaagatgagatgtgttctttcagagtctggtaccctgatgtgctcaggtatgataacatgttcatcttgagatgcattagcttgtgaaagcttcttagataagccagccaaatctgcctggttacaatcaacactgggaggcacaacactaacttcatgattgacacagctggggcttactgatttgggcttccactccagatgtgggctaactttcgtgtgactaacatggtgggatgccctaccgctcaacggtacaggcaaattaagacggccatttctcaaagaggcgccagggagtccagattggtgttcattctgaggattatccttttgtgccgatgtcactttggctaagctgttagaagtagatgtgtttgttgctggactgtcagaaggccgttgcctagcaccaactactccaacttcacgctttatagctccaaaagttccagctgattttgaaccaggtgagggtacatggattggatctgatgaggaacagcaaagttccccaccaaaattatttttcccggatggcggagtggccactctgttctggctgccctttcctgaaactgcatgagaaccaaccactgttgcttgaccattaacattgggagtaa

SEQ ID NO: 5806 - DNA, 242 bp, Setaria italica
  misc_feature (199)..(199): n is a, c, g, or t
  Peptide Sequence Number=SeqID_71780
ccggcggcggtgcggactccgagccgcggtccgcggggagcaggacgcgctcggtgtccgctactcgcgggcggaagccgtcgccgaggcccgggagggatgtggccgcggcggctgcggcagcggaggagaagaagcccgctggcgtgcccacattgctgccctcgctcagcgcgcccgccgggatgcgccggcaggngctgctgctgcgctcgggcctgtctcttgacgcatcctgctcc

SEQ ID NO: 5807 - DNA, 485 bp, Setaria italica
  misc_feature (470)..(485): n is a, c, g, or t
  Peptide Sequence Number=SeqID_71781
actacggcggcggcgggcccgcggcgtacggccacgccgcgtacgcgccgtacggcggctacggcaggagcccgtacgggcagcagcagtactacgaggaggagcccagcgccgggtgcagcgtcatgtgatcgtagctttgcgcgtggaattttattcagctgggtgcatgatgccttttcgtctcggaaatatacgaagatctgcagcttcgtcgtgttgttcattgtaaaattcctagtagaatatgttaggatgtaccgtatttttcacttccttttgctttggttcatggtgttgtgttgtgttggtatatgagtactgctctcttttgtattttggagggattaaagtgagtagacgtgtgagtgtaggatgaagcgccccgtcgaatgtaaagctgaacaaatcgtatatatgctatgcttgtgtccgtgtttttataaaataaaaaaaaaacaaaaaaaaannnnnnnnnnnnnnnn

SEQ ID NO: 5808 - DNA, 1336 bp, Setaria italica
  Peptide Sequence Number=SeqID_71782
tctagttcttctagtcgtcttgtcgtacgtagtattggttctagtctaagtcttcggccttcttctccccaatgagaccaaggaagacgtctccaccgccaacctcaaatacctgctggtcccatactatctcggggaaatgactgagaagattgctcaggaggacaggatcccaattcttaaggcatcacagaaccatttcaaggagttcgttgctctatgtgaagtactagagcttattccacaggatgagcttgaattatctagacagaagcagcatgatactatagcaaacagaagagcgcagaagattgcccggttcaaacgtcaaaaagctgcagaaactaagcttcaagagattaaagagagaaaagaaaggcgtgggcgttcattgagggcagctgctttatctgctcctgttgaagctggggaggaagatgcctttgaggatgatggggaagaagaaagagaggcttggttagctactatctcattggctctctgcaaggcctttgatcttctcgacatgctaaagaaggaagaagaaatgcttctagctgtaaaggaaagaaaggaaaaggacgggaatgcatttgctcgtgaaatgcttgatgaacgtacacaaaaagctgaagcatggcaccataatgctgcaaaccgtgcaccatattccaaaccagctgatccaatcacttgcgcaacatttgctcaagacgtccttgaaggtagagcaagtgtttcgcaagctcatgagcacaaacaccaacccatgatatttggacctgcaagccttgttggtggaggactgaccagtgaaagggaaagaatggcagcacaagtttttcagcctggttacaggctgccaacgatgagcatagaagaagctggtttgtgcgaaatgaaaatgatggagaaatggcaagaaaggactgcaaatatgatcaaagaagcaaactcggcgtggcacaaggacggcactagctcagcccaagaggatgaggatgccgaggaggccaaagcgagagcatgggacgactggaaggatgacaatcctcgtggcgcaggcaacaagaagctcactccctgcggctaaactgcttgcatttactgaaattcccccttgtgacgaatgtttgtgtagattatagaatgtttgattttactaacgtttcggctattaatgccttttcagtaacgttctgtctgtgtataatacgattccagtgacggtgcaagtcagcaagtgcatggtttcacttttttgaagatgcggaggaagccgtgaacgcaactgagcatttgacgttgaaattttgtcagcaatgctacagaacag

SEQ ID NO: 5809 - DNA, 317 bp, Setaria italica
  Peptide Sequence Number=SeqID_71783
ggatctacagcacctgctacgtccacaacccaaaggcgtgatacaatagataacgtgtgccaaacagtttcttcatattctccaatcatcttcagatcatcacctactactaaggtaggcgtcatcgtatccaaaccagagagtacaaatggagcatctggtgatatgtctgaataaagacaatcgcccaactctagcaatacatactccacttcctcctcctcctcgtcatcttcgatccgcgcttcgaagaacgcgcggcaggacctcacggcggcggcctgcgggtgcaacgggaccgccgccgccacttcgac

SEQ ID NO: 5810 - DNA, 668 bp, Setaria italica
  Peptide Sequence Number=SeqID_71784
tatattgatcaagtggttgctatccactagatgaattcagcaagtgtacaatccagtccgggggtcaatgatcaccttactgtacactgaaggcattgaagaagaaaatggcagctacaagtttttttggtttcagatttccttgtccttgtgctgctatgctctgtgctgaggatgctctgcattgattggccgaaatttgaggatcttttgagtgctggcaagatgatttacttccttcaacgaaccttccttgctgctgctagctggtttgtccatgttttcttcggaaggtgtggtctcatcactcggaggttttggttcagcttcactttcagagaatagataacatgtgccaacagtttcttcatattctccaatcatcttcagatcatcacctactactaaggtaggcgtcatcgtatccaaaccagagagtacaaatggagcatctggtgatatgtctgaataaagacaatcgcccaactctagcaatacatactccacttcctcctcctcctcctcttccccaattttcttatctttgtcaagttcttctgacatctccaagtggacttggacgaccaataagactcttcagtcctagcaagggcctcagaagatggcagcacactggtgtcacgattggcgtatggcgagcagcagca

SEQ ID NO: 5811 - DNA, 386 bp, Setaria italica
  Peptide Sequence Number=SeqID_71785
gggatactgttccaattgacaccatcgctttgtgaattgcttctgtacatagaatcagttgcattaccattttgaccagcttcaacactaccactactacgcttcacactagagccacaaccttctgatgaatttgaagagctattctgtcctttccttcgaaatccctcccgcagctttataactgtacttcttagagcgtctatccttgcaactgaggggtttgaaatagaaagccagcaagagacagcagcagacaaaagcacagatgctacaaaagcataactgatgcaatggccaaggtaccagtaatgcactccaaaggatataagaaaagcccttgatgttccagccacaaataatactatcatccgacttttaagaag

SEQ ID NO: 5812 - DNA, 1080 bp, Setaria italica
  misc_feature (1)..(6): n is a, c, g, or t
  misc_feature (9)..(9): n is a, c, g, or t
  Peptide Sequence Number=SeqID_71786
nnnnnngtntctgttttgttttttttttttttttttttaacttagaagcaaagccagtaatcattttattgcatttattaaacgggataacaaaacctttttaagttcccatccttgcattacagatcgtacagaatatgagagcgagatgaaatgcctcctactcgactattccccgctttgcgccgtccaccgtgttcttcagcagcatcgccaccgtcattgggccgacgcctcctgggactggcgtcaggtaaccggcgaccttgctcacctctgcgaaatccacatcaccgacgagccggtacccagacttcctggtagggtcgtcgactgagttcgtcccaacatctataacggcagcgcctggcttgatccagtcccctttgatcatcatagcctgcccagctgctgcaatgactatgtcagcttcgcggacaatgctttccggattcgaggtccgtgagtgcacaattgatactgttgcatctgccttcagaaggagaagggatacaggtagcccgactatattgctgcggccaaccacaactgctcgtttccctttaacggtaactccactccgtgacaagagctccatgcatccctttggtgtacatggtacaaaaagtggttccctgcctttcattgcaagtttgccaatattgagaggatggaaaccatcgacatctttctcaatgctgatctcactcaatatcttctcttcattgatgtgcttaggcaatggaagctgcacaaggatgccgtgcacggcggggtcggcgttgaggcggtggacctcggcgacgagcgcgagctcggagatgtcctcggggaggtcgacgtcgacggagcggatgccgacctcggcgcaggccttgcgcttcatgttcacgtacgtctgcgagtccttcctgctccccacgatcaccaccgctagcccgggcacgacgttgtgggcagatgagagcgtggcgacctcggccgcgacctcgcggcggatgtcggcggcgatggccttgccgtcgatgatctgcgccatcgcggtggtggctgtcgtctgggcgagtgagtggcgacgac

SEQ ID NO: 5813 - DNA, 484 bp, Setaria italica
  Peptide Sequence Number=SeqID_71787
tggtggcgtaggaggaagaggtggtgatggtcgatatgggaatcgtgcacagattggtcggattctggacgtggtggatggaatgaaggccctgggaatggccgtagggaaggactgatgtcatacaagcagttcattcaggagctcgaggatgatgtttcaccagtcgaagcccaaagcagatacgaggagtacaagtctgagtacatcacaactcagaagaaagcatactttgacctccataaggatgaagattggtaactgttctttaaattacaatattgcgatttattacttattctcttcactaacttcttaattttgcatctcgttcttgtaggttaagaaacaagtacaatcctacaaatcttgaaggggtcatagaaagaaggaatgaactggcaagaactactgcaaatgaattcttccaagatttacagagtggaagtctggacactggtccagggttgacaggttcagcagc

SEQ ID NO: 5814 - DNA, 2149 bp, Setaria italica
  Peptide Sequence Number=SeqID_71788
gctcggtccagttggcggcggagggcacgagcaggacgacaggaggtatggcaacggtcatggtggcgtaggaggaagaggtggtgatggtcgatatgggaatcgtgcaccagattggtcggattctggacgtggtggatggaatgaaggccctgggaatggccgtagggaaggactgatgtcatacaagcagttcattcaggagctcgaggatgatgtttcaccagtcgaagcccaaagcagatacgaggagtacaagtctgagtacatcacaactcagaagaaagcatactttgacctccataaggatgaagattggttaagaaacaagtacaatcctacaaatcttgaaggggtcatagaaagaaggaatgaactggcaagaactactgcaaatgaattcttccaagatttacagagtggaagtctggacactggtccagggttgacaggttcagcagcgagcaaatcaggaaataatagcagtaaaaatcttgtggatgcagatggtaaaaaagggaaacttgggaagggctctgacgatttatactatgctgctcccaaggctcacccagttagttctgaggctcggcgaatccgaagtgacattgagcaagctcaagctctcatctgtaaacttgattctgagaagggtattgagaacaatgttctctccagtagtgaccatgacaagacagacagggataagtcacatggttcaatggggccaatcgttataatacggggatcatctactgtgaagggtcttgagggtgctgagttgctggacactcttgttacttacttatggcgcatccatggtgtagattattatggtatgtctgagacaaatgaacctaaaggcctgagacatgtgaaagctgatgcaagaacatataatggggatagctcaaatgcaactgaatgggagaataaactcgattcattctggcaagacaggattcaaggtcaagacccgttagaaatattgaaagcaaaggagaagattgatgcagctgctactgaagtgttggatccatatgtgaggaaaataagggatgaaaagtatgggtggaagtatggttgtggagccaagggttgcactaagcttttccatgctgccgagtttgtccagaagcatcttaaactcaagcatgcagatgtggtggttgagctaacttcgaaagtgagagaggatatttactttgagaactatatgaatgatccaaaggcgcctggtggaacacctatcatgcagcaacctgctccaaggggaaaaggcaggcaaaggccaccaatagaaagtcggctgagagatgagcgtggaaatcgtaggttcgacacaaatgttgattcaccaccacatgatgggtctggtgaaaaccctgatgatgctatttatgattcatttggtgatccaattatgcatggcgccttccctccagatattcctgctcccccgattctaatgcccgtgcctggtgctggtccactgggaccatttattcctgcacccccggaagttgccatgcatatgatgagggatcagggcgggccacctcattttgagccagctggaggtccacatcctaggaaagcagggaggggtggtggccccccaatgcgtggtccatccccaatcttcagcgctcctccgcctacccatatgcatgatcctcgtagaatacgaagctaccaagaccttgatgctcctgaagacgaagtgactgtgatggactaccgaagcttgtagaacttcccagtttcatgtgcctcctgatacttgtaggtaacattacagcttgaaaacacctcgccatctagaattattgtggaggaaccccagcaggcatcgtgtcccacctaggggtggtaatggatcgtggccctcatgcctcctacacaatccaacttagtcctatttaatttttagttcaaaatcatataaatttatggcctggcccttattgagcccgatccttaaatttgcttaccacccctagtcccacccttgagttgtcgcttctcagtgtttgtaaaatggaacacaggaagtacattccatttcgccatgaaacgaggaggtattatctgtaactttgtacaacgtgaaaatttttcattcgtgttcttttaggcacaattaccc

SEQ ID NO: 5815 - DNA, 245 bp, Setaria italica
  Peptide Sequence Number=SeqID_71789
agcagagccgcagaggagtggatactgggcggatggataggagaggcacacgggagggagtggcgcgcaatctccaatagcatacctctaacatcaggcaggcacggaattcgtcgataggcttcatttcccattgtatttcttcccctgttcttattcattttgtgatgaaatagcacagatgaccctgcgatacctagattggggaaaatagtaggtttgcatctgacacgacttgcttttaa

SEQ ID NO: 5816 - DNA, 2146 bp, Setaria italica
  Peptide Sequence Number=SeqID_71790
cgggcgccgggggcgtcagatctgatgatggccgtcggcgggtaagaggaggggaatgcttcggcgctcaagggctccgcgcggcgccggggggcggtgcaggcgggcctggatgcggacgacctcctcacgctcatgcacggctcggatcccgtcaaggtcgagctcaaccggctggagaatgaagtgagggataaggatagggagctgggtgaggcgcacgcggagataaaggcgctgcggctgtcggagagggcgcgggagaaggccgtcgaggagctcactgctgaattagagaaagtggatgaaaaactcaagttgacagagtctctccttgaaaccaaaaacttagaacttaagaaaacaaatgatgagaaaaaagctgctctggctgctcagtttgcagctgaagcaacactacgaagagtacatgcagcccagaaagatgatgatatgcctcctattgaagccattcttgcaccactggaagcagagttaaagctttctaggcaagagattgcaaaactccaggatgacaatagagctttagaccgtttgacgaagcaaaaggaggcagcactgctagaagcagaaaggactgtacagattgcaatggcaaaagctgctatggttgatgacatgcaaaacaagaaccaagagttgatgaagcaaattgaaatttgccaggaagaaaataagatcttggacaggttgcaccgccaaaaagttgcggaagtagaaaagcttagtcaaaccgtaagagagctggaagaggctgttctacaaggtggtgcagctgccaatgctgttagagattaccaacggaaatttcaagaaatgaatgaagaaaagaaaattcttgaccgggaacttgctcgggcaaaagttactgcaaacagggttgctgttgtagttgcaaatgaatggaaagatgctaatgacaaagtaatgcctgttaagcagtggctcgaagagcgaaggttcatgcagggtgagatgcagcagcttcgtgacaaacttgctattgccgagagaactgcccgatctgaagctcagctaaaggaaaagtatcagttgcgcctaaaagttttagaagatggatttgaggggtcctccaagtggttctagtcgtcctcctacagaaggaaagagtattagtaatggacctccccgtcggctttcacttggtggtgctgatagtatgtccaaagcttctccaaatggtgtgttaatgaggaggtctccatctttcaactcaagatcctctctcacaaccagcagtagtttggtcctgaagcatgcaaaaggaacttcaaggtcatttgatggtggtaccaggtcgttagaccggggaaaagttcttggcaatggacctcattcactcaatagatctacagatgctgttaaagatcgtgaaaacggatgataattggaaggctgatgcagaagaaaaaaacaatgaaaccacaaaaaatgattcaagtgatatggtctccagtgtattttatgacatgctgcagaaggaggtagtttctttgagaaaggcatgccatgagaaagaccaaagtctaaaggacaaggacgatgcaatagagatgttagcaaagaaagtagatacattaaataaagcgatggaagtggaggctaaaaagatgaggcgggagatagctgctatggagaaagaatttgctgcggtgcgtcttgagaaggagcaagataataaagctaaacggcttggtaatttgaaagggcctggaacttcttctcatacggcttctggaagaactgcaccacggggtggattggcgcgcaatctccaatagcatacctctaacatcaggcaggcacggaattcgtcgataggcttcatttcccattgtatttcttcccctgttcttattcattttgtgatgaaatagcacagatgaccctgcgatacctagattggggaaaagagtaggtttgcatctgacacgacttgcttttaatgtagtgaaggtaatccttcggtgggtgaggtttaaccttgcggcacgctctcattttgtcgaggcagtgcggctgtggttgtataggttggacgatcctgtgccttttcttctatatgtagttgagctagtgtgtttaaggtttaaaaaaaaaaaaa

SEQ ID NO: 5817 - DNA, 1975 bp, Setaria italica
  Peptide Sequence Number=SeqID_71791
tgtccggtcgaagaaacgaacacctgatttcacaattctggcacattaaatataggttcccaggtcactaggtcaggtgtatagaagtgtgaacagatatcaattgatgcccttccaactgctacaatttttgtaaaggcctacatgataacccagctgctcattgtgctagcttctggtgtggcaattaattacataagcttactatacaccaccccgccaatttcttgtatccatccgaatgaggttagcctccaaccccatttgcagcaggaacagtaggcacttgaggtttccaaccccatatcacagaagaactagagataagtacgctatgtatgaggtgaacagtgaacctagctgcaacaggccatccccagaaacaatggtgccatctcacttgcgccaattgacacaagtagagaaaaacacccaagaacatgtccatttcttctgagccattgaaacccgagcaaactgaattcaggattaaggattgtgccaggcagttagtcttcagcagaaggccgacctaaaagagagagtctagaccagaaaccgagtcatcttcagccacatgcggaactggcatctcatatgccacattgtccttcgtactctttccataactgttttttcgcgttgcggtttgtgctgttgctgccgttgcggctgctatggtggctttaccagcatccctgaattgaccagtaacccggtcatatgtcaagaaagcatctcctatttgtccaatcactttgttccgcaccttcctcacacaaacctgcacgacatcaagagggcctgcatttttatccctgtttctgtggatcacaattccattatcacatttgtttatgaaatgtgcacttccacttatgtcatacatatttggtgggcctccattccagttatggagctgtctaggatgagcaacaaaccatacatgacatgaatggtgttgagcaaagcgcttaatcttggtaagaatctggctgacgtactctgtctctgtttggtttgaggggcgctgatggtcaagttcgttgtaagggtcaatcacaagaccacgcactccatgtcttagaactgcagctttcgcaaggtcaagaacccaattaatagatggaaggctatcatcttcacaccggataagatgaaaagtttcattcaaccattgttttcctgcttcaaattcatcaggagtcattcgctctgcagacccaccatacctagcatcaaagaatggtttcttaatgcgcttctctaagagtttcctagcatgctccctgaccttgttttccattgagcacagaacaaatttaccacccactttcttggtttatattgcacaacaacgcatcaatccactcacttttaccagaatttggtactcctgttactacagtcaactccccaggcacaaccttgtaaaggtcatccatagatttccatccagtatgaataccaagctcatccccatgggttccaagatagtaattatcaatctcagggaagaaatctttgaatgcaaaaaggcctcttataggatacagttccgcgtcttctataacctttctcaatgcttgcggacctaaaaacatcagtacctcatttgcatctttgcaagtatctgtctcattcttctttggccacttaactctccaacatctttctttaccaagtcgacgagcaagttcttcagccagagcctggcctggaggatcagcatcggtggcaagtattatcctagatgtcgagtcaagatagtctttgcagttccacagatattgatacttcttatcctgctctttgtctgggattttactggatacttttggtggtgcaccatcaggcacgctaacacaattacgatagccagcttcatccatcgacagcttgtcaatttcaccctcaacaatgataatatcttgtgcacgctttatatcatccagaccataaaaattttctccgt

SEQ ID NO: 5818 - DNA, 467 bp, Setaria italica
  misc_feature (417)..(467): n is a, c, g, or t
  Peptide Sequence Number=SeqID_71792
acaacctgcagacgctgtccagctccgtcgcagttaccgtagacgttaccttcgacgaacccagcctcgcggcgcagttggacgacccggcgatgctttacgaagagccgactcggaagatcaaagaggcgattgcgaaggccaagggcatccattcgctttgaaggccggcgccaaagtttgaagtgatgcttctggtacatcttttgctcgtttctcgtaacactacgagactgttgtagcatatatgtgcgccgtgtaggggtttaatttcagcgctgatacctcttatgggtacatggtcatgtacgacgcatcgctttctatcagacagcttaattagctgagagctaataatgtaatatacatacgacacggcttttaacttggttttgcggcgcgagacgaacgccggtnnnnnnnnnnnnnnnnnnnnnnnnnnnnnnnnnnnnnnnnnnnnnnnnnnn

SEQ ID NO: 5819 - DNA, 1404 bp, Setaria italica
  Peptide Sequence Number=SeqID_71793
ctgaattgtgagaaaaatatgcttcaaattcctttttgggctgctttgctgaaatccatggatccaagacctcgttgatagctaaagtaagttccctgctcttgaaatatttcatgactagttcatgtaatttaccacgtgtgtaacccacaaactgggggtgcaactcatggaagctacctgatccttgattcacaccaacattatattgatctgactgcatatgagcagcggtagaatttgaactttgtgccacactaggaacagagcagagagattttaaatccttaagaacaggaaaccatgtgttatcaatcttacggaatacactgctccgttcaacaatagttcccttcttaactaattcttgcaattcggagtaagaaaacggaccatgctcatgcccagtgccatcaaggtagtaccagtcaccccgattaactgacaattcatcagcagtacatacacggtcctttggaatgtttggaacagacttggatttgtgcaaaccttgggaatcatggtcatgatgcttcttgaaatgcgatgaaccttcatggacagaacttctctcagtcccaattgaatgggagcgtgaagatctagacagtggccgatcagctcctctgggttttgtacggggttcaacagatgattggtctttaacaacacgagaatttatcctaaccactggaagcatcatccccttcactcccctaggaggttgtctgctctgacctggcctcccaggcacaacacttttacaggtgtcactaacactgtcagtatcctcttctgtcgatgagaatgcccacaatggtaggtcatgctttttagcacgtacagcatagtatagctcatccttgcagtgccagcgaggatcctcacggctaccttttggcatttgacacagaggatagccttcattgagaacaagttttttcctgaatggattatcttggctcaattcatcatttctcttccagtcaccacctttgcaagaccatctcccagaaaaccattcgctagattcaacataatggtgaaagttgttcttctccatagaaacaaggccataagcgtctgttggcctgttgtcttggaattctgagcccctattgatcccatcatctccttcatgatgtatttggaatcttgtaaaatcttcatgtcgactccatctttcccaatcagcaggtttaaaatctgcacctaaaagctctccaatgatctcgagctcctggccaggtaccaaaattgatccatccatcagtgcttcaaccctatcatcaatatagaaatcttcactatcttctgcagaagcttcctccattttggtttcctcagcacctgatgccaagttagaagctgcctcaagagcttcatcaagcaaatttcctgggg

SEQ ID NO: 5820 - DNA, 413 bp, Setaria italica
  Peptide Sequence Number=SeqID_71794
accaactctcctcatccactttgcgcttcccacccaacgcccacttccccttgcttcgcgttggcgccatccatggcagtgcaggcgcgccacctctcccacgctttccccccctacctccactcccgcagggctatggacgacgtgggggtggtgccgggcacggcgttcttcgacgagtacggcttgagcgcgccggcgccagggctcggcggcacgccggtgctcggtgacttcccgcgcagcgagctgacgtgcaactacggtttcgagccgaggaagcggccgcgcgtgacggcggaggcggcgggttccttggaggatcgcagcgtggtcctgcccccggcggtggcgcaggaacttgtggcggcagtgccagtgggcaacgggcagagaagggcggcgggttccgg

SEQ ID NO: 5821 - DNA, 285 bp, Setaria italica
  misc_feature (240)..(240): n is a, c, g, or t
  Peptide Sequence Number=SeqID_71795
gcggtggaatatgcagatgtcggcgcctgcagccgcgctgggacctgcctgcgagcgccgccgggtccagggccttttaaaaaaaaaccgtaggggcggggcggcggcggcgcgcgcaacctgcaacgactacacgccgctgtctggaggaccggactggatggtggtggccccgctcggccgccacacgcgtcggcatcgctgcccgaggggtacggctcccctgatgattttttttanacctccgtccaggtcccccacccaccccacgccgcggcctgcggg

SEQ ID NO: 5822 - DNA, 1264 bp, Setaria italica
  misc_feature (1)..(43): n is a, c, g, or t
  Peptide Sequence Number=SeqID_71796
nnnnnnnnnnnnnnnnnnnnnnnnnnnnnnnnnnnnnnnnnnnccaacctttttttttttaatgtaatttagtatccacgtcaaaacaatgcatgtctgtctatttagtggggtctgtctttccagggagcacatcttaaacatacttggatacagaaacttgaagaagtgcatggccagctttataacattgctcgacccaaagattattggggaggaaaaagtagacataaaccaccagactcatggaacagtgtcccaatcaacgatccagcactgtcccaatagaagacgataatggcagcaaagagaaaacaggaaaaaaacagaggtttattgggctggagtgggaggcgtcagctctggtggggcctctcgagtgacaccgatcgtggaatcatattcttcgtcctggtgagcaaacttcttgggcagcaccttctcgaactcaaccttctcaagtggcttggcattctcagcagcatgctccttggacagactaaaatagttggcagccgattcagcaataaaagctatttcatcatcagtgagcttcctcagaaatttggcagggtttcctccccatacctctccagaagggatccttgtattctgtcttacgagggctccggcagcaaccattccatgcttttccacaatgacaccatccaatagggttgcccccataccaacaaaagcttcatcctcaatggtgcatccttgtaagacagcgctatgacctactgtgacattttcaccgataattgttggaaagactttcccacttagattagacttcgccacatgcacaagagaattgtcttgtatattggtcccagatccaatctgaatgttgtttgcatcccctcttagaacgcacccgtaccaaatggaagctcctggtccaacttgaacatcaccaataagtgatgcacttggagcaacaaatgcatctctatgaacatgaggggttttgtcaaagatgttcatgagtgtgcgatgccttgaaatctgctcgtggaagaagtagttgccctgcaggcggcagccgaggcggtcgagggcctggccggtctcccggatccagaaccccaccgcgtacatcgcctttcccaggcctgccatctcccccggcggcggccaaaatcgctagcggcgggcgcggcggaggcggagcggtgcggaagcgctcgtggccttggagatctcgaggaggaggatcggagtaggggcgagccgaggtgaggggaacgggagggggcgg

SEQ ID NO: 5823 - DNA, 359 bp, Setaria italica
  Peptide Sequence Number=SeqID_71797
aggaccggcccttcattgcaacatcaaactgagggtacgacccgcgctgcatcccacggctctggacgagctccattatcctctttttctccttgcgagctaaatcctccccctcggtgggatcagcactcacagccgggccgaccgggccctgctcattgccgtcggcataggccacctgaagcgacgcgagcgcggcggccgcgccgacagcgagataggcggcagcggaggacgatgccgaagccccgcgcgccgaagcgagcgacgtggcattgagaaaccctaggcggcgtgatcctgtcgcaacggacggcgaggaggcggcgggaggcttctggagaggaagggggaggcgt

SEQ ID NO: 5824 - DNA, 392 bp, Setaria italica
  Peptide Sequence Number=SeqID_71798
cccggattggacaagggaatgaatggatgactagacttgacagtcgttctaaaatcctaggactttctcagccatctcacttcaccgcctccggccggccgcgctcaatcttgcttgcttgcttgctgattcccgtcgcgtctcagctcctctcggatggaaatggagggagcgagagcaaaagaagaaaaaagaaagaagaaaaaggaaagacgaaatggtcgcgcacacacgcgcaatggcgcgggcggcttgcatccgctggcgcgttcaccacacggccttgtcggcggagatgccatggaggagcgggagcgagtcgccggcggcggcgacgcagcagcaggagagcgcgccgctcttgaggtcctcgagggtgacgaaccgggagg

SEQ ID NO: 5825 - DNA, 266 bp, Setaria italica
  Peptide Sequence Number=SeqID_71799
aggagggcacggatatggtcgagcgctgccacgaggccacagccaacctcaagaaatgcatggacgcgaacgccgactactacgcgcccgtgctccaggccgagcaggccgtcaacgagcgcgccgaggccgaggccgaggccgccgccgccgccgcggctgacgccgggaaagggcagccagcatccgatgcggagaagaaggaggaagccgtgccgcaccaggctgctccctccccgccggccgccggcgaggggaagaaggaa

SEQ ID NO: 5826 - DNA, 554 bp, Setaria italica
  Peptide Sequence Number=SeqID_71800
cagttgcgatctgtcaatatggggtgcaaaatgttactgcggattatatcatgaagtgcgatgatgacacctttgtgcggcttgatatagtattgcaacaaatcactacctacaacagaaccttacctctttatctgggcaacttgaatctcctgcacaggcctctaagaaggggcaaatgggccgtgacctatgaggtaccttagcaccaatgttaacatcatagttttgcaattttttacacacatatatatgctcttaagtgtatgcctacaggaatggcctgaagcggtgtatcccccgtagccaatggacctggttatgtcctctcaatcgacattgcaagagacatcgcatcccggcatgcaaaccactccttaaggctgttcaagatggaggacgtgagcatgggaatgtgggtggaggactacaattgccacttgcaccggtgcagtacatccacagctggaggttctgccagttcggctgcgtggataactacttcacggcacattaccagtctcccaggcagatgtcttattgccttcttgggt

SEQ ID NO: 5827 - DNA, 1840 bp, Setaria italica
  Peptide Sequence Number=SeqID_71801
ggtcggcggtgacggtggtgggcacgccgcgggcggcgcggccggagtacgtcgaggcgctggagcggagcggcgcgggcaacgggaccgtgatggtggcgcagttcgcggtggagctccgcgggctgcgcgccgcagacggcgaggagccgcccaggatactgcacctcaacccgcggctgcgcggggactggagcggccggccagtgctcgagatgaacacctgcttcaggatgcagtggggcagggcgcagcgctgcgacggcaccccctcgagagatgacgctcaggttgatggattcagaaaatgtgagaaatggcagagacgggacatagttgaatcaaaagaaacaaagacaagctcatggttcaacaggtttatcggccgagcaaagaaaccagaaatgacatggccattcccattttcagagggcaagatgtttgttctcactatccaagctggtgttgaaggataccatatcaatgtgggaggccgccatgttgcctcgtttcctcataggatgggatttgctcttgaagatgctacaggtttagccgtaacagggggcatagatgttcactctgtgtatgcaacagcacttccgagggcccatcctagtttttctctacaacaagtcttggaaatgtctgaaaagtggaaggctcgccctgttccagtggaaccaattcagctttttgttggcattctctctgctacaaaccattttgctgagcgcatggctattcggaaaacctggatgcagtttccagcgatccaattgggaaatgtggttgctcggttctttgtcgcactgagccataggaaggagataaacgcagcactaaagaaggaagcagaatattttggagacatagtcattctgccatttatcgaccggtatgagctggtggttctgaaaacagttgcgatctgtcaatatggggtgcaaaatgttactgcggattatatcatgaagtgcgatgatgacacctttgtgcggcttgatatagtattgcaacaaatcactacctacaacagaaccttacctctttatctgggcaacttgaatctcctgcacaggcctctaagaaggggcaaatgggccgtgacctatgaggaatggcctgaagcggtgtatcccccgtacgccaatggacctggttatgtcctctcaatcgacattgcaagagacatcgcatcccggcatgcaaaccactccttaaggctgttcaagatggaggacgtgagcatgggaatgtgggtggaggactacaatgccactgcaccggtgcagtacatccacagctggaggttctgccagttcggctgcgtggataactacttcacggcacattaccagtctcccaggcagatgctatgcctctgggataaactgtcagccggccgagcacagtgctgtaactacagataacgcgacgctccaggggtgcaggtggaatcagatggctatccatgtggtatcctttgtcccacgatcatgtacaacaggagaatttcaggatctccactgcatcctttggcttcagctccatccgatccactaaccctagaaaccattttgacatctcatgttcaattctttgatctttatgagatttataggtgtggagatttataggtgtgtgggtgtgatcaactgcttcaccttcattgaggtggatgcaaagatgagggaggagtaatggaatccacgttggctgcttgtacaggggcaagttcatttgtaaaactgcaaatctgtatccactattggtggacagtaagtcagcatgacggcatgaatggaatgaagaaacttcgtttaaccctaaaaaaaaa

SEQ ID NO: 5828 - DNA, 574 bp, Setaria italica
  misc_feature (550)..(550): n is a, c, g, or t
  Peptide Sequence Number=SeqID_71802
cgctgaggcttgcaatgcgagccgccggctgcaacgcggcgccagcgactactcacgctggtggagcggccctcagtctcgtccatggacgctgaatttcagcgtggcgtggacggcgatgctgcgccgcgccgtgaattgggggcacgagacttctcggggcccggcgccggttggttatgggaatacctcatgagctattcgaagaaaaactagaagccatgaaagttgccaaagggttgcgaaacgatactgagttgaatgtcaaagatctggaagacctggtagctgaatataagaatgtttatgtggtgaccaaaggtgaacagtttccctcagatccaaagaggcagttgcatttggcaatcttggctgtttttgattcatgggacagtactagggcaaaaaagtacagaagcattaatcggattactggattgaagggcaccgctgtgaatgttcagtgcatggtatttggcaacatgggtagcacatcaggcactggtgttctctttactaggaaccctagtaccggagagaaaaaactttntggcgagttccttgtcaatgctca

SEQ ID NO: 5829 - DNA, 371 bp, Setaria italica
  Peptide Sequence Number=SeqID_71803
ggtagtaagaagcagcaggggccagaagcgaagcgagaaagagccaagaagcgaagcgagcggcaccctgggaggacggttgcaagcgcatgaggaggaagctgcggccgtaagcaagaggcagcagcagcggcagggtgctcctctcttcgttgtcccctccggcggcggcggtcggatctgcggttaagcggcggcgggtcccccggagctctgagctgtcattcccgagctcgtggcggcgagatctgagttcggtcgcgcgggaggaggtttcgctgtgccggcgtgcctcctggtgctgccggagacgcaaaggcggcggctttgagcattgccgtcccttcccccgcaagctctgaagcttcccc

SEQ ID NO: 5830 - DNA, 255 bp, Setaria italica
  Peptide Sequence Number=SeqID_71804
cacaacgcacgagtacaggacaccaccagcgccagcgatcgcatcgcaccgcacccgcacgccctcgcggcatagcagatcagatccccgcggcggccatggccgggaacttcgagctccagggccggcacggcaagtcccgtgtccgcgtctcccgcgtctggcgccgccccgccgcggcggggggcgacatcatcgtcgagtggaacgtcgccgtcagcgtcgtctccgactgcctcccctctacacctccag

SEQ ID NO: 5831 - DNA, 618 bp, Setaria italica
  Peptide Sequence Number=SeqID_71805
ccgatcccagcacgctgcacaacagcttcagttcatcagtgcctgggtaatattgccagctatgtatgtgtaattcagttcagcaatgttaggtacagtaccttccgaggtagagctgctcgtgcaggatggagaagtcaatgacggagacgatgatctgcacgacggggatgaaggcggccacgaacacggcgcccctcttctcgatgcaccatgtcaccagcacgaacgacacgccgcacccgacgatgccctgatcgatccaagcaattgatgttcagagtctatgcaacgctgacaagaggccgacgacggcgacctggaggaagctgaacatagacatgagggcgttgcaggagtagacgtgcgggtacttcctggcgaggcggccgtggagcaggaaccagcaggagaggcagacgcagttgcccaggatggccaccgtgcccagcgtccacttgccgcggttgacggcctccgcggcggctcctcctcccggcggccggtggtggtgagaatggaggtgcgagccggcgtgggtgagggcgacgcccttgtagaaggtgagcaccatggcgccgcccagcgagaccagcgtgcccgcgagcttcgccatcg

SEQ ID NO: 5832 - DNA, 303 bp, Setaria italica
  Peptide Sequence Number=SeqID_71806
actgaccacgccagtttcgcggctccgccatggccacctccaccaccgcgctccacccgcaattccggccgccgctgcgcgctcccggccgtctccgcccgcttccacactcctcgtattcctcgttcgcccgcgctcgccctcgcactcccgtccgggcctcagcggcgtccgcgtccgcgccggtgcagcaggaggccgtcgcgggggtcccgtggggctgcgagatcgagtccctggagagcgcggcgtcgctggagcgatggctcatagactcgggcctcccagagcaacgcctggcca

SEQ ID NO: 5833 - DNA, 286 bp, Setaria italica
  Peptide Sequence Number=SeqID_71807
aagaaactagggatccagaataccacccagcccaatggactcgcagttcctgatgcaacaatgtgtcctgttaattcgacttctcatgttattgagctaatgcaaacagggcacaacaatagatccatgagtgcaacagccttgaatgagagaagcagcaggtctcacagtgttgtgaccatccatgtacaaggccaggatttgaaaaccggaaacactttgcgtggcgctctgcaccttgtcgaccttgctggaagtgaaagggtggaccgatctgcggttacag

SEQ ID NO: 5834 - DNA, 417 bp, Setaria italica
  misc_feature (12)..(12): n is a, c, g, or t
  Peptide Sequence Number=SeqID_71808
cggcgcgcgcgngcaggacgggtgggagccgaagaacgccgcgtgtggctgggggtggtgctggtggtggtggatcaggaggttcgacgcgtggccgaacggcgcggccttcgtatcctccatgcccggcgcgaacggcatgttggggccgaacgccggcgacatcatggacggggcgtggtcgagctcaaggaccggcgggtccatgacggcccccatggccgccgacgcgtcttcgccgccaatgatccacctgaggaaggtgtggtcgggggcgagccctggcggcgccgcgccgtcggacagaacggcgccggccgagtcccacccctcgccagcgccaaggcccatgtcaagcggcgtgagctgccactcctccctgccccccgccgcagcgttccttccccgggtcgtctt

SEQ ID NO: 5835 - DNA, 242 bp, Setaria italica
  Peptide Sequence Number=SeqID_71809
cgcacctcgatagggtttcggccaccgccatggccgacgccgcgccgtccatccctgccgcgatcgactccctccagacctactccacggccctctccgccttcaccgctgcgtggcgcgccgtcgagtcccatgccgccgcccttgactccaccctcgctgctcgcctcgccggcttctcagagctcgagctgatctgctccgcgatggacggcgctgggctccgcgagcacctcacccag

SEQ ID NO: 5836 - DNA, 270 bp, Setaria italica
  Peptide Sequence Number=SeqID_71810
cccgacctcgagtgcggaagctaatcaagaagaagccgagaacccaaacccagcggcaagcgcgcgcgtctccatacagagaaagctcgatccatccatggcgcccaagagctcgtcgacgtcgccggccggaagcagcagcagcagcggcagcggcagcggccagcatgcgcagcagcagccgaggctccgcggcgtgcggaagcggccgtggggccggtacgcggcggagatccgggaccccgcgcggaaggcgcgcgtgtggctcgg

SEQ ID NO: 5837 - DNA, 449 bp, Setaria italica
  Peptide Sequence Number=SeqID_71811
caagccgtaacagcaaacaaagcaagcgagaatctcctctagctagtctgcaagacgccagcgagcggcgaggacgcgagctgtgacaccggtaggattaatcgatccacatggcgcccaagcggtcgacttcgccggctggaagcagcagcagcggcagcggcagcggcagcggtgcggagcagcccaggctgcgcggcgtgcggaagcggccgtggggccggtacgcggcggagatccgcgaccccgtgcggaaggcgcgcgtgtggctcggcaccttcgacacccccgagcaggccgcgcgcgcctacgacgccgccgcgctgaagctccgcgggcccggcgccaccaccaactacccctccgccgacgcgaagacggcggcggcggcggctccggcgacgagcgggagcgggagcgggagcatcgtgctgtcggagggcgcgtcg

SEQ ID NO: 5838 - DNA, 961 bp, Setaria italica
  Peptide Sequence Number=SeqID_71812
caactcgcaagcgccaacagcaaacaacaagcgagcgagaagctgaagcaagaagccgtcgaggacgtggatcaagcgatccatggcgccgaagaggtcgacttcgccggccggaagcagcagcagcggcagcggcgtgttcgcgccggcggcggcggcggagcagcagccaaggctccgtggggtgcggaagcggccgtggggccggtacgccgcggagatccgggaccccgtgcgcaaggcgcgcgtgtggctcggcaccttcgacacccccgagcaggcggcgcgcgcctacgacgccgccgcgcggaagctccgcgggcccggcgccaccaccaactaccccgccgccgacgcgaaaggggcggcgagcgggaacaccgtgctgtcggaggacgcgtcgtcctcctcctcttcttcccgggactcgcctctggcggtgacggtggccgtcgcggcggcgccgcccccgtcgctggacctgagcctggcgctcccgaccacgccatcgtgctgccagatgttcctggacccgacgatgatggtggccggtgcgccggcgcttctgcagttcctgccgccgaagagcgaggaggggcagagcttttcatgttcatcgtcgtcgtcggtggtgctcgacgcggcgccggcggcgggcctggggctggacctgaacctggcgctgccggcacagatggtggtgtagcgacaggctaatgagttggttaattacagtaggaattagctgatcatgaatcagaggccagccagtgtaaatagggcgcagatttgtgaatgcagcccatcctttttcctttctctgcatctcttcttccaacccaatgatgcaaaaacagaggacaatttgccttccagggcataaacttgtttttttctgctattatatcgatccgttcgttacaaaaaaacaattaacaatctcgcattttgaccaaaaaaa

SEQ ID NO: 5839 - DNA, 261 bp, Setaria italica
  Peptide Sequence Number=SeqID_71813
cgatatgtctgctcgaaagtgcttccacggtagccatagccttcgaagtacattgtttccaacacgaaggttatcccttctgctcccgagaaatcgacgagccggtgtatcttgaggcagtcggaaaggcagcggttgcggggagggggcagagtagagtagagcggaaccctccgctctgggtttcttcggggagaagaagaggagctcgcgccttgcgcttgccgcttggttggagggagattggagagagcctgaaag

SEQ ID NO: 5840 - DNA, 307 bp, Setaria italica
  Peptide Sequence Number=SeqID_71814
tccataaatagacatgaatagctttagatatcagttgctccactgtggctgagaaaggatcacaattctcacaaaagaaacattcaactttacgatgccactaacccaaccaaggatgcccatcccacaaggacaataattagtcagtagctcatcaagctcttctccctggtcatgtctgtcgctggaaatactgataaaacatcactgcctatgtattcagcccttcagtgagtatttctttcccgtaaatgccgagaatttcggttcttctttctttggctcttcctttgcttccttctctaga

SEQ ID NO: 5841 - DNA, 1214 bp, Setaria italica
  Peptide Sequence Number=SeqID_71815
cagaataaactgcacaaagaagagtaatcgcatccagtgatgtatagaacaagagcattaccaccagtaggctctgtgtttgcaggaacggcaggttttactggctcaggttctttatagtcaagtggtggagcaaagtcaacctcgcaatcagtctcaataatacttatagcattggaaggttttgtctccactatatcaatgtagtacttcttgttattatacgctaccatgatgctgtcacctgtggttagacaagaaaagttccgcaaagttttctccaagctgcaagaatgacgcaaacaggtcatcagtgttcttcagggattccatacttgaattactcactacttgtatcatgtcacaatacagcagtcatatataggagagaagggtaacagatgttccactaggataagaaatagttaataaaaggaaaatactaacattgctttggggtttgagatatctaaaaagtctgttgtatgaggctgtaacttgacatatgtgccctttgggaggttggcattttttatgaacaccatatctccctcttgcagaagaagattttgcatcatccaatatggcatgtagatcatgccttcttctgcaatgaactccagaacaccacaatgtgaagtccgttctgctgccgcattttggacttcaaaaagcataggatactcaatatgcagagatgctagacgatcaagggctgatggtggcataataactgaaaagaagcaaagtaataatcacgtaaatcttctgatggcaaataaaaggacatatggaactcggaacacattgaacagagaacatacttttgtcaccagcctcaagttgtggctgcaaaaacagtaacagagatctattacaataaattgcaaaaaaagcaaaccaaaaatgttatattgaaaggttgtaattattctagcaatagatgctgatagaatttactggcccagttaatgatagtttaaatatattttacttgattcaattcaaaagtcatgttgattaaggaaagataagttcctcattcaacaatttgaatgaaaataggcattagaacccaacctatggaatatgattcatatgcaaaggaggacaaaagaacacagaatggaataaagaattagattacagtatctcataaacaagcaactatactcattagtcatatgtcccttgaactgggtagatgatcaagt

SEQ ID NO: 5842 - DNA, 1190 bp, Setaria italica
  Peptide Sequence Number=SeqID_71816
ggatggcaaggagcatgaggacaagctgccattgacagaaacttctactgggtggccaattgagtcgcatgctgctgagttttacacgaagacaatgcttggcaagttcgtggaccacatgaagcagggtgctaaatatgatgtggtggagattgtgccaagacgaaagtacagacttgatcacgtagatcctttgagttgtgataagtggtaccgttcgtcttacatggtagatgtaagggaagatggtggctactaccaatgcgagtgtgggatgtgggatcatatgggaatcctgtgttgtcattctatccggctaatgatgcaactaatggtacgaaaaataccagaacaacacttgctgaggaggtggtcaaggaatggcaataaagttgaatccgacattgtgaggcaagcagacctggcaagttatttgcatacatcaagaagtttcagaaatgcttcactaaccaacaaggcaagagagttagtggagttgggggacctgaacattgaatgctatgatctgtgttacaagggcatttgtgaattaatagaacaagtgaagagtaagaggccaaatacagacgtggcttagccatgaagctttaagttgcaacatgctcaggcactgcaggcagctaccagcatgccagttgtgggaggcaacgaatgggtgatggaggtcagttgcatccaagagcaaagacgccagatgtaacgtgacacagtgttgggccagcaaatgcaagagatggtccaggatatgagcgccgtaggcctctatcatattgaacaaagcggtttaaaacatgcggtgggacaggacacaatgcggatcagtgcccagacagggatcctgcactggacaaaccaaaagaaccgagcagatgcactcgttgcagaatgaccggacataccagagtggcctgtggaagatctgctggggcggccgaacctgctcatggcgagctctgaaatccatttaatggcattgaacagggctccgacaacatcacattttggatgctattttgtgtggcaatttagtggacccatctttaacgactgaaacctggtcgcgctcccggccaggcaagccgtccgcatcatccaaaagaacaccggccgtcggatcgcgcgcggacggcccggatcgtctaacagaggcccggcgatcttgcaataag

SEQ ID NO: 5843 - DNA, 588 bp, Setaria italica
  Peptide Sequence Number=SeqID_71817
gccttcgccgccgatcaccttctcgtacccggggcagatgacctcgtcctggaacgcgaggctcaccttcttgccgctgagcagccggaacgagaaggaccagccggtgagcgcgctcaccagcggcacctccgccttgagcaccaggtcgttgcccacgcgcttgaacgtcgggtgcttcttctcggagacggtgaagatggcgtcggcgggcaggcacccgggccgctcgtcacccatgccttcgaacacgacctgcttccctttcttccaccccggtttcaccatcaccgtctggctcacctccttcttaacaattgacctgcccaaagcacgagccccattagtcgtctataagctctagcaattcgaatactggagtccaagagtcagtacaaggaggaacgaggaaagaggctcaggagtcattgtcactgaaagagaaaaccctcctaggccaccatccaccctcacatgtaaaagaattatgaatactgactatcgctcaaaaaggacctcaccttttgctcgataatagataccaaaattggtattaaaaggctaccaacaaacatgcacacacatatg

SEQ ID NO: 5844 - DNA, 1020 bp, Setaria italica
  Peptide Sequence Number=SeqID_71818
cctatcccctgtgtgccttggagtcttcagtttttttttttcctaatctcatcaggaattcagaacaaagacatccagctcatgccacgagcatgtggggtatccacggaacggaaggcttggctcacgtttcatatcatatagaaaacctgtatgtacaacgtcgtctccctctcccctcccttcctctcttttatgtactcacgcgctatgatatgatgagtattaacatacggccaagaaaacttgatacggtcgtcgcacttgcgccggcaccaccacaagctcggtcgaccggtccgatattccgatcccgatcagcaggaccctttcaggatctcggcgagcccggtgcgctgctcgtcggtgagctccttggggaagacgatctcgaacttcaccctgaggtcgccccgcgcgcccttctgctccgggatcggcatgccttcgccgccgatcaccttctcgtacccggggcagatgacctcgtcctggaacgcgaggctcaccttcttgccgctgagcagccggaacgagaaggaccagccggtgagcgcgctcaccagcggcacctccgccttgagcaccaggtcgttgcccacgcgcttgaacgtcgggtgcttcttctcggagacggtgaagatggcgtcggcgggcaggcacccgggccgctcgtcacccatgccttcgaacacgacctgcttccctttcttccaccccggtttcaccatcaccgtctggctcacctccttcttaacaattgacccgttcttggtgacgatgtcgcgggtgaacttgacctctttcttgcagccgcggcagagctcctcgagggtgcattcgagcttgcgctccagcggcggcgccttgcgcatgatggagctggagaactccgcgaaggcgcgccgcccgccggagttgccggagctgtacaccttcttgaactccctcgccggcgtgccaggcgcgctcctcgtgcagaagtcgtcgctgcgcgtcctatccatgcgcggcgcgacg

SEQ ID NO: 5845 - DNA, 1359 bp, Setaria italica
  Peptide Sequence Number=SeqID_71819
tttttttttttttatttatgataattaacattaaaataaaatatcaatgtacgtacatatatactatccaacgccatctggttggaggatgtttatttgccattttcatcacatgcaccggtacttattcaaatgaaagttataaggataagcatgcatgagtacacatctaaggcatgacatttatttagctagtacacatcatcatgccatgttccggtgcaatcctgctatggatagacctcaaagacaccacgagctccaaatttctttagaagcttatagtcactgaaccctgctttcatgaaaatctcacgccattctttttcgtcccgttgacgtcctttagtcattgtcatcatggcaacgtccattaagagctgggcctccaacaatggccccgcagagtagtcaatcacaatatcgccaataataacttttccaccatcctttcgtgaaggaatcgccttacggcattgagcgaggatcttcacgcaatcctcgtcagtccagtggtgcagcataagctttagcaccacagtttgagcaggtgggatgaaattgaacatgtcatcttgaacatagtttatcgcaccatcacccggtttggagctaatcgtcttgggattggccagcaccgtgcacttaatatgtgggaaagccttgacaagggccctggcaaatgtgtcatcaccagaggcaccccagcagcaagtcgttgactgaatccccttaaatatgtcacggaactcccgcattgcaattggaaccccaaagttgtcgtgggcttccaaagcttcatttgccatcttgtggtaatctgcgtcaagactctccatactctcatggaacaaagttgccccatgcagctcctcgaatggtggtgtcactacgtccttcttgaaccagtcagccagccccattgccgcatcgatgtaacgtgttgaggtggtcgtgagcacgaaagacgtatggttgatgtgtacctcgtcagggatgccatccaccaagaggtaggacacggggttgatgcagtataccccctcctccgtgctcttgtccacagtgaatacgcccgacgcagccaagagccgcatcaagcggcgaaggaacggtagcttagcagaggggagagacagtgcagtgataaggccagtgggtgaggcagccccaccaaggcggtggattgccgtggggatgccaagctcgactgcacacctcagtgccattggtgtcaggtagtagaggctgtggcgccacaagtcggcctgcgcctgcaacagctccgcgtcagtggggactacagtttgagccgtcattgctctctgcgcaacaatcttcgaagttactttttgtgtg

SEQ ID NO: 5846 - DNA, 545 bp, Setaria italica
  Peptide Sequence Number=SeqID_71820
cgccttcttcgccaccagccagccagctcaggtgggcaggcagcgccgcagcggccaagatgatggcggaggcgtggacgcaggtgctgctgccgtcgacggcaccctgcttctccgggcagccgtcctgcttctggcaggaccggctcgcggatttcggagggataggggacgagtggacggcggaggagaacaaattgttcgaggaggcgctggcgcggatcgaccggaacgcgccggacaagtgggagagggtggcggcgatgctgcccagaaagacggtcgtggacgtggtgaaccactaccacgacctcgagtacgacgtcggcttcatcgaggccgggctcgtgccgttcccgcactacagcagctcgccgccgtcgtccgggttcaccctggaggattgggacggcggcgacggcgggttcagacgcggctactgcctcaagcgcgcgcgcggccccgaccaggagcggaagaagggcatcccctggacggaggaggagcacaagtaagccccacagcccccaccagaaccatcgtcg

SEQ ID NO: 5847 - DNA, 1708 bp, Setaria italica
  Peptide Sequence Number=SeqID_71821
aaacaaacaacatgcacgaaaattaaataaacctgaattcctttcaagtttgattaagtttaccactcatatacatgcatatatactagtatatgcaccaagtaaaaaggtggccaacctgctgcacaatatctactcagcctcccccaggcttttctgcatccccttcgtccgggatctgtcaagaaacaaaaaaagaggatcaaaagctacatcgcctacaggcagatgatgctttttgatcgatggttgtatgattaatcaggccctcagatcagaaacttctggagcccctgctaccacctacgagaagaggttagctaagcgggcaaggcacgatgtccttactgctcctccggccgccgcgaccgccgatagcctcccggcgaagccgcgcgaccgcgcgtagagcacggagcagagtagcgtgcccacggcgcacatggcgccccacaccacgaacgtctcctggtagcacccggcgccgatgcagctttggtggccgccctgcgccgcgccgcgctggtagaggtaggcggcgaagtagccgaagcacagggagcccacggggatgttgctcaccaccacgttgtggttcacgccgaagttcttggtgccgaacagctcgctggtggcggagacggccaccgacgtgatggcgcccgtgcacgtaccgatcaccgccgtgctcaggtacaggaagaagttgcccgggttgaggagcaggaagaaggcgcccgccatgggcgccatcagcgacgccatggatcccgtcctcgagatggagtagccgcttttcgcggagtagtagtccaagaaggatggcagcaggcggccgaagaatccaaacgacgacgacagcgagaccagcgtagaagtctgcgcgagctgtcgcgactcggcgatctgtcccagattgttcaggaacaccagacccagggtgccgctgaacatgtagctgaagaagtagagccagaagtccagctttctcagcagccggaggccgccgacctcctcctttggtttctccgtggcggagtccccctccttgctctcaacgtcagcgatgtcgatggcgacgaccctctcgatggcgtcggcgtcgtcggtgccgaggtcgtggatcctgttctcccgtttggtctcccaaatcttgttgaggctctcgcggatcctgagcgccagcgggatgagtatggggggttgccaggagcacgccgaggctgaccatgtgctccctcgacgagagcccgttggacgtggagccgatgctgccgacgacggcgcaggcgcccgtggcgagcgtgatggcgaacatgacgaggaatgccgcgtccgtgctcgcgttgctcgtgaggtcgaccgccctgagcgacggcgccaccacgacggtgacgagcatgggcacgacggcattgagcaggaggtaggccttggccttggagttggccaggcccggtatggagtctgccaggctggtgtagaccttggcgctgaggccgaggtagctggtggcgaggcccacggcgacgcggctgctggagccgaagttgcggatgcagaggaggtagcagacggtgttgatccagcagatgccattcccggccagggaggtgagcaggaacaggtgccagtaccggaggccggcgctgtcgaggaagaggtactggacgccgtagccgacgaggccgaacgcggcgccgaacgg

SEQ ID NO: 5848 - DNA, 737 bp, Setaria italica
  Peptide Sequence Number=SeqID_71822
tacatagctcaaaagaaaaaggattatatattaatacatatgtacatgtgagtcgtgtttttgctaagcataagactcgatgcaaccttattgtacctgtgcttcacctttgcaaacaacagagatgagcctcagcattttgttaagcataagacttgatgcaaccttattgtacgtgtgcttcaccttcgcaaacaagaggagataattcaactcccagagcacacaagtccttccttagagcctcagcattcttaaactgcaacccaaccattcctacactaagagctgcttcaatgtttaccattctatcatcaataaaaatgcagcttgctggatcaacattgagatgatccacagcttgaagataaaaatcgggtgaaggcttgcgttttccagtttgacaagagcaaaatgtccaggacaaatattttgagagctttaacttatcctcgattaattggtaccatactggataatttgtaaaagcatgtatctcgtagttatttttcttcaaacaacaaagaatatcttcgacaccatcaatgtactcatatgctctcaccatgcactctttgagaccttccaaatcaaaagatctgccatcactgaagaactttttggccagctcattctcatcaatcagccccttctcgaattccgaccatgccgttgggtgtttgctttctagtagttccttcatggacattttgaagaaggcgggatctggtggtagt

SEQ ID NO: 5849 - DNA, 422 bp, Setaria italica
  Peptide Sequence Number=SeqID_71823
atgatctggtttagtgtatgaaggcgctgtgagacccgtaaccacgatagataggcagccattgacagagctgcaggcccaagaatcagagtcagataatttgtcccaatccaatagtacaatgaaagaactaagatggtcgccccatagaaaatggattgtgcatgagatgatggcatcccaggatcagaccgcaaagctgatggtctttcatggtttagcaactttttcagaaccactgacagcagagagttggtaaccgcacccagcaaaatccagataacttcagcatcatgcttccaaagagctaccggttcagcgcaaccagccaccagccatttaatcatccggttcagcgcggcctcgacaggcgcccaccggctcgcttcccttctcgggccgagcgactcctcccctcccag

SEQ ID NO: 5850 - DNA, 658 bp, Setaria italica
  Peptide Sequence Number=SeqID_71824
aaataaaagaattctagattgcaactgaatttttgctgtcccgtgggctttaaaccatcatgactcataagcagaatagtttcagggtgataattcaaagtccagggaaaacagtctgctaccacaattggttctagtgcagtagtttctaacaatcaatatcccactgcagctgtgaagtacaatcactcatccttgagccaatgacggatcatgtacatgacaaagccaacacaaaatactgatgatccgaggatgactgtaatccggaccaacagtgaagaagcgaatgcctcctgcacaagtgaatgccagagcacaaaccataaagcaccaaaggcagatcctacaccggctcccaccatgatctggtttagtgtatgaaggcgctgtgagacccgtaaccacgatagataggcagccattgacagagctgcaggcccaagaatcagagtcagataatttgtcccaatccaatagtacactgcatttcaagaaaatagatgaatcacacattttgttatactggagaaaagggtatttgatacatattgctcatggaggaactgttatatgctagcctcaatgatttagaatgaaaagtttgcttctctttgtttctttgccataaaaatctagagcacaaaataaatatgtt

SEQ ID NO: 5851 - DNA, 323 bp, Setaria italica
  Peptide Sequence Number=SeqID_71825
tttttttgtcgatgggcagtgtatggttgcattttgtttccaaggccagatgccttttcatcaacgctttgactgttgggctgggctataaatcctctctggacatgaagacaatcttatttcgaaaaagaaaaaagaaggagacaatctttcgcatatatcatattgatagcgtacgttgtttatcgaaagctgatagaggctgcatttcttgggtgtgccgtcaggcatcaaaagcaagcagctccctactttggtcatcatgctgtccttttgcttcgtgcatacgcgcatctcactcgaggtccacaatttcgaagctt

SEQ ID NO: 5852 - DNA, 293 bp, Setaria italica
  Peptide Sequence Number=SeqID_71826
ggaggaggtagacagatggggaggtgggggagaaggcatttgcaaagagggtgtagaaggcggcgctgagcccattgaagcttattgagagggagagggccaggggccggttgcttgcagagaagctgcgtatgcagagaacaaagcagactgtgttgaaccagcagatgctgcaccctgctaccaagcagaccaagaacaccagagggtagcggacggcgagggaggacgggttgaggaagacgaggcagcagtactgcacggcgtaggcggcgagccccagcgcggcggag

SEQ ID NO: 5853 - DNA, 436 bp, Setaria italica
  Peptide Sequence Number=SeqID_71827
ccggcgacttacgatgaggtagatgacggaggcgcccatgaaggtgcggtagcggccgaggtgcgcgtcggcgacgtaggctccgatgaccggcgtcatccagatggttccgacccagttggtgacgttgttcgccgacggcaccacgccctggtgcagcttcgtcgtcaggtacagcaccaggttcgacgagatgccgtagaacgccatccgctcgaacacctcgtacactacgacgaagccgcaggctttccaccctccgcgcttggcccggagcaccgggttgccgtggaggtccaccgtgccgtcctgcgtgtactcgtcgccggaggccggcgccgcctccagcctctccgccatggctggagctggccgagagctccccgagcgagagggatgggtatgacaggcactacggttctagctccgcgggccg

SEQ ID NO: 5854 - DNA, 392 bp, Setaria italica
  Peptide Sequence Number=SeqID_71828
gggagatgttgggcttggtgccgccgttgcccaaggccacgatgtacagcccgccgaagtagacgccgagctgcagggctgagaccttcgggcacacatcgccgtggcacggcggcggtttcagcgccggcagggagaccgacagcaccagcaacaccattccctgcattacattgtcccgtcacttagttattactcgttcgttgcattagtgagtagtgacactaccagtatgtgatgatttcaggtaaaaaagtttaaaagaaaatgagttcgtgttgccttttagttttctatagcacaagggaaattatagttctaggatgattttaggtcccgtttgggaggcttgtccaaaaccaacttcttagaagaagtcggagctggtgaaa

SEQ ID NO: 5855 - DNA, 807 bp, Setaria italica
  Peptide Sequence Number=SeqID_71829
tttttttaataaccaattaacagctgaattagctaccaggcaaagcaatacatatataggttatcctccaaataacagcctaattaaaatactcaagacgattgttaactcggctactactacgttgctcaatcaacgcatgatcttactcacgaagtgtcaattttcgtcgtcaacgcgatggtcacaactcacaagtcacaaccacgtccatcgtctaaatttgcagtcccacgagccgaaaagcatcgaacccctgctttgtcacggcgccgccggctccgactgcactgtcgccgtgacgccgatcgcctccgtggactccgccctgtactcgtacctgcagctcagcacaacgaacgcggcgaggttcgcggcggcgagtacggcgaggaacgcgtagtagcagtcgaggcgcgacgcgttgaggtcgttggccacccagggcgcgccgcccctcctcccggcggccgtggtccgctccacgagcgagagcacggcgctgctcagcatgctgcccacgccgtaggccgtcagggacatggccgtgccgaggctcttcatgctctcgggggcctggtcgtagaagaactcgatctggcccaccaccaggaacgcgtccgcggcgcccatcagcacgaactgcggcagcagcacgaagatggtcagcggcagcggcgccccaagcgccgccgagtggctcctcgcgaagcccagcctccggctctcgaccgccgccgtgatcgccatcgtcgcgacctggaggagaagcccggcgccgatgcgctgcagcagcgtgatcccgcg

SEQ ID NO: 5856 - DNA, 1094 bp, Setaria italica
  Peptide Sequence Number=SeqID_71830
cttgctcagcaccgccaggttgggcgtgtgcgggagccggcggcgttctcttggcgtagtgctcctcatcgagctcgtgcaggtcgcgcgggtccacgggcgcggccacggcccacttcctggccgccgccacgatgaccctggccatcttggcgaaggggctatcggaggtgggcttgtggcggtagaagggcgtgccggcggtgaagatgacaatggagacggcgaggcccagcgtggggagcgcgtagcccacggtccagccgacgttgtcctggatgtagacgaggacggtgttggcgaagagcgtgccgaagaagatgctgaacatccaccagttgaagaaggagagcttgtggcggcgctcccgcgggtggttgtcgtcgaactggtcggcgccgatggtggagatgttgggcttggtgccacccgtgcccacggcgaggatgtacaggcccaggaagaagacgcccagctgcgcgctcgtcgcctggtgcgtgcagtttgggtccgctgtgccgtcgccgcacttgggcggccgcagcgccggcagcgacaccgacagcgtcagcaggatcatgccgatgaggtatatggcggagccggcgacgaaggtccagtacctgccgaggtatgcgtcggcgatgtaggctccgagcagcggcgtgaggaagacggtgccggaccagttggtgacgttgttggaggcctccacggtgccctggtggagatggtccgtcaggtagatgatcaggttcgacgcgatgccgtagtacgccatccgctcgaacagctcgtacacgacgatgaagaagcaagccgtccagccgccgcgctcggagcggagcacggggttgccgcgcaggtccacggacccgtcctgcgcgtactcctccgcccgcatgtcgccgccgctctccatggccaggctcccagcagccccgggaggagacttctcggcaaccatctatcgggtggtgccgtggtggtaacgttaactgctcggcggggacacggtcggtgacggtgactcttgtgtcttctcccccagtgtcactcgcctgcgtccggccggtcctttaagtcttctacta

SEQ ID NO: 5857 - DNA, 1995 bp, Setaria italica
  Peptide Sequence Number=SeqID_71831
accgtgttccaaacaacatggtaatgcttctctctccacgttaataaggagcagcagcggggaggcagaggttaagaacgtaccacggctaatttttctatgcgatcatacgaaaattacctgttggaatcctgtgctttttttcataacagcataatagtggagccgcaaagttgtatgctctgcagctcgatacatgatcacgcgagtcgcaccatggctggagcttggcttcctctctcgtcaacccaatggctccgcctggagcttggctttctcggcctccaggcccatggcaatgtcgaccgtctcggtggattcggccttgtacctgtacatggcgcttagcgcgaggaaggcgaagaagttgatgccgccgagcacggcgaggaacgcgtagtagtagtcgaggttggaggcgttgaggttgttggtgacccaggcgttccctcggtcgcgcgtgatgcgcgtcaccgtggacagcaggaagctgctgagaatgttgccgatgccatacgccgtcagggacatggccgtgcccaggctcttcatgctctgcggcgcctggtcgtagaagaactcgatcttgcccactaccaggaacgcgtcggcaaggcccatcagcacgaactgcggcaggagcgcgaagatggtgagccggagctcgccgccggtgatgtccagaccgtggcgccgcgcgtacgccagcctctggctctcgatcgccgacgcgatcgccatcgtcaccacctgaaggaacatgccgatgcccatccgcttcaggatggtgatcccacgcgggttcttggtgtaccgacgcacggccttgacgaagaccaggtcgtagacgacgacggcgatgagcatggtcagcgtcacgaacgcgccgaggctcgccggcgggatctggaagcgcgggcccatgtgccggttcatcgtcgcgccctgcttcacgaacagggtgttggtctgcgcgatcagcgtgcacggcacgaacatggtcaccaggagcggcaccagcttcatgatctgcttcgtctcctccacctgggtcaccgtgcacaggctccacttcgccggcgagccgccgttgccgacgtcatccttcaccttcacggcggccttgttcaggaacctcatggtgttggtggagtccatccggaacttgcgcttcctggtgtactcctcgacgtccagctcgtgcagctccttggcgtcggccgggacggggacgttccacttgcagagcgtggcggcgaccactttgcccatgctcgtgaacggactgccctgcggcaacctgtggcggtacagcttggtgccggcgaggaatatggcgatggagaccatgagacccagcgtggggatgccgtacccgacggaccagctcacgttgtcctggaggtagacgaggacggtggaggagaagaggatgcccaggaagatggtgaacatccaccaattgaagaaggagagcttgtgcatcttctcccgcgggtcgaactcgtcgaactggtcggcgccgatggtggagatgttgggcttggtgccgccgttgcccaaggccacgatgtacagcccgccgaagtagacgccgagctgcagggctgagaccttcgggcacacatcgccgtggcacggcggcggtttcagcgccggcagggagaccgacagcaccagcaacaccattcccacgaggtatatggcggagccggcgacgaaggtccagtacctgccgaggtatgcgtcggcgatgtaggctccgagcagcggcgtgaggaagacggtgccggaccagttggtgacgttgttggaggcctccacggtgccctggtggagatggtccgtcaggtagatgatcaggttcgacgcgatgccgtagtacgccatccgctcgaacagctcgtacacgacgactgctctcgtagctgtctattctttcttcccgtcgggtacttacttcttacttactttgttagttttcggtttagttta

SEQ ID NO: 5858 - DNA, 651 bp, Setaria italica
  Peptide Sequence Number=SeqID_71832
cagacgtagctgatggatattctcaatctggcctgcatcttcttccctttccgcgcatcaacgatgtagttaaacacaggctgttcaacgcctgattgagcatctgaaggagcacatttcgattggcaaggtgctgaaggcctcatccgcgacgggctctggcaggacctggaagtagatgctgcagctgccaagccctgtctcggtgacgacgatctgtgcagaaccggaacaggtgaagaaacggccttgctcaggcgacaattggatttggagctttccgacgtctgagatgaggtgtcactgctagaatctgccttatcttttcttctccggtgaacgatctttgccacctcgtttgacggccgcttcagactcttgcccgttccttcagatggatgcgtcctccttggagagcgtcctgctgaagcatctcgtgaagagaccgacctggtagccttttcagcaggagcagcacttgtcgaagtgagaccagcagagctccggccagtcatcatccccggccaccgattttgctcaatgaccctgctggcgggagactctagtggccgagcattatcacattggtcgctgatgttgttggtcctccctctaagaggactcctcttcctctcaaccgcggctcctgaa

SEQ ID NO: 5859 - DNA, 481 bp, Setaria italica
  Peptide Sequence Number=SeqID_71833
aaaattctaaaaagaagaccacaaagagcaaaatttgttagggaacaaggacaaagcatgaaagcagtatcgaagtagttgtgtcaatgtttgcttcatcatggcatttccttacacagcatctggcatctacatgataaccagctcatactgagatgaacaaactttggatatagcatatttcactaatgatgacatcgttgagtgaaaccaagtgcaaaccaatcatgcttcacatgatattgaggaagttggactccaaccaagggaagcattctgcaaggacagcaggcgctcctatcgggtttgcagtcacagtctgtgttacttgcacaaggtggtgcaacttgtgctgagaacttagaacttattttgccaaggactcgtacagctttcgcatcttcgggcgtccaacacgaataaaaaacttaaaaaacgggaaaaaaacgtaaaaaaaccaaaaaaacaaaaaacgaaaaaa

SEQ ID NO: 5860 - DNA, 243 bp, Setaria italica
  Peptide Sequence Number=SeqID_71834
ctcatcgccgtcgcactaaactgtgctccaaccttgcggtgctcttgcctcgctgttgctgtcgtcgcgcatggacgccatggacagcaagagcaaggggagcaagaagcagagcaagagcctgctcggcaagtacgagctgggccgcctgctgggtcgcggcacgttcgccaaggtctacctcgcgcgccccgtcgccggcggcgagcccgtggcggtgaaggtgctcgacaaggccgaggt

SEQ ID NO: 5861 - DNA, 147 bp, Setaria italica
  Peptide Sequence Number=SeqID_71835
cttaagtggctttcttctgtagaagctttgtcttgaatggtacatttgtattgtgtttcagcaactgatgaacctttagtctaaattgagctacttaaggcactgcagctccagctggtctatatataattttttgttatgtaaaga

SEQ ID NO: 5862 - DNA, 414 bp, Setaria italica
  Peptide Sequence Number=SeqID_71836
gagctttcttcagatcctacgattcatcctcgccacctcccgtgccaaccccttcttccattctgcggctaactcctccaaatcttctggtccagagcggggtgtttggctcagatcgtgcggccgccatggcggatcagttcgcggattcggcgaacaatgtgatcatcgaggaggtcaacaagggcctgaacccaggaatgatagtcctgcttgtggttgcgagcttcctgctgctcttctttgtggggaactatgcgctgtatgtgtacgcgcagaagacacttccgcctaagaagaagaagccagtttccaagaagaagctgaagagggaaaagctgaagcagggtgtctctgctccaggagagtaaaacaagctatgctactgatctcatcctgcctgagctcctcttt

SEQ ID NO: 5863 - DNA, 1353 bp, Setaria italica
  Peptide Sequence Number=SeqID_71837
ggacttcgtcatgcccgccttcctcttcatcatcggtgtctccgccgcactcgttttcaagaaaaggccaaacaagacagcagcaactaagaaggctacggttagggctatcaagcttttcatcttgggtgtgattttgcaaggaggatacatccatggacgacacaaattaacgtatggtgttgatttggatcaaattcgatggctaggtgtgctgcagaggatagctattggatactttttagcagcaatttcagagatttggcttgtcaacaataatttggtggattcacccgtatcatttgtgaagaaatacttcatggagtggatcatggccttgatgattacagtactttatgttgccttgctatttggcctttatgtttcaaactgggaattcggagttaaaattagcaattcaaccctttcaatcccaagcaatttagttgaaatgaagacgatccactgtggaattagaggtagtcttggaccaccttgcaatgcagttggcttggtggatcgagttttgctcggtgaaaatcacctgtacaagaatccagtctacaaaaggacaaaggaatgcagtatcaattctcctgattatggaccgcttcctctgaatgcaccagactggtgcctggctccatttgatcctgagggtttgttaagtacactgatggctgcagtaacttgctttgttggtttgcactttggccatgttttaattcattgcaagaatcattcacagcgaatgctattctggctgctagcttcgacagtgttgacaatctctgcgtttctactgctagtattaggcatgcctttcagcaagcctttatacacagtgagttacatgctactcactgcaggagtctctggatttctgttgctactgctatactacatagttgatgttattcataccaagaagccatttatcctattccagtggatgggcatgaatgcacttatagtctacgttctggctgcttgtgagctgttccctactcttattcaagggttttattggcggtcacctgagaacaacctggtggacattacagaatctctgctccaggccatcttccactcgaagcgatggggcaccttggcgttcgtcctcctggaggtagtcttttggtgcttggccgctggcttcctccacatgaaaggcgtctatgtaaagctgtagaatcaatcatagacacacgtgttgtggtatccaccgcgccgagtccctgtaaacatcatcgtggtttctacggcttcttgtatgtgaatgtggtgcgggttgggaccatgggtcttgttgcggttgacgaccccatgatctatctcatcctccaattaaaa

SEQ ID NO: 5864 - DNA, 469 bp, Setaria italica
  Peptide Sequence Number=SeqID_71838
tttgtcaggcatgtaatagcaacaagtccaactgttctgagagacactgtaggcggcttaagcttgagaacatatggaggagagccattggaaagtgtcgatcaaggtcagcgaaaagtttcctcaggaaagaaggcttcttatcatcggtccatgttaccgaagaacttgccatagcagaagttggatttggacacccggatcacctttcaagagcagagaaaatgcaaagtctaatagaatgcgctttacaacatgttctcgggtgtaatgtggagatcagattcaaaacttgtatcatgtccagtgaggaaagatgctaggttgaagagacagtcgttcagttttctcaactgctcaggccggaagcaagagctgtcagattcagtggtgactgatgaagatgaagctgtgaggcctggagcaaagagagacacccccttaaaaggctacacctccagtcagaagg

SEQ ID NO: 5865 - DNA, 259 bp, Setaria italica
  Peptide Sequence Number=SeqID_71839
gacgtgagctaggcgattggatttttttttttggtctaaatgcttttgaaatcgctgagctgtataatttggatttaacttgatgtccattgtttcatgatggatacatcatggtctagctaagtatgtagtttaagacatgacagtatacaactcttaccagatggttcttaaaaagctgtggatttctaattcattaataaagggatttgtcttctcctgttgaagagagtgatgtttcatttgaagagccccattt

SEQ ID NO: 5866 - DNA, 1010 bp, Setaria italica
  Peptide Sequence Number=SeqID_71840
gatccgtgttggtatatacaggtacagctagtggtattatgtacacgcaacaaaggaggagtggctgttacatagccctgattcagtcactcaagctggcacttcatcagacgaacggaatgaccgcatgacataaactggatcgccaaccttgatgatccttccttcgctgtttgctgacagagattccttgcagactgcattttgcccaaagtacacctgccgtttatttttgtggcttggaagcagcacttcaccagaccgatatttctgcaaagtttcagttggttcggtagggctaggtattccagtgtcttgattaattgtaggcaccttgcaacggccgcataacttcacacctcgaaacgttagcttgtttatctttattgttttccacagatcctctgcgtatgggtggcatccctccactaaaatatttggtctgaagcggttaattggtatgggctcttcaagtatctcatttagtgcatccagtgatccctgagaggttatcagaaaagggtagccatcagaaaacatggttttgtaacctcgtgcatagtcggggtcagtcagtctagtttccgactcttctttaaagcgcacgagtcgagttgggttcccaaagaaattggaaaaccattcagctgcttcagcaccttcatcataagcggagccagaccactcccacacagagacatcatagattgtggcgcattctgaagcaagagggatcttcaatggttccattcctggtgctctgataaccatgtggtcgtcgggcgtggggagccagtcctcggcgaaggcctccggcggcagctccacctggatgagcgcgagcttgggctccaccctctgggtaatgcctcgcccattggagttcaccagcatccactgccgatcccaccggaacccggtggcggtgatgggggcctggggcacggagatgcccctgacaaggaacttagaattagggtaacaacgaaagaataggaacgtacaaccga

SEQ ID NO: 5867 - DNA, 1273 bp, Setaria italica
  misc_feature (1125)..(1273): n is a, c, g, or t
  Peptide Sequence Number=SeqID_71841
cggatcggcaagaccttctagacggttctcaaacccaccggccactgcggttatcgacagcaccaggtcctccacgaatcgagtcgccgcgagcagaggtcatggcggattcggccgcgccccgtccaaccgtcctcgtcaccggcgccggcggccgcacaggccatattgtgtacaacaagctgaaagagagatccgagcaatttatcgcgaggggcctagtgaggacagaggagagcaaacagaaaattgggggagcagatgatgtttacattgctgatataagggatgcagatcatctagtgcctgctgttcagggtgctgatgctctcataatcctcacaagtgccgtcccgaagatgaaaccgggtttcgaccctagcaaaggtgggagacctgagttctactatgaagatggaatgtaccctgagcaggtggattggattggccaaaagaatcagattgatgctgccaaagctgctggagttaagcatatagtgttggtgggatccatgggaggaacaaatcctaaccatccattgaacagtcttggtaatggcaacatactggtatggaagcgcaaggctgaacagtatttggcagacagtggggtcccttatacaattataaggcctggaggtttgcaagataaagatggaggagtgagggagttagttgtcggaaaagatgatgaacttctccagactgacacaaagtctattcctagagctgatgtggctgaagtttgtgttcaggctctgcagtatgaagaggcaaagttcaaggcgtttgatttggcttcaaagcctgaaggtgtgggcacaccaacgaaggactttcgggcgctgttctcccagatcatggctcggttttgaccgatccgctaagaatcctaaggtctacacaccgttggtttccatggtgttgcattccattgcttgtggacttgtactagatatataaaactaagtagcttgtgtaatggggagctgtaatttggtgtgaatccaagtgtgattgcaaaatcgcattgtcaaactactgaaaggaatcggtgccttattgtaagatcctttttctttcgataaagtaatccgtgccttattctaaaagaaaaaaaaaaannnnnnnnnnnnnnnnnnnnnnnnnnnnnnnnnnnnnnnnnnnnnnnnnnnnnnnnnnnnnnnnnnnnnnnnnnnnnnnnnnnnnnnnnnnnnnnnnnnnnnnnnnnnnnnnnnnnnnnnnnnnnnnnnnnnnnnnnnnnnnnnnnnnn

SEQ ID NO: 5868 - DNA, 488 bp, Setaria italica
  Peptide Sequence Number=SeqID_71842
catctcagggcaagttacaggatactttctcctaataagtgtgattccagagtcattacaactggctccagtaacagaaaaaatcttcattgtagagaaagtttgcctacttgaagaacagactctaccatccagtacatcattggcaggtttaaccaaatagatgtcgaagttccctgtagccaaacggattgaggtacatggcttgccaagatgaacctcattaagaaattcattttgaggatgagatgcagcttctgcgacgttcagacatgacgtgtggtcgatcaccaggaacttatccaggacagatgggtggcttaaatcccactgaaactcagatggaaagcaaaggatgattcttgcaggtgacatggatatctgaacctttagacttccatttgaggacacacctgtgctggtggtcaacctgcttccattatcatcaccatgcatgtgaattttatgctctccatgtgacaaatcag

SEQ ID NO: 5869 - DNA, 413 bp, Setaria italica
  Peptide Sequence Number=SeqID_71843
ttcgcggcgtccgcccggcagccaggccgacgcgcccggctgggagtgggcgccgaacgccgcggcggcgctggtgctccagctggccgtgtgctcgctcctgttcttcttcccctcccgcgcccgagctcacgcgcccccgcccccgcagccgccgccgcggccgttgaggcgacgcaggaggaggatgaccaggagtgggaggccgcgctgcagaagtggaagaccaagacctacgcgctctcggtgcccctccgggtcgtcgcgctccgcggctccttccctccctcgtggattaaggatttcgttaaggcccagggcaagaggatcaaattcagccccgagctccgtgctaatcttgatgggatattctctgagatgtcacaatgtatggacaagggtcaagttaagcc

SEQ ID NO: 5870 - DNA, 450 bp, Setaria italica
  Peptide Sequence Number=SeqID_71844
cggatgaacttggggcggccgccggatgcgcggtgcgggttggagagctcctgggcctcgaagatggtggcgtggagcgtgccgtggagcaagatctgagccatggctccctcccaagcggtccgcctaacaccagtcgcctgcgcagcaacaacgcacactcccacacaggagcgtaagcgagaggactagaccactagggacaaaaagccggcagcaactagcgcacagatcaatccagccccgccccggcggcgagcgaaggaaacggagataaaagacggcaccgggcaacggctgctcccgccttgcccggccgagaccagagcaggaacagtacacggaggaaccgcgccgaaaaatgggggaacgggggctgccggatctgagcgaagctgcagagctctgcttactaagcagaggatagcgcgagggttaagggagggctta

SEQ ID NO: 5871 - DNA, 456 bp, Setaria italica
  Peptide Sequence Number=SeqID_71845
tccgggtacgcccgacccgggtcttctccagatcaatggtggcatatatcttggtggtgcctttgccgacacccaccgtgtcctcgatcccctccacaagcttgcggatgaacttgggggcgccgccggatgcgcggtgcgggttggagagctcctgggcctcgaagatggtggcgtggagcgtgctgtggagcaagatctgagccatggctccctccaagcggtccgcctaacaccagtcgccggttccgttccgggcgggcagcgtggccgtcgtgacgatggcgatggcgagaggctgttgaggatcgggagggagacgcggggtagtggatggaaagaaaaaaggaaagcgaggcggggaaaggaaagggccggccgggaagccgatccgatccgatcaagcgagattataaaaatggtggtggatcgagggagggaggagtggtgcgcggc

SEQ ID NO: 5872 - DNA, 638 bp, Setaria italica
  Peptide Sequence Number=SeqID_71846
ttctaacgtccctattggggttagtcttgtaggtaggttgtcccttgggtaggttccttgcttccaggtcgtcactcgagtacaggtcccagtacttctcggcaatcttgttcaccttctgcacgcactccatgctctccgggtgttggaacacgtcatccaacatgcccaggtgctcgtaccacagcgccatccggaagccgtggatctggccacgtgcaggctgcctggtcgccaggtggtacggctggtacgcgcccatggcaatctcagagtccctggcgccatccatggacctctggttgatgttggcagaaccgatgatgatgtactcgtcgtcaactatcatcattttggtgtgaacatagatcatgaacctcctagcctcctgagcccggctgtaatcagtatcaggctctggctgttccccaggttcgtactccccctcctgcttcacctcacggttacctaggcagaagaaagtgaggtaatccttggggtttgcttctatttccttggcccggagagcttgtgtgatgtaagtgtaacaatacaatactaccaattagttactacctttagaccaagtacaaagtaaatttaagtaaccttaagttaaacggttaaagttaacttaa

SEQ ID NO: 5873 - DNA, 555 bp, Setaria italica
  Peptide Sequence Number=SeqID_71847
tcacgcccccgatcagaaacagaaacgtagtatcctcctcatttcgtcccccgccctcgaatcgcgcccctgttcttcccgattctcaagcattcacatcgtcctccgccatgatccggttcatcctgctgcagaaccgccaggggaagacgcggctggccaagtactacgtcccgctcgaggactcggagaagcacaaggtcgagtacgacgtgcatcggctcgtggtcaaccgggaccccaagttcaccaacttcgtcgagttccgtacacacaaagtcatctacaggagatatgcaggactctttttctcgatgtgtgtggatatcaccgacaatgagttggcatacttggaatgtatccatctgtttgtcgagatattggaccatttcttcagcaatgtttgtgaacttgatttagtatttaacttccacaaggtctacttgatattggatgagtttattcttgctggagagcttcaagaaacaagcaaaagggcaattatcttttaaagaaaacttaaaagtttaaaacttaaaagaaaaagaaactaaa

SEQ ID NO: 5874 - DNA, 891 bp, Setaria italica
  misc_feature (864)..(864): n is a, c, g, or t
  Peptide Sequence Number=SeqID_71848
cttctgaccagcgttgaccggtgagcctgtggacaccgcggcttccctcgtggcctcatctgaccgtcgccgccgaaggggaaaacgcaggtgttcttgtttctctctccagcccaaactggtggcggaatcaacccaaaaccttgccagatttccaacctgattacgacatgatccggttcatcctgctgcagaaccggcaggggaagacgcggctggccaagtactacgtcccgctcgaggactcggagaagcacaaggtcgagtacgaggtgcaccggctggtcgtcaatcgggaccccaagttcaccaatttcgtcgagtttcgcacacacaaagttatctacaggagatatgcagggctgtttttttcaatttgtgtggacataactgacaacgagttggcatacctggaatgcattcacttgtttgttgaaatattggaccatttctttagcaatgtttgtgagcttgacttggtttttaattttcacaaggtttatctgattctagatgagtttattcttgctggagaactgcaagaaacaagcaaaaaggcgataattgagcgaatgggtgaactagagaagctggaatgagggtgagggggaagaggcggccgctgcagtgccccatggctgctcaccatttgtacaataatttgtaggtgttgtgcatttactttcgttgttcttcatttcggatttcattggttgggtgaatggtccatgccatcactttgtctcaagtaaccgttgcttacctgagattgcttgcatgttacagaaacttcactgtagttagtttctcactgcagcgattaaaaaaaaaagttttctaactttgttgccaaaccaaaaaaanaaaaaaaaaactaaaaaagagaactag

SEQ ID NO: 5875 - DNA, 1373 bp, Setaria italica
  misc_feature (1314)..(1373): n is a, c, g, or t
  Peptide Sequence Number=SeqID_71849
cgtcccggggctccgcctcgccgccaagggcaaggtgagggacgtgtacgagagcggggagcacctggtgctggtgaccactgaccggcagagcgcgttcgaccgtgtccttgcttccatcccgtttaaaggccaggttcttaacgagacaagcctttggtggttcaatcgaacccgtcacattactccaaatgcagtagtgtcttctcctgataagaatgtgacaattgccaaaaggtgcacagtttttccagttgaatttgttgtgaggggatttgttacaggaaccactgatacatctttgtggacagtttacaataagggtgtcaggaactattgtggaaatgctcttcctaacggcatggtaaagaatcagaagctatctgcgaatatactgacaccaacaactaaagctgcagatcatgatgtccctgtcactccagatgagataatcaaatcagggctgatgtcaaaggatgattttgatgaggcaggaagcaaagccttaagcttgtttgcatatggacagcaagtggccttagagaatggattaattctagttgacacaaagtatgagtttggaaaaacagcggatgggacaatcgtgctgattgatgaggttcatactcctgactccagcagatattggattgctaattcatatgaagatagattcaaatctggtcttgaacctgaaaatgttgacaaggagtttttaaggctttggttcaaggacaactgcaatccatatgaagacaaggttctgccagaagctccggaggagctggtctgtgagctagcctggcggtacattttcctgttcgagacaatcacaaatgcaaaattcgagatccctgaaacacaggaaccgattcatgaaaggatctcaaggaatgttgctcaagccttacgggacctgtaattgctgatggagtatcccggagcagatattgctgatgacagcaagaggtgaatttctggtactgatattcccgcggtaattgtagcatgtgcacatgccatatatccttccagtaaaggttgccatgacggcttgatgaagcgaaactatccacatcttccgtgatgtattgtggtaataaattctatcaggagccagttgtatttaagtgagctactgccatgctctgctgtttgatctgcttggagcatgacaagggatactaaatagagaaatgcaacaagcatacttgagagttgagacaggaagatgcagtgtgcataccgttattactctaatttcctcgtgtaagtcagtgtaacattatcaaatggctgagtttgccaaaaaannnnnnnnnnnnnnnnnnnnnnnnnnnnnnnnnnnnnnnnnnnnnnnnnnnnnnnnnnnn

SEQ ID NO: 5876 - DNA, 559 bp, Setaria italica
  Peptide Sequence Number=SeqID_71850
gaatgcagttgcaaatagctgcacagatctgaagagcatcatcctgtggagctgccggcacgtgacggaggccggggctggtggcgctggtgaacaattgccggcggctggagtgcatcaacgtgggcggcatgcgggtcccgccggagagcttcgtgggcctgctctccatcagccccgccctgcggatcaggtccatcccccagatcctcaacgccggggtgcaggtctcttgattgatgccgccgtccatggacaaggattgttacaaaagcccgccatgagcccatgcccatcactactacttgttcatggcaggaatcatcacaagggatccatgaaataaaggatcaattgttgtttcgtgttgtcctgattattgctctccaaaaaaaagatgtgttgatttgaaaattgtatcttttgtatattcattcacacctgtacatgattttacacagaataagtggtaccaccacaagtacagcttgtgagaggaagggcatacatgactatgtactaatgaaccatatagtaagttaaagttacaaaaaaaaaa

SEQ ID NO: 5877 - DNA, 1026 bp, Setaria italica
  Peptide Sequence Number=SeqID_71851
ctccgtttcccgtttcctttttcttgctcccgggctccctcgtcgctctcttctcgagttctcgcacgcctctcttcttcttcggtttgggtccaacaagtggagaaagggcaggatgaaatccggggagcggccgaagctggtgcggggcctccggcaggactcgcggcggttccggctgctggtcatcgtcgtcggcttcttcctcgtctcgctcaccttcgtcgtcatctccaagcccgacgccatcctcttcaacctgaacggcaagctgccggtggaccaggcgccgacgtccatcctgatcaagcagaaggtcaactcgccgccagccacctcacggaagacctccaccgacgctctcccaggtggagatcctagagttgtcgacgacgaagccgatgtgagaccaaaaggaaccaaaggcgaggaagaggagagccgggtgctgagcgagcccgacccgaccagcgggatgacggagcatacccccaacaaggacgggagcggccggaaatccgacgaggagacgttaggcggcggaggtgacggcgaggggaaaaggaaggagggggaggagcgtgggcacgcggcggagaagcacaaagtcacgctcccaaccgtttccaattacaccattcatgacaccgaggacaccgaaaatggcaagcaagacgacggtagttccgatctgcaggggagcaagcccctgtgtgacttctcaaactttagagcaaatgtgtgcgagatgcgtggtgatgttagagttcacccaaatgctacctccattatgttcatggagcccgccggttcacggagagacgagctgtggaaaatcaagccataccctcggaaaggggacgagttctgcctcagccatatcacagagctgacagtgaaatcaagcaaagtggccccggagtgcaccaggtaccacgatgtgcctgctgtgatcttttcactgacagggtactaccggaaatctgatgacttcaccgattcttgttcctattgtactttctacct

SEQ ID NO: 5878 - DNA, 770 bp, Setaria italica
  Peptide Sequence Number=SeqID_71852
tgcggctgcggctgcggctgagagggtattacgactggggaaggaggtggaggtggagtgcggcgacatctccgcctcgcaggaggacctcctcgcccgcgcccccttcctcggcggcggcggcggggaggaagaggccgaggtgttcagtacccctcctcttactcagggccagcagggtcaacagagccagcagggccaaggggtacaagaggaggaggaagatgccatcaccatgtgctccctcccgttcacccagctttccccttccgttccctcttcggaggacaaggaggatcaggcgctggcggtctccaagccgcggaagcctcgggtttgcaccaggaaggtgagaggcgccaggatcaggactccaacaccgagcccgaaccagagccctgacaatcgtagcaccagcaccaacaccagcagcattgtcgaccctctctatagggctgtgctcatgatccccacaaatcctgctccacccaccgctgctgaggacctcctcgcgcttgctcgcaaccgcggcatcttctaacctccctagttcgcgatgatggaagctaaaagtttgttcgataaggagggccatagagacctgagaacaccaacaatgtcagatattgcttatccgagaagctgatttgggaaatcctggggatttggagatctccagggttcttcagttggtcagacatctcccaggcagtttaccagcagctaatcattggagaaggcttaagagtagagacaaattggcagagcat

SEQ ID NO: 5879 - DNA, 531 bp, Setaria italica
  Peptide Sequence Number=SeqID_71853
tcaccatcagcaggcacagcaccacggccgcggcgcccgccaccggggacgacgacgaccccttcttcgccgcccgccgcctcgccgccgctggcgggaaaagcacccccgagacggacggcgaggacgacgaggcggtcgaggagcgagcggacgaggaggaggaggaggaggagtagcccgagtccagcgaagccgcggagctcagcggcgccgaggacgccaccgacgacgccgtgccgaacaagccgtagacgtcgtcatcggcgtccatcccccgcttctttgacttggccggtggcggtgatgccgccgacggtttcttcttgccgctgcccttcttaccggacaagaacctcgcccggaacgacatgctccggccacgctggtcccggtggcgagccgccgcctccgcagccgcttcgtcgtcggccacggcggccgcaccgccgaagcacatgaagagcttcattgcgcgctcgatcgggcgagacgaaaggtctcgatcggtcggtggacggtggtaacaag

SEQ ID NO: 5880 - DNA, 384 bp, Setaria italica
  Peptide Sequence Number=SeqID_71854
tttttccagtaacacgatctgattgggcaactgaaagtcctgctgggcatccaataccttgaagtggtgtttgatacaataatgtgtgaaagcagaagtcagcaaatactagaccatcattggattcagttattgctcgatattttgaagtggtagtgtcatccaccttatgtatgttacattcaccgatagcctttgtcacaagtctcaagatgatcccttgatgctgagctggaacatttgatatattggtcaagaagtcaggcgcaatgtttcctttctcctcggttggcaggcgttcaaacgccatctcaatatatactatgcagaagtttcggacaattgctgaggaatagattcagtatagatattccataaatccag

SEQ ID NO: 5881 - DNA, 747 bp, Setaria italica
  Peptide Sequence Number=SeqID_71855
ccactccatcgtaatataatctcaagagtcaacactccagatttgactcctgaagaaaacacatggtcttgcttacatgcttcagtcactaattacaatatcagtatgtctaatagtaggtacagttaacttaaggggctgatcctccccggtatactatttctctgaagagatctacacatttgacaaccttgcaggactgcctgactgcagaaaggcactctgcttgggttcctacgcaggctgcagatttctgatcacagaacaacaggaacatgatccacgtcctggcaatctgggatgcagatccatgtctgaatctagtctttatgcgtatatacgtgcatactcatatgtcgtcggaccagtcctgggctcgccctcggagaagagcgcctcgacgatgttgtcgatgagggagtcgacgaaggcgttgcaccccagcgtgaacatctggccgatcctgttgcgcgcgctggaggcccacgcgaacgccgccgcgcaggccaccacggccacgcacacccccgccgcctcctcaatctccatcgcgtccagcttcttgaacagcgagctgcccgtcgtcagctccaccgccaccgccgccgcgaacgccacctgcagtagcaccagcaccggatcagaccatgcatccaagtccaacatgtgcaagctgagagccacgtctgaacaaggagaaaagggaggaaaggagcaagataatctcatcgctcaccatggcgaggc

SEQ ID NO: 5882 - DNA, 1095 bp, Setaria italica
  misc_feature (1)..(107): n is a, c, g, or t
  Peptide Sequence Number=SeqID_71856
nnnnnnnnnnnnnnnnnnnnnnnnnnnnnnnnnnnnnnnnnnnnnnnnnnnnnnnnnnnnnnnnnnnnnnnnnnnnnnnnnnnnnnnnnnnnnnnnnnnnnnnnnnngacacgtaagaaacacagcgtattagattttatctccactccatcgtaatataatctcaagagtcaacactccagatttgactcctgaagaaaacacatggtcttgcttacatgcttcagtcactaattacaatatcagtatgtctaatagtaggtacagttaacttaaggggctgatcctccccggtatactatttctctgaagagatctacacatttgacaaccttgcaggactgcctgactgcagaaaggcactctgcttgggttcctacgcaggctgcagatttctgatcacagaacaacaggaacatgatccacgtctggcaatctgggatgcagatccatgtctgaatctgaacaaaaattcagatcaacttgcttgccgttgtgcagcgacgacgaagcttgcgaaatatacggatctcaacagctcgatctatctgtaaatacttgctcatactctacgtatatacagtactctctacctagtctttatgcgtatatacgtgcatactcatatgtcgtcggaccagtcctggggctcgccctcggagaagagcgcctcgacgatgttgtcgatgagggagtcgacgaaggcgttgcaccccagcgtgaacatctggccgatcctgttgcgcgcgctggaggcccacgcgaacgccgccgcgcaggccaccacggccacgcacacccccgccgcctcctcaatctccatcgcgtccagcttcttgaacagcgagctgcccgtcgtcagctccaccgccaccgccgccgcgaacgccaccatggcgaggcggccggagatggtctcgaagtcctggctcttgcgggagctctcgatgtagtcggccagcgacgcgaagaacgggagcggcgccggagccgccggccgagtccgcggccccgctcccatccttcctccccggacggatcctaataactactaacgtaataataacaagtaactactactaacctaagtactta

SEQ ID NO: 5883 - DNA, 1412 bp, Setaria italica
  Peptide Sequence Number=SeqID_71857
ttagaataaagacgacaataaagggagctgcgggagaactgggctgccctgcgtgatggttctgtggggtttgctccacgtgtgcctaatggaagagggaaagatactggttccacttctgctgctactgatcatcagcgtcaccgtcaaacgacacctgcaactgccagctacagaaatggtgctcctgctacttctgctcagcagccaagaccttcccctgaggaaactagtacctcactaggacacagtaaaaaagtctcgcacaaggacgctcgtgatgcccataaggcatggaaaaggttggagatcgcaaaaacttctggtgggaggaagatatctagcaaacctgcctcccttagctgcagcaccccattttccatggggaacagatcaacttcttacagtcctattgattcaattttgggacaaaagaatggtaacctgcctaataaggtgtctcaacacaatagagcaaactgtggtcagggtacagaaatggaaagtacaccacccacagaatacacagcagaacgccgtagcttgcctgaggacagacatgcatgggttcatgaaaggcaatttcttttcggaatcgaataaaatgaggaaagtctaaatggtaaagttgactcatcaactcaagatcaacatgttgatcaaccgttagcatcttcatgtagtacaggcggattagagaaatccaaatcaggcatgctgcatccactgaagtgcagttcatcatccggtcagtcccctgtgatatcatcactacagttggggcctagggctgggagccaatctactatgatggtaaaccctgaggaaccctcagctgtttgtgctgcaacaaccaatgaaataggtagtgctgcaaccgctgaagttagaaaaagttctagagcagaccgtcatgagcggaagaggaaacacagttctgaaaaatgcagtgatgaaggacccaaaagatccaggtcagcctgtaaaattgcaaaaagtgagatttcttcgctggctgttcgcgagctgaaactactcaagatagacaagacgcatggctctgaaaccttcaaggaagttgctcggacagcaacacatactgtcttggcttcctgcggatttgagcattcgccatcgcagtcccttgcactctcaagaccggtctgcaagcacagccccaaagtcaaagcgcagatgtcatcagcgataatcgattcttgcagagaatgcttgcgtagctctgtgaaagagccatcagcttagcgttgttgggtaggcatatggatcaaaccggtgcctcctgttagattctagacatttagtcttgagattctctcttgtctggtcattgtgaatatcgtacagcacaaactagagacaagttgtacatttcatattttcatagcatagga

SEQ ID NO: 5884 - DNA, 295 bp, Setaria italica
  misc_feature (283)..(283): n is a, c, g, or t
  Peptide Sequence Number=SeqID_71858
cgttccccaccatgaggtacgccgaggccaaggcgctccggatcgggaagggcggcgcgctcgagtgcgcggtgtgcctcagcgagttcgaggatgaggagcggctcaggctgttgcccaagtgcagccacgccttccacccggactgcatcggcgagtggctcgccagccacgtgacctgccccgtctgccgctgcaacctcgacccaaacaaggacacgagtagcgatgaggagccgagcttcggatcgattccggtagcgagcagcatctccagcgaacngtggttgcacgg

SEQ ID NO: 5885 - DNA, 447 bp, Setaria italica
  Peptide Sequence Number=SeqID_71859
cctcagccttagttaactgtccttccgcatatgcttgattcccccttaaacgccatgtttcacaatcttcatggtgttcaaagttttctgtttttgtgcattccgcacccccgcttatggttaccctgttaggttccattttgatgtattcagtccactgagcagctgaatccccacattgctgagtagctgaaacttctgagcgtgcaagtccaatggcagatgaaggaaggctttgagtagagttagcatgattacacattcctccaccttttttcttgttgtgtcgtctttgtaggtgcaatgtactttgattaaaagttgatgcagaaaatatgaaatcagattgaccagaatgttccgtgtttgctgcagaagtaaactcagttccatcacgactactttctgttatttgcaaagcagagctgtaagaattgccttggacga

SEQ ID NO: 5886 - DNA, 341 bp, Setaria italica
  Peptide Sequence Number=SeqID_71860
agagtaggcggccatgtccaggttctggaagccggggtcggagaagccgagcaccctgctcgtcgacgacgaggagggcggagttgtcttcctcccctcctccactagctccgcatcctcctccgggtttgggtacgcgagcttggagaggcagcggcagcgtctgccggtgtacaggtaccgtaaggccatcctctacctggtcgagcggcacgccaccaccattgtcgtcggcgagacaggcagcggcaagtccacacagatccctcaggtacttcctacctcaaggaggctggttgggctgatggtggtcgacttataggatgcactcagcccagacg

SEQ ID NO: 5887 - DNA, 250 bp, Setaria italica
  Peptide Sequence Number=SeqID_71861
ccggcatgttcggctgcattgcgtccatcaagcgccccgacctcttcgcccatctcgtcctcgtcggcgcatccccgaggtacatgaactcggaggactacgagggcgggttcgacgagtccgacatcgaggcaatgctggccagcatctcgtcggacttccgtcgctgggccgagggcttcgtgccgctcatcgtcggcagcgcggacccctcggcggtggagcgcgtggcgcggagcttcttcgccag

SEQ ID NO: 5888 - DNA, 1003 bp, Setaria italica
  Peptide Sequence Number=SeqID_71862
tttttgcccatcgtcggctcccaagtcccacctcggcgaacggcgaagagcggcaaaaatgctccagtgcatcttcctcctctccgattccggggaggtgatggtggagaagcagatggcgggacaccgcgtggaccgcgccatctgcagctggttctgggactacgtcctcgcccacgccgccggcgacccgtccaaagtcttgcaggttgtggtgtcaccaacgcattacttgtttcatatctatcgcaatggtgtaacgttcttggcatgcacccaagtagagatgcctccactgatggctatcgagttcctttctcgtgtgggtgatgtcttgacagattatcttggagatctgaatgaagacataatcaaggacaactttgtaattgtatatcagattttagatgagatgatggacaatggttttccactcacgactgagccaaacatcttgaaagagatgattgccccacctaatattgtgaacaaaatgttgaatgttgtgactggtaaaagttctactcttggcagcaaacttccagacgcagctgcttcttatgtaccttggcgatcaacagtagtcaaggacgcaagcaatgaagtctatgttaacatagttgaggaacttgatgcatgtgtaaacagagagggggctctagtaaaatgtgaagcatatggtgatgttcaagtaaattgcagcctcgcaggtgtaccagaattgactatgtcatttgcaaaccctgcaattatcaatgatgttacgttccacccctgtgtccgattcaagccctgggagtcaaatcaggtcctatcatttgttcctcccgatggacaattcaagctcatgagttacagggttaagaaattgaagaagacaccaatttatgtgaaaccacagctgacgtctgattctgggaattgccgtgttagtgtgatggtggggatccgaaatgatcctgggaaacccatcgattctataacagtgcagtttcagttgccc

SEQ ID NO: 5889 - DNA, 2184 bp, Setaria italica
  Peptide Sequence Number=SeqID_71863
aggacacatcatcagggtaggctcgccttttccatggctctccttgctttctcctgtctcagctgatcacttgggattggggttcagacctcgggtgaggcctgaggcgagcaagatggggttcttcttcacctctcgagctgctgctcggttcttggatggaatcgggcggcccggcgtctccaccgcagcactgctcctcacagcagccagtggcggaggccttgtggcgtatgctgattccgctgcagaaagtgctccggagccatcccatgatgctcccaagaagaaggtgctggttcttgggactggctgggctgggacgtcgttcctcaagaatctcgactgctcccagtatgaagtgaaagtcatatcgccccgtaactacttcgcgtttacacctctgcttccaagtgtcacatgtgggactgtcgagccacgtagcattattgaacccataaggcggatgtttgagaagaaaagtaaggatgttacgttttatgaagctgagtgtttcaagattgatgcaagtaaaaaaactgtacattgtcgttcagctgttggaactaatcttgatgggaatggcgattttatgcttgattatgattacttagttgttgctcttggagctactgtaaatacatttaacactcctggagtgctggagcactgccactttttgaaggaagtagaggatgctcagaagataaggaggagtgtgatagactgttttgaaaaagcatcacttccaaatattagtgaagaggagaaaaggaaaactttacattttgtagttatcggtggtggacctactggggttgaatttgcagcggagttgcatgattttcttgtcgaagatctggtgaagctataccctgccattcaagaatttgtgaagataacaattattcaatcaggagaacatatattgaacatgtttgataaaagaatagctgcatttgctgagttaaaattccagagggatggcatcgaagtggctacgggattcagagtggtaaaggtctctgatgatttgattacaatgaagagcaaatcagttggtgaggaggtgtcagtgccatatgggatggctgtttggtctgctggtattggcactcgtcctgtgatcatggatttcatgcagcaaattgggcagactaatcggcgtgccctggcaactaatgaatggttaagagttcgtgagtgtgaaggtgtctatgcaattggtgactgcgcaacagtgggtcaaagaaaaataatggatgatatttcgatggtattcaaaatggcagataaggacaattctggcactttaacactgaaagaaatcaatgatgttttggaagatatttgtataagatatccacaagtagagctctatatgaaaagtatgcacatgcttgatattgcggatttgataaaagatgcaataggtgattctcacaaagaatcgatggtggttgatatagaggagttcaaaaaagctctgagccatgttgattctcaagtgaaaagtgctccagcaacagctcaggttgcctcgcaacaaggaaactatcttgctgaatgttttaacaaaatggaaaaatgcaaagagcaaccagaaggcccactacgcatgacaggggggtcaggccggcactttttccgcccattccggtacaagcatttggggcaattcgcacccctgggtggagaacaagctgctgcagagctccccggcgattgggtttccatgggccacagcactcagtggctctggtactctgtgtatgccagcaagcaagtgagctggcgcacaagggtactggtggtctccgactggactcgcaggttcatattcgggagggattcaagccgaatttagcgccgccaaaccgagcgcaccagccttcctctgtacagggaattctgctgaataatgattgatttgctggagcttgagcaagcaaagctgtttcttgtccctccctaggtccttccaacgaaactgccgttctcctctgtgtgctgcacggtgttcctttgctcctgccatatggctctcctagcatgtgaagcagatttggaacaatgaggtcactttttagccgtcactgtagccccgtttggaacatggaatctgattattgaggcaggaaattgagccgtttaatgtgaaactgtcgtgagccatagtttgct

SEQ ID NO: 5890 - DNA, 574 bp, Setaria italica
  Peptide Sequence Number=SeqID_71864
cctcccgcaggcagatggcgtaaaggccatggccgcctcagtgtcggtgactgctgcggcggccgcgaaggaggccgagctggcgaggtccgacagcttcgacgactacgagcaatgcagagtctgtcagcagaagacagaagaacctctggtagatcttggatgcagatgtcgtggtgatcttgctaaagcacaccgcacatgcattgatgtttggtttcgcacgagaggttcaaacaagtgtgagatatgccaacaggtggctgtcaatatcccccctccagagacacaagcaagtacaagttattgggtttggagggttgattcgacttatggaaggggacgaggaggacgtgaaaggggatggtttagcccactttgggttgcatttgcaattctgattggcggtctcttattggacgtgctaatatctgtttccctgggcgtctccgcacttcctgtcaacataataattggcgttcttattgttctcggcttgggcaccgcccttcgcctagctctggagtgctgccaggaatggggctccaggaggaacgtgagtaacatgccaagg

SEQ ID NO: 5891 - DNA, 611 bp, Setaria italica
  Peptide Sequence Number=SeqID_71865
aatgtatgcttcctatttcatatgtctatccattgtcattatgccttaactaagaaactgatctatgtttatgtatagccaagataaagtaactgttgtcagttcatatctgttgaagtaccttgttaagtataacaacttcaatttactttgttctggaagacctctgatacacaattacataaattaacatcagcttgaaatttgagtagtaacagtattgataaaattgcaagtcgaattcttctttctagttgtgaaatttacttgttttcattcagcagacaagttattgggtttggagggttgattcgacttatggaaggggacgaggaggacgtgaaagggtatttttatgactgtggatacgataaataagaaacaaatgcactaatttggctctgtatcctgcaaaaaatgaattagcaatcatgtaatcatgtgcaagttttcaattttttgaacccgggcatttcgttctgcttcatattttattttcttctctttatgtgtagggatggtttagcccactttgggttgcatttgcaattctgattggcggtctcttattggacgtgctaatatctgtttccctgggcgtctccgcactt

SEQ ID NO: 5892 - DNA, 1360 bp, Setaria italica
  misc_feature (1355)..(1355): n is a, c, g, or t
  Peptide Sequence Number=SeqID_71866
ggagtaggtgctccgtgccccgccctccaacacgcaaaagggggcggccacctcccctcctcgcacggcacgcgaggtgctcgactgctagtcgcacagcaggaggaggaggtgggagccggcgggccacccatgtcgagcggcgcggacggatcggcgcccggcgcggccctagacccagggccgggccccgagccggaccgtgagccgcagccgcccttgccgcaagctccagctgcgacgctggtgccggcgccgcagcaggagatggtggcgttgcagacggaggcgccggcggtcaccatcgtgatgtcgcggccaggggaggaggttcaggcgccggcgccgcagcaggaggtggtagcgttgcagacggaggctccggcgccggcggtcaccatcgtgatctcgcgcccaggggaggaggttcaggtgcccgatgcaaagggcgtctccccggcgtcctccccgcaggcagatggcgtaaaggccatggccgcctcagtgtcggtgactgctgcggcggccgcgaaggaggccgagctggcgaggtccgacagcttcgacgactacgagcaatgcagagtctgtcagcagaagacagaagaacctctggtagatcttggatgcagatgtcgtggtgatcttgctaaagcacaccgcacatgcattgatgtttggtttcgcacgagaggttcaaacaagtgtgagatatgccaacaggtggctgtcaatatcccccctccagagacacaagcaagtggatggtttagcccactttgggttgcatttgcaattctgattggcggtctcttattggacgtgctaatatctgtttccctgggcgtctccgcacttcctgtcaacataataattggcgttcttattgttctcggcttgggcaccgcccttcgcctagctctggagtgctgccaggaatggggctccaggaggaacgtgagtaacatgccaaggctggagaacataccgccgaccgggtaccatcctgcagtagtatgattatggggtctgtaaatagcgtaggaacatctaagctcgtgctggcttttggattattctcgtgattagctttagctcacacgtctcgttaaaaatcagagctcagattcaaagcgtgttgatcacgatcgggatgctccaatgtaaatacccagttcctgatgctcaatggtcacgggcaagtattgatgccaaattgtcagccacagtatggatgctgcctggttaatcatgcagcacagcctcatggtttgttctgatgaccgcaatggttgtgaaggctagctgtggatgtaggctttgcagtggtatgcatgcctgtttaaaaaaaaaanaaaaa

SEQ ID NO: 5893 - DNA, 602 bp, Setaria italica
  Peptide Sequence Number=SeqID_71867
tgtttgcattgccaactagaagcaaattattgtttacaggatgaaagcaaatgcagagctgggagagtaatcagcaaacttaactttgatgatgcggttacagctttggatattgatcacactgggcagcttattttcgctggtgatgcacagggttacatatatactgttagtgtgaactcacatacgagggtcactatctagaactacacaagaacaagagcagtaggagcaaatctcctatttcaaccatccagtatccgcaccttttctctggtagcacgttgccctgtacttctttcttgcgctcaagatggaaacctatctttcttcagactattcgtgcttccttctgtccgcttctttctcttgagaaaggagagttcatagttactggtagcgaagatgcaaatgtttacttctatgatttggcacgaccaaagaactcgtgtgtgaataaactgcagggacatggttctccagtaattggagttgcctggagccatggggagaatttgcttgcctcctctgattcagatggtacagttattgtatggaagcgggcgaaaaataattagagagagcggttccatgtcacggag

SEQ ID NO: 5894 - DNA, 1693 bp, Setaria italica
  Peptide Sequence Number=SeqID_71868
acgaacgaccccctaccaatagaccgaacggacccggacttcctcagctgcgtcctccagcccccgacgccctcctcctcccgccccgacgccgactacgccgccctccgccgcctgctcctccgccgcaagccgccctccgccctccagcaccgcatggactggcggtgcaacggcaagggctacgtcgcctaccgcaacttcctcctccgccgcatcgatggcggcagcgcccacagcacgcccagcagcagtggaaggtgggctccttctcctggccctgcactctccgaggcagacagctggggctctatccgggacttgagaactaacagtgggctaagccgcactgtaagtatcagctcaaagcaaagtgatacggagcgccatgtcagattcgctgagcccgcatactcatttgttggaatgcattgcatttttgacagctgcaaaacctcagttacggtattgaaatttggccgggcaagttctgatctgcttgcgtatggtgcggcagatggcagtctgacagtctgccaggtttctgagccaccatctgttcttcaaaaattgataggacactctaaaaaatatcacagtacatagcttcatgctccctggataaaactgtgcgagtatgggaaatctctaaaggcacatgcattagggttgtatatggagtttcttcccagctctgcatttgctttcatcctgtaaacaataatttgcttctagttggcaatgcaaacaaggaaatcaatgcaataaattttagcactgggagagtaatcagcaaacttaactttgatgatgcggttacagctttggatattgatcacactgggcagcttattttcgctggtgatgcacagggttacatatatactgttagtgtgaactcacatacagggtcactatctagaactcacaagaacaagagcagtaggagcaaatctcctatttcaaccatccagtatcgcaccttttctctggtagcacgttgccctgtacttctttcttgcgctcaagatggaaacctatctttcttcagcatcgcaacagatgctaagggatacttgactctcatatgctctttaaaactggcctcgcgggtgcagactattcgtgcttccttctgtccgcttctttctcttgagaaaggagagttcatagttactggtagcgaagatgcaaatgtttacttctatgatttggcacgaccaaagaactcgtgtgtgaataaactgcagggacatggttctccagtaattggagttgcctggagccatggggagaatttgcttgcctcctctgattcagatggtacagttattgtatggaagcgggcgaaaaataattagagagagcggttccatgtcacggaggatgcttttatgcagcaaactgttgattctgctgcatgattgaatcgaaggcattgttttcctttttttatgtacattgtacgcccatcgcattgtttgtaacattaccatgcaaggctagtcagtgaagatcgaccggtcttgattgtaatacagaagtataggtctccccgtagagtgtaaagcatttcgcacggtatatcctgtatcatttgttttaggactgtacttttgtatcattcacgattgtcacccaaacatgtttaaacttgttcacatgtgcagtgcatgcagcatacttactgtcc

SEQ ID NO: 5895 - DNA, 259 bp, Setaria italica
  Peptide Sequence Number=SeqID_71869
tgtgaacacaggtgtgtgacctggccccgatctaacagtagtgtacactggaagttttaagccagctcgatgagcagtctcctgaagtagattcttgtatatcccggtttcatcctgtggagtaaacagtgttagcacctcgacttcaacagcattcctcaagaggttaccttgtagcacacatgcccattacaattgaattgtaaagtagggaacatattaagtagcagtaagcacaaaggtaatctaacccccaata

SEQ ID NO: 5896 - DNA, 1624 bp, Setaria italica
  misc_feature (1581)..(1624): n is a, c, g, or t
  Peptide Sequence Number=SeqID_71870
cgaccgctcgccaggaggcaaggccgaaacagaagaggggagccggcggccaggcggggacaaaaccaagccacagcaggcgccggccatttctcctcgttcttcccttcaaattttggaggcgggacggagggaattcgtttgctcccccccatcctcctggcggatgatggcggaggtgtcggacaacgccaagggcctggcgctcgccgtcgcctccagcgccttcatcggcgtcagcttcatcctcaagaagatcggcctccttcgcgccgccaagtgcggcgcccgcgcaggtggtggaggatacacttacctttccgagccactgtggtgggctgggatgaccacaatgttgaccttggcaagtgctgcttggggaggttgcaaactttgttgcttacatatttgcgccagctgtactcgtgactcctctcggagcattaagcataatagtgagttcagtgttggcacactttgtgctgaaggagcggcttgagaagctcggggtccttggctgtgtatcatgcatagtaggttcagttgttgttgttgtgcatgctccggaagagcatatgcctaactctgttgaagaaatctggaacctagctactcaaccaggttttgtagcatatgcagtgactacattgttagtcgtgggaacactagttctcttctttgaacgtcgatatggtcagactaatatcctaatatatctgggtatctgctcttcaatgggatcactaacggttgttagcatcaaagccattggtgttgccataaagcttacattggatggagtgaatcaggctgcttatccatacacgtggttttttcttatggttgcagttacctgtggggtttctcaaataaattatctcaacaaggcattggatacatttaatttagccatcgtttctcctatttattatgtgatgtttacgacccttacaatagtggctagtggaattatgttcaaggactgggctggtcaaagcttaagcagtattgcttctgaattatgtggcctaataacaattctttctgggacaattttgttgcacgcagcagaagagggagccaacaattctgcagctttgttgccttggcctttggataagggatccatatcttggtgtatcagcttaagcagcgacaatctactgaagaatgttgaagaggactacttcgcagctctgcaaaattcacctgccccagtatgacgatacatttgttctactttggctgtagaagaaccccgatagagtttgtaaaaagtaagcgaatcgcggaggagatgttaacagtgccaacatttctggcagttttggtcgaggagatttcatctgccattttttcagattgtacataggaatctgtaaatttgtgattttgtttatacccaggacaagatgagacttgttaatcccttgttcgtccaaaaggcaagttgcatggccgccggcatgttgtagtttgtacaaatgtttcttcttgaacttaagctcagtagtgaagattgatgtatccagctgtcgtgtgtatagtatcaaatacgcattcaacttcatctaaaaaaannnnnnnnnnnnnnnnnnnnnnnnnnnnnnnnnnnnnnnnnnnn

SEQ ID NO: 5897 - DNA, 429 bp, Setaria italica
  Peptide Sequence Number=SeqID_71871
caacaccatcggatcgaacaattcatccggccacgcttccgtctcttcgcccgccgccgccgccgatggccgccgtcgctcccgtggtctccgacctcgtcgacttcctcaacgcatcgcccaccgccttccacgccgtcgacgaggcgaagcggcggctgaaggcggcggggttcgtgcagctctcggagcgggaggagtgggcggggctcgagcccggccgcaagtacttcttcacccgcaaccactccaccatcgtcgccttcgccatcggcgccaaatacgttgctggcaatgggttccacatcattggtgcacacactgacagcccttgcctcaagctcaagcctgtctccaaggtgaccaaaggaggttatcttgaggttggggttcaaacatatggtggtggattgtggtacacatggttcg

SEQ ID NO: 5898 - DNA, 405 bp, Setaria italica
  Peptide Sequence Number=SeqID_71872
atatgattcaggctatgacgctaattgtgggcagctccctaatttttttgtcagaactcaccaaatcaacttgaatggcttgcatacaatcatgtttgagcccttgaacacggaatagagcgaccccgtccctctgatgagatccatttctatcacttttctgtaggacatgattcctatatgcagcactcctgcccccctggaatggaaaggagataacttgaatatgatcagtgacttgaagattgagaaaaataatccaggctctcttccctcaaacacttgtgccacaactggatgcccttttactgaatcagccagattagacaccaatgatgctgtggccatgctatcttcctttacactgttcttaccagaccaagcaaagaacagataatagtcttt

SEQ ID NO: 5899 - DNA, 635 bp, Setaria italica
  Peptide Sequence Number=SeqID_71873
caaagagaggcttcctaaccaggtaaagtaagaacctccgtcttgcaaaatataacaatgtgaagaattaagtgaactcgcaaccaaatcaacttgaatggcttgcatacaatcatgtttgagcccttgaacacggaatagagcgaccccgtccctctgatgagatccatttctatcacttttctgtaggacatgattcctatatgcagcactcctgccccccttgaattcccgtttgtaattatatgatcagtgacttgaagattgagaaaaataatccaggctctcttccctcaaacacttgtgccacaactggatgcccttttactgaatcagccagattagacaccaatgatgctgtggccatgctatcttcctttacactgttcttaccagaccaagcaaagaacagataatagtcttttccatcttcaacatagctatactggatgatataactgtctcctgtgtacaattgctcctgctcctcagtgctaaggagggttgtacaaccatggtccaccagccaaaccttcagactgccatcacaactgatgagctgctggggttatctctggaatttctgtgacatcgtaaccctgatgcttgaaaatagctgccactttctctcgccc

SEQ ID NO: 5900 - DNA, 2022 bp, Setaria italica
  Peptide Sequence Number=SeqID_71874
tttttttgttagtcgtaacaccgatggaccggtacaaatacgtgcaatgtccaatatccatggtctagtacaactgtacgcagcagtttgaaggtacacgatcgattacacatcatacacgagtgcacgacatctatatatcatcttcattcatgcgaccggctgccggctggcctccggcagctctcaccgtcggcgagctgtgccgttgccgttggagagcgcgtgcacggtctccgacgcgtgcagggaggcggggaagagccgccgtgccaccgccgtaggcgtcgatgtcgaggacgaggagcggcttcttggggactgggacagtgttggcgatggtggcagtccggtagccggtgagcgctcccttgccaacctccaggtggaggcggagccgaatgccctcctcgccaccgacggttgctgctgctgttgctccggtgtggtcggctccgacgataccccgggcctccttgtcgacggcctccgcatgcttctgtccggcgtctctagttttggtgacagccctttcaggagggccagcttcctctcgaatgagttgcctgccatagatgattgctttgaactgtcccagttgaagaagttggtgaaaaatgctggctcatccccttctgtgacaatatacactgttgtttcgatcgatcttctgttctgaagaataccatcctgaaggaacatcttcgcaatatccagtgcttgctccttggatgtaacatctgagtgtagtccaacccagacatagatttcatcgttgcagtctagtatcaatgtctcttcagttgccaggtcatcctgacagaagctgaatatctccttgaccttgagcagaccttgttcaaatctacaagcatacagatgtggatctgcaggccaacccttgacatgcttttctttggagtattctgatcgtcctcctaacgctttccagaagtcatccggttcagagccttctctgactagcagggactgtttcaatggacacaacttgttcatcatcctgtcaagtatattatggtcgcttggcaaagagaggcttcctaaccaggtaaagtaagaacctccgtcttgcaaaatataacaatgtgaagaattaagtgaactcgcaaccaaatcaacttgaatggcttgcatacaatcatgtttgagcccttgaacacggaatagagcgaccccgtccctctgatgagatccatttctatcacttttctgtaggacatgattcctatatgcagcactcctgccccccttgaatatgatcagtgacttgaagattggaaaaataatcgaagattgagaaaaataatccaggctctcttccctcaaacacttgtgcctgcgattacatttgcgaatgaattgacaacactgtgaacggaagtgtggtgacatgtgaaattttcagtggtgtagggctgaagcagctgaccacaactggatgcccttttacttgaatcagccagattagacaccaatgatgctgtggccatgctatcttcctttacactgttcttaccagaccaagcaaagaacagataatagtcttttccatcttcaacatagctatactggatgatataactgtctcctgtgtacaattgctcctgctcctcagtgctaaggagggttgtacaaccatggtccaccagccaaaccttcagactgccatcacaactgatgagctgctggggtttatcctctggaatttctgtgacatcgtaaccctgatgcttgaaaatagctgccactttctctcgcccagcattatataacttcatcccaacaatcttaggccaatgctgaaaatgaagcttaaattcgacagtttcgtgaccttctgtcattataactgtatgagaggacctgccttgggaatgcacataatcttctaaggcagtaacagatgtcttcctctctgaaaccagcgttgtcattcccatccataggaatatttcggtgccgcagtccagtatgtaacttctgtctgagttcagaatttct

SEQ ID NO: 5901 - DNA, 378 bp, Setaria italica
  Peptide Sequence Number=SeqID_71875
ctcaatcaacaagcactagcgcaaggaaaacgagagaaggcaggagcagcagcagcagcatttcccccttccgcttgcttgtttgctcaacgcgtgcttgatttgaggagattatcgtgggatttggatcgttgtttcatggaggagatctgctgcgaggtggcggcggggtctcgtcgtcggacagggaagggggagggcgtgggcgacgccggcagccgcgcggcgcggcggcggaggatggagatacggcggctcagggtggtggcggaggagcaggccgcgaagaggcggaggtcttggtagggttgtacgtacggggaggaggaggaggacgcggtgagggacccggcgccgaggtacggcgtgacgtcggtg

SEQ ID NO: 5902 - DNA, 251 bp, Setaria italica
  Peptide Sequence Number=SeqID_71876
gttaccacctgctgccctggctgtagtggagacccgcagaggtgcgtgccggcggcgagcgacggcggacccggcagagcagccatggaggcggtccagccggtactgagcgagaaaacgaacccgctgctcggcagatcatccagtccatccggcgtcacgctgcttcaacctcacgccgacagcggcgcgggtttatacaacggcgcctactccttcctcgacaccaccaggccctgcgccacgagatt

SEQ ID NO: 5903 - DNA, 830 bp, Setaria italica
  Peptide Sequence Number=SeqID_71877
gtgcacccaagcaccgcaagggataagggtagcaggccacaatatattggtagccacaggataaggaaattgcttgcctcgaaggtaaggaaggcagcacgtaataagatttgtggagggatgccatcaaaaaaggtttgtggagggatgtccaacaaaggtagcaagctaaatttatgcagcaaaaaagatacctgccagacgtcaaaaggtgcaaaggacaattttcaagaagaaaaaaccagcgcatcatgcaacttcatttgctaaagagatgctaactggagccgccgggacatcattctctacagaaggtcggaataaatcatcgggatctgacaattaccatgttaagctaagaataaagtcattcaacatcccagaagtgttcatcaatgtccctgaaaatgcaaccattggttcattgaaggtggtctacgcgttggtgttcttcttcaaggaaaggatatccaagacgacaacaagacactacgtcaagctgttatatgccatggtgaaaaactaaataacatagactttacgctggaatgtgaacgtcagcaagattctccctctggagtcataatagcagaagagatggattttgtcagtgcagatattgtggaaccattagctaggatgaagtatgaagagccatttcctggaactaaaggcggtgggggcaaccagcagcctataaaggcgtatccaaatgactcttttcgctggtttgttgtttctattcgttccttgtttgtaaatggcctcacaagatgcatcagcaagcttgcaagccataatccctgttgcagcttcagacttgaacgcac

SEQ ID NO: 5904 - DNA, 496 bp, Setaria italica
  Peptide Sequence Number=SeqID_71878
attcctctccccaatccccatcccttcctcgtccttggggctttgagctcgtcgacctccggccaaatctggaagcagcgacggcacccggcggccgtcacatccccgcgcgaattgtcccgacccccgactctttcctcccccatcccgatccggaagggagcggtttccccctgtccaaatcgagccacctgcgcccgtcgggggagaagcaggctgcgcatccagtgcgctcgagctcctgcaggcaacttccccgtcgagcctccgcaaggatccattttgcctcccatcggcgacgtggaagagaaccgcggaggggattgcgaagcttaaaacccacgacaccggctgccgagccccaccgcgcacgctcctgcaggaagataaagatgatggatgtggtgtttgtatctcttcgccgtctgtgaagacctgctgtgtaggtgacatcaagatatggtgatgcggaagaggtcggattctggatcccgtg

SEQ ID NO: 5905 - DNA, 454 bp, Setaria italica
  Peptide Sequence Number=SeqID_71879
cgagaagaaagaaaaatgagatgtgtgcatttgatttgcttgcgagcgtcgccgggacgctattaacagatcaggacagttcatcttatgttcctaatactagcggagcagcaacaagttatgccagaaataggaaatcagttaaagaagaatactttgatgaaattttgcacctgaaaaatgtggctgtgaagaaagactgtggcagtgggtgtgtagtgggctcaggtggtgtctctgccttacctaggaaaggtaatgacggcctggcttaaaactcattgacaagaaatgaagatgaatcagtactaaagtcactaacagtgaaatcaaatatgctagctagggactcatcagttagatgtacaaggccatgtgaaattagtcgtggtcttggcataatttgtgagtatggagctttttggagtattccatccaggatcctcaagctcag

SEQ ID NO: 5906 - DNA, 1498 bp, Setaria italica
  Peptide Sequence Number=SeqID_71880
tactatatgggaagctacaagttactgatttagcaatcatgcattcttttgtgcagcctgatattctctttggtgctgctgttgttaatctactatttacagtattgttgatgaaatctgtgagactgcaagagcccatttaactttctgttttgcagttggaaaaaatatagtaatacataagttacctgctaaaaaatgctggactggacagtcatgttagttttctacatttgaataaccaaacaatttgtcgcaatgtgaaataatgagtcttcacaatagctttaattgttacacaatacagagcattttctagctggaaaattcaacttccattgtttatgaatattaccttcttgtgagtgttgcccaataaccatttccaatttgtctatagaaaaccgttatggatgtcgtcaatagtataatgcaaggtggtctacgcgttggtgttcttcttcaaggaaaggatatccaagacgacaacaagacacttcgtcaagctgggatatgccatgataaaaactaaataacatagacttcacgctggaatgtgaaggtgggcaagattctccctctggagtcataatagcagaagagatggatttgtcagtgcagatattgtggaaccattagctaggatgaagtatgaagagccatttcctggaactaaaggcggtgggggcaaccagcagcctataaaggcgtatccaaatgactctttcgctggttgtgttcatcgtcctgttgaaatggcctcacaagatgcatcagcaagcttgcaagccataatccctgttgcagcttcagacttgaacgcactagccattgtgcctatttgcaagaccagacgatctgaatttgggcaaaggcgtacaaggatgcccttctctgttggtgaggttgaggcactggtggaagctgtggaacagcttgggaccggaaggtggagagatgttaaaatgcacgcatttgacggtgctgatcacaggacatatgttgaccttaaggacaagtggaagaccctggtgcacacagcaagcatatccccacaacagcgaagaggcgagccagttccgcaagaactactggaccgtgtgctctcagcgcaggcctactggtcccagcagcaggcaaagcttcatggcaaggctcctcttcctgagatttgccttgcctagaaagaggaaatgctcgtgtaaaaattgtgcctaataatagaaaggtagaagggatgtgcaaaggaaacagactaatttgtgtgctattgcaaacttgtaacattgtttttttcttcttctttctttggtctctgttgaagccagaggctctctcctctgtggatcaataagggagagaaccttgtttggtacttgtaaatgatgctgcagactattgctgccatgttccataagaaaaccttgagcatatataataacactgttgtcacccaataaccaatttaacctaaaatttaaagttaaaaacttaaaaa

SEQ ID NO: 5907 - DNA, 2440 bp, Setaria italica
  Peptide Sequence Number=SeqID_71881
tctttaaagttttgttattctagtaagtctaaaagtctagtacgggtctattacttgctagccctttgtacagtctttgttgcgcacgctcctgcaggaagataaagatgatggatgtggtgtttgtatctcttcgccgtctgtgaagacctgctgtgtaggtgacatcaagatatggtgatgcggaagaggtcggattctggatcccgtggccgccgaactgcaaccatgccacgtgttccaaactcagctcgggggaaacgcaccaccaggaaaaagaaagatgagatgtgcgcatttgatttgcttgccaccgttgcaggaacactattagcagatcaggacaactccaacaatgttcctaatactagtggtgcagcaaaagctaaaaacaagaaagcagttaaagaagaacaccgcgatgaaattctgcccctaaataacatggctgtggagaaagattgctgcaatggatgtgtagtgggttctggtggtatctgtgcctttcctaggcaagctaacaactgctcggcagaaaactcgtcgacaataaacgaagctggatcaatgttagagtcactaacagtgaaatcaaatatgttagttagggactcattggttagttgtacaagaccatatgaaactagctgtggtcttggcataattcctgagtttggagctcatggaacacaccatccaggatcctcaagttcagcagaggctgaacaaatgcaccaagctgaacctaaagtggtcagaagacaagcagatgggcatgctgcggttcttcacagcttgtttgactccgtggatcttgatgttagacctcctgctttggttagttctgacagtagctcaggtgtgcttttgtgcagccatgacaaggaacataaagccgcttccttgtgccaggttgaaatgcagcatactgcagatagagatgatgacgaaaattcttctgggtgcacacatccaagcaccacaggaaatgagggttacaaaccgcattttctaggtaaccataggatcaggaaattgcttgcctcaaaggtaaggaaggcagcacgtaataagacttctggagggatgtccagcaaaggcagcaagctaaacttctgcgggaaaagatacccaccacacgtcaaaaggtgcaaaggacaaatttcaagaggaaaaagctagcgcgaggtacaacgccatttgctaaagggatgctaactggagccaccgggacatcattccgtatgcaaggtcaaaataaatcatgtggatctgaggactaccatgttaagctaaggatcaagtcatttaacatcccagaattatttgttgagatccctgaaactgcaacaattggttcattgaagagaaccgtgatggatgttgtcactagtataatggaaggtggcctacgtgttggtgttcttcttcaaggaaagagtatccaagatgacagcaagacactacgtcaagctggtatatgccatggtgaaaaactaaataacatagactttacgctggaatgtgaaggtgggcaagattctccctctggagtcgtaaaacctgaacagatggatttgctcagtgcagatgttgtggagccattagctaggatgaagtgtgaagagcattttcctgaaactgttggcgatgacaaccagcagcgcacacctccttatcgaagccgctctctctccgatctgtattctgttgttcatcctgttgagatggcctcacaagatacatcaacaagctcccaagccatcgtccctgttgcaccttcagacgatggtgctctagccattgtgcctctttgtagtgtcaggcggtctgaaactgggcaaaggcgcactaggatgcccttcactgttgatgaggttgcggcactggtggaagcagtcgaactgatcgggactggaaggtggagagctgttaaaatgcatgcatttgaacatgtggagcacaggacatatgttgaccttaaggacaagtggaagaccctggttcacaccgcaagtatatccccgcaacaacgaagaggcgagccagttccacaagaactcctggaccgtgtgctcgcagcacaggcctactggtccgagcacccaaagatccgtggcaaggctcctcttcctgcgatatgctctgcctagaaaggaggggggcgagctggtccttgtgtaaatactgtgcctaatagaaacgatgtagaagtggtgtccaaagaaatcagactaatttgtgtgccattgcaagcttacaacattggttttgtttccatcctccgttctttggtcgctgtcgaagccaggggttatgtctcctctatggttaaataagggagagagagccttgtttggcacttgtaaatgatgtcacaaactgctgctatgtttcataaagaaaaccgtcgacttgtcgctgttgttcttccaaaaaa

SEQ ID NO: 5908 - DNA, 811 bp, Setaria italica
  Peptide Sequence Number=SeqID_71882
cttccaactccgcacgctgagctccaccgcgctgctgcgtaagtgctggcacactgctgcttgccccttgccgccgttgctgctccactgctacttctaccccgtccagcgtctgcaactacctggccacacgctccgccatgcgtgccgagcctagcgaggatgagccaccggaccatgtgactgcgccagcgacggaggaagggctgagacggcggcttccgcgcgcacgggtgacgcggagcctctggcgcagtggcggagttcgccacgcgacgaggagcggccgagcagcggcatgacgcggtctccgacgagctggaaaggcggtgctgcggagaagcaatggtaccgcacggtcgccgccttgccggcgaggaatcgttgcggcgatggtcggagctcgcaagagctgtgctgcagtacatcttcttcaccgagcggcaacaagtagattgtgagactgctgcagcctggttcaaaacttgttctaatgacaagcaagttcttggtaagttggaaatatgcctgttaggataatctggcaacctatggttgtgtgataccatgaaccaaaatgaggaaatatatttttatgtgccgctcataattcaggacatgttattgaggtctgcacatagatgtattttgtatccggtggcaattgctagatggcaattacttctagatgtgtttatttttgaaggaaagctgttaaaagaaacttcttgtctatctaaggcaagactcttgctgtctgtacttcaaatatttaagctacatggcttataacctctattcgcactatgaa

SEQ ID NO: 5909 - DNA, 502 bp, Setaria italica
  Peptide Sequence Number=SeqID_71883
ataggcatcacagaggagcctcttgatgaatcccagatagcttacatatgtagagaagcactgaagggtcttgcttacttgcactcaatttttaaagtccatagagacattaaaggtggtaacattcttctaactgagcaaggcgaggtgaagttgggcgattttggtgtagcggcccagctgacgagaaccatgtcaaagcgcaacacgttcattggtactccacattggatggcgccagaggtcattcaagaaagtcgctatgatggaaaggtagatgtttgggcattaggtgtatctgcaattgagatggcagagggcatgccaccaagatccactgtgcatccaatgagagtacgtgcagtgcttctcagtgcctgttagtatctgcagttaatgctgctataacagaattaaggctgctttgtctttggtgtactgtatttcttgtgtctttattctgcatatgtttctttactttgtctagctataaatactcacc

SEQ ID NO: 5910 - DNA, 2655 bp, Setaria italica
  Peptide Sequence Number=SeqID_71884
cctacctccgacccccgaccgaagcctctatctccgcaccgtcgcgtcaagcgcggcgcccggcctccgcccgatccccgttcctgggatctgcggcgctccagtccccgcgccgccgaggaggacccctactccaccttcgtcgtccactccaccgcgcgctcaggggttgcctcctccagcccacgcgagtccgcctccggcacattcatccgtcactcgggtggctcgtccagcccccgcgagtcgttctctggcaccttcattcgccacaccagcgggggctctagtccccatgaggttgcctctggcagcggcggggggttcgggtcctctttctggagtccagcggtggagcagtcggaggagctccggcagccatcgcctctgatgcagcagcaacaacagcaaaattcaaggcggaagccatccgtgagctcagtgccagacagcgttaccagggaggatccttccaccaagtacgagctgctccatgagcttgggaaaggttcatatggtgcagtgtacaaagcaagggatctcagaacgcaggagcttgtggctgtcaagatcatctccttaacagaaggggaagaaggctatgaagacatacggggagaaatcgagatgctgcagcaatgcagccatccaaatgttgtccgctactttggaagctatcaaggagaggaatacctatggataattatggagtactgtggtggtggaagtgtcgctgacttgataggcatcacagaggagcctcttgatgaatcccagatagcttacatatgtagagaagcactgaagggtcttgcttacttgcactcaatttttaaagtccatagagacattaaaggtggtaacattcttctaactgagcaaggcgaggtgaagttgggcgattttggtgtagcggcccagctgacgagaaccatgtcaaagcgcaacacgttcattggtactccacattggatggcgccagaggtcattcaagaaagtcgctatgatggaaaggtagatgtttgggcattaggtgtatctgcaattgagatggcagagggcatgccaccaagatccactgtgcatccaatgagagttatcttcatgatatctagtgaacctgcaccaatgctggaggataaggagaagtggtctctcctcttccatgattttattgcgaagtgtctaacaaaagatccaagacttcgtcctgctgcaagtgagatggtgaagcacaaatttattgagaagtgtaatactggagcttcgaaaatgttggcaaagattaaggatgcaaagaggattagagccacacttgctgcacaaagccagctggatggccctgatgatgaaatgctagatgcaactgttcgaataaatgaagactatggggaaactgttcccgcaaactctcagcaacacatgaatcaggcaacatataatgatggtcaggcaggtgattttggtactatgatagtccattctgaagatggtgacgaagtggcagaatcacccatttttccaagaacagagttcattccaggccttggtagcatcaattctttcacacatgatccaaagagagccgaactcatttcaaagttttgggcggagaatacaactgatagcgatgccaataaagatcgggatctagatgaccatgttgacatgcagcaaccaaaagcaatcccaacttcaaccggaactgtgaagaaacatattggtgcagaagggactatgcgacgccatgatagtcaaattagttcttcaccgggtcttgccaacccaacgatgaagttaaacaacagcccaagccgtaaagcattttctgttcaggataagctctggtcaatttatgctgccggcaacactgtgcctataccatttcttaaggcgattgacatttcaccgctagctctagtgtcagaaaatgacgcaggaaatggcctggctgggtcaagtacaaatgatgccttggaggcagttagggagctgttcagtggtgatggacaggcaaagaaagggcgcaaagggcaaaacgaagtccctcttcctcctggtgtgcaccacagattaacgacatgccccacattgatgaacctggcccaagctctagcttaccataagacctgctacgaggacatgcctctacaagattcacaagcaacacaagagcagcagacgatacaaaatctttgtgatacacttcgaaccatactgaggttgtagacatgcatgaatgcatgaatgaaggatacaaccttgggaattctgaagacgcggcatggagccaaggatgaatatggcttcccatggtggacaatgcccctgctcagggtggagaccaggattgaaaggaggcatgagaaatggtgcggatcgcagggtaacgcaaatggcgcctgccgttgaattttgtggacgcttggtgactggaagctgtgaattctcttctggaaaatggaaatttttgactcgtgttaataccctctaggtgtttcagtggtcgatgtatgtagagactgcatcgattttggctaatcaaattttgcggtgccgatctgcaccttgtttctgggacttcgacatggcaattatcatccatccaaataaatagaaataattgataggtagaaataaacagacaaaaaaaaa

SEQ ID NO: 5911 - DNA, 502 bp, Setaria italica
  Peptide Sequence Number=SeqID_71885
agcttcaaggggagcagcgactacagctgtgcttcttcagtgacagatgaggaaggacgtgagatgaaggcaccaggtgtggtggccaggctcatgggcttggacgccctgcccacctcaggtgttccagaaccatactgcacaccattccgggacacaagatcgtttagggacagccaaagcctcaagaggagtcctgagtactcaatgaatgatcagttcagtcatgttcctcgaagagttgatggttatatgagaaagccattggatctcagagcacagaagatgccaagcagcccgattgaaaggttccagatagaagcattgccaccaaggtccgcaaagcccctaccaatgtctcatcacagacttttgtcccccatcaagaatccaggtttcagttcagcgagaaatgctgctcagatcatggaggaagcagccaagattcttcagccaaggacgcaatccagttccagggagaaaatctgctcattcagcccag

SEQ ID NO: 5912 - DNA, 512 bp, Setaria italica
  Peptide Sequence Number=SeqID_71886
gtaagcagctcatacaacaaaaatggccaacaagaagatggtcgccgccgtggcggcactgctcctggtcgccatggcgctggctccggcgagcgccatggactgcaaggccgggtgcgccgagctcaaggactccccgctcggcaccgccgactgcgagaagaaatgcgccgagatcgccgcctccacggggagccgtgacccatggaaggaatccaagtgggacatcccgtaaacacgtcgccgtcaatcacgcagcagcaggacaagtcaacgtccttcaccaccgtacctgcccggctgctcatccacgcataattatttctacacccgcaaggccgcaatataatgttgtttcccatttcatttaattttctgcctgacggctttttattgtgttcatgaaccaagtcagatccacagtattcgtaccgtattcttgttaattattattaatttgtttgttctttttttttcctttaattttgttttctttaaaaaaaaaaaaaaaa

SEQ ID NO: 5913 - DNA, 231 bp, Setaria italica
  Peptide Sequence Number=SeqID_71887
catttcagcgcttgcacagcatatttgccctactgtaagcagagtcatgcatgttcagtttaggaataacagctttcttcctcaatcaagctcttacggtcttacctataactcctcgagaacacaggtcgcctagtagttctgctgcctcattcaaaaggccctcataggcaagagcctcaaggagaataatgtaggttgattcatcaggcatgcagccattggacacca

SEQ ID NO: 5914 - DNA, 537 bp, Setaria italica
  Peptide Sequence Number=SeqID_71888
gcgcagctgggcgggggcactgcgccgtgacgtcggcgcggcaccgcggcccgccccttggggcacccggcgccgccgcccgccggcaggaagtccatgggcacgttgaacccgtccaccagcgagatgtcgaagaagtcgaggtcctggaacttgttcagcccgtactcggccagcgtgttgggcggctgcccgtacccggagcactgcagcacgccgccgcagtcgccggtgtcgcaccgcccgttcccgctgccgtcgaaggagcaccccgtgcgcgcccacacgcgaccgccggtggtgcccgccggcacgtcgacggtccaggtctgcccgttgtccagctgcctgccgccgccgggcaccgcggccgcccacacggtgtactggcagttgttggtcacggtgaaggtggccgcgtcggccgcggccgcggcgaggaggacgagagggaggaggtggaggatggaagccatttctctgctccgccctcgatctgtctagtttgtgattagttgctctacgcggagcctggtg

SEQ ID NO: 5915 - DNA, 231 bp, Setaria italica
  Peptide Sequence Number=SeqID_71889
ctataaggtttgttgatttagaaactacatgttcttctaaatatagcaaagaataatgcgtatattgaatctcatatgcatgttatctgctgtatgaaattggaccgatatgcttcgctatacattagctgcgcactaacctaacaatttaatgtgctggaagccaacaggtacacttacaccatagcatccagcctttcttattttcatgtaagtgaggtaacatatcat

SEQ ID NO: 5916 - DNA, 653 bp, Setaria italica
  misc_feature (544)..(544): n is a, c, g, or t
  Peptide Sequence Number=SeqID_71890
tttctttttttccgtttaaggtttcttttcgtttattttcttattttactttgtattactttctaattagtcccttgtcttcaggaaatacttcagcagcatcagggagaaaatgcaattcatcctttcttttgtatgttgcttgtatggcaggatcgttccacagttcatcaacaactggagcatattcacgtgtagctgcagggaagaatgcatctaggtctcccattgctatgatgtccagaagccaatcagagaacttcttcagctttgcattgattgagtatatgcaagaatttgaactagtaggtttattatcatcttgatgaggatcttcatcctctgagtttgtgtgatttgatacagccaaagcctcttcctcaaagcgctcacggccctcgagcagaatccccaggtacttgaacatgttgctttggatcattagtttgatactctcaagttcttcatgagtaaacctgtttaaatatggtacttgttccagctcctggtgatccaagaataagaagcttctgaacttttttgnggtcgaagtaattagggacacttcttgatgaataatgattttcatcttttggctcatcagagttcacaggaggcacgggtagtgaaaccaaggcgcatgccaaacgtgt

SEQ ID NO: 5917 - DNA, 2611 bp, Setaria italica
  Peptide Sequence Number=SeqID_71891
ctcctccactcctatatttcatttcattgttcagaaaaattaactagtacaaaacaaaaagaattgacactctgcaacaacaaatgatacatgacgatttccaagctgcaaactaaaatacatcaactacacacacacacaaacgctatacagttgctagtgattctgcctgcaaatgcgaaatcaaccacagctgatcagctacgcggcgtcggcggcgatgaggcgggacgagctgagctccgtggtgctgtagaaggactcctccgggcagtagccggcggcgtcgcgctcgtcctcccaccggagcacctcccggatgtagcggaaggcctcgtcgacggtgggccggtcgcgggcgcgcgcctgccacacgaagagcttccggccgccggtgctcgccgcgtacaggtccttgaacttcatggccacgtagtagaaggcctgctgcgccagcgactggttgttgtggtgcgtccgcagcgggcagaagtcgccgaaccactcgcacgccgccgacagcggcgagcggcctatcttctcctcgaacaggtcgtacttgttcagcaccagcacgaacggcgtgtcgcggaagcacggttgcctgactgtggcctcaaacaagtccctgctttggatcatcttattcacgagggacctgcagccactgcttccaggggatgcaagctgatcgtagtcactgagcgctacggagaagatcaccatgcggacatcctcaaacatttccacccacttgcagccctcattcatgcccttggcgcttactctgatcagctggtatttgtttactggttgcgagtatgcctcatggctgtcgccgaatgattctgacatagggctgcggtcatccagggtgaaatcaataaaggacaatccattcccttgcgttactccttcagcatatattacatctttttccgaaggctcgtattcattacttgatacttcaatagccctgctcaggaaatactcagcagcatcagggagaaaatgcaattcatcctttcttttgtatgttgcttgtatggcaggatcgttccacagttcatcaacaactggagcatattcacgtgtagctgcagggaagaatgcatctaggtctcccattgctatgatgtccagaagccaatcagagaacttcttcagctttgcattgattgagtatatgcaagaatttgaactagtaggtttattatcatcttgatgaggatcttcatcctctgagtttgtgtgatttgatacagccaaagcctcttcctcaaagcgctcacggccctcgagcagaatccccaggtacttgaacatgttgctttggatcattagtttgatactctcaagttcttcatgagtaaacctagagccatataataacttagcctgtttaaatatggtacttgttccagctcctggtgatccaagaataagaagcttctgaacttttttgtggtcgaagtaattagggacacttcttgatgaataatgattttcatcttttggctcatcagagttcacaggaggcacgggtagtgaaaccaaggcgcatgccaaacgtgtcaaaggtgactcccatattttccctttgatattgttttggccttcttcctcatatccgccatcatggtaaacccaaaagtgagtgtcacgggggcactgaacttttgcaatctttagaattctcagttcaagcttggtgatttctcgtccattaatatagacctgagcggtgccattgcttgcatcaggctgaagctttccattaaagttcaggttagtgctaataaccctgtctggcttttcaccttcctttccccacaatcctgactccttgtcataccaatatcttccaggcttgagatttccaggaggccgttggcaactaagcaagtccgccatctcttcgtcatgaagagggaagccatttacaatgagctgctcaggccggagctgattcgcctggcactccttctcgaccttgaggatttgcttcacctccaaggggctgagcaaccgcgacagtatcctggagcccttccccagcttggaccgcttggcctcgtcgatgggctggccaatgcaggtgatgcacttgcggccttcgggcatcgaccccatggccctgagcaggcagtggctgcagtacctggcatcgcagacgatgcaggattccttggtctcccacttgctcttgccgcaccggtggcaggtcctccccttcttctccaccctcgtcaccgcgacgtactgctcggagacctcgtcgaactccttgctttcgtacttgctgtcctccgccgccgccgccaccccgaaggtgaccacctgagcccgcctcccatccggcgcagcaggcctcgcagcagccttgtgcccctgcaagctcctcggcgagcgggagtcctcatcgtcatcgtcggagtactcctcatcccgcgccgccgccgaattggccgacgccgagctccccctggcctgcgcagccgacgagtggtgcgcacgctgagcctgagcaacccggggcggcggcggggggttggcgcggacgggcagggcccgacgaccggcgccaccgggacggcgccgttggcaacgg

SEQ ID NO: 5918 - DNA, 744 bp, Setaria italica
  Peptide Sequence Number=SeqID_71892
gctatgaagaatctacaagcactagcaatgcatccgcacttgacataaaagtctatgatagcatttccaataatgacatccaagtatccagaaccatattttacaaggtagccatggatctgctcaccagccttctttgctcctatatcagaacatgcaccaagaacaattgacaaagtgaactggtcaggacacagaccaaactgatattccctgtaaaagagcagcagagctttctctggcatgaaattcctggaatatccagaaagcatggcattagttacaactaaatttcgtgggaacagcgcatgggagaataactcaacagcaccctcaatgctatggcattttgcatacatgtttactagtgatgcactgacgaaatcagcaagtagcagcccaagtttaagagctaaagaatgaatctgcattcccttatccaagtcctgaagactggtgcaggcatttatgacagtagcaatacaatgctgatctagaggtgctccagcatcacttaactccctaaagtaactgcatgctctttcatattggaggttcttgacacagcctgccatgactccagcccatgatacaatgtctggtgattgcatagttttgaagattgattccgcacacaaaagtgatccaaattcagaatataccgacatcagagcattgcatacattagtataacaaaccttccggttttcaaagtaaaagcgtgcatttgttgaacctcctctt

SEQ ID NO: 5919 - DNA, 505 bp, Setaria italica
  Peptide Sequence Number=SeqID_71893
ccaggaggcaggagcactcctcagaggaagcagggaaggaagcttcctcagagcagagcacaccctgcagctgcagagcatcgcaagacagtaagctgcagcgacagagcgggatgagccggggcggcctggacctgaagctgcacctgtcgcccccggcggcggcggcggcggcgtcgccggcgtcgtcgtcggacgaggagtggtcgtcgtcgtcgccgagctcgtgcctgtcgtcggagggcgagcgggagccgccgcaacgggggcaccacgggctgcagtggtcggacagcccggaggcgacgtccatggtgctggcggcatgcccgcgctgcctcatgtacgtcatgctctccgaggcggacccgcgctgcccgcggtgccgcagccccgtcctcctcgacttcctgcaccatgccggcgccggcgcccgcggcaacgccaacggcggccgggagggcggcaactacggctgcaatagcacccccggcggcagtggcgg

SEQ ID NO: 5920 - DNA, 834 bp, Setaria italica
  Peptide Sequence Number=SeqID_71894
atcgagttcatgaacatgacaatgcatcagagcaatgtgccgttatgatttatcagtttctctactacatgtatcccaaaccgagaacaaattttggcagcacaaagaaaaaggaagcttctttgaaaccaagccgcggctgcaacatacaagaacgcagagccagagtgaaacgaacgccaagaaacctcgtcgacggatcacttcaccgccggctccgtcgccggcgcggccgcctctccctcctgtgccagcatggcctcctgtcgcgcgcggagcacggcgaggaggttgacggcgggcatctggaggcagccgaggaggtactggtaggactgcgccctggtgggcatggcctcgagctgcgcgaagtcgtcgggcccgtacaggcggccctcgtagacggcgccggtgaagtcgttgagctgcagcttccactccttctggaagtcgcggtagggcttgagcgccggcgggatctcgtcggagcgcacgaagagccacgcgttcatgccacgcgcgcagggcttgagcgcctcccaccgcgtccccgccacggccgccgccatgtcggagttcttcgtcaccaccagccgcgccgtcgggggcagcgacgcccggatgctccgcagctgcgccaccgtgagcccgtggcaccagatgcccgccagcagctggcacccctccagctcgcgccggagcgcctcctggcggaccatctccgccgccccgcggatcgacggggccagggacgcggcggagctgcgcaaggacgtcatcggcggcggcggcgagggttctgtctggatgcgagtgtgcgatctcttgcctccg

SEQ ID NO: 5921 - DNA, 795 bp, Setaria italica
  Peptide Sequence Number=SeqID_71895
atttttatagatttttactttgtgtatttttagtaatctgtaagactatgtcatgggaagtaattttacctggcaatggccaagtccgacgtacattatattttcctgtagaacctgacatttgcaacattttatcgccagatatcatctagctgagaagaagattccttccatccatgggtatacaacaggcctgaagcttgaacagtttatattcgatgctttcacttactccccatccacagcacttttgaggtcatgcgcgaggaggaatttgcgccggtgaagaatgctaatggtgcaacctatgacactcctgatagtgccagattaatgctgcttcggcttcatagccgatgggtggttgctgcaggtggcttcttgacacattccgtgcccttgtatatgacaggtgttgaagtttctccactttgctcttatgctggagagaacctagaagccatatgccgaggaaggacattccatgcaccaagtgagatttcattctaggcatagtagttggaagcaacaatcagaaaacaggaagatgagatctgcccaattttgatttcaacatgacaattcttgcaaatagggtgtttatattagtcaactattgtatgtatgcaaggaccaattattgtaacgcaacacctgaagttgccttgtttctcctctagcattaatgtgtattgtattctcatgtgctgctcaaatgtagattatgacatgcttttctgtaatatttgttgaaaacagcatatctaccaaatgcttattatctttgcacaatta

SEQ ID NO: 5922 - DNA, 1661 bp, Setaria italica
  Peptide Sequence Number=SeqID_71896
cttgtcggcgccggggccggtggggaggtggggcgccgcgccgccgcaggcgctgctggagaggatgaaggactacggccaggagggcgccttcgcgctctgggacgatctctcgcccgaggaccgggagctcctcgtccgggacatcgagagtatagacctttcaaggatcgatcggatcattcgacgctcacttggatcacaaggcatgccgctgcctgccgtggagcccgtgccggaatccagtgtctccaaggtggaggacaggtctccggaggacaaagaaagatggtggaagaaggggctgaaagccatctcggaggggaagctggctgttgtccttttggccggtggtcagggcacacgacttggaagctcagatcctaagggatgtttcaatattggacttccatctggaaagtcacttttccaactccaagctgaacggattttgtgtgttcaaaagctggctgctcaatctagtgaaagtccgagtaacactgtgccaatccactggtatataatgacaagcccctttacggatgctgccactcgcaaattctttgaaacccgtagatattttggcttagacgctgaccaagtgacatttttccaacaaggcacacttccatgcatttctgctgatggtagatttattatggagacaccatataaggtagcaaaggctcctgatggcaatggtggagtttatgctgcactgaagtccaaaaagttgatggaagatatggctgcacgtggtgtgaaatatgtagattgctacggagtagacaatgcactggttcgtgttgcagatccaacattcttagggtacttcattgacaaaggtgtatcctctgctgctaaagtggttaggaaggcttatccacaagagaacgtaggggtatttgttcaacgaggtcgtggtggacctctctctgtggtcgagtacagtgaaatggatgcagctatgactactgaaattaatcaatcaacagggcgccttcgctattgttggagcaatatctgcctgcatatgttcactttggactttttgaaccaagtggcaaacagccttgaaaaggacagtgtatatcatctagctgagaagaagattccttccatccatgggtatacaacaggcctgaagcttgaacagtttatattcgatgctttcacttactccccatccacagcactttttgaggtcatgcgggaagaggaatttgcaccagtaaagaatgccaacggcgcaacatatgacacccctgatagtgcgaaactcatgctgctccgtctccatagtagatgggtcgtcgctgctggcggcttcttgacacattctgtgcccttgtatatgacaggcgtcgaagtttctccgctttcctcctacgctggagagaacctggaagcaatctgccgtgggcgaacattccatgcgccaagtgagatatcgttttaggtagggctgttcatgacagcaagagctgtgtaactgcaaagcgaatttaaaggattgcaggatgtgcatgttccctttctaggcaagagatgggtgtggatggacaggttgttgtatacttgtatgtcatgtaatgtagccctcgaattccgaattcatcgtgagttttactaccccaaaaaaactaaagaagaactagacc

SEQ ID NO: 5923 - DNA, 508 bp, Setaria italica
  Peptide Sequence Number=SeqID_71897
ttcttcgttcacaatgctccatccagacctcgcatttgcagtaatgttggtaatgctatgagtgttctctgccaacctctgtctagtgtccaccttttcctcaagaagtcctgaattgacgccgatctcatgcaacaacctagaggccgatatggtgaagttgaaaggtttcttgctgaggtggatcttatgcggtgaatcagaagtgaagaaagcgtagaagagcagtacacaggatataacattccatactagttgtagcttgttggtgctgtggatggtaagcattgccttacacaggtgtgttcctgcagtcggcagaccagagcaatcggcggcgttcagctgcggccgccggctcggctagtacgccgtggcgctgtggactcgtactgccgggctgggcagcaggcagcagccgacctgctggctgctgctgactgtggcaatggagtcaggcggtgccgcggtggccagcctgagtctttcttttgttgtcgtaaaaagt

SEQ ID NO: 5924 - DNA, 455 bp, Setaria italica
  Peptide Sequence Number=SeqID_71898
gatttgtcttaccaatctgctcacagtatgcaggaagaaggcggtatccatcctcaagtgtaccattgacggcagccatacttctctcttttccacgccaatagacctagacaataatatagagtaacaagacaaaaccccatgctgctcccgaatatcctgcaatatctcctttggcttaatctgtgggttatcccttaaccttgcctcaacagacctagccacccaaccaacagtagcctgctgatgatgcaggtcccgaacaccctcacatgtgtgctccccgtgcaaagtccgaacagtgaaagtcggaacaccagggcacttagcgatgtgcacacgccatgggcaaccttcttttgagcacttggcgatgaatcggctacgatcagatttcacataactacggtagtagtcttatgcagttggttctttaaagtttctttaatttgttt

SEQ ID NO: 5925 - DNA, 505 bp, Setaria italica
  Peptide Sequence Number=SeqID_71899
ggccggcggcgaggagaccgccgggacggtggcgacggcggggagctggggcatggcctggaagatgagctgcggctgaagcgcagccagctgctgctgctgcggttgcgtctgaatctgctgggccggaggctgcgcctgtgcctgcgcctgcggcaggacctgaggctgaggcacggcggccgccgggcaaacagcctgcggcggaggaggggccgcctggggtttgggctgcggctggaggcgcgggccgaagaagaggtccatctggtcgcggatgaactgcgccttgtgggagaggtccatgccgagcttggcctccgcctgctgcagcacggcggcgagcgaggcctccccgggcccgccggcggagccgcggaggagggactcgacgcagctggcgatctcctggtcggacaccatggcgggagcgtgggaaaaactcaaatctcgccaaaacctcccgccttccctcccgcgattcccctctctcctccgcccctct

SEQ ID NO: 5926 - DNA, 393 bp, Setaria italica
  Peptide Sequence Number=SeqID_71900
gggaaggagctgccggctgcggtggctcaactacctgcggccggacgtgaagcgcggcgacttcaccgccgacgagcagctgctcatcctcgacctccactcccggtggggcaaccggtggtcgaagatcgcggcgcagctgccgggtcgtacggacaacgagatcaagaactactggcggacgcgggtgcagaagcacgccaagcagctcaactgcgacgtcaacagcgcccgcttcaaggacgccatgcgattcctctggacggcggcggccatctccggcggcgccgccgtctccaccaccctcatcacggtgccggaggtgatgacgatgatgatgaacaacgagaacgatgacgaccgctccccctgcagcgcggtcaccaccgccac

SEQ ID NO: 5927 - DNA, 364 bp, Setaria italica
  Peptide Sequence Number=SeqID_71901
ctctgtcagcaacaattttctggttatgacatgagcataatttaaacaccaatggaattttagaatcttagaacataaacaatttctatgtgcaacggatatttgtcagaattcagaaacatgcattgtttaatcataactttctgcatcatgaacatatgggaatatgaacagttagataaaagagataagaatcacacacaaagcataatgaaaaacataaccagcaattgaaccatgcttacaaacatagccatgtaggaatcaagatgcattcaacatttatcaagatagtggataaactgcttacctcatccagaaggaccaaggactctgaagttgaactcttgtcgtcgtaattgta

SEQ ID NO: 5928 - DNA, 507 bp, Setaria italica
  Peptide Sequence Number=SeqID_71902
tttaggtttaagttacttagttaagtagattcagtccgatgaagtcaaatgctccagtaacaagctcggattcataactggtgaacgatggaaggcgggtgccagcagccttcttcatgctctccgggtagtctccaaacaagaaagggtgcaagatgctaccaaacaagtagtcgttggctctttccgttgcctggatatcttcagctgaatctgtcaatgtgtaaatccacaaggaatacaggtttatgcccactacgcccttctgaacagactggtacttctcccggtaaagcctgacagcagacgagtgagccagcagactgtggtgtagaaataagtaaggttccacagaagagttgccaaccgtacaattacgaccaacgccaaatggattcgaacaacgtccagggggcacagctcccatgtcataggaaccttgagcaatgatgtttggttccaggatagttgtccagtgcgcaaccctatcgcctaactcgcgaaaac

SEQ ID NO: 5929 - DNA, 698 bp, Setaria italica
  misc_feature (628)..(698): n is a, c, g, or t
  Peptide Sequence Number=SeqID_71903
cttgggaggggcgattggttcggacagagatgttgcgaagcttctggctgcggaagaggcattgaggacattgaaatcaactactgacccacaaattaagaagtacctgagacctgtaagatgtaatggctgatccccctccccccctcctgagctctgcaaccacatgagctcaatattcaaaaaggtcggaatgcgagggcagctgctcatttcaccattccagctgttgatttaacagaagtgtgttaccctttctgtgagtatggttctcaccccaaactcatgatatgtgccaaacttcaagcacacatgagttctggaaaggccggctttgaaggaggtataacatagagggcggacatggttgttttatagattcttttgaccatcttcatcaaagaatcttcccatgtacaagttattcacatacaactatagatgttctatctggtttaggatagtggcatagttggctgtaaacaagtaggaatgtagatgtcgtggatctaaattgtttccttgaaggatgtgctggcccattaacagttatggatcatcaaatggaatgcttgttccggttgttcctgtttatgtatattataaacggtgctaaatccttaacatnnnnnnnnnnnnnnnnnnnnnnnnnnnnnnnnnnnnnnnnnnnnnnnnnnnnnnnnnnnnnnnnnnnnnnn

SEQ ID NO: 5930 - DNA, 290 bp, Setaria italica
  Peptide Sequence Number=SeqID_71904
gacaagagagaccaaacaaacttggcatccgcttcggctgcggcggtgcccgggtccccggggcacggtacggcgggaggaggaagaggagccaccgaccgatgggctcttccgaggccccgctgctgatcccgcacccggcgggcaaggaggacgcggaggcggagggagggaagagttgcttgtggtggcggcgatgcggcggcgcttgttcggaagggtggtggggcgaggcgacggcggaggccggccggctggcgtcgctggcggcgcccatgatcgcggtggcg

SEQ ID NO: 5931 - DNA, 2663 bp, Setaria italica
  Peptide Sequence Number=SeqID_71905
tttttaacataaaacatgtcaacactaagaacatagcataaataggtaatagtgttcgaacagttccacacatgcactgcacactgcaggagcctatcacaatcctaatctagtacttagagaacacaaaacacacaggttaggttattcgttacagttcagaccaacagcttcaattccgcacttgggtgctagtataggttacagtaccttccctttatttatgacacagggtagctacagctacaataaaaatattgaaaatcccctataaagcataaattctacgttgtaaccatgcatgactgccagatacgcaacaggtcaagaccagaaggttacttctggttgacactaagcaaaaccaactggacagggctggtgtttttacatgctacagccaattgcccgcagaggtgctagcctccgcattgtagcttaattgctttccaagattcatactagtagatagaatagccacaatgttaccaccacgcaccctcccttctggagcagagattggtgcttgaggaagagtctctgcaggacgcagaatattgctggccctttcgctgaaattgaaagggttgaacgcctcaccatctgcggttctagaaatggaaccgtgactaaccatgttgttcacaacaggtcctggtgagcccatagcaccaagtgtctccccgccacggactcggctgtcttccaccagagcattgtgtgcaacgcacagtccattcttcccccttgaaaagcgctcacaaggagtactgctggttccaagttcagatcctggttggccccataagcaacgcttgcctcccccatgagccttgcagaagtcagtgctaccctgtgcactcttgctgcagccagcaaattgacatcttttgcccccaccatgacgaacacagcagtctgttcgtcctctagcactcttggtgcatcctggtacgacacatcgctttccacctccatgggcaacacagaactcggtgccaccatggacactctttgggcaaccttcagctccacagccgtttcccccctccatggcccttgcagaagagtgtgctgccctcagcacccttgctgcaatttggatgtgtgcatctcttaccacctccatgggatttgcagaaattagtgcttccttgagcaccttttgtgcaaccttcatgtttgcagcgccttccacctccatgagcaatacaaaagccagactgtccctccgcactctttgtacagttctcttttggcatctctttccccaaccatgcttaatacaaaggccagattttcctcttgctgcctttttgcacccttcattcctgcaacggcggccacccccatgagctatgcagaaatcagtgcgaccctcagcgctctttgtgcatccaagatgctcacagcgcctaccccctccatgagatttacagaagatggtttttccctcagcccctctcttgcaaccctctctctggcaccttctgcccccaccatgtgaaatgcagcgcccagatgaaccccgggcacctttagagcatcctggttgtgaacaaatttttgtgctagtacagcgctgttgtgggctgctaactccagaagaacaggctactgaactttttggcagttgtatcgccggtgacattggtaaaggaccgtgagattgattggagccaacaggtaacaggtaaggaagtagcttaccaccagatttccagcgagctgatgttgatccttcatcaacagttggcactgaggccatattgtatgattgaaacaatactgtgtgattttgggagcccatattaaggtccacattagtaacaacagattcagcaggtccgacagtcaaagataactgaagatccgtaacaggctgcttctctggagctgtcttagcattacaagcattcgtgcccaattttgaagtgccttcattacacagactaaactgaaaatttaggtccaagtcaatagatgatccatcatccctatcctttgcagcagaagacaaggtgcagcatgtgcccatgctctgcttgcttgagtcagaggagcttgaagtgttacctaagccaagtgacaagtcaatccatttccgcttgatccctcttgataaaatattcgttctatcttgggaaagcacatcaacttgcgtaggacaagctcttgaatccatgactattggtcgaagagtggtccagtttccaaggttgtttgaattcaaagatttaccagtataccctgaatgttcaagcgtatgatccattgctcctggtggcagcgaataccatcaaattcaactgacctttatgaggaagtacagtcagcgactcagcatcacttctaggttacataatgcaatggaatataaggagttagaagtatatgcttgttagcagtccctttgtctccttgcatcctccactaacaaacccagaagtatcatgacgatccatttgtcagcactctatgaagagagtctatctagttaacaaacccagaaattgcgcttagaagtaactgactctgctttcatctgacaagatcttgcaagtcaatcagtgacaaaacagcaatagcctttctatactgcaagaaattgcagtgctgttgatatggaaattcagcaagatcactctgcaaacttgggtcaa

SEQ ID NO: 5932 - DNA, 518 bp, Setaria italica
  Peptide Sequence Number=SeqID_71906
ccccgtaggatgcccacctcaaaatgtgcatgttacgctgcatgccggaaaaaaaattgagttatgaacatagttagtaatcaccctttagcaaaacaatcatcgtctgggaagcagaagaataaagggtacgtgggtaacaacattataatcgaatatagtggtagaaaccacaagggttgttgaaacagccattgaattcaaaatacggttagttggtaacgagcaagcagaagcacatggcaactaggaagaatagtcatgaaggaaccaaacatccattcagaattacacttaactcagaagacttgctatgtcaaattgtcaataatagcgtattttataggcctaagatgctagaatcagtgcaagtttacaaataattgaattagaatcagcttgtgaattgcatgccaatagacaggtcaaccaccacacagaagtaaagaagggacgggtccaagtccaattcgattgctagagctagacatcatctagtcctaagtactaattgtaaa

SEQ ID NO: 5933 - DNA, 426 bp, Setaria italica
  Peptide Sequence Number=SeqID_71907
cgaagaatgattaccagagatggagcaaagcaactggacagtgaaggaagactcaagtttcatttccagtcttttgtctcattcaatgtcgcacataaaacaataatggcactgtggaaggcaaggtccttaactcctgaacaaaaagttcagcttgtagaagaggaatcagaaacagaagatttccaaaacgaggaaggtgggtctttcttagggatagaagatgccaaaatgtcagcagtgttttcatctacaaaaccttttgatgtatcaacactcatgagcatttttgagggtggtcctttggagcatcgggtgatggagagagttggctgtgtggattactctgttacagaatgggaacctgtaagagctgatgtttaccagaggcaagttcatcataagttcgacaagaaatcagagcgg

SEQ ID NO: 5934 - DNA, 875 bp, Setaria italica
  Peptide Sequence Number=SeqID_71908
ttcaccacatgtctaacaatttaactacatggagtgcatttacaaggggggaaaccacaaccagtctctctacagcacacattaattcagatacaattaaccaatcaactgcatatatttatccctcatcactcaactagttactctgcagcatgaagccaatcggctgctactatctacacatgcatgcatccaccaacactactaacaaatcaaatattactccgatcctactaggctaatgatgaagattagccggccggccaccaacctgcaggaggataggagagcaggccttcctcgacgacgccggcgaggtcccttcttcgttcatcagacctcatcggcagcgcctctcaattcccctaattaattaacaccatgcacgcatcagcagctaccagattcgatccatccatctcgccgatcaaccccaaacctcaactgtatgttaataaatcaactaatcgaccaaatcgaactactactagctagataacttctatatggctaggtggcagctagctccaactccggcgaggcctatctagcctggttgatttcagtcagaacttccacatgttggagtagtccaggtagccgccgtccagtagtaggtcgtccagctccgggtaaggcctcgacgacatgtcggcgtcgagcgcggtctcgccgaccgacgggctcggcagcgctggcgcctgctccgggcaccgctcgcgtatcgcctggtgcgggtacccgccggggttgctcgccgccggcagggagaagtaggttggctcctggattggctgtggctgctcgttctgctgctccgccttgacttggtatccgccgccgctgcccgtgcccgccgcggcgccgggccggac

SEQ ID NO: 5935 - DNA, 328 bp, Setaria italica
  Peptide Sequence Number=SeqID_71909
ccgtgacagacaaggttgaacagcgccacagcggcggtagcaatggaaacgctggtgggtcatgggcgtagtcatgtaggacagggacgtccgtttatggacctcttcggtaggctcccaaaacggctccgccaccgccttcgttgggagccccaaccaaacggttgtttgcaaaacagcttcgagattgaagctcacttggagctggagctttttttactacgcgtaggaagccgaaaaacatggcttcctgcggctcctccttgtcggcatgcacaaggatgcagttactcctcgaaattgcaaatactacagctaaaatgccact

SEQ ID NO: 5936 - DNA, 570 bp, Setaria italica
  misc_feature (10)..(10): n is a, c, g, or t
  Peptide Sequence Number=SeqID_71910
ggaaaacacngtttggtggctgataagccagctgataagctgaagcgaacaggccgatggcttcctgcggctcctccttgtcggcatgcacaaggatgcagttactcctcgaaattgcaaatactacagctaaaatgccactcatcgggggagcggcatcgaggagcgacgcgctgaggctggctgcgggcggtccgtgcatcaagggagcattatgccgggggcggagcacgacagcgaggaggtggcacgttggtgccagagcgcggcccctggtcggcgagcagcggcggattcggcctaccttgactccgagccagtggctcggagtggcgcaacatcatggagagcggcgtgcgaggttgtcagtcggagcggcgcagcggggtcggagcaaattgacgggacgggcgctattggacaagggtaagaatagagggaaaaatataaactttactcaatagttaagggtatattggacatttaacctcttctactgcattataaaatatagaagaagtcgttttgctaaataatttttaaaatagctttagtttttattcagaggag

SEQ ID NO: 5937 - DNA, 755 bp, Setaria italica
  Peptide Sequence Number=SeqID_71911
caacagctgcagcagcagcagcagcagcagcaacagcagcagcaacaacaacaaatggggtctccgttacagcaggcgcaggtgggctcacctgctggctcacagcagtccatgatgatgcagcagcagcagcagcagcagataagcccacagcaaatgggtcagcatgctgcaatgagcccccagttgagctcaggaactctgcagcaaatgagcaataatgtggcaaaccctgtagccactccaggcccacccccaagcccgcagttgagctcccagacccatgggtcggtcaacagcattgctaactctccgatggagcaacttcaaggtgcaaataagggaggtcctggtagcatgtagtaactggaaatacttggttctcttctttggcctatacaataaaggaaggtgtaaacaccggccaagatcactgcattttcatgtttgttgtggtaaatggggtcaatggattgtgttataagttatagcccatagatgataatttgtggaggagctctatgcttggattttgatgttgtagactgtagttagtaggaatggtgtgtaggatctcagtagtggatagctaggggcaagcattgtttgattggacggttctcgtttcacgtttaaattatataatcaaaattgtggaactgatatgtaaccattgtgcttattaacaagcatcatcatctactcaagttctttcttagtttaaaagttttagtacttaattaagtttttttaaa

SEQ ID NO: 5938 - DNA, 405 bp, Setaria italica
  Peptide Sequence Number=SeqID_71912
ttccttactgagaagaacactcggcagcactaaaatggattcgataagctcctggagtggagccaattcctttttgtcaatcaggccaaactcatttgtgaacagaatgaagtgcttgaagcaggtgttaagatgagcctcctccttgaggctgacaatcttctgaaagtgagagtgatatatgtgggcataaacgcggaacaggcgcttgaatattgtctttactacttccttgaagtttggcgggaacggtgtgccaagtttttgaggaaatatggattcatcatcaagttggccttcaatccaatccattagatactccacatattttggtgctgctacctctatgggtttcttatctgtacaccatcagcccatctgtactcatactttgggcctgcagtc

SEQ ID NO: 5939 - DNA, 1134 bp, Setaria italica
  misc_feature (1)..(2): n is a, c, g, or t
  Peptide Sequence Number=SeqID_71913
nnttagtacttagtaccgtaagttagtttactttatttttttagttagaacaaacactgcatgcattcacgtgattggaccaaactgttttgtgttttctttcttagcacaacgcgccgctgatacgatcttacaggcacacttacatggccaatatagaatcagaggagaaaacacgggtgcacgcaaatatagcattagcaatgtcaagtctccttttttatgtctaatataactggaacaataagctctatgccagtgaagtattgtcacaaatagactaatatctcagccatcagcattgagagctccagatccattttagtgctgccgagtgttcttctcagtaaggaacgatgatggattcgataagctcctggagtggagccaattcctttttgtcaatcaggccaaactcatttgtgaacagaatgaagtgcttgaagcaggtgttaagatgagcctcctccttgaggctgacaatcttctgaaagtgagagtgatatatgtggggcataaacgcggaacaggcgcttgaatattgtctttactacttccttgaagtttggcgggaacggtgtgccaagtttttgaggaaatatggattcatcatcaagttggccttcaatccaatccattagatactccacatattttggtgctgctacctctatgggtttctttatctgtacaccatcagcccatctgtactcatactttgggcctgcagtcattgtcgggcagctctcaggtgtgcagaattcagtgagtgttccaaacagcagattaacctggttaaagaaatccacagtattcacagcaagccattcattaatgtcttctccaggaggcagcctcacagcttccctaaggtttccactgccgagagtggcatctatgtgcttccggagctgtgctcccttgctgcctgatggagcgctcttcttgggacggaatgtcttctggttccgtccgagcccgaagagactcatccctcctcctggtccgctgcctccctccctcgatccggcgcggggccgagcagcggagacggcgacggctggagctgcctgctgcttcgccgctgcgaggacgaagagaccgagggcgggtggggggactgcgacctgcgct

SEQ ID NO: 5940 - DNA, 849 bp, Setaria italica
  Peptide Sequence Number=SeqID_71914
ccgcgtcgcatttgccgcgagcaaccatagcgaggagattgcaatggcggcctccacagcttcccgcctctcgacccctcgcttcctcgcccctcctgcgtctcctcatcctccaatccgccgctcgcgcttctcccctgttcgcgcagccaagtacgccctttctttgcctctttgttgcacgagaccatgataattcaaagatgtttgaattcgcccggttcttggaacttgggtaaaatttcgatcttagctaatgtgtctgctagtgagtatggttgtatcaggaatcgaggtaatgacactatgagattgcaattcagttttttattcccgtctagtttaggcacctttcctgcaggccctaccactatgttcgtgtttagcagaacttctcttcatatgtattgtatgccggtgatggtttatctttgtgcatttgctctgatgacctctagttctagtcactcaaaccttgccgccatcaaggtgcaaaattaagttgctagctccagttaactaacggggcgattgttgctgcagctaattatgagactcaagttattcgtagtgtattttatctaccagcaactatccaggcatatgaacctgtgattgtaggttggaagctgtgctatctattggtactcatctaatcccacacccaagaaaggttagttgtttattttaagaacatcactcaagttgctcgctgatcatagaattgtctgctttttcttgatccttttttttaaaaaaaacaattgagcttgccaatctttcattttgttttccatatttccaaggctgcaagtggtggagaagatgctttctttgccaatagcgatg

SEQ ID NO: 5941 - DNA, 653 bp, Setaria italica
  Peptide Sequence Number=SeqID_71915
gtccgcctccacccctctccaccatcgccaccgcgtcgcatttgccgcgagcaaccatagcgaggagattgcaatggcggcctccacagcttcccgcctctcgacccctcgcttcctcgcccctcctgcgtctcctcatcctccaatccgccgctcgcgcttctcccctgttcgcgcagccaagttggaagctgtgctatctattggtactcatctaatcccacacccaagaaaggctgcaagtggtggagaagatgctttctttgccaatagcgatgctggcggagtatttgccattgcagatggtgtttcaggatgggcagaaaaggatgtcaatccagctctgttttcacgagagctcatgagaaacagctctaattttctcaacgacgaggaggtcaatcgtgatcctcagactcttctcatgaaagctcatgctgcaacttcttctattggatctgcaacagtaatcatcgccatgctagagaagactgggactctgaaaattgcaagtgtgggagattgtggtttgaaagttattcgtaaaggccaagtaatgttttctatatcccctcaagaacattactttgactgtccataccagataagctccgagtcagctggtcaaacatatcaggatgcactggtttgca

SEQ ID NO: 5942 - DNA, 345 bp, Setaria italica
  Peptide Sequence Number=SeqID_71916
ttagaaagaatcagagaagactcgtcagaaatcacctctccaagccaaggagcagcggctgcaactgtagttaacaggatgcttggtggcaccaacaggctcaacctttacagagagatataaaaatacactttgtcataggattgtatatagtcaccaaacagaaagtgttgactacgttgcctgcaatatatagtcttctggtttccaaaggaatggatagaacatcttgtttgctgttttgtgagtctaaaaggataatttgtatcagttaacattggtattgtaatgaacgtatatggttttgattcccgttgcttatcttgcaaaaagtgttgagaaacg

SEQ ID NO: 5943 - DNA, 1450 bp, Setaria italica
  Peptide Sequence Number=SeqID_71917
ctcgctcctgctctcccatctctcctatctcctctccctccgagtctggtgctccccgagacgacggatcgcccgcccagatccccagctccctgcaccaaggagccaccggtcgctgctcgatccacatccctcgccggcctccaagcagtgaaggatccttatgagctggttggctggggctctactccaattctggtgctactaagatgggtcaggacctgctcagcaacaaagttgggacaagactaaccgtagatgaaatagcaggcgcctaccatttctcgctcctgctctcccctgttgtttccttctgggattgcatcttccgcaagataagatactcattcagacctgagtgggtgtagcatcctgcccgcgctcaacccccctctcttttagcagtagctggtttgcaaataaatagacgggtgggggctcttaggaaaccacctagcaaggagtccaaaacaatgaactttgaaggttttgtctttccctaattatatatagtagctggtagaggagtttagctgggaatagtaaatagcaggcacagttgacatggacaaggctatcatgagcaatcaggcaggcaaagtcttgaagaaaggaaaaaagaaacaggccaaggatgaactggatcgccagaagcaggctgagaagaagaggcgtaggctagagaaagcgctggcaaactcggctgccattatctcagagctcgaaaagaagaagcagaagaagaaagaagaacagcaaaggctggacgaggaaggtgctgcgatagctgaagcagtcgctcttcatgttctcataggtgaagactccgatgaaccctgccacttgatgctaaacaagcacagaaggtgcaaccattgggatccctcggctggctttgaattcactgtcgatgcacaagccactgatatttatccttcagatggactgatatgcgccagccatgccacatttgctcccaaagggaggtgggctgattgggggattggccagccaatgccatcttggggagaagtgagggacctccaaggtccgtactatcaaggaacattccatcagtcagttaactgccctggtttcatagcagcccaagcagtgtcgtcgttgaagatcagagaagactcgtcagaaatcacctctccaagccaaggagcagcggctgcaactgtagttaacaggatgcttggtggcaccaacaggctcaacctttacagagagatataaaaatacactttgtcataggattgtatatagtcaccaaacagaaagtgttgactacgttgcctgcaatatatagtcttctggtttccaaaggaatggatagaacatcttgtttggaaaccagaagactacgttgcctgcaatatatagtcttctggtttccaaaggaatggatagaacatccttttagactcacaaaacagcaaacaag

SEQ ID NO: 5944 - DNA, 355 bp, Setaria italica
  Peptide Sequence Number=SeqID_71918
ggtaacagtcagtactaagaagtttcaaagacaatggaatttgaagttgttcgaaaactttcaagtcaacaccagaagctctcaattgaaggcacaataaatcgagggaaaagaagtgcggggtttctagatgaagaaattttaatcatggttcaaacacttcaatgtttttactttttacaataagcaacagcatatgagaatgtaatttgtaatttctcgtttaagcaaggtgattgacatattgcaaatccatgtaaatctaatttggagaagaatctgaacattaaagcaattaacagttcaactatagtccaatttgccagcacaggatcacaagtttatgagccaaaca

SEQ ID NO: 5945 - DNA, 1135 bp, Setaria italica
  misc_feature (970)..(970): n is a, c, g, or t
  Peptide Sequence Number=SeqID_71919
tgagtttccagcctcatcactgaaaagatctttcataacacgatcaataacagatggtggaggcacagtagtagtagattttgaattgtcctggcctgaagtatctgcaacgaagtcttccaaaaactgtgcctccgctgacgattcatacgcattcactagaagatgtagctgggatgcaaacccaacaaattttccaatggaatcatctaccatgtattgagatacaactgggtgaagaaaccagctatcagcatcaaaggaagaagcattttccacttcagccatctcaagggtttcttcaaatgtcctctctccccaaatggcagtcagctcaaaacctttcacaggatcctcagcagagtaccactctgcccaagggcaatcatcgtcccattgatttttggggtggcttgcaacttcattttcagttaatgactcagcagcttcagaatctaaagtctcattatcataatcatactcaggagtcctgtaggtaagcttcattgagaagtgaacctttaccctggatggaaaatctgttgaggataggacaaactttgatagaaatagctcatgtaacccctccagatgcatgagtcttattggcacttggctaccaattcgatcagcttcaaatcttcgagtaaatactgttcccaagttctgaattcctatatgtgctttccgtgaagggtcatgaacgggtacaaatgctggccaattgctgccacaattggaaagggcaattgctacagaactcaaaagcttagttgattctggatcgtcaagaaccacaccgctggcactcagcggagcaatcatcaaaaattcatcaactccaaatgagagctgcatgctatgtgtatcatcatcccagtatgagtttttgccttttgcagatttcatgaaatgatactccatagaatacactcttttcccatgcttcagttcacgtttgatcaagtanaagttttcaaagggaggaacaatctctgcacctttttgcattaagatcttcgggccatctgcaagccattgacggcaaatggcctctatctcagatataaacctttcccatgatgaagcgatagtgaaatcatcgaaccgttcaagctcctcttcggcctcctcc

SEQ ID NO: 5946 - DNA, 326 bp, Setaria italica
  misc_feature (1)..(68): n is a, c, g, or t
  Peptide Sequence Number=SeqID_71920
nnnnnnnnnnnnnnnnnnnnnnnnnnnnnnnnnnnnnnnnnnnnnnnnnnnnnnnnnnnnnnnnnnnnttttttttttttttttattcataaatatatacttgtttattatatggcaagaaaaattacataatctctgatactttacaagttgggataatctgggaacatgttgcgagcacaaaataaggggggaaaagaaattccaaaatgtttgctgtctgttcaacaatctgttactctgtacttctgcggcaaatagaatttactttgatcactacttggaaggcctgttttctccaagtccttgctgctagagctacctta

SEQ ID NO: 5947 - DNA, 528 bp, Setaria italica
  misc_feature (523)..(523): n is a, c, g, or t
  Peptide Sequence Number=SeqID_71921
tcgtactttgtattgcacttaattggaataatttaagcacgtcaggaaggagaatcagtgtgtttgttatccaaatctatgtaggcacaactataccctgagttataatcatcagtcacaaaatattagtagtgtttcttaagttatcaactagtcttgattcacagttctttgtacatatgctattaatgctctagttatgttggtagtacttcaactataatgtgtgatcgttttcacgcagctaatggattggatggtcaatgcaaggggcatgcacatgtcacacactaaccatgcaatacgtctggatctcatctataaagtgcgtggccttgaggcagctgagaattatttgctagtctccctgatccagccaagaaccatcgaacttatggtgcacttcttaattgttattgctcagcaaaaaatggaagagaaagcaatagatatctaccgcaagatggatgagcttggcatctgttccagtaggttgcccatcaataatctgatgtccctttanatgaa

SEQ ID NO: 5948 - DNA, 487 bp, Setaria italica
  Peptide Sequence Number=SeqID_71922
attaggaggtccttcacgaagggactattggttagcaattacccgtgaagtattgcaggtgaacagatttatcaggaagttcaatcttggagatgttcagagagcagaagcactctcaaagctatcctgggcatcttgagatactctgctgtcaaagaagcttttcatattgctccttcccacttcaagacaacacttacctttagcttagcagaaaagcttccgaaaggagacatggtcttagaagcactgtataataactacttccaactcttggactcttcattgagccatttagcaactgattctgcagtcgacaaaatgccagaaaaccattctgtaccattttccttgtatgctctctctagaatggggtttcttctgctgaagagaaaagatgaaactgaaaaggaaataagcttttgtgctgtttgctttggtgtaacaaaatctctggaggctgctctagaagagtcaatttgttact

SEQ ID NO: 5949 - DNA, 762 bp, Setaria italica
  Peptide Sequence Number=SeqID_71923
tgggacatgggagccatgaggccgcattgcatacccaggaacccatgggaaatgaatgccggcagcggcggcggtggatacaccccaggtggcggggcactcaccccaccaccaccgagctgctgcctaagtgtggcgttctcggccactatgaaggagatcttagaattgaggtcgtttatgaccgagtgcatcgacttcaccttctcctccagctcctcgacgtaccgcttcttcctctgccgcgacagctgcgcgctctcccggttccgcatcagacgcgcagtccggcgcttgtcttcttcctcgccgcccgcgcctctctcgtcggagtcctccgcggcggcccgcgacgccgaagccgacgccgacactgatggggagagctcgccgtcgccggatcggcggcacttgaccccgtccgagctcgccccggggctcgcctgcttccgcttgaggctccagctcggggcggcgccgctccttccctcgtccgagtcctcgtgcttcacctcgcggtcgccggcgttggccacggcggagttggcggcggaggtggccggggaggcggaggaggacgcggcggggccggatccggcggccgagccctcgccggagtcgtctccgtcgccgccgcggtcgggggaccggaggaggaagtcgtcgatggagaaatcgactggcaggtcgaagtcgaggccgtcgtcgccggcgaattcgagcgggaggtcgccgccggcgaggggtaggtccgggtcgaag

SEQ ID NO: 5950 - DNA, 407 bp, Setaria italica
  Peptide Sequence Number=SeqID_71924
ggcgacgtcatccactgcgtgccgttgcaccggcagccggcgttcgaccaccccaagctcagagggcagaagcccgaggatgagcctgcggtgaggcccatgaccaagggcggcggcggcgccgccggcgaggaggaggaggagtccgtgttcttccggcaggcgtggagcgacggcggcgagcggtgccccgaggggacggtgccgatacggcggacgacggcgcaggacgtgctgcgctccggctccgcccgccggttcgggatgaagccccgcgccagcaacgtccgccgcgactccaccagcagcggccacgagcacgcggtggggtacgtgaccggggaccagttctacggcgccaaggcgagcctgaacgtgtggtcggccaaggtggcgtcggcggcgga

SEQ ID NO: 5951 - DNA, 348 bp, Setaria italica
  Peptide Sequence Number=SeqID_71925
cggacatgggcgacctttgtgaattgttcacagccaatagagaacaatggtatgtacaagccagtcgcttgcctgagcaccaactcttctttcatctacgtgattactgggcttttatcttcttccgccgaaaattttgagctctcgtgcggttacctggccatgactcctttgggtgctgcgttcacggtagttcccaacaatgcaagctatgcagatatcgtgaaactcattagcaaaggatttgccgttcgattttcttacatggatggggactttagacagtgccttgcggaagcaactagcgaattccatgaaccaacagataatacaggcatcaaggatcgt

SEQ ID NO: 5952 - DNA, 1215 bp, Setaria italica
  Peptide Sequence Number=SeqID_71926
cgagtccaacttgggagctcagagcagctgccttcttcctcggtggagtcaccatgctctcgaatacatgttcgtcaagaggtcacgccgcagtgtcgaactggctccgtctagatggaggacgacatgggcgacctttgtgaattgttcacagccaatagagaacaatggtatgtacaagccagtcgcttgcctgagcaccaactcttctttcatctacgtgatgattgggtcttcctcttcttccgccgaaaattttgagctctcgtgcggttacctggccatgactcctttggggggtgctggtcctttgggggtgctgcgttgacggtagttcccaacaatgcaagctatgcagatatcgtgaaactcattagcaaaggatttgccgttcgatttccttacatggatggggactttagacagtgccttgcggaagcaactagcgaattccatgaaccaacagataatacaggcatcaaggatcgtattgttagcattctttttgttgacagcagtttctggagatgcataatcgaacaatttaggtttcctcacagtgctgctgcattggtgctcattggcccagcaatagcgtttcctactgcgatgtggttcctgaagtttattattgtgatttgcaggttcgttttgtcgccacttgcaatgtttaccttccttgcccacatgtattggaaaacaagaataacaatggatgcagtcgagaagtttctgcggatgcaacaaatcctcaatggtccattgagatatgcctacacagatatcgtagcaatcacaagtcatttcagagagaagctcggccaaggaggatacggctccgtgtacaagggtgtcctactcccaggaaatgtacacattgccgtcaagatgctcgaaaactccaactgcaacggagaagagtttatcagtgaggtagccaccattggcaggatccaccatgtcaatgtggtgcgtctcgtggggttctgctcagaggaaatgaggagggcactcctctacgagtacatgcccaatggttctcttgacaagtacatcttttcatcggagaagaggttttcttgggacaagctcgatgagattgctttgggcattgccagggggattaactacttacatcaggggtgtgacatgcggattttacattttgatatcaagccgcacaacatccttcttgataacaactttgttcccaaa

SEQ ID NO: 5953 - DNA, 711 bp, Setaria italica
  Peptide Sequence Number=SeqID_71927
aacaaagtaactagcactaaagttaaagtaattttcctatatgaaggcatgttttgtaacaagagaaaacaaaaaaaaataaaataagttgagagagagagagagagaggaagaaagtaaagaggatatctcaagcacacatataaaggacaaaccaagacacaagcatataatagaactatacctaattagcccattggcccaagtagtcataacacagatacttccctgtactatgaaatatttgtacatatgacattatgtgcaagtgcaagggatgtgtatgcactgtgacaggactattactgatgataaagtttgatgaataacgcttgcctagagcatgctggattaatgcatatatatgattactgcatcagaaccatactcaatgcacagatcttctatttaataaaaaagaaattaatataacataccctagaaggatgtctgatattagaataataagaaaggccttcccactgtctgaaatgttatttagcaacttatatcctgtgaacttcagcatcgcaactttgctctggttgaagcagataataaggaatagtgcaatcccataaaccatatcagaccatatatttgcaaaagctttccggttttctaatctccagtcatctctcaactctaacgctttttcccgcagctctgaccagacctcctcgtcagaaagcggaggagatttaccaatct

SEQ ID NO: 5954 - DNA, 1984 bp, Setaria italica
  Peptide Sequence Number=SeqID_71928
aatattgagtcagattgtgacatggaaatgatatgccactagtactaacttagaattatatggtatactaaagaagagaaatgatgcaagttctagtcaggatgcttttgcagttatttgaaattgacaatataaattaactagcactcctttgacaacaataggcccagtagcacaggaatttatctacttctaagcatttaaactccattttaaataagaagaaactatatgtgcacatgcaccctatgaaaagtgctacagatatttacgcaattgaaaatggacagaaaacgaaatggacatgcttttctgatagatactcactttgctctggttgaagcagataataaggaatagtgcaatcccataaaccatatcagaccatatatttgcaaaagctttccggttttctaatctccagtcatctctcaactctaacgctttttcccgcagctctgaccagacctcctcgtcagaaagcggaggagatttaccaatctctacttcaagtcggtatcttgccttctcaatatttaggtctttaaccatctggagcttctggctgcgtcttacatcaagtaactcagcagcaagtggcaccttctggacatacctctctaaaaagggcagcataacatagtcatgtactagaaaatctatcacccacggaaccacaatcaatattgccagaaatttggccgaatttgttgaggcatacataaaaactcgatcttcgaacaacatgtcatcataatcttcattaaggggatccctgaaaacttcaataacactcttatccctcataatctctgcaggatcatcagttatctgatccaacatgctcgcacctccacccccgtctccaccccctgatgtgctgcccccgctgatccaatcctcccacgaccgctcctcggcattcatagcatcctgctgggcttcccgcagctcaacaatagcctcagctttcctcctccacgtctcaaacttctcattctccgacagctcttggtcattgccaatctcctccgacaattcatcaacctccctccagccagccaagctctcctcatcttcattcccatcgtagaaaaatgtcttccaccacggccgttcccacttcttcggccgcctcctcttcgtcgcaaagaccaccgggtgcctcaccctcctcctctgggaaccaagggtgaacatcttgtatgcacaagcactccggcgccggatcctatcctcaatgagaaaccggagcgcaatgccattagacctgaccgcagaacagctcatgaaggtcatgaaacggcgaccacatgttcctagccccagcggtacttggaacacaagggcaaatacacctggagtggccacaggctcatgtcatcagcattcccctaatgtcgacgctgcatatcattgcaacatagcaacctccacatcaagaacccgagaagcaccagtagcacacatattggcaaagaaattcgcagacactattccctgtgcggaattcctccagaaatggatcctaaaataattccttgtctcctccgctgcaaaagcagcaaccgggacacggaaggaaccttgtttggtgccttggaaccaagaaatttaacagaatcctgcagcctcaaaatctatcgggggtcatttcttgcacaatttgctgtgctgaaacaaccgataagaagatcgctgatgctactattaacccgggaaatttcggtcggtagcaatagtaattttccttccacagctggcaaacaagaattcttatcttgtcctcagcgcgtctcctctgcgccgcctccgctgcggccgagctgccggcgagcccctcgacggcgaatggtggcacttagcaggtagcggcggggaagcaggccggaggagactttatttggcggcttctgggcagcggcggccggcggagggaagacgcacgccggaggaaggcgaggcggagtggattgggtgatgg

SEQ ID NO: 5955 - DNA, 688 bp, Setaria italica
  Peptide Sequence Number=SeqID_71929
tgtttccaaggttgacgttctctatgtgttgatcatcaacgttgaaaagagtctgccggtttcgcctatgcctccaccagaacagcaatccaacggcaaggaagaggaggctgatgcagccagttgcagtaccaaatgcaattgcaactttgtggctcttagctttcgcaggcatcacagtaccctgtgtattattcaggctgtaagacattggcatcggtaaagatccgtaacaatcttgttccgtagttgctgcacaaatcagtggattccctacaatgttgtatgtccttgtcagggaccctgggattggaccgcttagattattgtaggacagatccaagaaaataaggtgtgataaattagctgccgatgacgggaaggcaccggatagtgtgttgttgttaagcctcagatactgaaggctttcaaggtggcccactgagcttgggatttcaccagagaagtggttgctggagagatcaagcgtcttgagttttgttagcttgccaatctctgccgggattaacccgtttatgttgttgttctgcagaagaactgtctcaaggttggtcaaattccctatgcttggggagagaatgccagaaagattctggcttggtgcttccaggcccgtgacaaggttctccggagagcaagtgaccatggtccagctgcaaggatccac

SEQ ID NO: 5956 - DNA, 1636 bp, Setaria italica
  Peptide Sequence Number=SeqID_71930
tattctaccaacagttacagaacctgtaaatgtagtaatataccgtgcctagcctagctacgatgtgctcttctttgatctttgtacagttcaactgattgagatctgcttcaatttctgacaggatgcaacatcagttgcctcactttgtattatttacagatcctactgggaaacgactggtaacctcttgtctcacacagtctcaatggtgtcatcttggcccagagagctccactgcctgcaccagcagcgacgagtcgtccgtcaggtcagagtagcagcggctgaaggtgaactcgggcaccttgaatttgtgcgagtcggtgtgctgtgacgcctcccaccgctctgcgaggccatcgccctcgagcatcctgaccacctctgacatcttgggcctgtggccagggaggaactgggtgcatagcagcgccacttgcaccatctcctccaactcaatgcggtcatatttgctccccaagcccttgtcgacaagtatgtccagctgtttctcttggtgcattttcttcacccagtctaacatggctcccttctgatttgatgactttccaaactccaatgcagtctgacccgtgatcagctccagcagcaggattccaaaaccaaagacgtcggttttctcagatgactggccagtagagagatactcaggggctatgtggccgacagttccccgcacagctgtggtaacatgtgattcacggtggtctaggagctttgcaagcccaaagtccccgacaatggcttcgcagcagtcatctagcagtatgtttgctgccttaacgtctctgtggatgatcttgggatcacactgctcgtgcaggtacagtaggcctcttgctgcaccaagtgcgatcctctttctggtggtccagtccagtggtggcttccctttcaggcgcaaagcgacactcccattcgacatgtatggatagaccagtagtctctcactggtagtcatgcagaatccatagagtctgaggaggttcctgtgcacagccaagctgatcatctcaacttcggtctgaaactgagcttccccgcctgcagcattaccatctttgagcctcttgacggctacaagagttccatctgggagttgccctcggtaaacgattccaaaaccaccttttcctaatatgttcttgctgctgaagctttctgttgcagcctgcagctctctgaattgaaaccgcttcatgtttccaaggttgacgttctctatgtgttgatcatcaacgttgaaaagagtctgccggtttcgcctatgcctccaccagaacagcaatccaacggcaaggaagaggaggctgatgcagccagttgcagtaccaaatgcaattgcaactttgtggctcttagctttcgcaggcatcacagtacctttagataaagttgtcattataccaattgctatctacaaaattaatgttaatttttatttgaagctttgtgctaattgagcatgagcactagtataacccttaacacgattgggcatcagctaacttaaccgatgacctatttgacgtacatactgctaatcactgctgaacatggtacagaactgactaactctgcataccctgtgtagtcgctagaactgagtaca

SEQ ID NO: 5957 - DNA, 426 bp, Setaria italica
  Peptide Sequence Number=SeqID_71931
agacggagctggagccagtggaagcacagccaaacggggcctacattttgactaagagaaagcaaaaataaatattctgggtttaagaaatttttcgaaaaacgacagtaacttagcgcaagcagagaactgctgagaggcttccagatcaacctgatagcatgcagtagtaccagcaatctggtatgaaccatgtgtcattgcttccaccaacaacgaaggatcattgaaatcataaccaagcatcacctccaaacttctcaggttaatgaattcttcagatttgattgtaattttcctttcaactggcattttgtgaaattctatatccattcctaaagatattaggaaaagatatgctgcctgctcaccaccagcactaagataagccccaattagggcttcaaccgaatctgcgattctctt

SEQ ID NO: 5958 - DNA, 479 bp, Setaria italica
  Peptide Sequence Number=SeqID_71932
gaggctccagtagccgtttcatgcttctccaaacaacctccttgtcgcacttgctgtcgatataaattgcaccagcaatagattctattacatcaccaagaaccttgggtaaaccgatgccagcttcccaaccatgtgatggacctgaaatgactgcttgaaattttcaaggtagtcagccatccttttgtgcagtgctgatgatgaatgaagaatgtgcttatgtaatcctgctttaactgctgcatgagcgtagcaattgttgttcacagaagcagatctcagatctgtcaacagttctggagtgcattcagggtactgccttgtttgtagaattaatcctagttgttatgatctaatacggcatctccaagaaactcaagccgctgcacaggtgcatggagctgtaagtagattactcgataaaatcgctaaaaacattttttgctgcttggtataaactttgattcagtaaaaga

SEQ ID NO: 5959 - DNA, 834 bp, Setaria italica
  Peptide Sequence Number=SeqID_71933
gctgtcgatataaattgcaccagcaatagattctattacatcaccaagaaccttgggtaaaccgatgccagcttcccaaccatgtgatggacctgaaaatgactgcttgaaattttcaaggtagtcagccatccttttgtgcagtgctgatgatgaatgaagaatgtgcttatgtaatcctgctttaactgctgcatgagcgtagcaattgttgttcacagaagcagatctcagatctgtcaacagttctggagtgcattcagggtactgcctgtagaaataatcagtgaagatatgatctaatacggcatctccaagaaactcaagccgctgatagcatgcagtagtaccagcaatctggtatgaaccatgtgtcattgcttccaccaacaacgaaggatcattgaaatcataaccaagcatcacctccaaacttctcaggttaatgaattcttcagatttgattgtaattttcctttcaactggcattttgtgaaattctatatccattcctaaagatattaggaaaagatatgctgcctgctcaccaccagcactaagataagccccaattagggcttcaaccgaatctgcgattctcttactttttatagacattttcctcacactgtacatattggggcttaggaggatgagtttgctgtcactacatgcatcatggtcaatcccaggaataatccatgttttgggttgaaagcttcacctcgaatgtatcccacaagattgttactgcaagctagctggcacaaagctgcattcgagatcaaattttcttcatctcggttagcaagccctcatgctgatgtctgtatt

SEQ ID NO: 5960 - DNA, 1495 bp, Setaria italica
  Peptide Sequence Number=SeqID_71934
tttcttaaccgttaattttctttgttcgttatttcttctttacttttttattagacatttttcctcacactgtacatattggggcttaggaggatgagtttgctgtcactacatgcatcatggtcaatcccaggaataatccatgtttttgggttgaaagcttcacctcgaatgtatcccacaagattgttactgcaagctagctggcacaaagctgcattcgagatcaaatttttcttcatctcggttagcaagccctcatgctgatgtctgtatttattaaaaagatgttgggttgtgatatacttgaggaaagaatccccaagtgtttctaatgattcctgtgaaaattcctcttggcatttctttgttgttagtgcttccaaaatctttagtgctggtatgtcaaactggcccattctttgactcaattggattttcaacttcacagaaagaagcatacactggatacggtacattatagaaggaataaataggaagctgcgcaaagtatcggatgaaaccggtgacatgacaactacacagagctcggggggcagttcaacagcattcgtactggtactttctttttcgtttttataattgcacttgtggaggaagttccgcactttcaaaagcatactggcagccaagagaggttgatcttcacatgttaaatcaaggccatgcctagttttaaaatgggttttgtagctaacgacactcccatcacttctatgcagaagagaattcgcattcaggtcaagaaaaccagaaacagcataaagcatgccattatgtggggtacagacaatagcatgttgaagcatgcactggcacaaaggaccatcttttgtctgcactaaattagtatctttacaagaatggcagtgcctcatatccttgttagtaacttcaagcattggtgaggctgagaatttgatgctgcaccaatcaatttttccagaaactagaggcagaactagatacacaactccaggagatgcttgcatttcaagtgagttctttatagaatccctgacctccaactgattgttactaataagtaaggaaagaatggctgtctgaaatcttctagcaacaattacctgttcctgatttagatgaattatgccaatatatctcatggtaacacttacatgatcttgcacaccccacattttgaatgagttagagatgaagtcagatcccatatcgcattttacagctaaaactatctcagctggagaattagctgttttggaacaccattccagtgagatctcatagcaatgatataagccaagtcgagaaaaagatagccaactatccactagctgttctggaaagtagttaggctgcttctttttggtatttgtccacaacaatgtcaggtccatcctgatatggaactcccaggttagtaggttctaatatataggatgagctctctgccctagcgacagcctcctgcccacacctcaccctcctctca

SEQ ID NO: 5961 - DNA, 935 bp, Setaria italica
  Peptide Sequence Number=SeqID_71935
acaaattttatgtacagttcgtagtactaggtagaagaagcaaaagtagagaacctgtagagtaggcatctgtacacccatctcatctgagacatatatgcccttactttactgatatgacactttcgaaaccatgaagcctatacaaaagtctaccgtgcagcaacgagattagtgttggggcacactatttgcaaattacttcgcgccatcagcagctttcatatcttggagcacggctttggctgctaactttttggcgtcaagcttgcttaggcccgtccgagcggccttgaatgcagtccctttggtttgcacttctgcgactaccgatgttactcggtcctcacgaattacattgtatgtaatactgtaagcttcgcgaccacataactcctgcagctctttcacagggtcaacatccagtgtgtcgggggtagcaagaggctccagtagccgtttcatgcttctccaaacaacctccttgtcgcacttgctgtcgatataaattgcaccagcaatagattctattacatcaccaagaaccttgggtaaaccgatgccagcttcccaaccatgtgatggacctgaaaatgactgcttgaaattttcaaggtagtcagccatccttttgtgcagtgctgatgatgaatgaagaatgtgcttatgtaatcctgctttaactgctgcatgagcgtagcaattgttgttcacagaagcagatctcagatctgtcaacagttctggagtgcattcagggtactgcctgtagaaataatcagtgaagatatgatctaatacggcatctccaagaaactcaagccgctgcacaggtgcatggagctgtaagtagattactcgataaaatcgctatagtaccagcaatctggtatgaaccatgtgtcattgcttccaccaacaacgaaggatcattg

SEQ ID NO: 5962 - DNA, 402 bp, Setaria italica
  Peptide Sequence Number=SeqID_71936
atctgctgcgtgcgtgatttgattccccactacgggaatcgcacgccgttgtttaaaaccaaagtgcatgttttttttactgcgctgaaatctatgctgcaggcggctacactgttggtcgccgacgagaacggccaaaggagatggctccggcagatctcgcgcatcatcagtgacgcgaaattaactagtgaccaagtggctagcacacttggattttctttctcgtcggcctcgaggagtggcccctgacgataatgtattgtattgtcatcatgccccacggcagcaagaggaagacgaagaataatctttttttttcctcctctttttgctggaagcaacaatcattgctcctccaatttagcaaaaaactagaaaaaaacagagcaatgcgagaaa

SEQ ID NO: 5963 - DNA, 250 bp, Setaria italica
  Peptide Sequence Number=SeqID_71937
gatgtcaatgacccgacgatattcatcgttccgatggcggtcatctccttgttgccgtcgatgttgtagttcttgaacatggcgaaactcctcccaacggcgatgccttcctgcatttgacagaacgagcaaaccactgtaagtacttcggttaacgcgatgaaaatcttgcaggcttgtaactagtgagacaagcatagtaggcttatagcgagggcaatgacgccggtgatgatcccggtcttcagcg

SEQ ID NO: 5964 - DNA, 1777 bp, Setaria italica
  Peptide Sequence Number=SeqID_71938
atctcgccctcacccttggcgcgctcctcctcctcattgatccaacgcaagatcctctctcggaggtaggtcgcgttggtgaagtagatgggcgcgtcgatccgcagcacgagcacgccgggcaccgcctgcgcttcggtgtactggtccatcctccggtagatcatggagttgggcatgttgccgagcaccgtcgtcttcggcctcgcgacgaacagcagcacccggaggatggagatggagacggcgacgacgaggccgatctcgacgctgccgaagacgacgccgaggtaggcgccgaggcagacgcagaagtccaccttgtcgacatgccacaggtggatggcgccctggtagtcgatcagccccagcatcgccgacatgatgatcgccgacagcaccaccagcggggtgtagtggaacagcggcgtcaggaacagcagcgtcagcatcaccgccagcgacatgatcacgttcgacatcgccgtcttgcacccggcgttgtagttcacggcggaccgcgagaacgggccggtagtgaggtagcaggatgtcaatgacccgacgatattcatcgttccgatggcggtcatctccttgttgccgtcgatgttgtagttcttgaacatggcgaaactcctcccaacggcgatgccttcagcgagggcaatgacgccggtgatgatcccggtcttcagcgcaagcatcatgtagggtggggagaattgcaggcttgtcactgacggtgggttcagacccttcttcaggtgaccgatcacttggatgccatggttttcagcatgagtgaggtacaccagaacactcccaaggatgaccgacgtcagcggcgccgccgcggctatccagaatagtttcggccgcctcttgctgatgaagcgggtgacgaggaggaagaagaggaagccactgccgagcacgacgctttcccaccgccactggtgcgtctgggagaagacggactccatgacggagatgatgtcggtggcggtggtgaagcggtcgaggcccagcatgcccttgagctgctgcaggatgaccaccgtcgccgcgccgcccatgaacccgatgatcgtcgcgtgcgacagcaagtccacgatgaagcccaacctgaggaggccgagcgaggcctggaagacgccggcgaagaaggtggcggtgaaggcgaggtgcatgtacagcgccgggttatcggtcggcgacacctggctgctgagcatggagccgatgagcagcgacgccaccgccaccgtgcccacggccaggtccttggagctccccatcagcgcgtacaccagcggcggcacgaagctcgagtagagtccgaggatgggcgggaggttggcaagcttggcgtagctgatgccctgcgggatggcgaggctggcgatggtgatgccggcgatgaggtcggacttgaaggcccccaccgtgtaggccggcgcccactcgaggaacgggaagaagtagcgcagcgccgccagcgtccgccgcgcggccccgcgctcccgcaccaccgaccggaacgggtcgtccgggaagaaggtctccttcaggttcccccggaacgtgtccaggaatggccgcgccggcggcaccggcacccgggccgcacctccgccgttcgcctccgcgccgccgccgccgcccatggctactacttcaggggaagagctttgagctttcagctgcctttcttcttcaggggcagcagaagcgtgtccgtctgtggctgtcagctacccagctgctgcgtgtt

SEQ ID NO: 5965 - DNA, 2123 bp, Setaria italica
  misc_feature (1)..(34): n is a, c, g, or t
  Peptide Sequence Number=SeqID_71939
nnnnnnnnnnnnnnnnnnnnnnnnnnnnnnnnnnatcataggattcttctagtgagaaaagggcctgaattgctacagaacagaaccatcctttttttttcccattacttgagagcaacaactacagcaacagctacacattctgcgggttacatccttcaaaaactcttcccttcgatgggaagaggccataacatcagcatgtcggcgtcacgttattcctgcccctatcggtctcatcagtctccccctaattatccaaattatccaacacaagaaacacaactattttagcctcctccgagaagcaccttgctctactgcttctgctggtcagaggacccgcgagtgccccatgcatgcgtctatggcattggggcacctgctgctggcctaccgccccggcgcctcctccggtcagggctgcgctttgcacgcccccgccgccaccgcctccgctacgctgaagaacaggcggtccgacccgaatgtctcgcccaccgctgagttgaacatcctctccgcaacggagccgactgggttggcaagaaccagctcgatgtttcttttgtcgaggattttcttcagctccgacagcgcgtccagaccgcttgtgtcgatcgccgcgacggcgctcatgtcgaggacgacgcatcggatggaactctggttggacttgagagccatctcctcctcgtcgcggaggtacctcatgaccctctcgacgaggtacatggagttggtgaagtagatcgccgactcgacgccgacgacgaggaacgccggcacgcgcacggcctccctgtactgcaccacgctgcggtaggtctgcgtcccggggacgaggcccttcaccaccatgttgggcctggtcacctggagcaggatcttgaacagcgagatgccgacggcgatggcgagccccatctggacggacacgaggagcacgccgaggaacgccgccatgcaggccaggaagtccagcttgtccaccttccacagcttggcggcgccgcggacgtcgatgagaccgaccaccgccgtgatgatgatcgccgacaggatcacgttgggggtgtagtggaacagaggcatcaggaacagcagcgtcaccagcaccgccgccgccatcacgatgttcgacaccgcagtcttgcacccggcgctgtaattcaccgccgaccgcgagaaggagcccgtcgtcacgtagcaggacgcgcaggagccggccatgttcatgatcccgatcgccatcatctccttgttgccgtccacctggtagttgttgatggatgcgaacgtcctgcctactgcaatcccttcagttagggacaagatgcctgtcatgatccctgtcttgatcgtcagcgccacgtaggagccgttgaaggtgagcatgttagctgaaggagggttcactcccctggggaggataccaataacgctgatgctatgggatttccagatgaaggagaggatggtggagatgatcactgaggccaggggagcacctgctgatatccagaaaagttttggattcctcgcactgatttggcgtgtgaggaggaggatggcgaggaaggcggtgcccatgacgatcgtctgccattcccactcgtcgtggcgcttgaagacggagcgcatgacgtcgatgaagcccatgtgggaggtgaagtggacgatgccgagcaggcccttgagctgctgcagcgacacgatgatggctgcgccgcccatgaacccggtcagcgtcgccttggacaagaagtccacgatgaagcccagcctgaggaagccgagggacgcctggaagacgccggcgaagaaggtggcggtgaaggcgagctgcaggtagaggatgggctggtcgtccggcgagacggcctcccggagcatggagcccatcaccagcgacgcgatggacaccggcccgacggccaggtcacgcgagctccccagcagcgagtagatcagcggcggcacgaagctggaatataggccaatgattgggggaaggttggcgagcttggcgtagctgattccctgcgggatggcgaggctggcaatggtgaggccggcgatgaggtcggcgcggcggctggtgctggcgctccagtacttct

SEQ ID NO: 5966 - DNA, 757 bp, Setaria italica
  Peptide Sequence Number=SeqID_71940
cccctctcctacctcgcttttccactcaccgccgccgaacaggcccgcccgccccctctccgtcgtagcgagacgcgccgcccgcatccggaatcctcgagccctactcgtcgtcgccggcctctccctacagcgcgaagcagggatccatccgggctgtattgggcttctcccgccgttccctctctgggggtcagctaagccggcagccgcgagagtcctcaagccgccgccatgttgttcttctcctacttcaaggagctcgtggggaaggaggtgacggtggaactcaagaacgacctggcgattcgcgggacgctccactcggttgaccagtacctcaacatcaagctcgagaacactcgagttgttgaccaggacaagtatcctcacatgctatcggtgcggaactgcttcatcaggggctcggtggtgcggtacgtgttgctcccgcaggacggcgtggacatcgacatcctccacgacgcaaccaggagggaggcgcgcggaggatgatcatcgacacgctcccccacaaccgccccctcatctgcttctcccccgacaggagccctgatccgacctgcgaaacatgtaatccatcctggtgttattaggacacatgctgactggccgtctccccggtactttgcggtgacagacattccaggtcgggtgacctgcgtgttccttgtgggttgctatcaatgatgctgtttgaaccggccggccccccaatggattagctgtgatgttt

SEQ ID NO: 5967 - DNA, 798 bp, Setaria italica
  misc_feature (700)..(798): n is a, c, g, or t
  Peptide Sequence Number=SeqID_71941
cacggttcactacgtgcgaaggcaaacggaagttgccctcgcataccgcttttgagagagagatggcgagcccaatggtagccactccggtccagctccgcaccagcaccggccgcctcagctactcctcttcttcccccagcgcagccaggcggcgattcgcggcggtgagggcgtcggcggagacgatggcgacggagaagctgggcatcagggtggagcgcaacccgcccgagtcccgcctctccgagctcggcgtccgccagtggcccaagtgggggtgcgagaagagcaagttcccgtggacctactcggccaaggagacgtgctacctgctgcaggggaaggtgaaggtgtacccggagggccacggggaggagttcgtggagatcgccgcgggggacctggtcgtcttccccaagggcatgagctgcacctgggacgtcgccgaggccgtcgacaagcactacaacttcgagtagccgccgctgtccaggccggactagcctgcagcgctcgatgtatggtacgcagtagcagtaattggtgaccgcctagttggaatgtttggattgcaccggcttgtccattcctgcctgtagacgtgccgtgctctgaacctctgatgctccattccagtgttgaacagcacaataaagctccggattagcggattacaaaaaaaaaaaaaaaaaaagannnnnnnnnnnnnnnnnnnnnnnnnnnnnnnnnnnnnnnnnnnnnnnnnnnnnnnnnnnnnnnnnnnnnnnnnnnnnnnnnnnnnnnnnnnnnnnnnnn

SEQ ID NO: 5968 - DNA, 1425 bp, Setaria italica
  Peptide Sequence Number=SeqID_71942
aaaacttgggacactgagtgctctccaattttaatgttaaaaccaactcaaaggcatgtgcttcgttttattcactgtttggagcagaagcttatgaataaaatctacaattttacatcgcaacaagaattgttcaatttatgcccagtttctcacctcatcgtgaacaaatcgtaatctgtggtatttcataacctagtaaacctccacgtgccactgcttgttctttttcagctgtgacagcttctggtcccagctctctcctctctgctcggccaccctcttgagcgtgtcctggattccaggcatcatccccttcaaaccgcaaaagtagatgtgtgcacctccgtccaggagcttgaagatttcgtcgctgtactcctcaatcttgtcctgaacatacatcttgccaccactcttattcttctgctctctgcttagtgctttgtcatacctgaaattgtctggatactgctgaaggtaggtagtgaattcttcatcatagaggaggctgtcagagttagcaacaccaaggaagagccatgccagaccgccaaatttgtaagctgggacatcttccatgaacatacgacgtaggtagccacggtaaggagcaacaccagtgccagtggcaatcatgatatgagttgcatttggatcatcctccggaagaagcagaattttgcctgaggggcctgtgatctgaactttatcccctggttttgagtcacacaggaagttactgcagatacccttctttgaggggtcttcctttccagtttcaggatcataataaacagcacggcgaacacataagcttgctgtctttccatcaaaagaatcaccatacctagtagaagcaatagaatagagcctaacggtatttggagacccaggtttcttcggattctctcccggaggaatgacaccataactctgtccttcccagtatggaacattaccgccatggtcaatgacaatgtggcatatttcaccaggagctttagggcctacaagcctctcaactgagacaattgttgcagtgtatggttcctttggcttgtataagttgagtggtggctccttcgcattctccaattcaacaggtttaacagcaactttgcttttgcttgcaagttgaacagacatgcagaagaccttgtttaaatgccttgattgctgggtcttttcccatgctaaagttctcctgatccacggtttgctccgaaagtttagattattgttacccttaagcgaagaaccgttgaggaaaccgtccgagccgacgggcgccaaggccgttgcagcaacctgagtcccgagcgcggcggaagccattgccggtcgaccggccgcgagggaggaggggtttgctagggttttgatctgcgggaggcgaggcgaggcgagcgacggggacgtcga

SEQ ID NO: 5969 - DNA, 374 bp, Setaria italica
  Peptide Sequence Number=SeqID_71943
acaatagacgttaccaaccaacagagttccaatgagaccccagggacctctacgactctgacctcttcaccatatttttctccgaacatcgcaatggcaccagcattttttgcgtcttgcaaagccatgacttttgtctccagatgcgttgcattgccaatccattggtttacgagtgattcaattttcaccaattcctcttcagaaagggggcggatggaaattgaagtcaaatcggagacggtcaaacgccacaagggaaccagcctgtgaagtttctgaaccaaccacacttttaagagcagattgcagtagatgtgttgcagtatgatgggccttagccccctgcctcaactttgcatcaacagaagcat

SEQ ID NO: 5970 - DNA, 1176 bp, Setaria italica
  misc_feature (1123)..(1176): n is a, c, g, or t
  Peptide Sequence Number=SeqID_71944
ttgcgtgtctcgacgtggctgcagccgcacaagaggtgatcgagcacgagcagtaactcgagcccgcacgcaccttctctccatggggtgcatcaagcacatcgtgctcgtccacggcgcgtgcctaggcggctggtcctggttcaaggtggccaccgcgctccgcgcggccgggtaccgcgtggacacaccggacctggcggcctcgggcgtggacccgcggctgctgcgggaggcggcgcccacgttccgggactacacggcgccgctgctggacctcctcgcggcgctcccggccggggaccgcgtggtgctcgttggtcacagcctcggcggcatcaacgtcgccctcgccgccgagctgttcccggaaaaggtcgccgctgccgtcttcctctgcgccttcatgcccgacttcgccgcgcggccgtcgcacgtgctcgagaagttcgtggaggggaagtggctggactggatggacacagagatgaagccgcaggatgccgagggcaagctccccacctccatgatgttcggtcccgggatcctgcgcgagaagttcgtccagctctgctcgcccgaggacgtcaccctcgtttcgtctctgatgagggtgagctcgatgttcgtggaggacctggccgtccagcagccgttcaccaagggcgggtacggctcggtgcgcagggtgtacgtggtgtgcacggaggaccacgccatcgcggaggggttccagcgcctgatggtggagaacgacccggttgacgaggtgaaggagatcgccgccgaccacatggtgatgctctccaggcccgacgagctggtgcggtgcctcactgacatcgttgagaagtacacttgatgctatagcgcgcgcctacctggcagagcttcgggttatgctaaaatggcttcagctctgactccaccggtgaaatggtatttctagtggcaaaataaattctcctgcacttctcgatggctgatgctctgccgtctgcatgtatgtttgatgttctgtttgcatgattgcatccacttcattttcttcctttcatttttttaaaaaaagctttccacgctgttgttgactgtactgttcatgattgcatgataggaactnnnnnnnnnnnnnnnnnnnnnnnnnnnnnnnnnnnnnnnnnnnnnnnnnnnnnn

SEQ ID NO: 5971 - DNA, 250 bp, Setaria italica
  misc_feature (246)..(246): n is a, c, g, or t
  Peptide Sequence Number=SeqID_71945
tttttttttttttttttcttttccagcagctcacatactcctgtgacagtgtgactgtgagacgacgtcacactaatgattgtttacacgcacgcaccgaagcaataatcaaattcaattggcctgtaacaatgcggtggctagctgctagctgcacggtgggtgaattgctgtgtcgctactacttgtagaagaggagggtgtagaagagctggttccaggtgtccgggaggccggggagcaccngtgg

SEQ ID NO: 5972 - DNA, 658 bp, Setaria italica
  misc_feature (606)..(606): n is a, c, g, or t
  Peptide Sequence Number=SeqID_71946
tgtcataaattcctaccattagatgcctaacaagcttccccgccattgctctcagtactttgggctcaaagagaacgatgtgcccctcctttttgtgattgcacagggtgggaaatatctcaatccaactatcgatcctgatcaagttataccctggttgaagcagtacatatatggaaacttgacgccttatgttaagtcagagccaatcccaaaggagaatgaccaacctgttaaggttgtcgtggctgacagcattgatgacattgttttcaactctggcaaaaacgtactgatcgagttttatgctccttggtgtggacattgccggaagctggccccaatcttggaggaagttgcagtctcattgcaagacgacgaagatgtcgtcattgcaaagatggatggcactgcaaacgatatccctaccgacttcgcggtcgagggatacccgacgatgtacttctactcgaccaccggggacctctattcgtacaatggtgggaggacagcggaggacatcatcagcttcatcaagaagcacaagggccccaaagctggtgcggcggacgaagtggcacagacaggagctggcggtgtagaagngggcatcacatcttcatcaccgtcagagattctagaaagcgagctactaacc

SEQ ID NO: 5973 - DNA, 271 bp, Setaria italica
  Peptide Sequence Number=SeqID_71947
ttcttagtctagtcatggacccagcactaatacattatgatgtgattattgatttacaatgccagaatgtacacctagatatggttctagaaagataaaaacacaacatacagtcaatctgactagaaagcatacaaagtgccaccttttccacaaacaagtttgtcaactggaacaaagacacaaaaagaaccaaagacaccttgaatccttgaggattaaaatgagatcaaaataagacaagggtataaactaatccaggggtgagaaa

SEQ ID NO: 5974 - DNA, 694 bp, Setaria italica
  misc_feature (642)..(694): n is a, c, g, or t
  Peptide Sequence Number=SeqID_71948
agctcgacgccgtggccgccatggccgcgcaggcccccgcacccggcggggaggacgagctcatggaggcgttcagggtcttcgacgccgacggcgacggccgcatcaccgccgaggagctccgcgccgtcatggaggccatcctcggcggcggcgccgagggatgcagcctcgacgactgccgccgcatgatcggcggcgtcgacgccgacggcgacggcttcgtcggcttccaggacttcgcgcgcatgatgatggcgaccgccaccgccgccgtcgacgcccgggccttcttgtgatccgttcctctccatcatcatcttggcttgtttccctgcttcccgccaaagatgggatggccccgtcggccctgatgcgcgctatatatcatcttctccaaagatcttttgggcgcgcaggatgataggctgctacgatcgatctactagtaggagtacgccattaaaggagcttgcttgcttgctgctaatccatgcacgattagcgagacccccgcgcatggaattgcaagttccttgtaaaattatttgtcgcgagagagtgagtataacggcaaggcgaatgattggttctttcgaattttttgaatttatttgaatcccgattccgacaaaaaaaaannnnnnnnnnnnnnnnnnnnnnnnnnnnnnnnnnnnnnnnnnnnnnnnnnnnn

SEQ ID NO: 5975 - DNA, 383 bp, Setaria italica
  Peptide Sequence Number=SeqID_71949
tgtttcataccatcgcccaatgcaatggatgtgagagacgagaccgtatgtaaatctgatattctgactgatttgaacttgtaggttgcattgagtgcaatttatgtgctgagccctgtcgacattctccctgaaagtgtgctggggctctttggattcgttgatgacctgctgattctggtgatcgtgttcctccacctcgccgccgtctaccggtcgttgctcctgtaccgccatggggggcagtagaaggcgctgtgcatagtcatttgcttaactgggttccatgcggagttttcgaggtggcagctttggaagagtgctgagtagatgaggaggatatgaaggacggctggctcgtgcttgtttgtagtattctgcta

SEQ ID NO: 5976 - DNA, 1134 bp, Setaria italica
  Peptide Sequence Number=SeqID_71950
aactactaatttcagcttataaactgtgctgatgcctacctactttactgccttttgagtctcctctattattgagtggtgtgatatgatgatcttttccaggagagtgcatcatccgtgtttggcatcatggacctgctgtacaggcttgcaagtgtcccatttgtcgccgccttataaatctactggtacctgctcctttatcagaccaggaggatgatccacaagttggccgtattttgggagagattcagcactataactgtatatttggtggagcaccacgcagcctgactcaggtttgtacactgtccatgaaagctgatttctttaccgtctctttcaagattaaaatctacgctggatatttgtattgattactgcgtttgatatgtcaacactgctactattgttagagatcatccaaatgaaaaaaaagtggccaaactacttgataagtacttagcaagctctgagaggatatttttattgtttcaaaacagatctcttgtcctagtgttccttgattcacgagtcttcctcagtccctaataggatttgtagcgtataactgggaaaacatcaatctggcatatctgactactgtacacatgccttaagcatggtgtgattaatggaccgtactgtaagcatatgattattttgatcacatgctttcttccagatcacatcaactatcatctggtgttattaggagtaatccctatttgaacctgacatacataattaaaactatgcagtgcttttacactctttctaacaaatctagagattcccatgtggctactttcagttataaatgtatgcctctagcatctagccttatgatcttttaggaggttttcatctagcttcttgttttttggcaatccactttttttgtgtgtttttcttcagaggttgcaagacctacccttcttcatccgaagactgtttagagaactattggatccccagcggactctcccacttgtgttcagggcacggatgatgatgatggtgagctcgacagatttaaatgtttcgttatttgatattcttatttaatattattctggaaagttactaagattgggaaagcaaacaggctgtgctgtttctgtccgcagtttc

SEQ ID NO: 5977 - DNA, 851 bp, Setaria italica
  Peptide Sequence Number=SeqID_71951
agaatacccctccgagtcggccagtcgccgacgacttcacgcgggcagcgcagccgcgtccccgacttccttcccttgggacacagagaagggggaagtgatgagctcctcctcgtcggcgtcggccgcgccgccggaggacgacgtctgctccgtctgccacgaccgcttccggatcccgtgccaggcaaactgctcccattggttctgcggagagtgcatcatccgtgtttggcatcatggacctgctgtacaggcttgcaagtgtcccatttgtcgccgccttataaatctactggtacctgctcctttatcagaccaggaggatgatccacaagttggccgtattttgggagagattcagcactataactgtatatttggtggagcaccacgcagcctgactcagaggttgcaagacctacccttcttcatccgaagactgtttagagaactattggatccccagcggactctcccacttgtgttcagggcacggatgatgatgatggttgcattgagtgcaatttatgtgctgagccctgtcgacattctccctgaaagtgtgctggggctctttggattcgttgatgacctgctgattctggtgatcgtgttcctccacctcgccgccgtctaccggtcgttgctcctgtaccgccatggggggcagtagaaggcgctgtgcatagtcatttgcttaactgggttccatgcggagttttcgaggtggcagctttggaagagtgctgagtagatgaggaggatatgaaggacggctggctcgtgcttgttttgtagtattctgctacgcctgtttccttagattctggagggtggacttgtgttga

SEQ ID NO: 5978 - DNA, 654 bp, Setaria italica
  Peptide Sequence Number=SeqID_71952
ggccgcggtggtagggacggcggtaaagtggactcctagcgcctctgtggaggaggtgatagaatggttggtcgcgccctgctcttgctgcttgactccagctgagagagttaaagcaaagatgaagcttcagctctctgagacatctgcaaaagattccactctcggaactgcaactgtgcggtgggaaagatttgaatttaataaggatgctccacttgatgaagataacgatgatgttgaagttgctaatgatgatgcttcactggtgaagaatattgggaagagcttccggctttctgctgtggagtcaaagcatgaagatagagtcagggacgcgcatgaggaagctatatttggagtacctacaacttcgtatgttcatactgaagctgctgaggatgagcctaaagccaatgatgaggaggagaaagctgaagatatagaagctcaacccagcagctccctcattagcgacaaagttctggcaatgcaaaagggttcctggagagaacgggctcagaagttgcggcaggattctaatacatgaaattttatcgttgatggcctgctcaagttcgactttgctcgtgtgcagcagattctgaagaattgaagctgagactttgtacccgaatttttgtaacttctact

SEQ ID NO: 5979 - DNA, 974 bp, Setaria italica
  misc_feature (904)..(974): n is a, c, g, or t
  Peptide Sequence Number=SeqID_71953
caactcgagtcccagccagcaaaaccagcaccgggatccaaaccaagaaatccatctccgagaatcagcagctgcggcggcggagatgggcgcggagtgccggtacgaggtggcgcaggcggcgtacgtcaagctcgcactgcacgcgctcaagcacccgtccgcccccgtcaacggcctcctcgtgggccgcctcgtcgagccctcctccaccccagccgtcgtctccgtcgtcgacgccgtgccgctgtcccaccacccgcagcacctgccgctgctccccacgcttgagctcgcgctcaccctagtggaggaccactttgcaatccagggcgatggcctcgccgtcgtcgggtactaccacgccaacccgcgccgcgacgacgccgacctcccgcccgtcgccaaacgcgtcggggaccacatcttccgatactttccccgatccgccgtgctgctggtcgataacaagaagctggaggaggctgtccaggggaagtctcgcgagcctgtggttcagttgtacaccagggattcatcaaaaagttggcgtcaggctggatctgatgggagcagtcagctggctttaaaagaaccttctagcaatgttgtcctagctgatcatgttacaacaaagaaatgggagaaacttgctgatttcgacgaccaccttgatgatattagcaaggattggttgaacccaggtctcctcgactgaacttttatgatatgatcacttctatgctttatggaacttctctagaaatgcttgaagctgtatggacttagctcggattgcattttaatgtaaacaagtgattttgtaacaattatagccgttcaaaatgcaaagatcgacattgcgatgaagtgtgagcgtagattgattattttgtctttactnnnnnnnnnnnnnnnnnnnnnnnnnnnnnnnnnnnnnnnnnnnnnnnnnnnnnnnnnnnnnnnnnnnnnnn

SEQ ID NO: 5980 - DNA, 250 bp, Setaria italica
  Peptide Sequence Number=SeqID_71954
aattggttttatcactatttgatgtatcaatttcaagtggtcggctgaccctgggacatgctcttcggatggatgaaatattgtctcagagtgtgataataaatccagaaaattattccaggactgattcaacaaatatatttccgggttgtgcatcggaacaacatggtaaacaggcatctgctccaattgcattgtttcatgagaaattaagttatggctctggcatagaagttgataggaaacttag

SEQ ID NO: 5981 - DNA, 294 bp, Setaria italica
  Peptide Sequence Number=SeqID_71955
tctcctccctcacttcctccacatcctccgccgccggcgccgccgcatccgcggcctcctcttcgacctcttcttgcaacgcctttcacgcgccgaggcccctccacctctcgctcaagcccgtctccccgcaacccaagccccagtcgctctcctgctccgcgccgcacgtcccctgcgccgccgccggcgacggatcgggcaccgggaaccgcggggatggctccggagggaacggcggcaaggatggaggaggcggcggggccggcgaggatgacgacgactacgaggagg

SEQ ID NO: 5982 - DNA, 1874 bp, Setaria italica
  Peptide Sequence Number=SeqID_71956
ctccgcatgcaggcggcggcgctgatggcacggagatgccgctcctcccctcgcgggcggcaggaacgccggcaggtggcggcgccgcgccgcgcagccgcagcaggttcgcgttcgtctgcgccacgctcgcctccatgaccaccatgctacacggctacagtacgttacccttatcccagtcaccacacgttctgcgctcgtgtccgtggagatggagataacaattgtgctcttgaatgctcgtgcgcttttacgatctcacgctgatgagcggcgcgcagctgttcatgcgggaggacgtgggcctcaccgacggcgaggtcgaggtgctggcggggtccatgaacgtgttcatgctcgcctccatcctcggcggcgggtggttcgccgaccggctgggccgccggcgcgtcctcgtgctcgccaacgccttcctcatggccggcgcgctcgccatgtcgctgggcggcagcttcgccgcgctcatggcggcgcggttcgtcaccagcgtcggcgccgggttcgcccgcgtcgtcgcgccggtgtacaacgccgagatctcgccgccgtccacgcgcggcgtcctgtcgtcgttgctcgacgtgttcatcaacgtcggcatcttgcttagctacgtgtcgaactacgccctcgccggcctgccggcgcacctcgggtggcgcctcatgtacgcgatcggcgtggtcccgccggtgttcatagctgccggcgtgttcttcatgccggaatcgccgcggtggctcgccatgcgcggccgctacgccgacgcgcacgccgtgctcttgcgcaccttggacaccccggccgaggccgacctccgcctcgccgagatcaagcaagccgttgcccatcagcggcctcaaccggaagcagcaggcagccatggcggcggcgtctggaaggagctcctcttccggccgtcggcgagcgtgcggcggatcctgacatgcgtcctcgggcttcagttcttcgtgcaggcgtcgggcatcgacgccatcctcctctacggcccactggtcttcaaggcggccggcatggcgtcgaacggcgccatcctcggcgccaccgtggccatcggagcggtcaagacgtgcttcatcctcgtcggcatgctcttcaccgaccgcctcggccgccgcccgctcctcctcgccagcaccgccggcgtctcggtgaccacggcctccctcgccgtgaccctctgcgtcagcgcagcttcgtcagcagcagcgacgacggcgtgcctcgcgtcggtgctcgccatcgtggcggcgtactcggtcgggtacgggtcggtggtgaacacgtacagcgcggagatcctaccgctgcggctgcgcgcccagggctcgagcctgggcgtggccgtgaaccggctgacgtgcgggttggtcggcatgacattcatctcgctcgccgacgggatcaccatggccgggtgcttcttcttgtacgccggggtgacggcggcagcgttcgtgttcgtgtatgcgcggctgccggagacgagggggcggagcctcgaggacgtggaggtgctcttcgacaagtgacgtgcttcctagttccgactgctatcttcttttttctagttgatgatcctatttccgactcgagaattgggcagaaaatctagggattgaattctcatccactattatttggggcaggcgccaaggaggaacagacgatataatcgtgagaagagtgttctcctctcctctcagcctcagaaatatccatccaaaatccaattacattgggccgaatccattctggcaggaaatcctaacactggaccgacgggcctcccatacctgagaggcccatgggccaactccccttaaaaa

SEQ ID NO: 5983 - DNA, 1860 bp, Setaria italica
  Peptide Sequence Number=SeqID_71957
actactgaaaaagaaacaaaggccccttaccagttaccatccaatgccatgccaattggtaaattctgactaactcctgcacttccatcgcagttttacttttactgcgttcatatgaactacttacactagtgcattccacgggcatactcattaactcattgtgatgtactgatggtgcatattgttttactagttactacgctgacaacaggatcgatcagaccttgtacaacatgccgatctcgactcgctgctgcagcggcgttccgagcgccggcagcgcggagcggcagatgccgtgcaggaactcgtagaacccgagcatgaccctgtcgaaccacccggcatcctcgccaacgtataacctcatcttaccgcgaacgtgcaccacgctggccttccatgccgcctccagccgcgcggcctcgtccgcacccgcctccgtctggacatgccgacgcaggtggctcatgacctgcgcggcgaggtcgtcgtcgcggaggctgtcagcgtaaccgtactggatggtgcagccgtacaccccgctgggtcccagcctcctgacgaggatcctttcccgctgctccaccttggccaccagcaggtaccttagggtgacgaagaccgtggccgcgtgcagcgaactcatgttcttgatgtagtggccgaggatcggggtgagtccgtcctggatgttgctgtagaagaagcacagcccggggaccctctggacctcgggcctcgcgaggagctcgccgaggcgctctactgtcaccttgttcgacatctcgtactcaatcttccgttgcctgccgtaataccacccaaacatgaccagcgccaggatcatggacacggcaaaggggagccacccgccttcagggatcttggtgaagaccgcgctgacgtaagatccttccatgatgaagaaaggcacaaagaacagcgccacgagagcaggtggtgtcctccatatgatgatcatcaccagagcgagcatgatggtggttatgagcatgaccatgatgaccacaacaccgaatgcgttccctatcgcgtttccagcaccgaagcctaggacgacaccaacgcatagtaccatgaggatgtagttggtttctggggagtaaacctctccttctttatgctgagacgtgtgcaccaccttgacacgcggaaagtagtccaggacaaccgattgcttgatgactgaaaatgtcgcagatattaaggattggcttgccacgatcgctgccagtgttgtgatgacaaacatgggccagtaaacagggcgaggcacaaatttgtagaacccatcactgtagtcattgacattgttgataaggtacgccgtttgcccagcatatgtgagaaccagagaaggatatatgctagacagaaaagctatctgaatacccttcttgctgaagtgaccgaggtctgcaaacatagcttcagcacctgtgatgcatagaacagttccaccaagcatgcgccacccttcctttttatttcttaggaagaagcggacgatataatgaggtgaaatggctttgaagatgccaggatagtaattaaagatgctatacacgccgatgattggagtggtgaaagtccatactgccatgattggtgaaaacagaaagctcacttttgaagtcccgtacttttgcagcaagaataagccgataaggatcgcagcagacagggcttcaactacagacttgctgacagaaggaaatggcgctcttagtccattgatggctgataatactgaaatagcaggagtcagtatgccatccccaatgagcatgcacatccccagtattgccatgaacaacagtactcttctagctg

SEQ ID NO: 5984 - DNA, 932 bp, Setaria italica
  misc_feature (925)..(932): n is a, c, g, or t
  Peptide Sequence Number=SeqID_71958
aaaaagaaaacaaaaagaaaagaaaaaggaaacggggggtaaaggaaattaaaataagaactaagaacaaaaattaacctagaactaggtagacgtactagaccaggtggagcagagcacgaatcgagtcagagcggacgagaggaagcaaagcagagcaggtgaggaaaggcgaagcttctcctcgccaacatggcgatgaccgtcgaagtcctcgctggacttgcctttatgttttccacaagcattctgctgcagatactggcatgtgctttgtacaacaactggtggcccatgttagcagctctcatgtatgtcctcgtaccaatgccatgcctgtttttcggtggtggatccacacacttcttgacaagcagagaaggcggggggtggattaatgctgcaaaattcctgactggtgcgtctgccatgggaagccttgccatcccagctattctgaggcacgctggcctaatcgagactggtgccatgttcattgagttcacgtccttcttcatccttgtatgcacagtgatgtgcttccacagggctaccctagatgaagattggtaaatgcgcatgcacggaccccttaagaatagtgattctgtggccgcttgacggcttctctccatgctgagcagaaaaattcctgttggaagctaacatggatctgtacaaagaagccaatttgaacctcttggctgatgttttatatagaaactcttaagatctgtggtcacgtgtcgatgcatatgttactacgttcacttgacatcgcggtggcatgttctatggtgaaggaaccatctgtgtaaagcatgaccaagagtacggacaccctacttctttggttggctgccacattgcgttaacatattatccaatggaacctaatgaccaaaactgtttgaattactagaannnnnnnn

SEQ ID NO: 5985 - DNA, 464 bp, Setaria italica
  misc_feature (1)..(39): n is a, c, g, or t
  Peptide Sequence Number=SeqID_71959
nnnnnnnnnnnnnnnnnnnnnnnnnnnnnnnnnnnnnnnttgttttttttttttttttttaaaaagaaaaagggctgatcagccaacctttctttattcgttggtaagttgcggaaatcaacagcttgacacgtacacaaagcacgtactaaaacacagcaaaatgtacacggcaagcgcggcgcacagtacaaactgaaactccaaaggctactactactggatgtaggactggccggtgatgtcgaggtcgcgggccggtcgcagaggtcgtaggtggtggcgttagtggtctgcaccaccgacgagttgtcgttcgtcttgaatataaggtagtcgccgaggtagaaggtctcgccgttggcccaaccggagtagttcccggacggtggcgttggccttggcgtcgaagaaccagccgtcggcgccgcccacggtgtggttccggttacttccggtcgtct

SEQ ID NO: 5986 - DNA, 463 bp, Setaria italica
  Peptide Sequence Number=SeqID_71960
ctggaccttgatctcgaagcgcatcccctgctggcactgggagccgccgtcggcgtcggagaagaagtagttggtgccctcgagaacgagagcgaccgggatggtgttgttctgctcgaggccgccgcccccgcccgccgccgccgccgtagattaaggtttccgggtcgtgggtcgtcgctggggtcgcagaggtcgtaggtggtggcgttagtggtctgcaccaccgacgagttgtcgttcgtcttgaatataaggtagtcgccgaggtagaaggtctcgccgttggcccaaccggagtagttcccggaggtggcgttggccttggcgtcgaagaaccagccgtcggcgccgcccacggtgtggttccggtactccggcgcgtcgcccgccgccggcgagtcggcccgcgcggccggcgcgctggcgagcaggacgaccgcggtggccatcacggccacgg

SEQ ID NO: 5987 - DNA, 460 bp, Setaria italica
  Peptide Sequence Number=SeqID_71961
ccacaccgacagccgcccccaagaaccggccgccggccgccgccgctctgctcgcgccgctccttccggcgccgccgttgtccccagcgccgtccccaggctcgaccccgccggtgcccgagaaggccgtcccggccggaggcggcgcgaggacccgctccttgggtgccgggggcgggctcttcagcgacggcggcaggccctggccgtgctggaccttgatctcgaagcgcatcccctgctggcactgggagccgccgtcggcgtcggagaagaagtagttggtgccctcgagaacgagagcgaccgggatggtgttgttctgctcgaggccgccgcccccgccgccgccgccgccgtagattaaggtttccgggtcgtcgctggggtcgcagaggtcgtaggtggtggcgttagtggtctgcaccaccgacgagttgtcgttcgtcttgaatataag

SEQ ID NO: 5988 - DNA, 658 bp, Setaria italica
  Peptide Sequence Number=SeqID_71962
gcatcattagctgcagttcttgcaatgtacctgttctgcttgaagaaacagttctggatcagtgcaacgtttggtgctttttcaatactttttcgtcagacaaatgtaatatggattatatttttgctgccaacggagctatctcatatatacaagatttgtatcccaaggacaatgtttctcaagagaacactgaagcaacacatcagtcaaacaaagtagtgtctggcaggggtaacaaaactgctgctcaaggtttgagaaggcggcgaattaatagtcccataagtaagaagctggttatttctgaatctagtcacctctacagcagtcttgcagaggaattacgggacatctgcttgaagttatggaattcgaagtgtgaagttttgattgcctttgcgccatttgcagttgtcatgatggcatttgttgcattcataatttggaatggtggtattgtactaggtgctaaggaagctcatgttgtttcaccccactttgcacagtttctgtacttcggtctagtttcagccgctgccctcctaccatggcatttctctcccagacgagtattggacctgttccacttgtctggaaagaataaaacatgtagttttctggcagtattgatgggtcttggtttaagctttggttg

SEQ ID NO: 5989 - DNA, 1326 bp, Setaria italica
  Peptide Sequence Number=SeqID_71963
tgtacatttcttcagcattgctccatccatatcttcttgctgacaatagacactataccttctacatttggaggaaggtatccaagtaactggttgatgaaatacatgttgatcccactatatgtgtactcatggttctcaatcatcaacatcttaggtaggtctctttacttatataagtagggaagctaactactttcgtatattataatgaactgtatcttctgatttgtcttgtcttacagggaaatcgcagacgagggtttgggtgctatcatttgttctgtcagttatccatatatataatttatgactcatgagtaatgttcaggtcttgcagaggaattacgggacatctgcttgaagttatggaattcgaagtgtgaagttttgattgcctttgcgccatttgcagttgtcatgatggcatttgttgcattcataatttggaatggtggtattgtactaggtgctaaggaagctcatgttgtttcaccccactttgcacagtttctgtacttcggtctagtttcagccgctgccctcctaccatggcatttctctcccagacgagtattggacctgttccacttgtctggaaagaataaaacatgtagttttctggcagtattgatgggtcttggtttaagctttgttgctgtacatttcttcagcattgctcatccatatcttcttgctgacaatagacactataccttctacatttggaggaaggttatccaagttaactggttgatgaaatacatgttgatcccactatatgtgtactcatggttctcaatcatctacatcttagggaaatcgcagacgagggtttgggtgctatcatttgttctgtcagttatgctagttctcgtacctgccccgttggttgaattcagatattatacaattccatttgtcataatggttcttcattttccagtaattggcaaccgcaaattgcttgctctggggttactctatgcggttgctgacgtgtttactctggtgatgtttctgttccgaccattcaattgggaacatgagcctgggacacaaaggtttatgtggtagattaggataaagcacatgaatggagcaagcttcattttaccataatctcgactcgaacttctaacataacagttaagcatacatctgtccggcctatttgggtcattgagtgaatctatcgggagataccaaaacaaagtgctgtttctttttcatgtcagcttttgtatgtaccctaggcgttctgacgaggaagaagctttgcacaatgatagatggttttagctactggctgtctaagttagaaga

SEQ ID NO: 5990 - DNA, 287 bp, Setaria italica
  Peptide Sequence Number=SeqID_71964
tacccgtctcctccgctctgctccttcccgcctgacccgcgcgatggcggctggtgaggcggcgccgctgtacagggacgcgtcggcgccggtggaggcgcgggtgcgggacctgctgggccgcatgacgctgcgggagaaggcagcgcagatggcccagatcgagcgcaccgtcgcgtcgccgcgcgccctcacggagctcggggccggcagcgtcctcaacgccgggggcagcgcgccccgcgaccgggcctccccggccgactgggccgccatggtcgacggca

SEQ ID NO: 5991 - DNA, 426 bp, Setaria italica
  Peptide Sequence Number=SeqID_71965
ttattttacgtattcctagggtctaacttcttgtattgtcttacgatccagggcaactctgatgctcatggatgtgcattatgcccttttcctagtgatcctgtcacaagccaaaattctgtatcaaccaattgagtgataaaaataggtggaaaagaagatggtaatgaactgatggctaacaaacctgaagcaatgaatcccaagcgcattggtgatctcatgaataacagatgtggcaaaatgcacgtacagtgccactgtaaataagcagtacattaagagaactagctgctcatcaacaagggatttccatcatcaagctgggcagtcagtgcattagcaattgcaaatggaaaatagcaagggccatgcacatccctgtttcaaacctttggtcatcacataagtgagcaagaatcattc

SEQ ID NO: 5992 - DNA, 950 bp, Setaria italica
  Peptide Sequence Number=SeqID_71966
ataaaaaagaaaccattgcaacaaaaattgaaaagaaagcatcataataaacaacaaaaagtatgcaaatctcagtagggcagcgggtagttccaatatatccctatttttaattacacaagtgtgtattcactttccaaaagcattaatgcacttcccacatgacaaacatattcatgaacaagaccaaatcatccataatgaaccactagaacaaatgtaagacatcaagttttaaggtccatacaggtgaaagaaaaatagaatttgttcggcttttgaaaaattagaaagcctccagaagacttgcagtcttgtaagacatcaatctacagaacgacacatttggcaagattgtaagaatatagaactacgaccactgggcaagaacacaagaactcactgctcccaggttgcgaagtaaaatgggacagctgaaataacccaaaaccagaaggtagcctttccacacattgccgtgcttccaaaagccaaggactcaaaagcacaggcaagagcatcacatccatggtcaaaaagctcgcctaaaggacttgatgagttggtacgccttgcttgttttccatcaacagcatcaaatgtctgataaaggaagagaagcaatccatgagcaaggtgaacccatctggggggcgctgtatctagatgaggtgaatataaaaagccaaggaatgccgatgtcagtagaaacatgaaacctgtcagcgtaatcatgtttggtgggaaccatagcgggaagatgttgacgaatcgggaccagaagggctggaggatgtacttggcgacgagcgagtggtcgacgccgctgtacttgtagcggcgcagcgtggcgacgccgtggtggccaatgtaacccatctcccttggaagcgcgctgccgcaatccccaaatccgaatccgcagccgggagggaagggatgaggcggcg

SEQ ID NO: 5993 - DNA, 410 bp, Setaria italica
  Peptide Sequence Number=SeqID_71967
ccgtcgaacatatccagtgaacaaaccgggcagctaggatacatcggacggcgagatgctacgatgctgctactagctacgtactcactacaagtagcgacacctgaccagacatggtgggtcagtcatcgccggataattatcggtcagtactcgctactgggctacggagatatttttacatgagcttatccacgggcccagaagtccagaactataccttgcttcgttgcctaccactaggcctgctccgattgctctgcttccctcccctcctcaagcgatgaccacggcgatggtgtcgctatccggcggccgccggctttggcccgcggcgccgggcttggcggccgcgggcttcttcccgtcaatcacggggcggcggcacgtcgggcacgaagaccgacgga

SEQ ID NO: 5994 - DNA, 307 bp, Setaria italica
  Peptide Sequence Number=SeqID_71968
gtcacggtccctcctcgccatcgctcgcggcatcgcctcctgccttcctccccttccccacgcgaataaagcgccggaggcgcgcgcaccaagcaaagcataccccccgcgcgggatcgggagggaggagcggccgcggagaagctgcgcgctagggcaggtgcaggttagggggggtcccgctgtctcgtccccggcggcgggcgaccgatgcggggcgcatggcggcggtgaactgcctctacgtcgcggccgcctccacggcggccagcgccgccgcgctgcagtggtgggcgtcctcgctcct

SEQ ID NO: 5995 - DNA, 498 bp, Setaria italica
  Peptide Sequence Number=SeqID_71969
ggaagaatagcagtgattaatggtagtactatttcatgcagacagggtcgccgatattttattctgttccatatgggatggagaaactggtcatgtattacaaacaaagatacaataacacaccaatatacatcacagaaaatggtaaggattctatctatctcgtttaaaagctattataatcattatgctaaatttatagcttttatgctttctaccaatgtaaattgagtaggacactgcccaattagcacaagcaacactacatgttgtgtcactaagttggcaagattatctgagatataagtcactttcctcacttgaagagggaagagaaacaaattgaaagacaggcgtggattgttagatacgttctatgatttttatttcatctcatgtaaatattcatgttaaataataaatatgtacattcatacacgatctcaaagttgtatgtttacttccaagtattcaaaacttttgaaaggcttgattcat

SEQ ID NO: 5996 - DNA, 369 bp, Setaria italica
  Peptide Sequence Number=SeqID_71970
tgcaaaatgccgttcacatttacagaaagaagtatcaggtgaaacaaggtggccatattggaattaacgtttgctcaagatggtatgaaccattccacaataccacggcagacatcttagcagttgaacgggttctctctttcaatggtccatggtactctacttttcccttagaatgataactatggatacagatagcattttatgtctaatcatatataaaaccaagtgataaactttgtttccgagtaataaacctaagcatgtaatatttttagtcaactctcaaaccatatgttcatattttctgggctggctaacttgtttaatcatgataggtttctggaccctcttattcttggtgaatat

SEQ ID NO: 5997 - DNA, 1801 bp, Setaria italica
  Peptide Sequence Number=SeqID_71971
cgccgaattatacagaggaagggagggagggagagcccaagacggacgatgggcggggcagcagcgggcagaaggaaggggatggtcgtcggcctcgcgctcttcttgctcgctcatcaggggctcctgccgtgcgcttcggccgttgatcgcggcgagttccccgagaacttcttgttcgggacctccacctctgcctaccagattgaaggagggtatttggagggtaacaaaggtctaagcaattgggatgtcttcacccataagcaaggtacaattaaggatgggagcaatggtgattcggctgatgatcactatcatcgttacatggaagacataaacctgatgcattccttgggtgttaactcataccgattctccatagcatggacaaggattctaccaagagggcgatttgggaaagttaatccagatggtgtagcattctacaatgccattattgatgctcttctacagaaaggtatgcaaccatttgtaacaatatatcattttgacattccacatgaactggacaagagatatggtggatggttgagctcagaaattcagaaggactttggttactttgcagatatatgcttcaaaatgtttggtgaccgagttaagttttggataactattaatgagccaaacttgttcacaaagttaagctatatgtatgggcgatacgctcctggtcactgttctaagccatttggtaattgtgcctttgggaattcttcggtggaaacatacatagtaggtcacaacatcatactatctcatgcaaatgccgttcacatttacagaaagaagtatcaggtgaaacaaggtggccatattggaattaacgtttgctcaagatggtatgaaccattccacaataccacggcagacatcttagcagttgaacgggttctctctttcaatggtccatggtttctggaccctcttattcttggtgaatatcccctagagatgcgcaagatcttaggttcaaacctacctgaattcacatcaaaacaaaagaagaaattgcaggccacaaaattggatttcattgggttaaatcattatacaacatcatatttgaaggattgcattttctcaccatgtgaactggatccggtagagggggaggcccaggttctgacatcagcagaaagagatggaatatttattggtaaaaggacagggtcgccgatattttattctgttccatatgggatggagaaactggtcatgtattacaaacaaagatacaataacacaccaatatacatcacagaaaatggctatgctcaagcaagcaatagcagcatgatcaccaaggattttaccaacgacacaggaagagtcgattatcttcaaggctacctcacctttttggcctcagcaataaggaaaggagccgacgtgcgtggctacttcgtgtggtctctgctcgataacttcgagtggaattctgggtacacgcagagattcgggctctaccatgtcgatttcaagacgcagaagcggaccccgaaactgtctgcgaaatggtacagagagtttctcaaggggtcacctctgagaacaagtctccgaaacggatactcccaccagtacactgcccaatccatggaccatttctcctcagaagattagttcagttaatgttaagatgttgatcatggtttacaacattgagtcgatggggtttgcgtgctctcatgtaagccgtctcaaggactctgtatacatgtgcaatcaataaaaggggtcttgtgattcaatttagtacaaaaaaaaaaaaaaa

SEQ ID NO: 5998 - DNA, 923 bp, Setaria italica
  Peptide Sequence Number=SeqID_71972
tgttgcgtgtctctttttttttttactttgaggcatttctacaataaaaggagctgcattccatgttctatcaagggggaaagtagagaattacacatcagactgcgccacgtgcgtttatactgatcaatgatcacaagaaagcaaatcaaagatttattctgagcgttatgttcgtccctctcaagcatcagaggcaaacaagttgccatggatttgcaaaggaactaagtgcatcagcaaaacagacataaaagtgcgcatcaacttcaaaattcaccgagctgatggcttgcatgatttgtgctacaagtacacgagcttaaatcaatgagcaggcttcttctcggttgtgtaggcatagtattctttgccgttgtccactctcgtagtattgccgccaatgtccagtatagcagatgtgaaagccaggcaggagcctccaattagggcagactgaatgctctttcctctgtagccgcagacggaggccccggcgacgaacgcgccgacggctccgttgacgaagtcgtgcttcttgcgctgggcctgcacgagctgctcgacgccgatgtagagcccgccgatggtggcgaaggtggccccgtaggtcccgcacatcttgagcgtccggatgagtcccggcagcgcgacatggcgctccacccgcggcacgtcgtaccaggtggcgacgacggtgccccagatggtccccgcggcgagccccgtcacggcgcccttcaccgtcttcgtcactggcgagtcgtcctccatggctcgatccctcctgttcctctggagacggcgcggtgtgtgccggcggcggcggagaaggttggattcaggggaggacggccggaggtttcggggtggaaatgggggaatcgcggcgtgggagactggcagggcacacaggggatagg

SEQ ID NO: 5999 - DNA, 253 bp, Setaria italica
  misc_feature (242)..(242): n is a, c, g, or t
  Peptide Sequence Number=SeqID_71973
ctggaggctggaacaactcgtccactcgctgccccgccccccttccctcctcttccgctgacctcaacgtcctcctcgtcgccgctgtttccggcccaccgcgccgtcccgtcagccatggaggagtatctggagaacatgaagtccctccgctcctacatgaacgatctggaggaggacgccgcgaagcggtccgcggaagagcagcagcagcgcacagccatcgacgcccagacgccganatcgcgctagt

SEQ ID NO: 6000 - DNA, 303 bp, Setaria italica
  Peptide Sequence Number=SeqID_71974
gccagtgctcgcctagggggcgaagcccatgtcggacgatgggccgtacatgagggcgtcggcgatggcggacgctgggcgtgaggcgaagacgtggtcgtgcgtgcgcaggaccgcccgcgcggcgctccgggacgacacgatgaggttggggacggcgccgaggcggaggagcatgaggccgtcgcggccgtggctggcggcgaggtcgcggagggagacgtgcgggaggtcgccgacgaggtgcaggtggccgatgatgggcagcgctggaggggaaggcgggagcttcttgccgccggt

SEQ ID NO: 6001 - DNA, 272 bp, Setaria italica
  Peptide Sequence Number=SeqID_71975
gtcgccgctacttggaccacattgttcgaagatacggcgtcgagctaaagatggagcactacggctgcctggttgacttgtatggaagagcagggcagctgaacgaagccaagaaggtgatcgacgacatgccgatggagccggacgtcggcgtcctcggcgcgctgtttggtgcgtgcaagctccacggcgatgtcgacttgggcgaggcgatcgggtggcgcgtcatcgagctggatccccagaacagcggccgctacgtgctgctggcg

SEQ ID NO: 6002 - DNA, 673 bp, Setaria italica
  Peptide Sequence Number=SeqID_71976
gatgctccgcgagcctcgccagcagcgccaaggcgtcgccggcgaggtcctcgcagtcgacggacagcacggcggcgagcgcggccacggcgccggccgcgacggccttgccgtagttgctcgcgcattggagcaggccgtagaggctcaccatggcgttcttgcggccgcggtgcgcgccgtcgcggatgagctgcaccagcgtcgggatggactccgggatgcgcccgatctcctcggcgtgctccgggtccgacgagaggtagaacaggacggccgccgcgttctgcttcgcctcggccctggcgccgacgttgatcacgtccacgacgaggcccacgccgccggcctcgaagagcgccgcccggcccgcgggtgcttcgagaggtttaggagggacgccacagcattctcctgcacggaggcgtccgtcgaggacaggaggcacagcagccacggcacggcgttcgcctccacgaggcacgcgcggtagaacacgctgtgcttgcagagcttgcgggcctcgcacgtcgccttccgccgctcctccgtcgagcccgtcgagatctgggcgacgatgtaggtgacggtgaggcgggcggcgctggcggcggcccgccgaacggcgcggctgtgttggcgagcgcgccgtggcggtcgccccgagccgctc

SEQ ID NO: 6003 - DNA, 1591 bp, Setaria italica
  Peptide Sequence Number=SeqID_71977
ggagggagcaagggggaactcgcggttcgcgccgtgatccgtctcgcccgcgggtgtttccgccgcgcgccgcggctgccgcgtcggtctcggttctcgccgcccgcacggcccgcttctgcttgatcctgcggtcctttttgcttctcgtttcacaggtggccagccttggtatcatcgagcagaattaattgtcctcttctggagtgtaaaatggcagcaggagccaccttaaactgggttaaaactccatttgactcccggagatttcatgatctatctagtttaagttttcgatgccgtaacccttttggaccaattcagcgctgctggttgccaactgatcaggactcatccctaaccaaggttcgcgtggctgctgattattcagactcagtgccagattcaaagtacacgagagatcggggttatcaccctcttgaagaagttaaagagcgttcaaggaaaaaggacctgctactgacagatgttgaaacagctagaacagtagtagagggcaatagcaagggcttgcttgtatttcctgcaagggtacacaatgaacctcatggaaatgttgcctggtcagagtttcaatatgttattgatgactacggagacatattctttgaagtacctgacagcgagaacctcttagaagatgatactgcgaacaatcctgtgacagttttaattggaatggacggacccattattggagaaagtagtgtggcgattagtgattttagtgattacatggatggtgaaaaatttatggacgttcctgatgagcactacagcaagattgatacagaaataactgatattcttatagaatgggggatgccagcaacaatgcgtgcaatacatccgatttactttgccaaatgtttgacaaaggctgttcatgacaatcgtggggagaagatggatagtccatcaaatagtgtctctattgttggatatctgagacctgcttttatagaggaagaatcttacttgaggagcttgtttcatgccgaatccaacagtgatggatattcatctgactggaaagtgaatgaaacagatggatacaacacagaaactcggccaatttctggaactaatcacctagttgatgatgataagtcaagatttgacttcaatgataccggaactagcaccggttcgatgatctacaagctggagataatgacaattgaactgttctccatgtatggcaagcagttgatgatcgatccacaagattttcaagattcagaaccagatattcttgcaaactctgcttcagcaattatagaacggatcaaagaaaacagtgatcagtgtgcagtggctctcaggtcactctgtcgcaggaaaaagagccttactgtcgaggaggcaagtttgattggcgttgacagtcttggtattgatgtaagagccttttctggcttggaagctaggactgttcgattttcgttcaatgcgcaggttagtcattaggcttagaatttcaaatcaccttggtccttttaatgaacctagaacaatcatttggagtctctggtttcaggcgctctctgaacgttcagctagaaaaaag

SEQ ID NO: 6004 - DNA, 1186 bp, Setaria italica
  misc_feature (1154)..(1186): n is a, c, g, or t
  Peptide Sequence Number=SeqID_71978
ttaaaatctcgcacctcagttacccactttcattcaatttttgtttgacttactctaagcaaatattcagatgatgataagtcaagatttgacttcaatgataccggaactagcaccggttcgatgatctacaagctggagataatgacaattgaactgttctccatgtatggcaagcagttgatgatcgatccacaagattttcaagattcagaaccagatattcttgcaaactctgcttcagcaattatagaacggatcaaagaaaacagtgatcagtgtgcagtggctctcaggtcactctgtcgcaggaaaaagagccttactgtcgaggaggcaagtttgattggcgttgacagtcttggtattgatgtaagagccttttctggcttggaagctaggactgttcgattttcgttcaatgcgcaggcgctctctgaacgttcagctgaaaaaaagatcaggcgaatgcttttcccacgttatcagcgtaaaagcgtgaaaacctccactgaagatgagtctcaacctatcagctgacttttctctagaaagcacctaaacgcccggtccaagtacaagggcgtcaagggaatcaacaaaagatcttttatctgatcttattatgcgcgtttgctaggagatagcgcacaacctgtcgactctgagaatgacctgaagcatcagggttcctgattgaggttttgacttcactggtgaaggaaggttggccatgtacggtctctaacatgcctccgagtccaaggataaagtttggtttctgacaaataagagaacaaataaggtgccagctcttgtaaaagatgcactgcaatctgatgccggcggaaatctgcaactgagtagctggccaagctttgtcagcaataaattccagtaataacgagccgcaaggagagcgggcagagtaataaggtctccttggcctgaaacagttcttatcctttcttttttaaaaagaagaagaagaagaagaagatagtatcctgtactcgaatcagttcttgataccccaacctgtaactaacttcttgtcgtctctttcatgtctgaataaatgtaacgcaactgtgattatgtgtcgtttgttcacctacagaaacgaatatagaatgataaagtttcgagagccnnnnnnnnnnnnnnnnnnnnnnnnnnnnnnnnn

SEQ ID NO: 6005 - DNA, 283 bp, Setaria italica
  Peptide Sequence Number=SeqID_71979
gaccggggctttggtgttgtatgagaggtgggcccctggacacggcggtggtgccggcgatgagctgcaacgggtgccgcgtgctgcggaaggggtgcagcgaggcgtgcgtgctgcggccgtgcctgcagtggatcgagggcgccgaggcgcagggccacgccaccgtcttcgtcgccaagttcttcggccgcgccgggctcatgtccttcctcaccgccgtccccgagccgcagcgccctgcggtgttccagtccctgctgtacgaggcggcggggcggac

SEQ ID NO: 6006 - DNA, 481 bp, Setaria italica
  Peptide Sequence Number=SeqID_71980
ctgatttgcgctagcagaattggatcagtcggggcactagggagtggccgatgcccgggcagctcggctaggactctaggggcggatgttggccggtggccgacggccagcatagagcagagaatggccaggtgacgggcaggctctagttgaggtgcgtgtgcgtcaagcaaaggactggctggacccggccttctacagttgggctacgtaaacacatcacaggctcactaggccaagtggcccatacagccatattcccctttcttcttccttcgctcgacgccctgaccaacgaatgacgcgcgccgtcgccgtgatccgcgccaagatctcgccgaggaagaaggggatggtggtctttactccgccgggtagctggggcagctgcctcaccctgctgtatggggagctacgcctctgctgataagtggttactatatgtcgacatgacataaaggtgcatgtatttaacacactg

SEQ ID NO: 6007 - DNA, 545 bp, Setaria italica
  Peptide Sequence Number=SeqID_71981
cctgggcacaccacaacagtctgggagtggctgaaaacagtggttctgcaaaacaaaatcaaattcaaattcaggagacaagaaaaaaaaatgatgtttagaagcaaaatcagtgcaaagttcatagcgcacagcatacattgatgtcaatatccaacttgttcaaacataaagtagcaaagaacaatcatttattaagtaacatgaccacaatacagtactcactcatccaaaatctgtgcctgtttagaattttggaggtacaattcacaaaatttagtttaacaacataaaaatccaatacctcttctcaaataccaaacaactaagtacctgctaactctgatattcaaaaatttgtgcatgctaccatacaaagtacaccaagagaaactgatcatggtagattggtaaagagtgatttgctgagatttttaaatacctgctaactctgatattcaaaaaaattaagttccaataaaaaatgtggcaggaatttaaacttaattaactattgtacaatttattctagtcctaagtctaaa

SEQ ID NO: 6008 - DNA, 798 bp, Setaria italica
  Peptide Sequence Number=SeqID_71982
cggcggtgcgccgtgaacggcgtgtcgttcgtcgtccccgacacgccgcttaagctcgccgacaactataacatcgccaacgtcatggactgggacggcgttccggcgaggcccgtcggcggggcgccgccgcgcgccgggacgcccgtcgtcaggctcaacctgcacgagttcgtggaagtggtgttccagaacaccgagaacgagatgcagtcgtggcatcttgacggatacgacttctgggttgtagggtacggcaatggccagtggactgagatgcagcggcaaacctacaacttggtcgacgcgcaagcaaggcatacagttcaggtgtatccgaacggatggtcggcgatcctggtatcgctggacaaccaggggatgtggaacctgaggtcggcgatctgggaccggcagtacctcggccagcagctctacctcagggtctggacgccggagcagagcttcgctaacgagtacagcatcccgaccaatgccatactctgcggtagagccgccggcttgccacactgatgaccaagatgcagagcatacatggtcgattcatcctatactacctgtatgtttcgtagaataaatcattctacttatatagctgatgaaatcaagatgataggtgacagagtgttttgttgtagccaaaagctcagaatctgaagttgctattctttgatggtgatgtcagtagtttatttctgcttgtggtttgcctgtgggtaaggacctctcaggctgaagctgtcccatgatctttaacccctaaaaaaaaaaaaaaaa

SEQ ID NO: 6009 - DNA, 453 bp, Setaria italica
  Peptide Sequence Number=SeqID_71983
tttttttattatcgactaaatttcctatttccggctcttgaaatcgccccacccccctaatttctccgctcgtcaaatcctcctcgccgtgtgctggcgaatcaccgaggtctcctctctccggcggcgagtcgtcgaatcgccccgcctggtacggccgccacgtcgcagacgccggccgcgctcctccgtcgaccgaggaagaagaacgggagccgacggcctctggcggttccaccggagaacggcaggcaagcggccactcgcgcgccgcgtcgattggcattggatttaccgatccattgcttccgtttgttgagttcttgaagcaaaacgatccaatgagattcttcaagggaagcaaggtggaggtattgcaggaggcagaggtgcccttttggttcttggaggtcctggtgagatagtctctggcaatggacacacctacttggt

SEQ ID NO: 6010 - DNA, 343 bp, Setaria italica
  Peptide Sequence Number=SeqID_71984
gtgtcgtggatgaggtcccggtgctggcgcgggaactgcagctcgagggtgcggtgatcgccgccgccgcccacgccgtggccgccgcggccgaacacgccgtaggggctgtaccctccgccgcccgcaccgcgttcggcggtgcgcgcggtggaggtccagcggacgcggacgccctgatacgtgtcgtgcgtggtgtgggagtccgggagggaggcgacggggcggtgcgcctggcggggcttgtggaggcgcacggcgggggccgtggcgaggcagcgctcgccgaggtagagctgcgccgagtcgtagaggtcgttggcgccgccgctggcgccgtcgg

SEQ ID NO: 6011 - DNA, 352 bp, Setaria italica
  Peptide Sequence Number=SeqID_71985
atgacgctggaggatttcctggcgcgggattccggcgctagggcggcggcggcggtggaggggtgcatggcgctggggttccccgtccagagccggggatgcgcccgggggagtcggcggcgggaggggaagccggaagcgggcgatggtggatcccgccgaccgcgcggtgatgcagcgccagaagcgcatgatcaagaaccgcgagtccgcggcgaggtccagggacaggaaacaggcgtatgtagcagagctggaatcgcaggttacgcagctcgaggaggagcaagcagaactgttaagggagcaggaggagcgacgccaaaagagacttacggagctgatggaaagg

SEQ ID NO: 6012 - DNA, 1687 bp, Setaria italica
  misc_feature (6)..(6): n is a, c, g, or t
  Peptide Sequence Number=SeqID_71986
tttttnttttttttttttttgttcgagtaaaaatagtaaagcatcggaacaaaactagggcactatacagtatgcggatcatgcatatatgggtatccgcaataattgacccatcagcgtcaaccagtaattgagatatctcatcagtaactacaaagccataacggcaattaactgttcacaagcacgtcttgcaagtgtagttctttgcatgatttgcatccggtacgtacgtacttaagctgtacatgcatataagtaaccaattaacctaaccccataaactcaggtacaaagagtgtaggcacagcccagcttaggggagcctcctgagcatgacctgcgcgccgtgctccggctgcagcaggccgagtgggaacggcgcgtgcgtgtaggccggcgagagctcgaacgcgaagcgctgcaggatcatggcgagccccatcttggcctcgagcagcgcgaagttctggccgatgcaggtgcgcgggccccagccgaatgggaagaaggccggcgcgtccaaggacgccctggatatcccctccgcgaacctctgcggcctgaactcgctcgcgtcggggccccacacgtccttgtcgtggtggacgcacagcagcggcagcatcagcatcacccccgccgggtaccggacgccgccgagctccatgggcttgtacgtctgccgctgcagcgccgccagcggcgtgtacagccgcagcacctcgtacagtaccatggtcccgattctgaggcggctgaggccgtcgtagtccggagtcctctcgccgaagacgtggagcacctcctccctggcgcggtcctgccactccgggtgcatggagagcacgatcatcgtccacgtgagcagcaccgacgtggtctccatgccggcgaagtagaacagcttgcactccccgatcacgtcgtcggtggtgatgccggccctcctcgagttgccgccgtcgcccctgcagtgctccatgttcgactccagcagcaggccgaggagatcgtcgctggtcgcgctcccggttctcagcgcgttctccctcttggcgatgatgcccttcaggagcgcttcgatctccgaagcgatctgcttcatccttcggttggttcttgttggcaagtacaagtatccagggatgtgaagcttctgcatggcctggacgacgagcttgacctgctccccctggagctggaagatcctccttccttcgaggtagctgctgccaaacgcggcccgggagatgacatcccctgtcaggttctgcatctcaggccacacatccacctcgcacggctgtccgtccgcaaccagaccctcccacctcatcaccagatccgtgcaacacgcggcgaaagccggcagcatcctcttgagtttctcgacatggaacgcggggttgacgatcctccggtgcttggcccacttctcgccctcgtggctgcccaggccgttgtgcagcaacctctggagcctaccgaacttgatcttctcgaagtggccgaacttgttggacagcacctcccgcaccagctcaggcttggtgatggtcacccttggcaccggcccgaaccaggtgatggacgttttccctgtcattgtcaaccgttttcagtcacgatttgttagtggtcgcttgatgtgccactatttggttttctttggggacagctgccg

SEQ ID NO: 6013 - DNA, 720 bp, Setaria italica
  Peptide Sequence Number=SeqID_71987
ttatcaattataggttgtcactttccaatctcaaattctaagaataatatcagataatgcattgcattatgagacttcttccatagctaaaaggtcaattctagcgattaatgcgcaaatgcattttgtataaaaaatccattcctagacgttgttacagcataaactcattcaactaggcttgtatccagtgtgcctgaaatcagaagtctaagagtgtaacagttttatttcacaaaagttgatagtagacacagcaagcaaccactttcatccaaactcatcatcttggaagattcaaaatacatccacaggcacatattgggattgtttcaaacaagcaaatcatcatgatttgttccagttgacatggctgtcattaaggcaactgacttccacatgcagaatgtgaccccaaatctcaggattacaaaccaataaaatcactactatcaacgagctaacaaaaacgacaaaaggaatgtaaggcaataaaggttagcaaacaaaatgtcagagcttttagtgttttctagaacttttcttttcctattcatatgtgcacactggacttgtacatactgaactctagaatctcccttgagctactttgtaacagaagctagcagatggggcctcagcatgcttatctacttaggatgtccaggaactacacatattgtagaaaaggtttaacctattgacatctcacatacaaag

SEQ ID NO: 6014 - DNA, 450 bp, Setaria italica
  Peptide Sequence Number=SeqID_71988
gcagagagcttgtaggtctacaacagcactattcaaagcagtgatatccttcttgataactgcagtcagctcttgaatctccacagtagggtcatcaaaaacagatgtcctctttgccaatttggcgaggcgggctagcttctgggaggtctggtggatcccgagcccgatcttggacgcgcggttgttgaactccgagcgcgccgaagtggccgcgatcgagccatcgaggggcccggcgccgccgctcccgctgctgctcgccgcggcggctgcgacagcggaggaggaggaggaggaaggggcggcgtggcggcgcgcgctctcgacggcagagcggaactcgttggtgcggtcgcggaacgacgcctgcgcgggccgcgtcgggttcatggcgggcgggcggcggtggatctgcgggccggatctggatctcgccctcgccctccg

SEQ ID NO: 6015 - DNA, 1224 bp, Setaria italica
  Peptide Sequence Number=SeqID_71989
gctgcgattctgaaacattgatatcacctaggagtattactgtttggtttggtcccgagataatacttcaaacatactgtggaaatatcaccactcaagagtaacaggtcagtgcaggagcttgtcccaatttacatgaccacaaaagggtgaacggttgcttatcatccgggggtgaaaattgtgtacacggtgtagtagtagtatgagtaaaaattaaagaatactacgcatagcagccatctatgcagagcatgtggggcgagatggtacagaaggaatcatgcgacgaagaatatgaagatcatgaggaacaccatcagcacaaagaatatcttcatcatcagccacctgttcgatgagatgctgttgaggtacttcaggagctgcccctgcgctccctcgacgttagtcagtgtttcatccatgttctcatcaattctgattgctagctctccctgttgagaaaccatggttgccaactgtgtaaagatgttgctcagctcatggatggtcgattccacattttgtagagcttcagctctgctctgcatgtaactgtcctgctgtacagccaattgctgctgctggaaaggctgggatgacgatgatgctccatggtctccattagttttcttcctctggaataatggtgtagatgcagagtcgctggcccatggtgctggggggacagaggactcggatggatccctagcaacaaggggacgttgacgaatgaatggatttgatgcatcctttgcagctgacgaggagaacatttgccttctattttcatgaaccttcaaattctctgttcgcatggtaagaacttctttaaattcttttgtcgcactcatcaggcggttttttaggttgtccacaactgtagtggaatgattagtcgtgtccttggatagattcccactctcattttgtgaattgcagagagcttgtaggtctacaacagcactattcaaagcagtgatatccttcttgataactgcagtcagctcttgaatctccacagtagggtcatcaaaaacagatgtcctctttgccactgcaaagattcatttcataatataattatcatagaaatagcacaatctttataaatgcatacatcatgataagaggttcataatgacaggtcactgatgacgttttgtggtaataatcacatgtaatgccactagaactaatgcacataactagattttaatt

SEQ ID NO: 6016 - DNA, 489 bp, Setaria italica
  misc_feature (413)..(413): n is a, c, g, or t
  misc_feature (431)..(431): n is a, c, g, or t
  Peptide Sequence Number=SeqID_71990
catgttgtattaactctggttcgagcacggcgctctctggctggcagctcacagtagatgccatcgagacgttgcagtctcttggccaagctcagaatcagactatgcagtcagactctgcggcttcattatataaggtaaggctgcttcgtcgttctaattatcctacaatcttgtgcaggcctttctggctgtctgcaaacttcagcaaatttcttaaatgtccagctttcttctgtgcattgcattgtctcatgtggtaggatgatcacgccccacccagccggaagctgctgaaaagggcaaatcacagcaagagctgagcatcagagcttcacatttggtcttgggagagctcagaaaccatgatccgggtgggtgggaaggagagaataaagcttaggtagttttgngtgcagatgattgggttncctgccgtctttagctatgtcggctcgattattgtatttatctatgttctatgagatg

SEQ ID NO: 6017 - DNA, 2856 bp, Setaria italica
  Peptide Sequence Number=SeqID_71991
atttctctcaatcatcgtgtagaccatgggaacgaggcgacttgcttcatcggctggccacgtttaagcagtcaacatgggcttctaagccaaaggctgctagttcattggcttgtgctcaaagaggctgggtgaacattgatgtggacaagattgagtgtgaatcatgtggtgcacatcttatatttactgcattgacatcatggtcccctgctgaagttgcaaatgccggggaagcttttgctgagcagcttgatgcatcacaccagaatgattgtccctggagggggaatagctgtgctgatagcctggtccagttccaccttaccccgtcagctcttgttggtggttttaaagatcgctgtgatggattattgcagtttgtatctcttcctgttattgcctcatctgcaattgagagtatgaagatcactagaagcgttcaaattgatcgcatcttatcccaatcagttacaattttgtctggggagctgggctacagaacagacagtacaacaggaattgatatcagccaacaagatgaaagctgcggctactctcaagcacagaagcttattagcgtttgtggatgggagcctagatggcttccaaatgttcaagattgggaagaaaattcaacacgctccgccagaaatgcaggttcagctgaaccagatggccagtttcattcccaaattcctgagcatcaccaaagttcatactctgcatcagttaagaaagagaagggaaaaggaaaaatgcgtgtcaaagattctggatgcagcatgagatcacctttgctggattgcagcttatgtggagctacagtgagaatctgggacttcaaatctgtgccacgcccttcccatttaagtctgaataacatcgacatgcctgatacaggaaggaagcctgtgttgacccgtggaattagtgctactagtgggatcaatggattggttgctgaagtagcagagaaagaaaatgttgaaggacgtgatgaggcaggtactgatgagcgtaagtctgtgtcaaatgctcaagttgacttaaatctgacgatggcaggaggtttgccatcaaaccattctgcattgcccccgatgcctggacatttcagttatggaggaatgggaagagatctcattattgggcagccaactggaagtgaacttggtggccatgcagcctcatttgagtctcggggccccagttcaaggaagcgtaacctggaggaaggtgggagcacagctgacaagccaataaacaggcttcagcctgctgacagcatagagggaactgtcattgaccgcgatggtgatgaagttgatgatgccgcacaagattctggtgctcggagcaaaaggcctcgtggttttaatctttttgatatcaatcgcccatcttctaccggagcaggtcccagcagaaacttaagctttgacctggatatagatgttaatagatttgatacatctaatgctgagggcccatctgcccttcacaacccatttccaaaggattctatgagggcgtcttctgttattgcaatggacactgttcacagtgcggaggaaaattcaatggagagtgttgaatatcatccatgtgatggtgatgatgttaataagccttctagtgcactcaggagtggtggaatgagtgaggcattggatctcaattatagcaaccaagcacagcaaagcagttttgtacagcctgctgctgaaactgaaagtaatgcaagagagatagggggcagtagtatgaatggaggggaagaagttctcaatgcagaaacgactcctgcttctgctagagatcagcttagcctgggggttagtggagggagtgtgggaatgggtgctagtcatgaagctgaaattcatgggactgatatttctgagcataaaactggtagcgttgttggagatgctgatccaattcctgagctcatcgagattatgggccacactggcgagtcagcccctggacctgcgttgatggatgagtctgcccctgaagaagttggtcgagaagatcctcatggtgatagccaagatatggcgtctcggttagcggttcgagctgacagtggttcaaaaatttgtggttcaactaaagctgattctgttgaaagtggagagaagatgagtcatgctgtagctcatgagaatagtgcacatccctctctttcttgcaatgcaagagtttattctggcattgatgcatcgaaagaggaagtgactggtattatgctgactaatgatgactatgatccagcaaatgggctaggagcaacaaatggagaaaacgattatgaaaccgaacttccagatttcgatccaataaagcaccacaacaattactgcccctgggtaaatggaaatgttgctgctgcatgttgtattaactctggttcgagcacggcgctctctggctggcagctcacagtagatgccatcgagacgttgcagtctcttggccaagctcagaatcagactatgcagtcagactctgcggcttcattatataaggatgatcacgccccacccagccggaagctgctgaaaagggcaaatcacagcaagagctgagcatcagagcttcacatttggtcttgggagagctcagaaaccatgatccgggtgggtgggaaggagagaaataaaagcttaggtagttttgtgtgcagatgattgggtttgcctgccgtctttagctatgtcggctcgattattgtatttatctatgttctatgagatgacttcagcaccaagactttgtaactggatacttgccgtttttgccaatgacttgtgcgagtggattaatatatatttaacttagaaaaaa

SEQ ID NO: 6018 - DNA, 680 bp, Setaria italica
  Peptide Sequence Number=SeqID_71992
aacaaagggaaggggtcatcatcttcattttcagcatctgagctcatattagaacaaatctcttttggatcagcatgaacatctttactggtagtaggatcatctgatgcgagagcttcattatcccctccattttccttaaccacgtgtttcttgctcgctttttcactagcagcaactttggatgttttactttttatttctgctagcttgtttctcaggtcatttttcgctttttccagcaaaagacccctaacatccaactgagagaaggtcttggctaaacttatgtggattggaggcctggttttccaattgagtccaccattaacgccttgaaactcatagaccccaatgttggttgaaaaagatatattcacaccaggcactctaaaacaatttgctccaggacctggtacgaccgatgaagaaccaactccagaatctttagtcctcatcttctttcctgatgcaacatcacctgttccatgattaatgttctctgacatgcttccatgcctttttagaggattgtacttccgacgaagagcctcctcccttctcgcggctgcttgtgcctcctccctctccctcttaactttttcatacgtctgatgaactacattagcagcttgagcagcagcagcagatgatgcagtggcactagctgcaccagcagc

SEQ ID NO: 6019 - DNA, 1245 bp, Setaria italica
  Peptide Sequence Number=SeqID_71993
taagaaacaaaaagactaatttgtgtatccatttgattcggagctcgttttctttacaaggttccaacagcaattcctcaacaggtcaattcgttattagccggacttgaccgaccgatcgaccgaccatcactaatcgtcactcacgacatagataaaaaccaaacgttacattatcacaagcaggatccaaggaaattgatgcaacatcaacacgatgtttctgcaacttattcccggatgttaaaatctgttcagttgaatggagagattcaactagattgtgcctgaaggtggtggcgatggtgcgtctcctgactccagcaggaacagcgcaggctcaaccttggctgcgcacccaaacttgaacgtactgtatttcctgtgtacgccggtgagcttgccggctccagccttctggtgaaagtctaccatcatcctcgagcactcaaggagttggtcgccggtgtatctgctatgtgattcgcaaacctttctccagtgctggcagcgattgatagcacattgcgcagtataaactgcagcagcagctagaagcgaaggccggtacttcagcatttggtattcaaccagacagagctccagcatgaaaaaggacactagctctagctgtttatctgaatctgctgctttcagaaatctcctcatgaagacatatggtgttggaacagacatattgaactgaagcgtgtttagaatcaacttttccatttctagaatctgcccttttgtgtaggctctgtcagaaatgagcactaggtcttcaacaactggaactgaaacctcctcgtatttgcaagcaagaagcatagctgttactcccactagctgcagcttcttccttggaaccacttgcttttccaaaaatctatctattatgtttacggtaagaaacagtgtctcatccatcaattcgaacttgtaatgcacctcaatgagccaatcaatgagaatcgctctcatttttgcatttatatcttgttggctggacatgtaatcaggctttacacaactttttgcctcagtttctctgtaaaacttgtacagttcttcaacgtattcagttgctgcaagcgggttccccgagtctgcactgtcaatgtccatgatagattcatcttcgttcacactctccttgtgatctgtctcatccatgtcaatgtcaacatcggggacctcctcgtactgttccaggtcgatgtcgatggtgccattgctgacagg

SEQ ID NO: 6020 - DNA, 618 bp, Setaria italica
  Peptide Sequence Number=SeqID_71994
ggcaccgcagcaaagtgacaaaaaagcagagcaacagatccatttccgcacattcctagcagctcgaggccactgctctccattcccctcgctcgtcgccatggtcgccatctccccccacctcaccgcgacccttccgtttctcccgactctgcggccacgtcctcgccgtcttccgcaggacgccttcgcggcctccgtgtccgcgcaccgaaccgccggcgtcgccctccatggctgcaggcattgcaatcctttagcaagaagacttcatgggtttgagaatacaataagcttctggacacggacggagcacaataagcaagctctatttgcctcaggcagggatgataactcgagttctccagatgggccgcctgtcctgactattctggcaggtgtcattgtgttccttcttgtcctctgggtaattggatcgattgttacctggattgtagggtttggtctttggtgctgcaaaatcttagaaggtccatttgagggtagctaagaaccatttcaattgtatatactttgtgctgtcgtttctttgctgaagccttgataaattgcattgtctggtatgtttttagaggaagtcatgtataactgcaattg

SEQ ID NO: 6021 - DNA, 327 bp, Setaria italica
  misc_feature (291)..(291): n is a, c, g, or t
  Peptide Sequence Number=SeqID_71995
ctttctgtcggataagtcaactgttgagggagagatcagcagctgactctgaatatcagcccttgaatggccttgatcctacaacacatgcggagttagctctgaaggatgcagagaagatcatatctatcaacagtaattcccctagaccatatcttctcaaggcatatgcgctaattctgctggagcattatcatgaggcacgtgaggcccttcttgctggtcttcaagttgaccccctcagccatgtcttgcaaacctgtctgagtgatctggataggaatacaaatnttgcagctggggcaaggcgtgcaaggttagatagga

SEQ ID NO: 6022 - DNA, 1349 bp, Setaria italica
  misc_feature (1287)..(1349): n is a, c, g, or t
  Peptide Sequence Number=SeqID_71996
cagctgactctgaatatcagcccttgaatggccttgatcctacaacacatgcggagctggagcattatcatgaggcacgtgaggcccttcttgctggtcttcaagttgaccccctcagccatgtcttgcaaacctgtctgagtgatctggataggaatacaaatattgcagctggggcaaggcgtgcaaggttagataggactgatgattttgagtgcacattatgctttaagctattgtatgaacctgtcactacaccatgtgggcattcattttgtcgttcttgtctacatcagtcaatggatcatggaaataagtgccccatgtgtcggacagttctatttattggtccaagaacatatcctataagtgtaacattgagcaacataattcagagaaatttcccagaagaatatgctgagaggaggtcagaacatgagactatgacatatgctggtgttgatttgatgcctctctttgttatggatgttgtacttccatgccaaaagatggcactgaacatatttgaacctcgctacagactaatggtaaggaggataatggaagggaaccatcgaatgggaatggttgctattgattcggcaacgggtactgtagctgattgtggctgtgaggtggaaattttggagtgtgaaccacttccagatgggcgtttttatttagaggtggaaggctctcgtcggtttcgtatcttacgatcatgggatcaagatggatatagagttgccgaagttgaatggttgcaagatatgcctctgccagaaggatcacaagagagaagagaactaatcgaacttgccaatggagcttcagaactagccagggcatatattaggcgtgctagagaaaccgtacggactgcaaggcgaacaaggcatttggatcttgagagcatgcctggaccacaggatcctgaaaaatttagcttctggttagtcaacttgataagtttgaggccctctgatagattagatctgttacgcctccgtgacactcgggagagaatttctagtagcatcaggttgctgagtgatgccgccgagcaaggttgccatgtacagtaacagaacaatagcaccaagaattgtttccacaggccaatttattcatctaggggtatatactgagcagctcctatgtaaatcgttttacagtatagatttatcatatttgttatttaattgattctgggcggtataatttcctcatgtacgaactgtcaatggaaaaggtatatcgtaaacttccttattcttgtaccatttnnnnnnnnnnnnnnnnnnnnnnnnnnnnnnnnnnnnnnnnnnnnnnnnnnnnnnnnnnnnnnn

SEQ ID NO: 6023 - DNA, 439 bp, Setaria italica
  Peptide Sequence Number=SeqID_71997
aaccggctgtcggggccagtcccagactggctgggctcgctgccgcagctgggggagctgacactctccaacaacgagttcgccggaccactcccggtgcagctcagcaactgctccaagcttctgaagctctccctcgacaacaaccagatcaatggaacagtgccacctgaaatcggcagtttggtgtctctcaacgtgctgaatctcgcacacaaccagctgtcaggtttgatcccaacgacgatagcaaagttgaacaatctgtatgagctgaacttgtcgcagaatttcctgtcgggtccgatccctccggatattggcaagttgcaagagttgcagagcttgttggacttaagcagcaacaatttcagtggccacatccctgcatcacttggttcactgtccaagctggaggatttgaacctctctcacaatg

SEQ ID NO: 6024 - DNA, 1293 bp, Setaria italica
  Peptide Sequence Number=SeqID_71998
ttttttttgtcaatgggtaggaaacaccccagtaaaatgtgagatcatcagaaagaataaaggttatggtaaacgtgacaagagtcgcagcagttaggcttaaaagcaagtctaccaaatccaaaaaaaaaaactcagagaaagtatgaaccaccataatgtacacaaatcaaagcttctaggaggggggctgctgttgttacacgttagaacaggcgctccgtttaggagcgaaaacacaaggggcggtatgcatataccgcgtgtaggtatcctctcatgggagtatagctctgcttactgctggagactgctgcaccctactatgtcctcttgaggatgtagccgacgacgatgcccagcaggcccacgacgagcaagaaggtgatggagaaaccgccgctgttcttgctgctctctttccgtagaagctccagctcttgccgtaacttctggttttgctgaatagcagacatcttctcctcagttaacttggagatcacagaagttgcctcagaggacttctccttggttgtgtcagcgggtgatctagatacagactgtgacatcgcggaatgattgattccattttcgtgtgcaaatgaatgagcagaactccctagttcagagtcttcagggattggactgggcgtagttgttggcacatagaccacacgcagcttgaattcatcgacaactttccctggctccttattgaacattgccgcattaatgtcttgtgctgttactccattctcagctgcaacactttgaactaggaacttatccttgcactgcatgtctggaggaggctccttctgcgcttgcattgtcactgtaacatcacaagtcgaccctggtgatacaacaccgatattagggcgcacacagtactgctttgggttggttgttttgaccttgaatgctacataatggtcagtcttattggtgagttgcatggagcatgagctctgcttcattatttcaaaggggaatgcgagctcggagggctggatctcgaggaaactcccgctcccgccgctcatggctgcctccttgcttgctccctgatccaaggatccctcctcctctccaaggaaccgaccgagcaaatcaagaactcggccacgaatccgaccctaaaaatgctttctttggcttcccacggaatcaaatgggagaaagccaagagtaattcggcggccgctgatcgaggggaacgaggggaaacgaaatccccaagaaatgagcgaaaagatgggagatttaggccgccctctcctgtatcgctgc

SEQ ID NO: 6025 - DNA, 326 bp, Setaria italica
  Peptide Sequence Number=SeqID_71999
cgcgaggacacgatggtgaagggcgcggcgagcggggccccctccggtcgccgcgacgtccacggagaatgtctgagggtggggaggaaggggatcgacgggaggttggaggcgtggagggatcgatcggagggcacatatggccgcgagggggcgggcaggtggcagcggtgcagggcgggtggcagcggcgcagagcgagcgaggagagaaggagttcggagcggggcgcggctcggagggagggggccgccggtcgcccgctccgccggccaccgtgaggccgctccaccgcccggctcccctgctccaccaccacctcagag

SEQ ID NO: 6026 - DNA, 1897 bp, Setaria italica
  misc_feature (1)..(22): n is a, c, g, or t
  Peptide Sequence Number=SeqID_72000
nnnnnnnnnnnnnnnnnnnnnnttttttaatttctgacagtgacagccatctccttttttgcaatatatgttggacatgcgatacagttttagcaatatctgcctctttatttcatattaccctctcaacccatccaactaagatcagaatttcagggctgagggctccccatctacagttgctatgcaggccttgtctctctttacttattcaaatgtccaagtggagagaaattattccacagcacaggttccctccggcacacggtttcaaaataggaaaaatatcaatccagacatggcttctatgtttttgtgttacatgcagttcacaactccataccatatgtatgcatgaattaatttgctcaggttatcattcaaatcagtatcttaggcagactttgattgcttcagaatgtttcctttggtatgtttgacactgaaccaatcatgagaaacctggaggtcagaactttgactcctgtcttcagtgaatgggatggggcctcaacaatgctatactatatgcaacagcagcttcagttcccgaatcagccttgaaaggagctcaatgctctaattacatgttcatacactttgatgcccctcaggaatactttatcctccagaaactcattattgtcatgaagtagtatcggagtatttgtcattggagaaaacccaagggcgggaatgcccagctgcctcacaaagcgtgaatctgtggttgaagataagatctcaggcttggatagctttccacctgcagaggtgatagcctgctcaaatacggaccaccatgggttcgactcattagttgcagtaaatatgggacgtcctgccacatccattactggtcctttctgcatcagctcataggtcaagtttttatgagctggtgcccattcctctttgactcttcgttttatctgttcaatgtcttcagttggagggaggcgaagatcaaagccaacctctgcttctgaaggttgtatattcatcacgaaacccgtggggcttggtatgccggccttcatgtacacagggttcactgaaaccacctcccctggacccttctctccggctttcaccttcccgaactgcgcctccttgaacccagccacagtctcgacgcaatccatcaaattgcccacggcggcgccgtcgaacatcctcgccccgtgcccgggcgcccccgccgccttcacgatgagcctccacaccagcctatccgcgtagaaaaccctgaacgcatccgtcggcgacgcctgcccctcgtcgagcatgaacccgacgttgagggcgcggaactcctccgaccgcgcgaacttctcgaacccatcgacgccgccggtctcctcgtcggggacgagcgagatgtggacggtgcgggcgggcgcgaacccggcggcccggaggccccggatcgcctcgaggtactggacggggaggcacttgtcatcctgcgcgccgcgcgcgaagatgcgccccgtggcggggtcgcggtgcgcggcgaagggcgggtgcgaccacagctcgggctccgcgggcacggagtccatgtgtgagttgaggagcaccgaggggagggaggggtcggtgcccggccaggtgaggaggagcaggggcttggtcttgcacggggtaaagtggagcgtggtggtgtggaggccgagggacgcggcgtaggggaggaggaaggcggcggcgccggcgtagtcgggggacgggtgcgcggtgcggatgcggaggtattcctggaagcgggcgatctggtcggactcgagctcggtgaaggggtgggcggggcgggggaggccggagatgaggaggacgacggcgagcaagagtgggcggtggcggagaggcgccgccatcgtgcgatgagccgctg

SEQ ID NO: 6027 - DNA, 755 bp, Setaria italica
  Peptide Sequence Number=SeqID_72001
atggtgcttattttgtaatacaactttcagggaggatgctgatggagagtgcccgcggcatttagagcactgggctttgaagatactatacaaatgtggtggtctgccattggctattgtatcggttggcaatcttcttgcactgaaggagaaaagtgaatttgcttggaagaacgtacatgacagtcttgtgtgggttgaaagcaccgatcatggaatggggcaagtgtcaagcatactgaatttgagtattgatgatctgccataccacctgaagaggtgtttcctttattgcagtatataccctgaggatttctttgtcaaaaggaagattctgattaggatgtggattgctgaaggctttgttgaagaaaaaatcatgctacaatggaggatgtcgctgatgattacctgaacgaactagtgcagcgaagcctgctgcaggtcgtgatgaaaaatgagtttggacgtgccaagcggttccaaatccatgatttgatcagagagttgattctgagtaggtcggcaaaggagggacactttgtattctcgaaatgcacaccaacatttgaatcgaacagtaatttccgtcatcttataattgatcgatgcgcaaggagtgacctcccagctccaaagatgttatcgcttcgatccctccatggatttaaaacagatttggatgcttcactgctgtctcgcttcagaattaattaactgttactaaagaactttaaattaggttaacaattaca

SEQ ID NO: 6028 - DNA, 767 bp, Setaria italica
  misc_feature (670)..(767): n is a, c, g, or t
  Peptide Sequence Number=SeqID_72002
tggcggcgggggccgaagaaggcggcgccggcgccccaggtcaccaaggcggacgcgacggcggcgaaggagaagcgcgggatcatgaagccggtgccggtctccgaggagatgcggaggttcgccggcggcgcgcccgagctcgcccgcccccaggccgtcaagctcatctgggcccacatcaaggccaacggcctccagaaccccgcaaagaaaacggagatcaactgtgatgccacgctcaaaagcttgtttggtgggagggacaaggttgggatgctggagatctcgaagctactgaaccctcacttcctgaagaactaacaaaagcagcagatggatccagcgatagtactttattggatggccaatccatgttaagtccaggttccactaggtagttaagccaaagtcatgtgatggcgtcaagacttcagactttgttgagcggttgggtttggggtgtgatgcatgtaaaaaggattcccagtgttgtggttgctcttgtgatcctgcaagggcactggtgtgcacaatgatgtgggaaatggttattcgctaatggcacatcttcctaatcgtatgtttatgcctatcttgttgcagtgaaatgattgtgatcaagtattatggtcacttgcgtagaaaccaaaaaaaaaaaaaaaaaaannnnnnnnnnnnnnnnnnnnnnnnnnnnnnnnnnnnnnnnnnnnnnnnnnnnnnnnnnnnnnnnnnnnnnnnnnnnnnnnnnnnnnnnnnnnnnnnnn

SEQ ID NO: 6029 - DNA, 641 bp, Setaria italica
  misc_feature (53)..(53): n is a, c, g, or t
  Peptide Sequence Number=SeqID_72003
gtacagagtgctatatgagggcccctatctgaggaagatcaaggtctctgganaggaaaactattgattcagcagagccatagacgatctgctacatacatcaatggcattctaaataactctaacgggaatgcagactccaatcaggctatgttgctaacgctgaggctaacatctagtatggtacgaagcagccagaaaggggtagcatgatacatcggctggaacaaccacacatgtcaactaaatggggttgctggctttctgcatctacaccggtcgaccacaattcaagtaaccagtcaaaacttgactctaggtaagcacaagctacgctgctttaggaaccccagtcagacaaagctgttcatgtctagaagaacaacagtcagggcatcgtctaaggctctgctgaatcaatagtttttccttctccagagaccttgatcttcctcagataggggccctcatatagcactctgtacagaagccttttgcttccaaacttccaccagaagggccctggtcctcctgaatgcttccttttcctcagctcatttagttttgttagccctgcctgttcctgcagtgatgcataggttggacctaaaactggccaaaattgttgctgaatcttcagg

SEQ ID NO: 6030 - DNA, 472 bp, Setaria italica
  Peptide Sequence Number=SeqID_72004
gtcaaccattcagatcatcacttattaagcaattggcattaatgtttatcagcacagctcttaaatgtcagtgccaaaggtaaccggccaagttgttcagggtatgaagcttcatgatatttacgtaattcaattattagtgatgttagctgtgcattttcgttactcactagatttggaaaaaaccgacccctgctgttcctgcagtgatgcataggttggacctaaaactggccaaaattgttgctgaatcttcaggacttgtaaaacagtcttcaagccctcttttgatggtgcagtttcaaaatgaaaacctgaactttcgccaactaaaaccttaacaacttcagtagctgatgaagatatcgaccgaagattgtatctgcacatagcaggtaggacaacaataaacacaatttgtgagtactgttgggggtatttctgaaatagatatgctgatcataaaaacaac

SEQ ID NO: 6031 - DNA, 1990 bp, Setaria italica
  Peptide Sequence Number=SeqID_72005
ttttttttttttttttggttaattccgcaaactcggtacgcaatgatagaagctaaagactcggatgccattccaaatgttcaaggttttcccatagacgatctgctacatacatcaatggcattctaaataactctaacgggaatgcagactccaatcaggctatgttgctaacgctgaggctaacatctagtatggtacgaagcagccaagaaaaggggtagcatgatacatcggctggaacaaccacacatgtcaactaaatggggttgctggctttctgcatctacaccggtcgaccacaattcaagtaaccagtcaaaacttgactctaggtaagcacaagctacgctgctttaggaaccccagtcagacaaagctgttcatgtctagaagaacaacagtcagggcatcgtctaaggctctgctgaatcaatagtttttccttctccagagaccttgatcttcctcagataggggccctcatatagcactctgtacagaagccttttgcttccaaacttccaccagaagggccctggtcctcctgaatgcttccttttcctcagctcattagttttgttagtagatttggaaaaaaccgacccctgctgttcctgcagtgatgcataggttggacctaaaactggccaaaattgttgctgaatcttcaggacttgtaaaacagtcttcaagccctcttttgatggtgcagtttcaaaatgaaaacctgaactttcgccaactaaaaccttaacaacttcagtagctgatgaagatatcgaccgaagattgtatcctccctcaagtatcaccaacaatcttccctttgagcaatcagataacaaggatgtcattatagagtatcccatcggagtaacatcacaacaaccaagagggtcacctctagctgcatcgaatcctgcagatattattgtgatgtctggggcaaattctgcagctattggaagcaccacggtctgaaaagcaaagatgtagtcgttgtctccaacaccaccacggctccaaggtatattaaccgagaaaccttgaccatcgagaattccaacctcatctgctgctccagttccaggatagaagtttccatactcatgacgatgtagtgatatgtacaatacagagctgtccccgtcgaatatctcttgtgtgccatttccatggtgcacatcccagtcaactatgaggactttctttgcacctgctctttttgcagctaatgcagccactgctgcattgttgtgaagacaaaaacccattgcttgcttcacccctgcatgatgcccaggaggtctcaccattgcaaagccattgtgaacacgcccagatactatcaaactagcaagatcagcacatagtcctgctgcaagtttggcggcacatgctgagtgtccatttgcataagtatccgaagtgaagtaactgtaaagcatgttttttgtctgctcaacactttcaatgtggtctggagtatgaaccattaggagttcctccttggtaatttcccgagggggtaccaaagcacattttgagggaaagattcctgcagcagcaagactggcagcaattgcgcgaaggcggtccggtctttctggatgtggatttggtttgatttctagctgccactgtggagcagcattctttcatcaaaaccaatcgctgtagacaccggtggtaattctgtgtcaggagataccaaagcagcctgtgcaatctgagttttaaaagcatcgtatccacctacaactgatcccttaagctcatggcaattcaggcaattagtaatctcgtccacatttggcattgtgcagttcaagcaaaaccacctattcacaacaaggctactggcagggtcccagtcactgtcatcttcctcttcatcattagagaaaaacagctcctccagtgtagcccagcttgctctctctcaaactcctgcggcagatcatcacagcatgcaacttctattttg

SEQ ID NO: 6032 - DNA, 221 bp, Setaria italica
  Peptide Sequence Number=SeqID_72006
cagcaaaaagtagaaaaattttacatcatgtgccattatttacagcacccagcaacagtaaaaatttcatggcaaattacagaacgcagctgcagatttctgcagcctaaaaaatccttaaggaaaaaaaacagaggaaagaatcgagtatgctatgaacgctggcacgaatacagtaattttctgttcatcacaaggatcccatctcctggcagttgcag

SEQ ID NO: 6033 - DNA, 342 bp, Setaria italica
  Peptide Sequence Number=SeqID_72007
caaaagcccgtagtacgtgccaaacttagctacgcacccgagggcaaaagcgcacgccatgaggcgcgacaggatggcggcggcggtggcggcgctgctgctgctggcggcggccatgtcggcggcgccggcatcggggcaggcggtggcgacatcgtgcacggcgtcgctgatcacgacgttcacgccgtgcctcaacttcgtgacggggagcaccaacggcggcgggtcgccgacgcagcagtgctgcggctcgctggcggagatggtgcgcacgggcgccgactgcgcctgcctcatcctcaccgggaacgtgcccttcagcctccccatcaaccgcac

SEQ ID NO: 6034 - DNA, 959 bp, Setaria italica
  misc_feature (953)..(953): n is a, c, g, or t
  Peptide Sequence Number=SeqID_72008
taataaccatgtcgaaatttgcatgtctgctgtccaagaaaaccataattagacgggcagcctttgcactttcaacaacatgccactgtccttctgctgaagcaaatagccattcctgagctcgagccttaggcacaataaaaactccacaatggtatacaaatgtttctgtttgcttcttggcatccaatagaacagccttgtagcaatagagcgaagtctcctgttcaccaagaatgaactgcctccttcgtcctgggacaatcactttcagatctcctatagctcctagctgaagatcacgcaatgagaggagcacatcaacaccagaagagtatgactccctgatgatgttctcatttccaagagcccgaatcacagcagttgcctgtttcatgttacagtattcagcagactgatccaatgatgattttattgtttgaactgcacccatcttccctttcaccatgaccaccatgaatgtctggaaggcagatttttttagaggattcactagctatagcttgaatattcatatcccatccaaatctgaactcagacaaaagaagtgctaaaacatgggattctgcaaggtaaggcacacaaacttccctcctgatttcaaaactctcttggcctgcaaaagaggcctcattaagatattttgtccccagttttgtcccagcccctggctccataagagcatccagtcctcccttatcaagaatgacatcaaacgacccatccgcaaactgcatgctggtgatgtccatgacgcgccagcgcatctcgggccgcgcgcgcgcgtggcggcggagcatgtcggcgacgacgacgcgggagaagtcgacgttggtgatgcggcggaaccccgcgtcgtagagccgctccgagagcgccgagctcccgcacgcgggcaccaggatctccggggccggcgccccagcccccgnatcccg

SEQ ID NO: 6035 - DNA, 905 bp, Setaria italica
  Peptide Sequence Number=SeqID_72009
caaagcaggacaaataaggatgaaaggaaaattgcaaataggctggccatcagagagaacaagccacaggcccacagtcatgagaacagcaggtgtttatgaataagattagtcatggagggcatcacattgtcccaaatggaaatttgaaaagcaagacaactttgggtctatcctgataatgcaaaccagaatataaaaataataaaaagcaagacggaccagctaccagcctaatatgattgcactatgcaattaacacacaaagatgttgggcttcgtgtaattcctaacgatctctacaaaagcttgctttcatctagttcagataggagttagtcatacacatgtgattcaaaccgataaaatattttacaaattgccatgcacatagctgggaggtatatgtttggaacataactgatcaatatgtgcctacactagatatcaagagaaacgcttccaccccaatgtgtagggacgctgccttagctacacctggaacaaatcgtcgcctcgtgtcgctgctccaagcattcgctggagccctcgtcgacgacgctccctacgatgttagcgcgtcgacggcaccgcctgccgcacgggttgtcagcctcctgcctccccggcggatccgcttccagtgacggcgtcgcctgcaactgtcccccgcggcagcagctccgcctctccttgattccaagcgacgactcggttcgagatccaagccgcagactggccgagcggcgtcgcctcccctcggcgtggcggatcgccgcacctcgcctcgttgaatggataagagatgggaggggaaaagaggggagcgttctctctccctgatgactgctctcgcgtggcgtggatacaggcggcgggacggccatggggagggctctcgcgac

SEQ ID NO: 6036 - DNA, 436 bp, Setaria italica
  Peptide Sequence Number=SeqID_72010
tctcttttttaggttttttttgttttttgtttttttaaattcagttccaggtattcatccttttgaactaacacaacagcttcttacacaattctatcagctataatccagatttcaaagtgaaatgaggtacatacatcagacgatgactaaatcatatcaacaggcaatcttataacacactatgtacagaatgtatcgcctccccaccaaataaaacatacttctccttgcgcctcatatttagatctctatccctttttgtaatgtgaaaatagtcacaaagttgaccaccctgtcatgtttcaaaacatgggcaaagttacttccaatctcatataattgattgattagatactacctatatttttcaaaccgggaacaagttacaatatgtctaatatagtcgtatgattaagttactctctactgagtt

SEQ ID NO: 6037 - DNA, 394 bp, Setaria italica
  Peptide Sequence Number=SeqID_72011
atcttgtttgcgcatcaggaatttcacctagctcctcctctgtttgtggaccgtttgggccaaacatttgctcatatagcttaacaaccatctctaactgagacttgtgtgacctaatttctccaggttcccaatactcttctttcatcctgtgcattatttcttcagcatcaacaccattgtcacctttgtcataatcatcgacataattgtattcctggaaaaaatattcatctggttcttgcccttctctgagcttatcttcaagtatgataaaccaatatccaaaatcatcatgtcctaaatgaccttccctggcacagttttcagttggcgaccactcattaaaatcaccaaccaatgaacaatagcgagcacctggagcccattccat

SEQ ID NO: 6038 - DNA, 255 bp, Setaria italica
  Peptide Sequence Number=SeqID_72012
atttattctcggaagctcttatattagttgaaggttcaaacaccgagaggaagtttgaataaaccagacaaggcaaaggcactaatgtaacagcaagaaatacggacagaaaacttatgacaaaagatgcatttccactgttattttagatcattttactgaaatgatgcatgttctcatcaagtacaatgccagaatatggaatttcatatttttcatggaaaattcataagagatgagatagactcgaaatta

SEQ ID NO: 6039 - DNA, 340 bp, Setaria italica
  Peptide Sequence Number=SeqID_72013
ttgtcgtattttgcaccttgtacgtcccaaatcatgccgattagtatgagtttagcgagtcaagctctggtttcctaggtgtttggctgctgatgactgtatgagagctgctcagtgatagatacttaagtttgtcccgatggtataggaataggaaatcgtggtttggaaatggaaggttgttagttagtccttggttatattcggaagctgccaagctatcaggtgaattcaaacccagagtttctaggcttgaaaattttaactgcttgctaaccttagctgccctggtggtaaccaaggattctgtgggtcagaaatgatagtttcatggctctgc

SEQ ID NO: 6040 - DNA, 559 bp, Setaria italica
  misc_feature (106)..(106): n is a, c, g, or t
  Peptide Sequence Number=SeqID_72014
tttatttaaagaagtcaatatgactgcactcactatttaaattgttttcaccatatccttgtggattctgttgcagaagtcttccactgtttcttcttagatgacncaataacaggatcctcgtaatctgggttcagcccttcggttttgtgtatatcctaaccaaatctaagtattcccataccttctccagaagtccatcaagattccactcaagatgagcactgtaagaaatttagggcacagaaggaagtgctttagttgttgggggtcaagagacccaaacatagcaagataccaggtatatgttcacctaattgggcagtaatggggaagtttgtccaagatttccagctcttcgagagttatctgatcaatcttgttgacaacatagatgcaaggtgtgtaaatgcggcttccttcaattacatctatgagatcatctgctgttgcatcatatctcagggagacatcggcattatggatcctgtaactacaactaacaagaataggacttttaactagtactacaaaggtacctaaagttagttagttagta

SEQ ID NO: 6041 - DNA, 1540 bp, Setaria italica
  Peptide Sequence Number=SeqID_72015
ttttttaaagcaggaacacttgcagtacaggaatcatcttatcatcatcatcctctaaagatgtggagagcatctctccatgtgttcaacgatagcggcaggacacttggtagttggtacatctgtgactcactgactccacatggcaccaagcaagcagcaatggagaacatcacagctacatgactcagcggcaaaagaaaacatgtctgcattgtcttctgttcaaggcagtataggcaaaccaagggcataaaaccatcacagcaagcaaaggcggtgttcaaggtgtttcccatgaggctgctactcaaaatcctcattgctccatccagttttgcagaacagctgtcattccaccgtatacctatattttcttaatgatctggacaacatcctcgtcctcaagctcatgctccttgccaactctctgtggcttatgtttgacgctggaaccccataccagagcatatttaaattgtttcaccatatccttgtggattctgttgcagaagtcttccactgttttcttcttagatgacacaataacaggatcctcgtaatctgggttcagccctttcggttttgtgtatatcctaaccaaatctaagtattcccataccttctccagaagtccatcaagattccactcaagatgagcactaattgggcagtaatggggaagtttgtccaagatttccagctcttcgagagttatctgatcaatcttgttgacaacatagatgcaaggtgtgtaaatgcggcttccttcaattacatctatgagatcatctgctgttgcatcatatctcagggagacatcggcattatggatcctgtactcactacagatggcttttactgtctcaaggtccaagtgtgtgtttgtcactgttgatgtaaagttgattccacccttgtccttttttctgaatgtcaaattgggtggtgtcttgttcaacctaattccaaatccctcaagttccttctcaatgagacgtttgtgggttattggttttatagcatcaagaacaatcaaaataacattgcatgtcctagccgtgctgataacctgccttcctctaccctttccatctttagcaccttcaatgatcccgggaagatctagaagctggattttggcacctttatacatgatgactccaggaatacatgttaaagttgtaaactcgtaagcagcaacctcagaaaatgttcctgtcaacttgttcagcaatgttgatttcccaacagaaggaaagccaactaaaccaacacgtgcatctccactttttgtgacatcaaatccttcacctgcaccgccaccacctttcgatgttggagtgagcaactcccgccgtaattttgcaagtttagccttcaaaaggccaagatggtgagcagtggctttgttcttctgcgtccttgccatctcatcctcgatgtccttgatcttctgcatgacagtgcgtggttcgttaaagatgtggagagcatctctccatgtgttcaacgatagcggcaggacacttggtagttg

SEQ ID NO: 6042 - DNA, 671 bp, Setaria italica
  Peptide Sequence Number=SeqID_72016
ccgcggacgacccagcagaaccgaaacgacttggcctcccgcttgtctcgcacggtcgcaccaatttccctcgctccaagcaaaggcgcagccatggccatggcggcgctgcgcggggcctcgcgctgcctggcatccggggggagcccggcggccgtccgccccatgctcctggcgcactcgcgcggaatcacctacaagctcttcattggaggcttgtcacagtttgcaacagaagacaccctagcagaagcattctctcgttacggccaagtaatagaagctaccatcgtcacggataagatgaccgacaaaccaaaagggttcggctttgtgaaatttgcttcccaggaagaagctaataccgcaagggaagagatgaacggcaaggtattgaacggccgtgtgatctacgtcgacattgcaaagcccaaactggaacgtgatgcagatgcccgcccaatagcgagaggccctcctaagccatttggcaacgactgataaaggatggcctggtgtgtagactccataattctcttctgccctctctgctatactagttcaccagttcgccactcagattcgggagctcttagataaaggtgatgtgtgataatgtggcgaattttgaggctttgcaagaacataaacacagtccgtttaaatatcat

SEQ ID NO: 6043 - DNA, 409 bp, Setaria italica
  Peptide Sequence Number=SeqID_72017
tggtggtgagcgagtgatgcttgagctctagcacggtggccgttcttgccgcccctgatttcctgctctctcctgaagaagatgacagacatgactcaagccgtcaagcgaaatgtagattcgcaaatacctcgaattttgaattttggacgattttagatgctaagattggaaagtacggtggtctgatgagcagttcttcatatttttgaatttatactctcaagtaaggactaaggtacaatgcggcaagttaaccctgaaaggactgcaagtacacacacgatggctaaatgggctaggcctgctgggcggcccgtagcacagcccaaaaaagcccggcactagctcagcccggcctatagtggatagtgctcaacctggcccggcactatgcgtcgtgcaatga

SEQ ID NO: 6044 - DNA, 1364 bp, Setaria italica
  Peptide Sequence Number=SeqID_72018
tctcctccgctccgcgccgccgtcgccccgagttccggccgccggctcccggcgccgccgctccggtgctcctcctcgtcatcggacacctcggtaccgccgagcatcggcttgcttgtggaggtggagggagttcttgcagatgtctaccgtttcggcaatcgtcaggctttcaatgtagcgtttcaaagtctcgggctagattgtgcaaattggacagagccaatatatactgatttggtcaggaaagctcgtggtgatgaggaaaggatgctggcattattctttgacaggattggctggcctacatctttgccgactagtgagaaaggatcatttatgaaaagtgttcttcgtgaaaagttgaaagctttggaagagttctcagcttctggtagcttaccactgcggcctggagttgaaacgttcattgatgatgcacttagtcgggggtatccctgtggccatattggctgcatatgggaggaatggagaaaatatttcaagatccatagttaaaaagttgggtcctgaaagaacatcaaaaataaagattgttggaaaagatgaggttgaaggaagcttctacgggcaacttgttcttggtaaaggagttacatccagtttggatgagcaacttatcagggaagcccaaaaggctgcttccgcagagaagcagaggattgcagaagaggttgcatcgatcctaaagcttagcgttgacatcacagcgtctgaaagctctgagaaggtaatagcggctctgcgagctgggtctgaatacgttggatgcgacgtacaaaactgcattcttgttgcaggcagccaacctggtgttcttgcagcagagcgcattggcatgccatgcgtagttgttcgaagcagctttactgccagagcagaatttccctccgcgaaggctgtcatggatggatttggcggtacagacttaaccgtatcaaaactactgagcaagaagtggtcttaataatgtgtcgattatcaaaactaaaggatggattggagaatgctatgaattcgtaactgatcgagtcctggcccatgagaagcctttttgtaaacatgagacacttgctgatgaaagctgtgagaagcggaaacagtaattgttttagcaattgagcaataatatgaatcagcaattcaagtattcaataaattgtcagagttggtctgaggtctgtgatctttggcttttactccttagagttgagacacacgtagagactagaaaaattaagagttggccattcattactaaaatcttatgtttccctcccatattgaatgatcaagatacatttcagataatctcatctacatgtcaagtgtcaacaagttgc

SEQ ID NO: 6045 - DNA, 471 bp, Setaria italica
  Peptide Sequence Number=SeqID_72019
cggcgccggcgcctgctacaagtgcggggagcccggccacatggctagggactgccccagcgctgacggcggcggcgggtatggcggaggcggcggcggcggcagtggatgcttcaagtgcggggagcctggccacatagccagggactgccccagcggcggcggcggcggctatggcggcggtggctacggaggaggctacggcggcggcggcggcggtggtggcggcggcgcctgctacaactgcggccagaccggccacatggcgagggactgctccagcggcggcggcggcggcggcggccggtttggcggtggcggcggcggcggcgaccgctcctgctacaactgcggcgaggccggccacatcgcccgcgactgccgcgcgtgaggcggatcagatcggatcggcatcgcgccactactacccggtggtggtcgccgtctagatctcgcccaagcctctcactt

SEQ ID NO: 6046 - DNA, 634 bp, Setaria italica
  Peptide Sequence Number=SeqID_72020
taaacaaaactaaactttaaaataaagtaactaacgttacgtacggaagtaattagactagcaccaggcaacgagggcggagacggcggcggcggcggccggtttggcggtggcggcggcggcggcgaccgctcctgctacaactgcggcgaggccggccacatcgcccgcgactgccgcgcgtgaggcggatcagatcggatcggcatcgcgccactactacccggtggtggtcgccgtctagatctcgcccaagcctctcactctttatgtctcgttcgtcggagtattgctttagttttgccgatctgggcccgagcgcccgcctccttgctatagaggagccagccgccttttttcttttcgtttcgctttggatttggttcggtttcgtaggggaactgctctgctcagttatcatcgtgtgcttggtgagtcgtcgtcgttgttcgtcgtcaaggtttaagaagaagtttaagaagtgagagatggattggttctgtgtcgctgaggggatgacaaaatctgcctccttttttttgtgctttgctgctccagatggaaaagattgttatcattattaatccttgcagtacctgcagtgcactgtgtttataaaaaaaacacggatagg

SEQ ID NO: 6047 - DNA, 228 bp, Setaria italica
  Peptide Sequence Number=SeqID_72021
gttggcgaatgctgggtaaaagcgcatatggcagatgtaggcaaagatgatgctgatcgggaggagtggcacaaggataggtgagtaatagaactttttcaggccaatgacgccaatcatggtggcctggtaaaggagtagagctgcgatgatccttgtgtgcatgtgtggccacattcgaccgttactctcgtagctaaggaacaataaaactactaaagaaaccta

SEQ ID NO: 6048 - DNA, 217 bp, Setaria italica
  Peptide Sequence Number=SeqID_72022
gacactgctgctttcacgtcatcctcagttttgcataggtacttccttttcaggtggaaaatgatgagaggaaccacgcgagagagctcgagaccataaccaggccaccatgattggcgtcattggcctgaaaaagttctattactcacctatccttgtgccacggcaccctacataaatttgacaataagggtctggatcttcttcttcagcgccc

SEQ ID NO: 6049 - DNA, 457 bp, Setaria italica
  Peptide Sequence Number=SeqID_72023
ctggggagctgccaactgaagaaagtgtttctaaaagggggagaaaaacagagaaaaagaactgagcagcagccgggttggccgtaccggaggagaggaagacgaggtatacggcggcgtcgacccctccggcggcgatgacgtcggtctccgacgcggagagggcctcgcggatccacccgacggggctgcggctcccgcggcggcgaccctcccacgggtcgagcccccgcagcaggaggctcgggtagtacaccggcgcgttcccggggcggcgcgacaaccacgtgaacaccagcaccagcaccacgaagatgacgaacgacgtcagcaccgacgtaatgaacgacgcgaagtccatctcgccgccgccccctgctcctggcttcaagccaaaaactgataacaaagacgactcagctccagacttcccacagatggaaagactagcattggg

SEQ ID NO: 6050 - DNA, 984 bp, Setaria italica
  Peptide Sequence Number=SeqID_72024
tctagttaactacttgttgctactcggtcatggcacctttgattattccatttggtgttgcatactttgctcttggatggcttatagcaaaaaaccaaggttcttagagtttatgttcctagctacgagagtaacggtcgaatgtggccacacatgcacacaaggatcatcgcagctctactcctttaccaggccaccatgattggcgtcattggcctgaaaaagttctattactcacctatccttgtgcgcatgtgtggccacattcgaccgttactctcgtagctaggaacataaactctaagaacctggttttttgctataagccatccaagagcaaagtatgcaacaccaaatggaataatcaaaggtgccatgaccgagtagcacagtgttactgttgcgatgagcatgtcatttggaaccctggtgctatatcccaagtctcctggataccatgctgctttcacgtcatcctcagttttgcataggtacttccttttcaggtggaaaatgatgagaggaaccacgcgagagagctcgagaccataaccaacaaagaatctgacaatataaacaatcagagagttaacactcgatagctgcagttaaacatgtttaggtttcaaaagctggacaataagtaattgcagaagtgagataaaggaattacttcagggcaacgaatgtgaggaagaatgttgcacctccaggcaggctggtggccagcatatttatgatcacagtaatgttagcgttatttaaaatagttttcaaagaggtgattaatgacttcccaagtgtatagataaggaagacattgaaaacaataaagtagaaatattttcctgctgacgccctgactacatggctctgagaagggattccctctgcttttgagagaaacataagaaaagcaggcagcagggctaggaacacaatgagtgcaatctgtggcaggtaagcctgcaagatggtcttgat

SEQ ID NO: 6051 - DNA, 151 bp, Setaria italica
  Peptide Sequence Number=SeqID_72025
ccgcgaggaggaaggatgcccgttccgtgaagatcaagaggagcaaggatgttgtcaagttcaaggtctcacgagaagatgccgaagcagatccatgagatcaaggacttccttctcaccgcgaggaggaaggaagtccatgagatcaagg

SEQ ID NO: 6052 - DNA, 545 bp, Setaria italica
  misc_feature (485)..(485): n is a, c, g, or t
  misc_feature (494)..(494): n is a, c, g, or t
  misc_feature (542)..(545): n is a, c, g, or t
  Peptide Sequence Number=SeqID_72026
tactttagttggtttttaagcttaagtctagtcgggtcattgttcgtcgatgatgggtaatagctatgagatctgagggacaggaatatccttctttttaatttgtaatcagaactttgtgaatgcgccttttcttaacttttttgcgtttacagtttgccttcaaattgttgaaaatgctgccccatttttcatctgctgaatgaagtttctaatccggtagtgcaatgcacctctaatttgtgcgtcatttttgatgtgataatatccattggtgcaggtttgagcgtccaggaggtttgaagttaagacaacatctagatgaactaccgaaagcttccttgttagcagagcatgctcgtctatgtacctttggaacctacatgattttagacctgccagtcatggatttgtagatctcggattttgggagaaaaataccattttactgtgttccaggatgcagcttttaacaaaaaaaaaanaaaaaaaanaaaaaaaaactaaaaaagaagaactagaccaaggacacacagggatannnn

SEQ ID NO: 6053 - DNA, 418 bp, Setaria italica
  misc_feature (416)..(416): n is a, c, g, or t
  Peptide Sequence Number=SeqID_72027
ccagccctcggggaaagatgccgaagcagatccatgagatcaaggacttcctccttactgctagaaggaaggatgctcgctctgtgaaaatcaagagaagcaaagatgttgtgaagttcaaggtgcgctgctccaagtacttgtacaccctctgtgtctttgatgcggagaaggcgaacaagttgaagcaatccctccctccaggtttgagtgtccaagaaatctgaagattcaagcaagagagagatggtggtgtagcgggaagcttttcttgccatcatcagaagtcttctgaattatcttgaaaaactttggtcctgtgaacaatgtagacttcgccatggattaatattattggcagttttgtgtgcggggagagaccaatcccgtccagtacagatatgtcaatctgacanga

SEQ ID NO: 6054 - DNA, 418 bp, Setaria italica
  misc_feature (396)..(396): n is a, c, g, or t
  Peptide Sequence Number=SeqID_72028
tgatgttgttccctcggaatcggaggacatgggagatgtccgtcccaggcgcgtgccgcgggaaacgatgctcaggcgaaatggaaggaacaatggcgtggcaagatgggaagcggcaggcaccatagctgctggcagcaatgatgacaggggttggagtggtggtgctttcttctcggactcggaacgagcaagggaaagccatagtgagcaacgatggcaagaaacaagtagtagtgcaagcacaaggaagcgtgccagtggaagagggaatgccacaaacacatcagcgagaaatcgtgtcggtcagaggggtcgtgccggtgctggttccttctctgactccgaggccatgcatggtggttctgagccaaaatggagatcaaggaccaaagntggcaataggaatggcgccggg

SEQ ID NO: 6055 - DNA, 948 bp, Setaria italica
  misc_feature (1)..(36): n is a, c, g, or t
  Peptide Sequence Number=SeqID_72029
nnnnnnnnnnnnnnnnnnnnnnnnnnnnnnnnnnnnttttttttttcaacattggttttaaaagctgtagcaccagatatttacagaggacatcattcagtgctaggcaacttgcctagctctaagaggttcagcgttgatttgtgttccagcacattatagccgagcacttatgtacagatgtcaattctcatttccctgatgggaaattaccaataaccgacatcctacatagaaatagacagttttcaggatgctaggagtttctgagcggatgccaaatcaaatgccatacttagacatcctttttggcgtcagaaatgtccttcaggtcacgctcactctcttccgaccttccatgggttgcttcctctagcatcgtcttgttctgttttgagacagcctccaggttcttcttgagccttcgaatttctttgacatagttgtggagccggtcgatgactagagcaaggaataatgagtatcccatgagcgaggcctcgaggaggtggcgcgcgaggaggacctggtcggtgggggtgagccccacgaccccggcaccgtcgagctccccctcggcgcggccgcggatctgggccatgctgtggaggctggatgcgagcacgacgaggacagtggccgccacggtacgcaccatgacgggcccgcgcccccgcttgaggcggtcgagcgcgagcacggccagcttccgcagcggcgtcttgaagagcagcgtcgccgccaccgcggcctccgccgcgagcaccgtgaagaggagctggatcatcgcgccgggccgtcggcggagggaaaagacgaggaggagccgaggaggcaggggtttggctttggccggggtttgttggatcgaggggttcgttcccctcccttttcttgacgcctgtcgccggagcggtgcctttaccgcgtggttgggtttttggaatc

SEQ ID NO: 6056 - DNA, 1152 bp, Setaria italica
  Peptide Sequence Number=SeqID_72030
ctgctgcgcctggcgcacaccctgcggctcgtgcgcccgcccgtcgtctgggtggtcgtggagcccgccgccgacgcgcccgccacggccgaggtgctgcggggcacgggcgtcatgtacaggcacatcgcgttcaagcccgaggagaacttcaccacggccgccgccgaggcgcacgcgcagcggaacgccgcgctcgcccacgtcgagaagcaccgcctcgcaggcgtcctccacttcgccgacgccgccggcgtctacgacaccggcttcttcgaccagatccgccagatcgaggcgtttggcacatggcctgtggcaacaatgtcggcaggcgagaagaaagtggtagtggaaggtccactatgcagtgcctcaatggtcgtgggctggttctcaagggacttcaacgatgggactacccgtgcagtgacatataacacagaagctgactcgaatcctgctggtgctgctggtacacgagcccacacaattgatgtctcagggttcgcattcaacagttctattttgtgggatcctgagcggtggggacggccaacatcattaccagatacttcacaggattcgatcaagtttgtgcaagaagtggtactggaagaccgagctaagctgaaggggattccctctgattgctcccagatcatggtgtggcagtatagcgtgcccagctcacaatagaaggtagtaagaggatggcattttcagaaaggggaaattggcggaatcggagtcgatgtaaatgtggcgataacaaaaggaaaggaagaaggtccattactaagttttcttgtttcttttggggttcccttttttctctctctatctcatttttgggtcttcaagtttggagttgggggccaatgatgaattgtccgtgggagatctgcccccgaccggaaaaaagaaaaaaaagcgatagtatttattcagatttatttgtgattcttttaactcggtgctgttgtgcttggggattcctctggtggaattgcaataaaaccatgtgtaggaggaaggaatgtacttggggaagaaaaaaatggcaatggcatgaggaggaagagtgcgttgtgttagttgtggcatgaattccagcaattaccatgtcaagaaaaagaatcatatatatgc

SEQ ID NO: 6057 - DNA, 409 bp, Setaria italica
  Peptide Sequence Number=SeqID_72031
tttcacagcatatgcagatgtgtgcttcagggagtttggcgacagggtttcatactggactactctggatgaagccaatgtcgctacagttgcatcatacgataatggacaatttgcacctgggcgatgttctgatccattcggagtaacaaaatgtacggtggggaactcaagtgtggaaccatatatagcacagcataacacgttattggcacatgcatcagctgccaggctgtatagaggaaaatatcaagcaatgcaaaaaggagttattggcataaatatattcacaatgtggtcatacccattaacaaactccactgctgatttaaaagcatctcagagatttcgggatttctacttcggctgggtactagagccattggtgtcctaatttaggtttagttta

SEQ ID NO: 6058 - DNA, 893 bp, Setaria italica
  Peptide Sequence Number=SeqID_72032
catcttgtccgtattcatcacattaaaatttgttgtgttcaagtagttttactacagaaattcttaggctgaatgtttcagcattaattctgaaagtgaaaatattgatctgttgcttcctatgacctaaaccatatgatgtttcaggatgacgtcaagcttgtagctgacactaacctggaggcttatagattctccatctcctggtccaggcttataccaagtattaaccgttttttaagtaaaaaaaaataattgatgtactaagcattccgcgtttttaattaaacgttcttaaattaaaatatgcagaaggaaggggagatgtcaatccacaagggttagagtactacaacaatcttatagatgagctagtgagacatggtgtccaagtacatgttatgatgtgccatttggatctccctcaggttctcgaagatgagtatagtggatggttaagccctagaattgtggaagatttcacagcatatgcagatgtgtgcttcagggagtttggcgacagggtttcatactggactactctggatgaagccaatgtcgctacagttgcatcatacgataatggacaatttgcacctgggcgatgttctgatccattcggagtaacaaaatgtacggtggggaactcaagtgtggaaccatatatagcacagcataacacgttattggcacatgcatcagctgccaggctgtatagaggaaaatatcaagtgagtacctgaaaacagaagtagtgtcctagcaactagcattagtaatatgttgccatccaagattgatccttacatttgaatttagttttgctcatgaggaaaggcatgttttcttctaactacaccaataccattccctttggtttctcaaagtctatt

SEQ ID NO: 6059 - DNA, 296 bp, Setaria italica
  Peptide Sequence Number=SeqID_72033
ataagaatgttccttatgccttttcagccgttctatctcttcctccaacccaaatttacccacctctacacaggctggcaaaggagcgttctgcaactggggctgctgcggttggctgttcccccagttgcagaacgctcctttacccacctctacacaggctggcaaaggagcgttctgcaactggggctgctgcggttggctgttcccctgcaatgatggtttccttctattgatagtcttcagtagatgtttttgtcctctcagaaacccctcgtttgcaaattcccatctgg

SEQ ID NO: 6060 - DNA, 1515 bp, Setaria italica
  Peptide Sequence Number=SeqID_72034
ctggggcgtaccaagatgggaatcattcatgggtggaacattgaatccccccgcatataggttggagtggttgatatatcagcatatcatttcagaaaaaggacaatcttaaacattaacaaaagggtaggcgacgctgtcaaagcttattaccagaatcccagcctaccttaggacaatacatcttacaccctgtgatttggtgatagaaggcccatctgttctgtaaggttagccatgtgctccagtttgttccatccattctcctgtggtgtctcccttgtatctagtacgcctgaatcaacttcatcattgtcgacagagagagggctgccaaccaggaactgctcccagaaggaatcgacgatggctggcaaatcctgagtctcatcgttgtacaaaatctcatcagtctcgatggggacactatcatcaccctcttcgggcagggggaactcagggccaggcatcccgaagggtcctccaggaatatcagagtcttcaggtactatgtctgccagatctgggaattccggaatagtgagatcacctggggctggtgctataggctttgaaacaggaggcacaacagtcatgttgggaacttggttggatgagttgctgtccaacacggctgggcactgaatttcaggagccactgaagacgaacagatagctgaaagcccagagctcgcagccacatacggcaaacctgaggtagctggaacctctgcaagggtgaccccagaattcctggttgatgaagagctgtcaaaaccttgagcagctggcatataattctccagtagaaaattatccgaattgcccacagattcaagtctatgtgaagcatctagctttaggatcttccttagcattgctttggcagcttcgttgatcataggctgatacttgataatttgaccgtccaatgaggcagaagcactttcagagtctaggccaccatcttgcttgggtagcctcctcttcttgttcacggctactattctcctcctgctgttctcgttttgctgtacaaactgtgctaggaaaccaggactttgcattgctttggccaggaaagacatcatctgttgctgtcgtgactccatcccttgaagacgcttccccagagtctgcagctgatggtcagttgtttgctgttgctgtctcagcctgacaagctcttgcataagaacattcttatcccttttcagccgttctatctcttcctccaacccaaatttacccacctctacacaggctggcaaaggagcgttctgcaactggggctgctgcggttggctgttcccctgcaatgatggtttccttctattgatagtcttcagtagatgtttttgtcctctcagaaacccctcgtttgcaaattcccatctgtctggatcaacctttctaaacccgtaggtgttgagttgcctaacgaaggaggagaagttgctgtgcttgaagtacttgggcaggaggtcccttgcgaactcgggcgtgttccagacg

SEQ ID NO: 6061 - DNA, 1844 bp, Setaria italica
  Peptide Sequence Number=SeqID_72035
gggatgacgatgtagttgggtttggtgattccagtggtaggggattgaaaaagtttgattttggcttgtcagagggtgaggatgatgatgatgatgatgatgcggtgggggaagttggtgaggatgatgagccatcaggtttcgaagatgatccctttgatgatgagggtgctaaggataatgtgagggagattgcgggaaataagtccggctcttttgagttagacaaagaagagccagctaaacagaagagagacacaagaagtactggaggtggtgattcttatctgagccagaagaggtttgatgaatgcccactatctcccttgacacttaaaggtgttaaggctgctaattatgaacgaatgactgctgtccaagaggctactcttcctattatacttcaagggaaggatgtactagccaaagcaaggacaggaacaggaaaaactgtagctttcttgcttccagccattgaagttgtctcaaaattaccacctgttgatcgtgatcaaaagaggcctcccatcagtgttgttgtagtgtgccctacacgtgagcttgctgatcaggctgctgcagaagctagcaagcttcttaaattccatccatcaattggggtgcagcttgtaataggtggcactagaatggcgcttgaacagaagcgcatgcataccaacccttgccagattctagtagctactccaggaaggcttagggatcatatggagaacactccagggtttgctacaaggttaatgggcgtcaaagttctaattcttgatgaagctgatcgcttgctagatatgggattcagatctgatattgagaaaatagtggctgctctcccaaaacagcgtcaaacactcctattttctgcaacagttccagatgaggttcgccaagtatgtcacattgccatgaaaagagatcttgaatttgtcaacactgttgaagaaggaagtgaggaaacacattctcaggtgaagcaaatgcatttagttgcaccactagacaaacaattctctatcctatatggtcttctaactgaccatatttctgaaaatgttgactacaaggtgattgtgttctgtacaacagcaaaagtaacaagccttgttgctgagcttctatctgaactgaagttgaatgtacgtgagatccactccagaaaacctcaaagttacagaactaggatatcaaaagaatttaaggagtcaaaaggtctcattcttgttagctctgatgtatctgcccggggtgttgattatcccaatgtcacactagttgtgcagttgggggtgccaactgacagagagcaatatattcatcgacttggtagaactggtcgcaaaggtaatgaggggcgggagtcttattattggcaccatgggaagaatatttcttgagaagtatcaaggacttacctcttacagaagcaacacaaccattaattgaccaggacagtaagaaaaaggttgataaggctcttgcacatgtggaagttaaggacaaggaatccgcttaccaggcatggcttggttactacaattcaaataagttcatcgggcgtgacaaataccagcttgtatcacttgccaatgagttcagtagaagtatgggtctcaataaccctcctgcagtgcctaagcttgttctcaggaagatggggctgagcaacattccaggtctgcgggcgaagtagtctaatcttggaagccatgttggcgcataatctaacattgcctataaaacggtaccccttggtaggagtggagctagcttactaaaacaaggtttacactttactacacaagtgtgagctttcataatactgttatcta

SEQ ID NO: 6062 - DNA, 451 bp, Setaria italica
  misc_feature (369)..(369): n is a, c, g, or t
  Peptide Sequence Number=SeqID_72036
acacaatatggggtagcatggaccagtaattcagaatcaaaatactaaatgttgcaccacagaaagcgaactaacagaagcaaatccgtagtgattttctttcctaaaaaaagatcttgttctatgcgaagaatattacatgggggaataaaggtgtgtggctgatacaggaacaccaatctactacttgggtccaaagcaccttagtagataaaataaaaacatggaaaattggcaattgttcttctataactcttgcaacactacataatttgatgaaatgaattacgcatgttagtaacttcatgtaacgggacagaatgttcatgagcaaacagaaaaaaccaactcagttcttaattgcattangcaagggaaaaaaataattgaaagccttctcctaagcattgtaccacaatacaaaaggaaaaggaaattgccatgatacaac

SEQ ID NO: 6063 - DNA, 797 bp, Setaria italica
  Peptide Sequence Number=SeqID_72037
tttttttttttttagtatctaccaacggaccattatatggagatgtttaaatgcatcacacatcagttcactatattacgtaaggatgccattacatcgcatctcattatgagcagtacagcatgatgccaccagcagcaccgtctaattgatgcatcatccaaaaaatagcagtttgcatctataaagcaggagaatttggtgtagaagttttgcttaacgcctagttagaatactagtactacaatagctctgatcgtaattgtcacttcctaccactacaatctgtgtccttcccagctgcagtgttgacttgtcggttgagataggcttcatagatctccacgacgagccttgggtccttctcgacaagctccttgtattcttccctatctgcaagtgtggacatgttgtccatgagcacagaaagggaggactccagcagctgctttgcactgtggcgatgcgcaaaagcgtagtgggtaatggcattatcgttgttcactttggatgttatgaacttctcacagtaggccttcaggtgctttacttcgtacttctcagccaacaccaagagatcagatgccatttgttcatctagaagagcttctgctgtgtacatgtaatggacaaatgcacgaaggacgtcatatgacacatcatagattttgatgatgccactcctgctttcttccatctcattctcaagcatcgctctgaaaactggagatctgctggcgaggatgacgcgatgggcgggacggcgggcgtgtcgggacgcgcgcggcgtcgccgtg

SEQ ID NO: 6064 - DNA, 163 bp, Setaria italica
  Peptide Sequence Number=SeqID_72038
aggggactaatgtaattttataccaaagtaaggtattcaaaaggctacatggtaagtacagagcttaaaacgttgaactttgttgcaacagtaaacagttctataggttcaacgttttaagctctgtacttacattagtccccagagaaaggttttccaaagg

SEQ ID NO: 6065 - DNA, 481 bp, Setaria italica
  Peptide Sequence Number=SeqID_72039
acaattttttaattgaataacaaatcgtcttttttttgcagctctttcaatttagatgacaaaaaggtatgagaatgaaagtgaccattatttactatgtaatcatcctgaatagattgttcgagcaatttatgatgttgaggaagcaacagctcatgcatggcagataattttggagctcaaggtttgagtcaaattatcaaaattgacaatttaatgtgttgtttgctcctcatcattttatgactattgctaaggttacctgcaaactgtagatgatcaaaccagagactcgtgactcactcattaggtttttacaaattttggtgtctcatcatccatccaagaggtgtcgaaggggatctgccaacgtacttattaactttgatgatcactggcatacaaaccaatcattaagttcacaagagagttctacattatttaactaagttgtttacttaggtttagtttttacttttta

SEQ ID NO: 6066 - DNA, 1766 bp, Setaria italica
  Peptide Sequence Number=SeqID_72040
cgccggagtcgttcgcggtcgtcgagttcttcgcccactggtgtccagcctgcagaaactacaagcctcactacgagaaggttgcaaaacttttcaatggtccagatgctgcgcatccagggattattgtgatggcacgggttgattgtgcatcaaaggtgaatctggatctttgcaataaattctctgttgatcattatcctttcctagtgtggggtccaccagcaaaatttaattccccacagtggaaaccgaagcaagagaatagtgaattagaattaattgatgatggaagaacagcagagcgtttacttaaatggataaataagaagatgggaagctctttcaatttagatgacaaaaggtatgagaatgaaagtgctctcccaaaaaatgcttcagatcctgaacagattgttcgagcaatttatgatgttgaggaagcaacagctcatgcatggcagataattttggagctcaagatgatcaaaccagagactcgtgactcactcattaggtttttacaaattttggtgtctcatcatccatccaagaggtgtcgaaggggatctgccaacgtacttattaactttgatgatcactggcatacaaaccaatcattaagttcacaagagagttctacattattaacaagtgttacaggagacaacatctgtggagagggggtgccacgtggatattggatgttctgccgtggaagtaaaaagaaacgagaggatttagctgtggtctatgggttttgctgcattcactaactgtccgaagtggagatggagagagccaatcaacatttacatcaatttgtgatttcatccacaatttcttcatctgtgaggaatgccgcaagcacttctacgaaatgtgttcaagtgtatcagtccccttcaaatctgcccgtgacctcaccctctggctatggagagcacataacaaagttaacgagaggttgatgaaagaagaaaaggatttagacactgctgatccttcatttcctaaggttatctggcctccaaagcagctctgcccatcgtgctaccgttcttcaagtaggactgctgatggagtcacgcaggttgagtgggacgaggatgaagtgttccatttcttggttggctactatgggaagaaacttgtatcttcctacagggagacctccatggattctcatcttcaagtaacgaagcaagtaggctcaatttctgatgattcttccgcttccagcgctgcaacagtcccaatcggagctgccctgggtgtcgctgttgctagctgtacatttggggcactggcttgcttctggaggacccagcagaagaacagaaagcaaagaaagaactggaactgaaaatagtgcaccacttgcaaaccctaaactgcatgtctgcatcaggaggagcctccgtgaatgtatatttactgggcgggttatcttggcaagtacccactcaaaagatgaaaaacatacagaagtgcgaagatttactcgtgcctgagtcccgtgattgttttgtgcaacgacgtgaactttgttgcaacagtaaacagttctataggttcaacgttttaagctctgtacttaccatgtagccttttgaatacctttctctggggactaatgtaattttataccaaagtaatgagtgaaaactaaaattaaaattttggtccagcgtgacttatcctgaactgcaaaagaaacgtaaagaaaaacttaaaaataaaacctaaagaaaaaactaaagaaa

SEQ ID NO: 6067 - DNA, 625 bp, Setaria italica
  Peptide Sequence Number=SeqID_72041
ctgctcccccctcgtctccgggccgcggccccccccggggacgcccgctcctcaccgtcagcaaccacatgtccacggtagatgacccgcttatgtggggattcaagggttttccaacttcggatgcaaagcttggaaggtgggtgctgacagcagaagatatttgcttcaggaatgtagtcatgtcttacgtgtttcgacttgggaaatgcgtacctatcacacgaggggtggaatctatcaagaacacatgaatgaagctcttgaggtgcttatcaatggaggctgggtagcgcaagatgatcagccaattacgtacctatttatctgtcatcaacagccgccatatccctacttatggactcttgcctttatttaaagctcttgaggtgcttatcaatggaggctggttgcattcattccctgaaggaaaaatagcgcaagatgatcagccaattagaagattgaagtggggaactgccagtcttattgtccgagcgcctataactccaatagttttaccaattgttcactctggttttgaaaaggtcatgccagagacattgttctttggacggcgaccaccagtgccactctgcggcaagaagatagatatcatcgttgg

SEQ ID NO: 6068 - DNA, 289 bp, Setaria italica
  Peptide Sequence Number=SeqID_72042
ctcggcgtccggctcagcggcctcgccctctcccaccgcagcatcccttgttcccaccgacgcaaaaccctcgcggacctgagaaaccctagagaagagatggcccccggcggcgaggccaaggcgaacccaggcggcggtggcggcggaggtggtgggaggaagcgcaagttcctcccccacgggaagccggtgcggaagggggcctacccgctgcgccccggggtgcagggcttcttcatcacctgcgacggcggccgcgagcgccaggccacccgcgaggccctct

SEQ ID NO: 6069 - DNA, 2792 bp, Setaria italica
  misc_feature (2765)..(2792): n is a, c, g, or t
  Peptide Sequence Number=SeqID_72043
gcgccggggagcacgagggcggcgagtcccttccaggtggagtaattggtggagtaggggaggggattggagcgagcgcggcggaatgtggcggcggtttgcccggatctgcgccggaggctgcgagcgcagtggatggaggggacagcgcagagcaatcttctggaaatggtactgggcatcaagtcatcggagatgaaagcgccgaagatcacctcatcagtagcagtaatattccttctgaaatcacttctgaggccagcaagatggatgatgataacctgactacagtggatacacagtactctgaaaaagaaacacctattgaggatggggatccatctgatccagcagttggttctgagcagctgaaggacattcccacttctattcttttgtcagagcctgaagatggtgcaaaatgcacttcagaaatctctgaacatggaaaacagaactcactctctgaatatgaaacacagaactcgactgctgtgcctttggaatcaaatgcaactggaggtggaacttctgaacagatggatgatgtagccagccaagtggatgggactgctgtgattgaggaagatgatacgatcaacaccattggcaaaaataaatttagtgaggacaaatctatagatggtgatgactttgatctctcctgtcaagaaaatctgcaaactaagattggtgaggagcacagtaacactggagtggtagaagaatcatctgacaagaatctcaatgcaattcacaacaaagaaatcccgagcgatgaagctgaatcaaatcagcaaaacaagcttatgataactgactcatttgagaacattgctaacattgatgtgcccgttgagtcttctacagagaaatctgttggtacagaggatgacatgcttaaacttggtacggttggttcctactcggagacacccgatgtcaaacctcagcaacaacccgactctacctctgaaacagaaggtcatctggcagtctctgaaggagcagataatgttgatgaacagcactatcctatttctggtggtacagctaacgttacagagaatatctgttcatctggtgtgacaatggatggcagcatgcagcaaaatgtgactgctggtactgttgtgacatctcaagttgacatagtggagttgagtactcccgccatgccacatgaaatcaacatggttgctaggacaaataatgttgatgaaaataggcagaatgagaaagatggtacagaccttacttcatatggaggtaatgagctacatatcgtagaaaactttgaagaaaagcaggagaacaaagaggtcattgtagatcccattcctcatgaagccaacacagcttccagtgtggtacaaagcatgtctagtgctgaagaaaaggaacagattgaagagttcattgcgaatcttgctcctgaagtgaccagtgtgacaagtagcagagacatagttgaagaaaagcagggtgagattgatgtaaaaacaagtggtgagatagatggtgcacgcagcatggaaactgctggagaaaacaatgatgctacctgggagattaatgcaggaaccagcacagatgatgttgaagacaaagtgcagaatgaagaattcactacaggccccatttctgatggtatcaacatgatatgcagcagtactaatgagggaaagatgcataaggaagaagtgaccgagagccttggttgtcatgagaatatcgtggtgcgtggcacagatgatgttgaagaaaagacgattgaagagactatggcagatgctacatctagcaagtttagtttggttacacctactgacagtgttgaagagaggaaggacgaagaaacaactgcagaccctactttgcttgagagaagtgcagagcacaccatagataatattgacgaaaggaagaatgaagaacctgttttggatcctactactaccacagccaccatacgcagtataggtgatgttgaaggaaagaaacagaatgaagaaactacagcagatcctagttctggtgaatgcaacgggcttccaggcacagacaatgcagaagcagaaaacaagaaggaaaagggagacattgccaccacaggccctgctaccacaaatgtcgtcaaagaaataggagaaactgaagatatgtcctcaaaggagatcagcaccattgaaagcacggatgacctcaagagagctgctgatcagaacgaagagattgccgacaaggaaatggtcatggactcagacaagaaccatgtctcgttgaaggttctcctcgccgacaagaacgtggaaaccaaggataaggagaagaagacaagcaccaaggaacgggtactgtcgttcaggcggcgtacgtcaaaagacaatgtgtcaccggtgaagcctggttcgcccaaggtcggttcgggacagcaagactggaactcccctgccaggttgcctgtcgagaagaagcccaagggaaggaaacagcagtgggtgccgtttatttgctgctcgtctgtacaatagttgtgctccatttgtttgctgaatcatcagctagggacttgtccatacgctggtgataactcgattgaatagtcatctcaggaccttcgctgcaagacatgtttggatcttgctacttggattgcgaactcggtttgccgtttgtatgttatatgttggtgtaaattaactagacatgtccagaatggcagaatagtatttcaagtttaacctgcaaatatcgtgccgttnnnnnnnnnnnnnnnnnnnnnnnnnnnn

SEQ ID NO: 6070 - DNA, 200 bp, Setaria italica
  Peptide Sequence Number=SeqID_72044
gttctagctggggaggcaggcaggcaggcaggcagctgggtatccccctccctcctccagctaggaacttgaaggatcgatgctttctttccctcaaagcaaaacccagtcagcacacccaagcaaagctcactcactcatctttcttgtgtagagtatttctattccattccagagagagagaggacaacgccagccag

SEQ ID NO: 6071 - DNA, 298 bp, Setaria italica
  Peptide Sequence Number=SeqID_72045
cgcgctgccgaggctgcaggagttcaacgtctccaacaatttgatgtcggggaggattccgtccgccgtagcggctttcccggccgcggcgttcgacgggaacgtcggtctgtgcggtgcaccgctaccgccgtgcaaggacgaggcgcagcagcccaatgcatcgggggccgtgaacgcgtccgcggcgggggactgccccccggcggctgccatggtggcgccagcgggcgcggaggcgcaaggaggcggcggcaaggggaagatgagccgcgccgcggtggtggcaatcgtggta

SEQ ID NO: 6072 - DNA, 547 bp, Setaria italica
  Peptide Sequence Number=SeqID_72046
gtgggtaacacttgagcttcaagttgactaaataccgttacaaataagaaaaataccttcaaagaaagaatactatgttggaaagataaacatgtttcagttggatcttagaatacagctggctcagactaaaatgtttctagcatacgaccttcagatcggtatacacggacttaatagttaagacaagctagcacagaactgttttcaccagtaagccactcaaagctagcaacctgatagtaaacagatcaatgcttgtgtctatacaaagaagcacagctctatgatattcatgatgacataaagggaatctttcccacgaatctgaccaggtagactcataaaccttattagccagttaaaaatttaccaaactggcctagcagaatctaacagaactaatgggtagttacgacatacgaccatcacatgagcaattacattacctaaatgggtgacagtattggtatcagttaaaccatgtatcaaaagtgtaatgctcaataaatggatcaaccttgttcagttttcgtttttttaaata

SEQ ID NO: 6073 - DNA, 333 bp, Setaria italica
  Peptide Sequence Number=SeqID_72047
gccagcacccccccaatccccccaccccaatcccccatcaatggcttccgacggcaccggcgtcgtggccctctacggcggcggcagcggcaacaacaaggtcaaggtcatggacgcctcctccaagtcccccgccgccgccgccaccttctccgtcaaggtcggcctggcgcagatgctgcgcggcggcgtcatcatggacgtcgtcacgccggagcaggcgcgcatcgccgaggaggccggggcctgcgccgtcatggcccttgagcgagtccccgccgacatccgcgcgcagggaggggtggcgcgcatgtccgacccgggactcatccg

SEQ ID NO: 6074 - DNA, 575 bp, Setaria italica
  Peptide Sequence Number=SeqID_72048
agaccaagcagctgggccgcctccccgtcgtccagttcgcccgggggagtcgccaccccggccgacgccgcgctcatgatgcagctcggatgcgacggcgtcttcgtcggctccggcatcttcaagagcggcgacccggcgcggcgggcgcgagccatcgtgcaggccgtgacgcactacagcgacccggagatcctcgccgacgtcagctcaggcctcggggaggccatggtcgggatcaacctctccgacccaaaggtcgagcgctacgccgcgcgctccgagtagcgctccgactcaggcagcaggcagtcaggcaggcgggcggcgatgaggctcctccatctgcatcgtcagggagcccatcgactctataagaaaccaaagaaaactcgaataaaaaaactcttccattcccttcctttttgagtagtatgtcttttttttttgagtagtatgtcttgtttgttttccttgcttgcaattgcaatcatccaaatatccaatgtcatgtctcttctgtttttcggggaacaaagaccgtatccgcattgctatgcattccttcctcctga

SEQ ID NO: 6075 - DNA, 1459 bp, Setaria italica
  misc_feature (1361)..(1459): n is a, c, g, or t
  Peptide Sequence Number=SeqID_72049
tcctcctcctccacctcctcctcatccacctcccgagagagagggagcagagagactagtaagcagatccagagagaaacccaaccaatcccccaccccacctcccaagagagaacgaaatggcttccgacggcaacggcagcggcgtggtcaccgtctacggcaacaacggcgccgccctgctggagccctccaagcagtccaagtccaccttctccgtcaaggtcggcctagcgcagatgctgcgcggcggcgtcatcatggacgtcgtcaccccggagcaggcgcgcctcgccgaggaggccggggcctgcgccgtcatggccctggagcgcgtccccgccgacatccgcgcgcagggcggcgtcgcccgcatgtccgacccgggcctcatccgcgacatcaagcgcgccgtcaccatccccgtcatggccaaggcgcgcatcggccacttcgtcgaggcccagatccttgaggccatcggcgtagactacgtggacgagagcgaggtcctcaccctcgccgacgacgcccaccacatcaacaagcacaacttccgcgtccccttcgtctgcggctgccgcgacctcggcgaggcgctgcgccgcgtccgcgagggagccgccatgatccgcaccaagggggaggccggcacgggcaacgtcgtcgaggccgtgcgccacgtccgctccgtcatgggcgacatccgcgcgctccgtaacatggacgacgacgaggtcttcgcctacgccaagcgcatcgccgccccctacgacctcgtcatgcagaccaagcagctgggacgcctccccgtcgtccagttcgccgcggggggagtcgccacccccgccgacgccgcgctcatgatgcagctcggatgcgacggagtcttcgtcggctccggcatcttcaagagcggcgaccctgcgcggcgggcgcgagccatcgtgcaggccgtcacccactacagcgacccgaacatcctcgccgacgtcagcgcggggctcggggaggcaatggtcgggatcaacctcaacgacccaaaggtcgagcgattcgccgccagatccgagtgaccatttctgccgtctattatcaaccaatctatccttccttcctttgctgttgtcttctttttagtagcaataaagtaatttctattactagtactgcatagtacatctcccatccgaatatctgatccgatccgatcggtagcctgcttctcgatcatccatctctccgtcaataatggatgaatgaagaaaccaacctatgttgttcatcgatgatgatcctatgcatcatggagtgaacagcctgccctgcttcgatgaatttgtctggctgacgagccaatnnnnnnnnnnnnnnnnnnnnnnnnnnnnnnnnnnnnnnnnnnnnnnnnnnnnnnnnnnnnnnnnnnnnnnnnnnnnnnnnnnnnnnnnnnnnnnnnnnn

SEQ ID NO: 6076 - DNA, 538 bp, Setaria italica
  Peptide Sequence Number=SeqID_72050
aaccctaaaaacaaacgacaacgacgactacgacaacggacggacaaccccaacaacccatccccacccgctgccaagcacaaaaaccctaaccccctctcgccccggctattaaagcctcggttaacatacctctgcggctagacggccgcatccgcatctccacgcctcctcgctgctcgcgcacagggcaaacgaagcgatggcgacggcgacggtggttggtggacctggcaggatggaggctgcggcgtcgtcgtcgtcggcggccgagctcaccgccgctgttgccgcccagaggttgctaggcctgctcgctcttgcgattcaagctgtaaacagtggatcagaaatattgaatgaagaccagagggcaatttacaagctacttggcagaatcaaatcagacagtgttcctgagaataaggatgctggagggtcggatgacgatgacgacgatgatgatgaagatgaggatgatgatgggggtgaagatgatgatgatgctgaggagtactctggggatgatgggggccaa

SEQ ID NO: 6077 - DNA, 611 bp, Setaria italica
  Peptide Sequence Number=SeqID_72051
gttcttaccgcccagacataatggagcatcttcccatggccttccttgtagccttcttcctcctctgccttagcctcaacaaccttccgggcttctgtgtcgccggcggcgattcctttgctttctcaggcttcgccggtgccaacctcacccgtgatggcacggcaaagatcaccagggaaggacttcttgagctgacgaacaacgacgcccacgtccaaggccacgcgttccacccaactccggttcaattcaaggactcgcccaatggcacggtgcagtctttctccctcatcttcgtcttcgccatcctctctgaccctgcaagctcagatgttagtagtgatggtatggccttcgtcatcgccccggggaaggatttctcgagcgcgtcaccggcccaatgtttgggcttgctcaacagcaagagtactggcccagcgaacgcgagcaaccacatcttcgccgtggagctcgacaccatccagaacgaggagttcaaagacatcgacaacaaccatgtcggcatcgacatcaacacgctctcctctgtttactctcactctgctgccttctacgacgacaaggacggtacgctcaagaacttgaat

SEQ ID NO: 6078 - DNA, 600 bp, Setaria italica
  misc_feature (562)..(562): n is a, c, g, or t
  Peptide Sequence Number=SeqID_72052
gcacctcgacgccacctacggctccgacgagaccaacgacgacatcgccatgctgcgtgcccaggtggagcaggacctgtctgaggggatcgccggcgtcgtcccggtcccgccggacgaggccggcaaggacccggtcatcgacgcgctggtcgccaacgtggaggccatgatcaaggcggataggaaaataacctcgctgaagcaattgcagggccacgtctggagaactggattcgagagcgaagaaatcaaaggggtggtgttcgacgatgttcctccggcacttcagaaatggcacgctagcggcatcaagacttacatatactcaagtggcagcagagaagcccagaggcttattttcgggaacactacctacggggatcttaggaagtacctctgtggattctttgacacaacggtcggaaccaagagagaagcacgcagctactacgaaatttggcagtcggtcggggtagatcggccgtcgcagatactgttcttgacagatgtgtaccaagaagccgcagcggcaaaggctgcaggtcttgaggtgctaatntctatcagacctggaaacgcgccactccctagaaaacc

SEQ ID NO: 6079 - DNA, 870 bp, Setaria italica
  Peptide Sequence Number=SeqID_72053
gtcggtcggttggtccggcgtgccggtgagcacggtcgggtggagggaccccggcttcatccacaccgcgttcatgcgagacctgtggcccaacaaggagtactactacaagatcgggcaccagctgcaggacggatccgtggtgtggggcaagccctacacgttccgtgctccgccgtcgccagggcagaactcgctgcagcgcgtcatcgtcttcggcgacatgggaaaggcggagagggacggatcgaacgagttcgcgaactaccagccgggatcgctgaacacgacggacgcgctggtcagggatctggacaactacgacatcgtcttccacatcggcgacctgccctacgccaacggctacatctcccagtgggaccagttcactgcgcaggtcgcgcccatcaccgccaagaagccctacatgatcgcaagcggtaaccatgagagggactggcccaacaccggcgggttcttcgacgtcaaggactccgggggcgagtgcggcgtgctggccgagaccatgtactactacccagcagagaacagagccaacttctggtacaaggtggactatgggatgttccggttctgcgtcgccgactcggagcacgattggcgggagggcacggagcagtacaagttcatcgagcactgcctctcgacggtggaccggaagcatcagccatggctcatcttcgcagcgcaccgcgtgctgggctactcctctaacagttggtacgccatggagggctccttcgaggagcccgagggccgcgagagcctgcagaagctgtggcagaagtaccgtgttgacatcgccttcttcggccatgtccacaactatgagcggacttgtcctatcta

SEQ ID NO: 6080 - DNA, 437 bp, Setaria italica
  Peptide Sequence Number=SeqID_72054
tcacgcatgttgtatttcttgagggtacttcacacaacatgttgttgccaaggataaagaaacctgtgcctgcacaccacttgcactccacatggccagcagattgacaggaagagcaagaaattggtcttggttgctgggagatgagccaggcgcgctcgatgcgcttggcgaagtcggaggagctccccggcgagttgacggtggaggccatgggagcgacgagccggagccctggcgcccgccgagaagacccaggacagggcttcctgaagcttccaggaggggcggcgtggcgggggaatggagcgaaggcgggcgcgtgggccccgcaggtggtcgccggcgtctgcatcagtcggaggggctccgcttcgggggccgtagaggaggggcgggggaggaggaaggaaggggagaggttcgggttccgggcc

SEQ ID NO: 6081 - DNA, 529 bp, Setaria italica
  Peptide Sequence Number=SeqID_72055
tgatatgcacaagcctactacacatactagctattgcaattttacaacgaaaataagtaaggtgatccgcgtatgtacagtttgctagtgtttttctttctactgctttgccgctactctgtacaaggaaactgctggttagagctatgcaatggaagtttcagcgttaatgtacaactcctgtatttgactcttccaagacttatgttttccgaaggccccaacaaactcagttactgattgttctctccccatacgatgtttggtttacattgtattgtctcttgccttttgaggatttcccgagttagcttgttaacatgccaattccattgttatctcgtcttagtcttccttctctgcacagaaccatacatgaacacattcagagaagtgaaaaggaaaaaaagaaatggcaacagagaatttggaagcctatccatatctcatatttatgtagaatgcagatgttaggataaagaaaacaaacatacaaagttatagtcctagttatatgagtaagaaagct

SEQ ID NO: 6082 - DNA, 2035 bp, Setaria italica
  Peptide Sequence Number=SeqID_72056
aaaaaagaaaaaggaaaccaaaaaacaaaaataacttaagaaatagacaagttagaccttacggagacaatataccaaattgctgttcagaggaacattacaggaggatatgctgatatgcacaagcctactacacatactagctattgcaattttacaacgaaaataagtaaggtgatccgcgtatgtacagtttgcagtgtttttcttcactgctttgccgctactctgtacaaggaaactgctggttagagctatgcaatggaagtttcagcgttaatgtacaactcctgtatttgactcttccaagacttatgttttccgaaggccccaacaaactcagttactgattgttctctccccatacgatgtttggtttacattgtattgtctcttgccttttgaggatttcccgagttagcttgttaacatgccaattccattgttatctcgtcttagtcttccttctaggatgattctggctactatacttccgtgctccttcacggtaggcagtataccgtccactagttgagacatgagagaggcgccggagaaacacttgaatgtgattgtaaatgctgagccggtgcctattacatgttgaaaagaaggcgacaaaaccatacaaaatgcttcgtattgcacggaaaatctgatacagaagatctttccagagtgacccccagatgctgttatcagatgttagcacatgcgatctgggtacagatccagcttgatataatgcacttaatgttgaccagctctgccttagaacactgataatatcaacaaaaaggtccacaacgaaacttgatagcccaatgactagtcggaaaggtgcagctagtatctctccaaggagccaaagtacagggtacagaactgaatttacaatgttaacaagagtactgaagacaaaccaaaatggccagataatcatctgcattgtacctaaaacgacactccaagacgtctccagcgataccatgacaactgaactcagatatcctactgtttcagcacaaaagttccacattggcagagtaaattcaaaaacctccaaaattggtcccgcaattggctttgtcaaaacactaagagcagatttaacagcacgcacaatcttaagagaccacgtaaaagcctgctggaagttatgcaggaaaagcatagttcctagatacttaagtcttgatatcatttcccatgtttctatccaatcaaagaaagggccaaacaatcttgatgcagttgccttcaacatggggacattcttgtagaggtcatagaaccctataagaacagtaattaatgacatcaagacatataatgctctggcaagagggcacatccatgggcgatatatcttgcaaaacactggatatgactgaagaaatataacccatgaaggaaggccatactcaagtaacgttaacaatctcacatcagataatataacttctttcagtctaaatgggaggtcatgatcatcaaagcggaagcagatcagtacatccttatatgtgctaggctctaacagcgtcttagcactctcattatcactgccacacgatgaacatgaagatgatgaatattttggcgaggtcacaatttctgagtatgattcttcagacatactacttccatcatcaaattttattatttttcttcttttgtaaggcccagagcaaggaggtggtgtgtaagatgggtctgtgaaacttgatgactctctgatgatttgaacatgacaagaatcatcactatcacttggtgaatcctcccattcaggtgttaagaaatcgttccgagcatcataaaatacatcaccgttaggagagatgctgtccaaatagtcttgtaggagctgacattcagagtcatttcctgagaaccaagaagtgatcaatgatgaagcctggttgacactataaaattcccatctcttcataattttagacttccacagccatagatgtatctgtctgaagttcattcaaataattgatgccacgcacatcagcccagtcta

SEQ ID NO: 6083 - DNA, 1391 bp, Setaria italica
  Peptide Sequence Number=SeqID_72057
actggtgtgctgtaatatccagtccgcagtcaccagactaggtctggtggtatctctctatacgtcagtctatcccccgaaacgcttgttgtcaatgtgtaaaagcgcaaaactggccacctttgtcatgaaaaactgttgcgaatccctttggcaatcttctccgacagctccgtgccccgaaggatgaggtacagtacaaatgaagcataaatgaggactgccacgcagaggagtgcgccggataatgggcctcgaatttcagaagagaagaaatccatcaagaggtagccgttgatagtgatcagtagtgtggccacagtccaggttacagcttgggtattagggcctattttgaagattcccataacttgctcctttgaaaccaaggttatgagtggaatgagtgcaaaaggaatctgaattgattggagcacattgagccactcatttaaaacatccagtgcagaatcagatgtgttgaagaacaaagcaacaactatagtgggcacaattgcaaagcttctggtgatcaatgccctgacccatttttttaacctcaaattaagaaatccgcccattataaactgcccggcataagttcctgttattgtactactctgcccagctgctaatagcccaatcccccaaatgtagaggataggaaaaaatacctccaccaaacttctcttgtagatactgtccagcattttcaaggccaatattaccagcttccttactgccatagaatccttttgcaaaaactgttgtgacaaagagatttatcatgaaggagacagctaatgctatagttgactctattgaatagtatctcaatgcttcacggacttgatattccttattttgatctattttcctcgattgcacgagtgctgaatgaagaaacacattgtggggcatgataacacagccaacaaccccaactgcttgtcttattgtccttgagctcaactttggaaccaaaataccaactaacaagtctttcatgttgggcttagtgtctgtgaacatccatgcaaaggcgatggccatagttgcaattaaaaatgcaaatacagcttctagtttcctcaccccatagttttccagcgaaagaaaaataaagcaatccaaggaggtgatgacgacgccggccccagagcggcaggtaccctctgctgaggatcttgatggcgatggcgcttccgatgacctcctggatgtcggcccccaccatggcgacctcggccatgagccagagcgcgcggcgcgcccagtcggggtactcgtcccggcagagctcggcgaggtgccggcccgtggcgaccccgaggcgcgcggcgaggagctgcacgaggaggcccatggcggtggcccacatgagcagccac

SEQ ID NO: 6084 - DNA, 145 bp, Setaria italica
  Peptide Sequence Number=SeqID_72058
tatctccgactcagtctatactatggcggtgcagcagctggtgagcatcctggagctgcccaccgaagctgatccgttggcccagttgctggccggtctcgtccctgatcccggctgcagcggaggcgaagttgacgccggtgag

SEQ ID NO: 6085 - DNA, 387 bp, Setaria italica
  Peptide Sequence Number=SeqID_72059
aaggaaataagtaacgtgaacgaaagaatagaccgtaacgacgttagaacgtaggtgaagcgcgcgccggggagctgcctgttgaaccggtccaccaggccgacgagccgctggttgaagatccggatggcagcgttgatggcctcgacgcaggtggcgccgtcggggctccgctgcgccagctcgttggggctgcacccgacctgcccgaccccgatcaccgccaccttccgggcgccgtaccgatacatcaccatcaggaggcgggagtagtcggcggccagcgagtccgcgtactgctccggggtgtaccggctgccggtgtcgtagaaggccggcatgaagtagttgttgaggtagtagttgctgcccatgccgacgctgaag

SEQ ID NO: 6086 - DNA, 437 bp, Setaria italica
  Peptide Sequence Number=SeqID_72060
cgtccggcgagcacacgttccgggggctccgcgcgcgcatgttggggatgcacgccatggacccgaccccggcgatgacgaacttgcgggcgcccagtttgtagagcgcgccgagctgcttggcgtactgctgcaccagcagcgtggagtactggtcgccgtcgtactcgttgcgggtgttgtagttgggcatcaggtagttgttgaggtagtcgttgctgcccatcccgacgtagaagatgctccgcgccagcgacggcgccagcttgcccgcgccgcccagcttcctgctcagctggtccagcgtctgctcgaagttcttgatctgctggttgaagggggacgcggccctccacggcgtgaactttgcgtcggcggcggcggggatcctggacaacacggggcagaacttcgtgggccgcatccccttcaaccag

SEQ ID NO: 6087 - DNA, 491 bp, Setaria italica
  Peptide Sequence Number=SeqID_72061
tagtagggatgggccaggtggcgaggaggctgttcaccatggccttcaccttgttgttgaaggggatgatgaggtcgtcgacgtccggcgagcacacgttccgggggctccgcgcgcgcatgttggggatgcacgccatggacccgaccccggcgatgacgaacttgcgggcgcccagtttgtagagcgccgagctgcttggcgtactgctgcaccagcagcgtggagtactggtcgccgtcgtactcgttgcgggtgttgtagttgggcatcaggtagttgttgaggtagtcgttgctgcccatcccgacgtagaagatgctccgcgccagcgacggcgccagcttgcccgcgccgcccagcttcctgctcagctggtccagcgtctgctcgaagttcttgatctgctggttgaaggggatgcggcccacgaagttctgccccgtgttgtccaggactccccgccgccgccgacgcaaagttcacgccgt

SEQ ID NO: 6088 - DNA, 614 bp, Setaria italica
  Peptide Sequence Number=SeqID_72062
ttggctagttcacgagaggtatatgtttaaaatgagatttttactttaaaaacgtagtacagctccatatcattaaactggcgaacatatggagataaccacaccaaccaacaaaataactccacactgatctccttgattcagtacacaggtagtagtactactaattaagagaacaccaatggaccaaaaacaggacactggacacgctcacaactgggttcagctccctcgtactcatgaccaccatacatcttgtacacactaagtgcttcaaaatcatgcattaatcgacgacaactttgacacatgccgtacgtcctcgccgttctactacggctgccatgcggcgagctgctggatgttcatggggtagacgacgtcggtgccgccgttgaacgccgccctgccgagcagcacgttcaccctttccgtcgggtggaaggcgtcccagaagatgtaggtgttccggttgaggcacggccgcaggaacggcaggcaggtgatcatgccccggttcctcccgatgccgcagcacccgcggtcgaccacgctgaacccgtaggaccacgggttgccggtaggtaccttggtagtattctattggtctgtta

SEQ ID NO: 6089 - DNA, 607 bp, Setaria italica
  Peptide Sequence Number=SeqID_72063
gcatgaagtagttgttgaggtagtcgttgctgcccatgccgacgctgaagatgcagcggctcaggtggtccgacgccgtgtcctggtcgcccaggatgctcaccagcgtctgcaccgccgtctggtagttctggacctgccccgcgaaagggatccgtccgcccagctgctgcccggtctcggcgcggatcccggccgcggcggaggcgaagttggcgccgcccaggagctggtcgccgctcgtggcggcgaacggcgggatgaagttgtcgaagcccaggagttgagcgatgacgtcgacggtggtgaggccgttggtgaagcgccccgaggggccgccggcgaagtcgatgccgtagggcgggtagttggcgcgcgccagcgacacgatgtagttgttgttgccgttgtccacgagcgagtcgccgaagatgaagtagcacggcacctgcgggtcgcaccgcgccaccgccgccagcgccaagctcaccgccgccaccaggcacgccagctgcctcacctccatgtcgatcacttagctctgggagcgagaagagagaaggagaaagagatcagtgcaccagaccaatggcggccgacgacgact

SEQ ID NO: 6090 - DNA, 1338 bp, Setaria italica
  Peptide Sequence Number=SeqID_72064
tttttttttttagttacaagaatgcacaaatatttatatatctcctttcgagtagtacacaccatataatctccgcactgcagaatcacggcacgaggaagggaaaacagaaaagggaagacacagtaagcttttgctcatcttgacgtgaccgacgtcttctaatatcaatcaatacaactagagctgagcgagcgtgcgcagatccaccgggtgcacgtcggacggcagcgccgcgctgtacgccctccgcccgacgaggatgttggccgcctccgtggggtggaaggcgtcccagaagaggtactcgttcctgttggtgcacggcgtctggaacggcaggcacgtcacctgcccgttgttcctccccaccccgcagcaccctcggttcgtcaccgtcagcccgtgcgatccaggggatctcaggatgtcctcgaagatcccgtaggcgttgatgtaggtgaagtgcgccccgggcagcgcgttgaactggtcgacgagggcgacgagcctccggttgaagatgtcgatggcggcgttgatctcggacacgcaggtggcgccgtcggggctgcgctgcgccagctcgttggggctgcacccgacctgccccactcccatcagcgccaccttccgggcgccgtagttgtacagggtccggagctgctgcgagtactggccggcgagcgcgtcggcgtactgctccggcgtgtactgctggctggtggagtagacggccggcatgaagtagttgttgaggtagtcgttgctgcccatgcccaccgtgaagatgcactggctcaggtggttcgccgccgagtcctcgtcgcccaggatgctcaccagctgctgcaccgccgcctggtaattctggagctgcccaccgaagctgatccgttggcccagttgctggccggtctcgtccctgatcccggctgcagcggaggcgaagttgacgccggtgaggagctggtcgttgctagcgccggcgtacgcggggatgtaatcgtcgaagcccagaagccgagatatagcatcgacggtggtgaggccgttgctgaaccgaccggtcgcgccgccggggaagtcgatgccgtagggcgggtagtttgcccgcgccagcgacgcgatgtcgttgttgttgccgttgtccacgagcgagtccccgaacacgaagtagcacggcacctggggctcggcccggaccaccaccacggcgacggtggccaggacgaggagcagcgccggctgcatccaccgcattgcagctgtgcgccccatccttttagctagctgagctttctccttgatcggccgcggcggattgaatataatggc

SEQ ID NO: 6091 - DNA, 1158 bp, Setaria italica
  Peptide Sequence Number=SeqID_72065
gtacacactaagtgcttcaaaatcatgcattaatcgacgacaactttgacacatgccgtacgtcctcgccgttctactacggctgccatgcggcgagctgctggatgttcatggggtagacgacgtcggtgccgccgttgaacgccgccctgccgagcagcacgttcaccctttccgtcgggtggaaggcgtcccagaagatgtaggtgttccggttgaggcacggccgcaggaacggcaggcaggtgatcatgccccggttcctcccgatgccgcagcacccgcggtcgaccacgctgaacccgtaggaccacgggttgcggaggacctcggagatcatggcgtagttgtcgacgtagatgaacttggcgttgggccggttggcgttgaggctgttcaccatggccttcaccttgttgttgaaggggatgatgaggtcgtcgacgtccggcgagcacacgttccgggggctccgcgcgcgcatgttggggatgcacgccatggacccgaccccggcgatgacgaacttgcgggcgcccagtttgtagagcgcgccgagctgcttggcgtactgctgcaccagcagcgtggagtactggtcgccgtcgtactcgttgcgggtgttgtagttgggcatcaggtagttgttgaggtagtcgttgctgcccatcccgacgtagaagatgctccgcgccagcgacggcgccagcttgcccgcgccgcccagcttcctgctcagctggtccagcgtctgctcgaagttcttgatctgctggttgaaggggatgcggcccacgaagttctgccccgtgttgtccaggatccccgccgccgccgacgcaaagttcacgccgtggagggccgcgtccgccgaggaggccgacgggtgggacggcagcagcggcaggcccaggagttgagcgatctcgtcgaccatggtgtagccgttggagaagcggccggtgggcccgccggcgaagtcgatgccgtagggcgggtagttggccttggcaagcgattgcaggtcgttgttgttgccgttgtccgtcagcgagtccccgaacacgaacatcgccggcacgcccgtcgccgtccccgcggccgcgcccccgcccccgccgccgctcccggcttccgaacccgggggaaacgtttcct

SEQ ID NO: 6092 - DNA, 1201 bp, Setaria italica
  misc_feature (1)..(34): n is a, c, g, or t
  Peptide Sequence Number=SeqID_72066
nnnnnnnnnnnnnnnnnnnnnnnnnnnnnnnnnnttttttttttttttttaatgaatattgaatgttcccaatagaagtactataaaactgattttgcaaagccaaatcttacatggttcccaaaatgccaaactaattacacacttggaatggaatgtgacaccgtaaactgcactccagactcgctgtctcctatacgctgtgcacccaatgcaagaacccacgaattcacaaaccaaagaacctctagagactagctagctagaggcgcgcgagggtccggatgtcgtatgggtggacgtcggacgcgagcctggcggcgtaggtcctctggccgacgagcacgttggcggcctccgtcgggtggaaggcgtcccagaagaggtactcgtggcggttggcgcagggcatctggaacgggaggcacgtcacctgcccgttgttcctgcccaccccgcagcacccggcgttggtaaccctcagcccgtgcgcgcccggggacctgaggatgtcgtcgaagatgccgtacgcgttgacgtaggtgaagcgcgcgccggggagctgcctgttgaaccggtccaccaggccgacgagccgctggttgaagatccggatggcagcgttgatggcctcgacgcaggtggcgccgtcggggctccgctgcgccagctcgttggggctgcacccgacctgcccgaccccgatcaccgccaccttccgggcgccgtaccgatacatcaccatcaggaggcgggagtagtcggcggccagcgagtccgcgtactgctccggggtgtaccggctgccggtgtcgtagaaggccggcatgaagtagttgttgaggtagtcgttgctgcccatgccgacgctgaagatgcagcggctcaggtgcgtcgccgccgagccctcgtcgcccaggatgctgatcagctcctgcaccgccgactggtagttctgcacctgcccgctgaagctgatccgaccacccagctgctggccggtctcctcccggatgccggcggcggcggaggcgaagttgacgccggtgaggagctgctggctgctcgcgccggcgaacggggggatgaagtcgtcgaagcccagaagcttggcgaggaactcgacggtgggaggacggtaagtagaaggaaatagttcttgtcactagctacgaattactaagctctgttgctgcatgcc

SEQ ID NO: 6093 - DNA, 1399 bp, Setaria italica
  Peptide Sequence Number=SeqID_72067
tgtgaaatccttatcggttaaattgtacatttctccaattaagctacacaacaaatttgcctgtttttatcttttgcccgttcaggcatgcaccaacttaacgcaaagccgaaacttatggaatcaattataccaaaagtatgcctcgtaaaaaattacagatatacgcggttgtacaggaaagaatcgcacggctactactgaattcgacccgtttccacccttggtggtggattagcggatgagttgccgatggatcatcagatggaagcgagcgtgctgatgtccatggggtagacgtcgttgggcgactcggcgcggtaggatcgccggccgacgatgatgttggccgcctccgacgggtggaacgcgtcccagaagatgtgctggtccctgttggcgcacggcgcctggtacggcaggcacgtcacctgcccgttgttcctgcccaccccgcagcaccccgcgttcgtcaccgtgaacccgtaggacgcggcgttggcgaggaggtcgtcgaagatgttgtaggcgttgatgaaggtgaagtgggcgccggggagcgcgttgaactcgtcgacgagtccgacgaggcggcggttgaagatctggatggcgccgtcgatgcggtcgacgcaggtgaccccgtcggcgctgtagcgggccagctcgttggggctgcacccgacctgtcccaccccgatcaagaccaccttgcgggcgccgtagttgtagagcacctggaggtagcggcggtagtcggcgatgagcgcgtcggcgaactgctcggggctgtagcggctgcccgtgttgtagaaggccggcatgaagtagttgttgaggtagtcgttgctgcccatgccgacgctgaagatgcagcggctcaggtggtccgacgccgtgtcctggtcgcccaggatgctcaccagcgtctgcaccgccgtctggtagttctggacctgccccgcgaaagggatccgtccgcccagctgctgcccggtctcggcgcggatcccggccgcggcggaggcgaagttggcgccgcccaggagctggtcgccgctcgtggcggcgaacggcgggatgaagttgtcgaagcccaggagttgagctgcacacgcattcaatttgcgagcacgtttcttagtgtgagatcggtcacgccacgtagtacctgcacgttttttggtgcgaatcgctccaacacgtacgtacaggccatgcaaaacttttgtaccgtcggcgtacgtgggctccgagtccgagtgtagtcatgtgagttgtgactctgagccctctgagtgtgtatgtacagtatctttacccgtactcctatacagatctacgaagctactagctacaactgcgtatctctacgacccaccccagcgtacgcattaaa

SEQ ID NO: 6094 - DNA, 521 bp, Setaria italica
  Peptide Sequence Number=SeqID_72068
ttgtggctgctggcactgatggaagcactgcgtcgagctctaggccaagttcaaagccaaacacacccagcaagcagcggaaacctgacacactactcgtctccaaatgaagtcaattgcgctacatccagtaagaatgtttggtgatggtaaagagtttctttccgatgagtattgcatgtatgtctgccacttgaatattgatgaaaattcagtacaacttgcaatgcttaaaatgttaccatggctggaagacagttggctaaggttgtttccaacttggtgttgtatgttaacttgttgcatatagttgatgaatcaacatataaatcctgtagttggtggtttgttgaggagtaagcattcatacaaatgctgcagttaattgtttttgtgtaatatttaattgattttttttttgcagctgtgtgcacatatagttttttatgaagatgctttattgtacttcaatttgtccttgttccatttctatgtatacaaagcagttctgagtttggact

SEQ ID NO: 6095 - DNA, 866 bp, Setaria italica
  Peptide Sequence Number=SeqID_72069
ggagccgcaggccgctgtgaagtccacgaagcgcgcagggataattggggtcgcttttgaagcttactactccaagatttcgcagatgccggctgcgtcaaaaggtggatgcctgcaatgctgtggcggcttgggcggggcagtactgcaaatgccggtttgagctcgatgagaaggaattggaagaagaggagggtggctctttagggtccgtgtcgccaatgtcgtccgaggctgagaatgggaaggaacttgtggaggaattggcaaggatgcgtatcaatggagacagcagtgggcgaaattgccgtgaggattatgataaagaggcgagggtgctgctaccctgggagcttctccagccagtcatgagggttcttgggcattgcttgcttgcaccactgaatccagtcgaggtgcgggatgcagctgcaggtgctgtcagggttgtctatgcccgtgcatgccatgaccttgtgccacaagcaatgttagcagccagaagcttgattgagcttgacaagagtgcacggaaggctgcaaaggcagcagctgctgcagcttctgggacaattgtggctgctggcactgctggaagcactgcgtcgggttctaggccaagttcaaagccaaacacacccagcaagcagcgcaagcctgacacattacttgcgtccaaatgaagtcaactgtatccagggagtgtttgcaggatggtacagagtttctttctcatgattattgtgtgtgcgtgccacttgaatattggtgaaagttcagtagacattgcaatgtgtactgaactttctcatgattattgtgtgtgcgtgccacttgaatattggtgaaagttcagtagacattgc

SEQ ID NO: 6096 - DNA, 318 bp, Setaria italica
  Peptide Sequence Number=SeqID_72070
ggtcgtcagccaaactcaccaaaactcaaaagcccctcttcgccttgtgcacctcgtcactccttcggcgtcacagccgagagccgatacgcccgagacagcacgcgccgagcgagcgagctctcccctcggcgatgaggtcgcagctccacgcggccgtgtcgtcgccgctgccgccaccgccgctctccctccggcgagctctcccctccgtcacgccccgcgccctcaggttccacgagttcccgtggcggttccgcgttcgtcaccacggccgcggggtcggagctcgccgagcagacaatccgccaggcaacc

SEQ ID NO: 6097 - DNA, 1067 bp, Setaria italica
  Peptide Sequence Number=SeqID_72071
atttagggataactagcagtatcatcacctgagggagtggaagcacacaaaaaaatcaagtaaaaagtaaccacgaagataatggatagcaactttctttggctcatcaaccaactctccaactcccaccacacgtgactctggggcaacataagccaatctgaattgaagcagcatgtggaggaaataaatagcatcggtcacacttctcaaaacagcaagtgctgtagcaaaatcccagtttaacactatgcatttattatcctgctctactgataataggaagaagaacagtggatcgatgaaaatggcaatcaggcatgatatcacgaagaattgattccagtgttgaacaggctttgcatgtgggttcataattggaatgcgtgaaagaatttgctcgatctttttcttccatccaccaccataaccataaagaatattatgaagcttattgtcttcagcattcgaacctctgtggaaatgtcttttatttttacaagcaggagggcaattgacacaatcaggattatcacattgtcccaaaggtccagacatcagtaggtgttcattctttggcacttgtccactgtaagaccacctagttcctccggtttgttctggcatgactgcctgtggcttgctgactggtttcccctgtgaaggtctaggcagcctatctggtgcgtctctactggtaaatggactgcccgatgttgtctgagttggtggctgaatgaataaaggaccagtatggggtacaaaggtgccttcttcatattcatcatcccttactggtatacacattgaagtgcttcttagaggaaatcttggtagttcaacatttcttagtaacataggaacatcatctctctcctgatcagtcattttataactctgtagatcttacagcaacaacaacctaatcacagatttacgattgggtcttcatttcaaactctgttgcccctgaacttgttccacacgaggcgggggagagtgctcggatcagcagcggcagcaaatcgctttcgagtttgtttcgtatttcggtactagtcggtatt

SEQ ID NO: 6098 - DNA, 1048 bp, Setaria italica
  Peptide Sequence Number=SeqID_72072
gccatgttgatgatcaaatcagttaaaatagttctacgttttcgccggctcagaagacatggagttcaggaacgctatatgcagtggggtacaaaaagatgctaacattttaacagactgcaactccgataaaccctcgtctaactacacgacacccccctcaccacccgagttttcttccctgcacatgagaagaataaggcaaacacatggggaaattacatgatgcgaggagcaccggcaagagctagttgctgttcagctgccgatgctggtgctcagttaatctccggcatgccactcgccagcagtagtgcaaggtcactgcagccatgaccaacaacagaggagtaccaatgaggcagccccctggggtgaggttaacaagtgtcattacagcagcagtcaaatgaacaactgggacaaagatttggtcacttttcttcctctcatcgtatgcgttaaaagcaatgatcattgagaaggtatggatgaccaagaatccaagtgcaataagggctgacgcaaggaaaaatggcatctttgagcacctttcaacataaaatgtggcttgaccgaatgctggagtcaaaaggctgagacagaaaaagactgcatgagccactccatgacctaaaccaccagctaaagaaattagcatcttgtctgtcaaactaagacgtggcttagaaattctatctgcaaaggcatctaacatctcttccatcttcttgtaaagcctccaaaacacaagacgagtgccttcttgcaaggcaacagatgtaaggatcagaattgcatatgcccaccaagttcctgattttataggaagaaatcccctccatattcccgagaggactatcaaacttataagccaaaaacaaggtgctggagaggagggtgaggacgaggaagggcttcctggcgacgacgccggcgaagagggagaaggcggggcccagcgcgatgagcgcgtaccccagccccgccgccaccgtcatctctcctctcgcgacccggcctccgctcgccgccggcggcagaagag

SEQ ID NO: 6099 - DNA, 1073 bp, Setaria italica
  Peptide Sequence Number=SeqID_72073
ttttggtacattaccatcagaagtaactactgatcaacagcataataagatcacccgctccacacaagggatatgcagccaattctgccctttctgttgaattgaatctgcaaacgtagcagtaatgtactcctgataggctaggatgcagcaggactcagcaaaaagttgagcctccttccaacacaacagatgatgcatccggagtaagtacaagccatgctaccacaaatggaaatctactacgactacaacgagagtacgagcatggcaccgcaccatcatctacctgacccatcctctcgtcttgttcccgcctggttgctgcctggagaatcgggaactaggggccgacaccttgtgtgtagcagcggcagcggcccttgacgatgccgttgaccttcccagattcttcacctgaggctcggttgatgttctcttttgcctcgactcacgctcgcccggcaggctcctcttcctgccaacattctgaccagatgcagggccgttgttctcttgttcaccaccgatggatgcgttccttgcatcaccttttctcttcttctcgttcaccactgcttcaggagcctcaggaagagaagagttctcgctgagaggctgctgcttgttcagggaattcgagctcctcaggaggtgattttccttctcgatcatcgcttcaaccctagaaaacggcagcaactttgcctctccaggagtagcaatggtggagtccagtatcatgtttgggttttgtgctttgagcttgctttcaagatctcttagcttaatctgaagcattgcctcagttctctgtgtttccaacagttcaagtcctatttcccttgcctttagttcagcaactgaccgctggtgttcttgttccttcaacttgagctccagctctttgttctttaattctgcaacagattgctggttttcttgttccttcaacctgagttccaggtctttgatcttcaactccacaactgatcggtcatgttcttgttccttcaacttgagctccatctctttgatcgtttgcttgagaactgcaacctcagattctgatt

SEQ ID NO: 6100 - DNA, 228 bp, Setaria italica
  Peptide Sequence Number=SeqID_72074
actagaatagatgcagtaattgcacacaaacttttagacactctaacagtaactgcatttggtagaaaatgatgatataaaggttgaaccacgttacttgtagattgctttaagatcatctgggatttctgtcatcttttggacagaaccatcatcatatattatctgatttttcagagtaggggtccaaacacccatttcggtcaggtcatgaagaagattgtttac

SEQ ID NO: 6101 - DNA, 514 bp, Setaria italica
  Peptide Sequence Number=SeqID_72075
ttctatctgtgccttcaaaatgtcaaaccagagggtctgtgctggaacaactttctttgccttgccttctctttcatatttcttgtacaaattctcaaactcatcaaaatcagctggaggaattggtgtctcggttcacaatattcgtgctactggtagttacattcgaggaacaaatggaacatcgaatggaattgttcctatgttacgcgtcttcaatgatactgctcgttatgttgatcaaggtggcggcaaaagaaagggtgcatttgctgtgtacttggagccctggcatgctgatatttttgagttccttgatctgagaaagaaccacggaaaggaggaacatcgtgcaagggatcttttctatgcattatgggttcctgatctattcatgcaaagggtccagaataacggagaatggtcattgttttgccctaatgaagctccagggttggctgattgctggggtgatgagtttgagaatttgtacaagaaatatgaaagagaaggc

SEQ ID NO: 6102 - DNA, 696 bp, Setaria italica
  Peptide Sequence Number=SeqID_72076
atccagtctagcctaattattctgtctctgatagcaaagagaatactgcaaatggttcacaacaaaatgcaataacattgacagtagtagatatatatacatgggcctcatcagcacgaatgtttcggtagtgcaacaagccagaggtagcagtattcactattcagggaccaaggcattcccagtatgtgaatttttaattcaacctacatcacagacttcgttctggttattgaactccaagccggttgtatagtgttgtggtcatgaacaagaaagtgcagcgcggatgcatctagcttccgcacgccaggcactcttcacggttgttcagagaacagaccatctgtgccatcttggcttccacatcttcctctgcaggcttgccattaggcaccccgttctccttcagaagtgtggtatcgacagtaaacttgatcgcgtcggcagctgctcgtgtgcgtagatagtacatcccagttttcaggccctgacatcgaacaaggttaaataaatcatcaatataggctaagtacaaaatgcttgaagataaacaattgattcaatgattcgaggctaaataccttggaccaagcatggaagtgcagcgatgttagcttcccaaagttggcttgctccatatggacattgaggctctggctctggtcaatatagcatccacggtcaactgccata

SEQ ID NO: 6103 - DNA, 759 bp, Setaria italica
  Peptide Sequence Number=SeqID_72077
gaaggtctgcgcgggggtcgtacaagggcgtcaccaccagccagctcgacgagctcgccgccgagaccgccgcggccatgaccgcgtcccacccggactacgcctcgctggcggcgaggattgctgtgtcgaacctgcacaagaacaccaagaagtccttctcggagacgattaaggacatgtacatgcacttcaacgagagatctgggctgatggcccctctggtcgctgaggatgtttatgaaatcatcatgaagaatgctgctcgcttggacagtgagataatttacgacagggactttgattatgactactttggcttcaagactctggagaggtcttacctcttgaagcttggcgggaaggttgttgaaaggccacaacacatgctaatgagggtttcagtggggatacacaaggaagacattgagtctgccatcaagacttaccatctcatgtctcagcgctggtttacacatgcttcaccaacgcttttcaatgctggcacaccgaggcccccaattaagcagctgtttccttatctgcatgaaagatgacagcattgagggaatttacgatactctgaaggaatgtgctgtcattagcaaatcagctggaggaattggtgtctcagttcacaatattcgtgctactggaagttacattcgaggaacaaatggaacgtctaatggaattgttcctatgtttacgttgttatttctaacgtattactttgttctttcgttttatttgttttga

SEQ ID NO: 6104 - DNA, 1712 bp, Setaria italica
  misc_feature (6)..(6): n is a, c, g, or t
  Peptide Sequence Number=SeqID_72078
tttttnttttttttttttttttttgttcaatgacacacatcaataaacattgacagtagtagattatatatatacatgagcatcagcccaaatatttcagtagtgcaacacaagccagaggtagcagtattaagggaccaaggcattcccactttcccagtctgggaattttcaactcaacctacatcacagacttcgttctggttattgaactccaatcatcagccggttgtatagtgttgtggtcatgaacaagaaagtgcagcgcggatgcatctagcttccgcacgccaggcactcttcacggttgttcagagaacagaccatctgtgccatcttggcttccacatcttcctctgcaggcttgccattaggcaccccgttctccttcagaagtgtggtatcgacagtaaacttgatcgcgtcggcagctgctcgtgtgcgtagatagtacatcccagttttcaggcccttggaccaagcatggaagtgcagcgatgttagcttcccaaagttggcttgctccatatggacattgaggctctggctctggtcaatatagcatccacggtcaactgccatatcaaccaaagttttctgcttgatctcccagacagtcttgtagattgctttaagatcatctgggatttctgtcatcttttggacagaaccatcatcatatattatctgatttttcagagtaggagtccaaacacccatttcggtcaggtcatgaagaagatgtttgttaaccactacaaactccccgcttagaacccgtcgactgtatatgttagatgtgtagggttcaaagcactcattgttgccaagaatctgactagtggaagcagtgggcattggagcgacaagaagagagtttctgatcccaactttagaaatagtttccctaagagatggccagtcccatctgttagatgggactacattccacatgtcaggttggagaatgcccttgctgacagggctgccttcatatgtttcataaggaccttctttagcggcaagttcagcagaagctttcagagaatgataataaattgtttcaaaaatgtccttattcaactgctgagcctcagttgaatcgaatggcatgccaagcaatatgaaagtatctgccaagccttgaacacctatgccaatgggcctgtgccgcatatttgatctctttgcggtctcaacaggatagtaattaatatcaataattttgttgagattgtaagtaacagttgaggtaacctcagctagcttctcaaagtcaaaatatctatttttcgaatcagtgctgcccacaagcttagatggatgggactccagaggaacacccttttcccttacgaagcgtggtaaagcaatagatgcaaggttgcaaacagcagtttcagtagggcttgtgaactcaattatctcagtgcacaagtttgatgatttaattgtgcccagattctgctggttactcttcctattgcacgtatccttgtaaagcatatatggtgtaccagtttctatctgtgccttcaaaatgtcaaaccagagggtctgtgctggaacaactttctttgccttgccttctctttcatatttcttgtacaaattctcaaactcatccaccaatcttctagtaagttgttggtttatttcgtttactttagtttttaaacttttttgtttttattttttcgtttttcgttttt

SEQ ID NO: 6105 - DNA, 747 bp, Setaria italica
  Peptide Sequence Number=SeqID_72079
cgtcttcccgcgcaggtcatccgggtcggcgacgagggagcggtccagcaccgggggcggcggcagagtggcgtccccggatccgtcgccgctctcgaggcctaggcggcaggcggcggcccaggtgcggacgaagtgcatggtggaggcgtcgtcgcaggcggcatggtggacggagacgccgaggcagaggccgcggccggggaagacggtgacctgcaaggcggcgagcgcgaacgccccgtcgtcccccggcggcgggagctgcggcacgagtgcgcggatccgggacaggtccctgggcgccctggcgacgaggtggtcgaagtcgtcggggctgtcgaactcggcgacgaccagggtgagggcgtcggcgccgcgggcgtatgagcagaggaagggcgcgtggggcctgatggtgccggcgagcgggtagaagcggcggagtgcgacggggagcgaggatcggaggagcggaagcgcggatgacgggtccgggtggcggaagaagaagaggcgctcgacggggccggtgaagagccaggccacgtcgaagaaggtcagcggcagcgcgtgctcttgcgcggaatcggacggcgccggcgagacgcggatccggtcgaccaggcgcacgtccggcggggacgacgggggcgccatctgatctgctctgcgccgctgctctgctctggtctgcagttgttgagtggcctcctctgctccgccctgctccggttgaggattgag

SEQ ID NO: 6106 - DNA, 1373 bp, Setaria italica
  misc_feature (1)..(86): n is a, c, g, or t
  Peptide Sequence Number=SeqID_72080
nnnnnnnnnnnnnnnnnnnnnnnnnnnnnnnnnnnnnnnnnnnnnnnnnnnnnnnnnnnnnnnnnnnnnnnnnnnnnnnnnnnnnnaagttcaattgttgcaaatttagatgaaattatatttgtggtaggagaaactagctgttcaactgccatctaccgttatttgttaaactcatccggccccaaaaccagccacatatatagataatcataatttgaaactcagctgcattcacatgacacgaaaaagaaatacacggccacaaaggtcgcagtacaaaattggtcaccaaagcagagcacaagctcaattctaacaccatatggcagctcacaggactaacgatccgaagctttgtattgtgttcaggccttccgacgaccaacttgagcaacgaacccagccttgattggagcaacagaccttgaagatccacactgttcacaacgaaggaagaacaggcgattttccttggatagaatggtatcagggctcttacatccattgcagatgacatactcatttatgtatctcctcaagatagcctcaaagtttttgggagcaaatcttcctttgatcaccagcctttgctgcccatcaagtgatccacttgttcccatttcagcgagcaaaaacatcatcacatgctcaggttgcctatgcatcgttttacacaggtccataaaattaacaaaaactgtcttctttgttccctccctaagaacttgaggtggcctcataacagttctacgcctgtccccggcaagatctgggttgttctcacgaagaatgttgaacactctgtccaggagctcttcgtatttgtagtccctgtcagttccatcccaagggtatctagggccatctccaagcataatgccttccccttgttcatcatctacagcttgatcatcttgggtgtcctccccatctccaaggtcagcaagagatgaatcaagatccacctgtttcttcttcttcttcttcatcccactgaagttgagttcagcaggctctgagactgccaagctttctgtcttatctgccagtttgtccacttcatcagaagggtcttggatggaaaccttcttcttcttcttcttcttggttggatcaaagggagcaagctccgagacctcctccctcttctccgcgtgctcctcatccgccatggctgacacgctcgccttcacctccgagaggctcctcctcgaaccgagcgctccgatccgggcggagagagcgcgcgcgagcgagaaagagactgcggcggcggcgggcggcggcggcggcgtggggtgcttcgggttagggcgaaaatgtaggttggtccttctattaactagtttcttacgtccttgttccccggt

SEQ ID NO: 6107 - DNA, 1865 bp, Setaria italica
  misc_feature (1)..(83): n is a, c, g, or t
  Peptide Sequence Number=SeqID_72081
nnnnnnnnnnnnnnnnnnnnnnnnnnnnnnnnnnnnnnnnnnnnnnnnnnnnnnnnnnnnnnnnnnnnnnnnnnnnnnnnnnngtgcaacgcagaattcttctcattatttccccacccctccactgactgaattgttctgctcatgaaccccctaaaaataaatcgttttcggtcacaacgtataaacagcgtccaaaaccctggcacatgcaggaaccattgctttacaaaacccgaacctgaacactaacttatgtaaccaaagaaccaaaagaaaaggaaaaaggaaaaaacaaacaagagccgatccggatgaaaggattggctcggcgcctcaaccttatcaccagatgggcaatttgtcatctgaatcacctacagcgctacaagggaagcaaccgagagcaacagggtgtaaccatccagagtgctgcagcatcattgctcatcagaaacagcagacagttggccaatagaaacatgtttccggaatcccattcatcccattcttttttttatttcaaaaaagaatccattcatccttccgccagctgaggggcgcctagcaattgtcagttcccgtggcaagaagacactgaatttctatgatccaaaataaatggattgtgcaccctttttcctgaatgcccctgtactccactgtggagcacccggcgagatatggttatttcaataccacgggggttcggggaaaaaaaaggaacctagtcttttaactgtttgacttgtggctatctgtaaccctcctgagcctttccaccaagacaggaatgtcctcctcactcaatgctgtgaaacaacacctgaaccatccaggctcaatgcaatggcaagatgaacctggagtgacattgacctttgcctcctccaacagcctgtcccagagcttgcgttctcctttctcgctgtaagaccggatgtacttgctcatgtctgcccagcagtagaaccctccactgctcttgaagcattcaacccccacttgtttcaaagcactgacaaacaaatggtacattttctggagcctctctctgttaacctttaggtattctgaaatgaacctttggtctgaaagcatggaaacaagcaagcgttgtgttggcgttgacactgacgagaatcgagcaattttagcagcagctgtgacaatgctttcattgtaggaatatatcactccaactcgaaacccagcaagagataggtcttttgagagtccatatattatgtgaaccctgcctttatcaaagtcttctagctcattcacaacctctgccacactgacaaatttgtcactgccatacgttgaaccagcaaatatttcatcagaaataacgtgtatgttcttctctgcagcaaactctagaagatcatgcagtgtttcccttggcacaatgcctcctgttgggttggaagggttagatatgagaaccccacgaacccttacgcctcgcttctttgcctgtttgtaagctatttcaagagcagtgatactaatgttaaagttatcagtgctacggcaaggaacaggtatcaactcaacgccagttcgccattttatatccctatcccatcaccttacttaaggtgatgggacaagaaatgcatttcctggatcagcaatacagaaactcagtatttccattgcaggagttgcaccagatgtaaccaccatttgagatgggtcgaaggatactgattcatgcatgatttgcctcatgaatccagcaagagcctgaaacagaaaccgagttcatatttggggattaattaccacaccttaaaacaaaacaatttaggattcatggaagtagagccctaaaacatatatgacaacgcttgcaa

SEQ ID NO: 6108 - DNA, 290 bp, Setaria italica
  Peptide Sequence Number=SeqID_72082
aatagaatagcatacgaaatcaaagctctctctagcacatataggtccaccgctttgtcctcggggattgttgatgtgaagctcagaccaaaatcaataagaaccaattgattgttgctgttcttgattatcatgtttgacgtggtcaaatcaccatgaaccaggcctccatcatgtagtttcccgattgcattccctatctgtgtggcaatatcattcagacgttcctcattaaccccatttgaaccaaacccaagaagtatatccttgacagacaagccatccacata

SEQ ID NO: 6109 - DNA, 373 bp, Setaria italica
  Peptide Sequence Number=SeqID_72083
tccgaccatcgtgcgcttcctgccccgttgcctcacttgagccagcttgttctgggtggagcaccactgcttcgaagactttctatacgccgccaggatcttctccatcacatcccacaggatgaatgcatcgaaatcaaagctctctctagcacatataggtccaccgctttgtcctcggggattgttgatgtgaagctcagaccaaaatcaataagaaccaattgattgttgctgttcttgattatcatgtttgacgtggtcaaatcaccatgaaccaggcctccatcatgacatacgtcactgagtcggagaccctaattacaaaaggtacaaaagtaatagacaagaaagacggaataccaacaagaca

SEQ ID NO: 6110 - DNA, 575 bp, Setaria italica
  Peptide Sequence Number=SeqID_72084
ccgtccccaccaaactacgtttgtaaacaaactacctccccttctgccccctgcttcagcaatacaccaaaatcatgttcttgatcctgagaattatccatgaagtataacaagcacttgaacaaagctacactccctacttcttccttgaggctgtggtagcagtgttctttttggctccaacagcagtaatctcctttctttgtgtcagacgcttatagctctgaggacttaatctttgtgctggacaagctggtctgaatacctctgtcttcaagggatccaacagatcctctgagcatcctaacacaaggccactctttgtagcatcatcccagagctctcttccaagctcaaatctaccattcctacaaagcttttctataaggaggtcgtatatatgagtgtccactaactcacaactttccatgagtctgaacatatcaagagcatggtcaacttgctcagttccacaaaggacacctataaggccatggaaaaacttagcagttggaagcaccccattttcaagcatggcatgtacaagccttttccctctaatgattctcccagtc

SEQ ID NO: 6111 - DNA, 1116 bp, Setaria italica
  Peptide Sequence Number=SeqID_72085
tcagcgagagccctctaccacatgcccacatcaagcctatcaggcccacgagcccggtgagatcacgacacacagactagcagaatacacgtaaccatgcttcagagcaacgctacttctggcgctgacgcaattgggttctaagcagtacaaatgatacagcaggcaaagccgctatcggtcgcttaaaaacacagcaacggaatcggttcatgcgggagccgtgaatacttctggttcataatttagatcgcctttctttcaaatatatccaggcagcacgttttatccgaccatcgtgcgcttcctgccccgttgcctcacttgagccagcttattctgggtggagcaccactgcttcgaagactttctatacgccgccaggatcttctccatcacatccccacaggatgaatgcatcgaaatcaaagctctctctagcacatataggtccaccgctttgtcctcggggattgttgatgtgaagctcagaccaaaatcaataagaaccaattgattgttgctgttcttgaataaaataaaaaaaaaaaaaaaaaaaaaaaaaaaaaaaaaaaaaacatgtagtttcccgattgcattccctatctgtgtggcaatatcattcagacgttcctcattaaccccatttgaaccaaacccaagaagtatatccttgacagacaagccatccacatactcaaaggtcaaagtatgcagaagcggatccacagcataaagaactggggtaggaacaccaagccgtcttgcttttgtcatgcaccgagcttcagcatttaagcgctttagagtcaactttgcatccaacaatgggtgccggtacttcttcgaaaagcgctctttgattacacatttccgtcccacaaatgttgaaacaaataccctcccttctgccccctgcttcagcaatacaccaaaatcatgttcttgatcctgagaattatccatgaagtataacaagcacttgaacaaagcttagggagggctctggtggtgttggtggcggttgctgcgacggcacgcgactcggcgtttctccgggagatgggcggcggcggccgggggcggaggcgttgcggcggggatgagcgccgagcg

SEQ ID NO: 6112 - DNA, 503 bp, Setaria italica
  Peptide Sequence Number=SeqID_72086
ctcatcgagaccaagagcaagtccatcatggtgttcgaggacatcgactgctccctcgacctgaccggcaagcgcaagagcaaggaggaggaggacaaggacgacggcgatggggaggaccccacgcgccgtccggacaagaagggcacgaagagcaacgtcaccctgtccggcctgctcaacttcatcgacgggctctggtcggcgtgcggcgaggagcggctcatcgtcttcaccaccaaccacgtcgacaagctcgacgcggcgctggtccggacggggcggatggacaagaagatcgagatgtcctactgcgacttcgagtccttcaagttcctggcccggatgcacctccacgacggcgtcgttgaggagcaccaggcgcagtgcgaccgtgtgaaggcgctgctcgaggaggtggacatggcgcccgtcgacgtcggcgagcaccttacgcccaaggcccccgtcgaattcgaggacgccggaccgttgcctcgcga

SEQ ID NO: 6113 - DNA, 719 bp, Setaria italica
  Peptide Sequence Number=SeqID_72087
aaaatagacaagtcagtttgtgcagtctgcattcgggcaactaagttctttcacttacacctaccttccaaaaccatcatctttggaaagtggaggtgaggtctctgaaagtgttgaagaaccccgggataacgcagttgaatcaaacaaccttcaacagcagaagattgattctggagatagtttagattctcactgtgaggctcaatctcctgctgcagctgttaacagtgaaggagatgtgtcgtcagatgaatacttctggagagctttgaataacgtgctcaatcaaaatgttctacaaaactttggattttctcttcctgaggtcaagaaattggatggatttgacctattaagttcacttggtctgaaatcacgcgaaattgctgaacagaaatatttagaatctggactggcgacgacagatacttcaacaagtgatggcagtgaaacaactcctgaagattcagttggtgttgacaatgaaaatggtgcattgacaaccaaagaggaggatcagtcttcctttctggacatcaataaagtatctcgggatgtattgtctcaaacagaaaatatactaggtgctctaatgatactttcgaaaaacctctcaccacatgacaacaagtcagtaacaacaaatgagacaaataaaaaagatgatatgatcatagaacaagaagttgctgcagctgaagactctattgataagg

SEQ ID NO: 6114 - DNA, 473 bp, Setaria italica
  Peptide Sequence Number=SeqID_72088
ggactgatcggaagaagacacaggcctgatcgtgcacccagttacccgcgttgctccagctagctagtgcataaataaggtggacaccaaatgctgcatatgagccagttcggctatggcatgaaccatgactgatctggtcttatgatcagtctgatactctgatggaaaataagtcatactccctccgtctcaaaatataggtcgttttggttttctagatttataggtgtttatatgcatctaaacatacaatatatttagatgcatacaaacacatatgaacctagaaaagccaaaacgacatataatttagaacagagggagtataagaaatatgtatgcagtcgcatatttagttgtcaaagcccatgtccatgtactatctgagtgtacgacaaaagtgaagaagttacaatgtgctaattctatgataacagtaacagtactttttataattgaccaaaaaaaaa

SEQ ID NO: 6115 - DNA, 316 bp, Setaria italica
  Peptide Sequence Number=SeqID_72089
cacggaatatatttttaaactatatacagtgcttaaattacacgctggtggaacaaattaagtgtttttatagatacacaagccatcaatctaaaacagtgaagaaataaagataacttcagaatgaagcaaggtttaaaatgcctatcttgctccatgtttcaccataagaaacttttaggggaagaagataatggattagtcctatagctttcactcataaagttggtgccacacggtatgacaaactatatccaaggcagaaatacctcctgtccgagcaatcgcgattacttcacttgtactagcatacaag

SEQ ID NO: 6116 - DNA, 359 bp, Setaria italica
  Peptide Sequence Number=SeqID_72090
taattctgtgcttatattttggttatagacactaacagtcccacgacttattctttggatggacttgtgcctgaactttttggtcctaggacacgggatgacaaagtttgcaagcgggttcatagtttaccagtctgtgctttggagttattggtttcttgtatcttcgttatgttgcagatccaaagactctgtggacatggtatgagccctatttgagggatgatgaggaattctcccctggatctaatggccgcatgacaaccatgggtgtttatgtgcgtgatcttatacttggacagtactactttgatagtctcctcccaagaattcctcttccagtaactcgtcaggtaaca

SEQ ID NO: 6117 - DNA, 451 bp, Setaria italica
  Peptide Sequence Number=SeqID_72091
gttgaacacgtggagccttggatgactggcaattgcaggggcccctccactgcattctgtcttctctacaagttcttcaccatgaagcttactgtcaaacagatgcacggtttgttgaagcatcctgactccccatacattagagctgacacggggatgacaaagtttgcaagcgggttcatagtgtaccagtctgtgctttggagttattggtttcttgtatcttcgttatgttgcagatccaaagactctgtggacatggtatgagccctatttgagggatgatgaggaattctcccctggatctaatggccgcatgacaaccatgggtgtttatgtgcgtgatcttatacttggacagctaggaagaacttctcacttggtacaatactactttgatagtctcctcccaagaattcctcttccagtaactcgtcaggtaacagccaat

SEQ ID NO: 6118 - DNA, 505 bp, Setaria italica
  Peptide Sequence Number=SeqID_72092
ctaaacagtcccaacgaacttaatttctttggatggacttgtgcctgaactttttggtcctaggacacggggatgacaaagtttgcaagcgggttcatagtgtaccagtctgtgctttggagttgtgagcattttgttttgttgtcttcactttgcctgttaaacaaccagacgattttgtagtgaatgaccatgtgctgttggattttgcagattggtttcttgtatcttcgttatgttgcagatccaaagactctgtggacatggtatgagccctatttgagggatgatgaggaattctcccctggatctaatggccgcatgacaaccatgggtgtttatgtgcgtgatcttatacttggacaggtctctttctcgactcccttatggtttcagaatggaataaacatattgctcttttgatcaattgttgtgtagtgtgtacattttttcacgcctatcttgagattcttgctctgaagctagcatttggtttgttctatta

SEQ ID NO: 6119 - DNA, 704 bp, Setaria italica
  Peptide Sequence Number=SeqID_72093
ccgcctccgccgaagccaagcacgccgctcacctcgacggaatcctcctctcgcggtcatcctcgccgtcgccctcctcatcctcctctcagccgggccggcgtggcgcgaagatccattcggacctggaatcagttcctcttttttctgctgagattgaagattgttctcgaaaatggagatacagacttcagggaagcccattgatttgctgatggagaaggttctttgcatgaacattttgtcttctgaatactttaaggagctgtataggctaaaaacctatcatgaagtcatcgatgagatctacacttgtgttgaacacgtggagccttggatgactggcaattgcaggggcccctccactgcattctgtcttctctacaagttcttcaccatgaagcttactgtcaaacagatgcacggtttgttgaagcatcctgactccccatacattagagctattggtttcttgtatcttcgttatgttgcagatccaaagactctgtggacatggtatgagccctatttgagggatgatgaggaattctcccctggatctaatggccgcatgacaaccatgggtgtttatgtgcgtgatcttatacttggacagtactactttgatagtctcctcccaagaattcctcttccagtaactcgtcaggtaacagccaatcttgagaagatgaaattgcccacta

SEQ ID NO: 6120 - DNA, 821 bp, Setaria italica
  Peptide Sequence Number=SeqID_72094
gattccttgtccatgtcaatgtttgtgaacattctttttttaattcctacatttgttttgtgtatccagaaactataccaattagtgggaccacttttttagtcagtcaagttagggcccataacatatttagattttatgttcgttttcaattggtctggtaaatccatttttattctttttacagattttcagttatgtggaattatttcatatatgtcatttaagttgacaaatgatttcgattttgagcctctccaacttatactgatttgcatgatgcgttgttttcctttcatggtgcagtactactttgatagtctcctcccaagaattcctcttccagtaactcgtcaggtaacagccaatcttgagaagatgaaattgcccactaagctttctggtgcgactggagactccagtcgtcagggatcagaagatactgcacgtcgccctccttctgtgaaagcctctctgtcagtttcctttggacagcgtgctccacatcgggcttccaccagagattcatcccctgttcgacgaaccatcacccatgatgatcctcgaagatcatactcaccatctcgtcgcagtggtagccgtgagtatcctgaccgtgatcgttctagtcgcgaccgggaccattcgagcagggatcgtgatcgctcaagccgggaccaggaccgtgacagggatatcagagattatcatcgccgtgagcgtgatagcagggatcgagactcctcctgtccctgcttctactcctgcttctgctcctatgacgagagctagagcgcctgtgcctgctactttcacgatcc

SEQ ID NO: 6121 - DNA, 2309 bp, Setaria italica
  misc_feature (2255)..(2309): n is a, c, g, or t
  Peptide Sequence Number=SeqID_72095
atcaaatcaaatcctcttcctcttcccctccctctctccccgcggccgccgcgccgaacgcgcacgccgcctccgccgaagccaagcacgccgctcacctcgacggaatcctcctctcgcggtcatcctcgccgtcgccctcctcatcctcctctcagccgggccggcgtggcgcgaagatccattcggacctggaatcagttcctcttttttctgctgagattgaagattgttctcgaaaatggagatacagacttcagggaagcccattgatttgctgatggagaaggttctttgcatgaacattttgtcttctgaatactttaaggagctgtataggctaaaaacctatcatgaagtcatcgatgagatctacacttgtgttgaacacgtggagccttggatgactggcaattgcaggggcccctccactgcattctgtcttctctacaagttcttcaccatgaagcttactgtcaaacagatgcacggtttgttgaagcatcctgactccccatacattagagctgtaagtttctgtgccctgagtatgcttttttgtgaatgtcttgcttcatggtgccatttctattattaggcatgaggttagtgcatgaatcaagctgtttactgggatattttagaactcaactaaacagttgtttttgcagttgaaaagtagctttatatgatctgaagcaataattcttgctttctttgcaatttactgtatacataattctgtgcttatattttggttatagacactaacagtcccacgacttatttctttggatggacttgtgcctgaactttttggtcctaggacacggggatgacaaagtttgcaagcgggttcatagtgtaccagtctgtgctttggagttgtgagcattttgtttttgtttgtcttcactttgcctgttaaacaaccagacgattttgtagtgaatgaccatgtgctgttggattttgcagattggtttcttgtatcttcgttatgttgcagatccaaagactctgtggacatggtatgagccctatttgagggatgatgaggaattctcccctggatctaatggccgcatgacaaccatgggtgtttatgtgcgtgatcttatacttggacagtactactttgatagtctcctcccaagaattcctcttccagtaactcgtcaggtaacagccaatcttgagaagatgaaattgcccactaagctttctggtgcgactggagactccagtcgtcagggatcagaagatactgcacgtcgccctccttctgtgaaagcctctctgtcagtttcctttggacagcgtgctccacatcgggcttccaccagagattcatcccctgttcgacgaaccatcacccatgatgatcctcgaagatcatactcaccatctcgtcgcagtggtagccgtgagggtcctgaccgtgatcgttctagtcgcgaccgggaccattcgagcagggatcgtgatcgctcaagccgggaccaggaccgtgacagggatatcagagattatcatcgccgtgagcgtgatagcagggatcgagactactacaggtccaggcattcagaagaacgacgtgacgacagaagggatcgtgaaagtagcaggcacaggcgctctagctctcgtcataggagcagaagcaggagtagaagcagggacaggaggagtcgaagcaggagcaggagccgaagttggagtcggaacgagcagcgatccagtccattcgggaacggaaataaggagaaggctgcagtctcaagcaacctagcaaagctgaaggacttgtacggtgacattactgagaagaaggaagatggcgatgctgaaaagcttcgccgtgattcatgcgctgaggaggtcattaggttgggaggccctaggtggaggtaaattcagacccgtcacctgtaatattgtggtctctatctgtcattgtgctgcgttgatctcttggaaagccactttttccccaacttgttatcacatagtgtttacttggtatctcagacttgttattactgagactagtgactacctgatatttcctactgctcccgtgcatttggagatattggaattggaaacacactactgtataaacgcatggtatccagtgcttcgttcttgcctgatgctaatgctaaatgaaggtgaaatgttgcagtttcaagtttaaaaaactgtaagcctcgctccttcgtttggctgaatataagctatacttgttcagnnnnnnnnnnnnnnnnnnnnnnnnnnnnnnnnnnnnnnnnnnnnnnnnnnnnnnn

SEQ ID NO: 6122 - DNA, 1218 bp, Setaria italica
  Peptide Sequence Number=SeqID_72096
aaaaaaaaaccaacgttattgaaacttcctgaagagttccatgaagaaaggggctaaatacctttcaactatatggacagcattcccaatcaagttcatttacatctatgttacaatagctttttctttgcacatgcccatggagtgtatgaaagtggtaggtcgcagtcaagagtcaacaaccaatagctatcaaagctgagaagccaaaaataaaaaagaagggtaaaatatgacactattaacatcatatatgcaaatatcagtggatcaaagaaagagaagaaataattctacttttgcatttgagggaattcccaaagttcgtttctaagtgctctctgagataagacgaacttcatatagatcatcaccaccttttccaatttccgccttaatcccaggtccaaaaaaggaggtgaattttgcctgtctcttctcaaaatcagacagctccaatgctttggcttcaaatacgagtactaaactatatttcccatcctcagttacttcttctcgaattttttgtaatataggtgcactacgtctaggaatgccaccacccaaaccatattgaaagattcgctgtagcgcttcatccagatgctgctcatcaccatatctaaaacgagttacatcactcctgacctgcttcagaataggggtggcacacttttctcttaaagcaaaagcatcagcgtaggttatgcagggcactggtttcaattctgcatacttcaaggccatgccgatgattgtgagaggaaacccgtaggttagcagcagggctgaccactccgagccgggaagcagattgaaatacgagccgaacccatacgacagaagcgagatcccaactcccagcccaatcacaccgaaggacaccttggcgagggagaattcgtcgtccgggatgacagccttgccggtcgaggcgccggatggctgcgcagcgggcgccgcggcaggaggtgacgacggctccgccgcgcgtacgggcgcgactgcgcgccccggccggcgtggcagaagggacaaggaaacacaggtcgcccggcggcgaggggaggccggcgccgggagcgcggcgagcgccctgaccgcgtgcgccgcgcactgcacagacatctcttccttgctctgtttcttcaccgcgcgtcactgcagtactgaagcgattcttaagggtgcttgccgacaaaaataagtgttgttttt

SEQ ID NO: 6123 - DNA, 332 bp, Setaria italica
  Peptide Sequence Number=SeqID_72097
cggcggcccagcaggcgcaggcgcggctcatgatgatggcccgcggcggcgtcagcctgccgttcggcgccgcgtcgttctcgtcgtcctcctcgtcggcgccgcagatactggacttctccacgcagcagctcatccggcccggcccgccgtcgccggcagccgcggcgccatccacgccgtcatccacgaccacggcgtcgtcgcccggcggcagtgcatggccgtacggtggggagcaccacaggaataaaaaagacgcgtgatcgagctggccgggggttggggggatatgcatgcatgcaagttgcaagcacttggcaatgcgagag

SEQ ID NO: 6124 - DNA, 655 bp, Setaria italica
  Peptide Sequence Number=SeqID_72098
caggaatcacaaagttcataaattcacggaaatggtgatgaaattctcaccaaaaccacaacaagaggagctgaattgtatcatcaaatcctcataactgtgcaacagcatgccacatttattcaaccaaggccatacagtgcccagatcaagaactgaagctaacaagaggtcaggaagagtaaaaggcgtaacattgcgacgagggagacggagtgaagatggatcctcactacagcttgtgcttgtagcgcgcgacctcggcgtcgttggggaagaaccccatgaggcggccggcggagttctggtaggcgtacatgaaccctcccatgaccccgatgagcccgcccgtgaccatcgacgggccccggatccccggcttgatcccggagaggtagccgacggtgacggagacggcggagatagtggagaggcgcatgtagtcgagcgcggagaagttgccgaccaccttggtgaaggccgggttccggtccaccaccgggtactccggcttcgtcgacgcggtgatatccgtgttcatcgcgggcgcggcgggggcgcgaatccctccggtgctggcggcggcggcggcggcggcggcggagacggcagatttggtcgcgagagctggatgttgttgtcgtagtaccttgtt

SEQ ID NO: 6125 - DNA, 1077 bp, Setaria italica
  Peptide Sequence Number=SeqID_72099
tcgcctccgtcgcgccctcgctcccctcgcccaactcggggctcgccaggccgcaccaccaccacccgcaccacatgtgggcgccgcccaccgcgtccgctggcttctcctcgccggccttcttgaattccgccggtgcaggcgccggcgacgccgctggtatcggcggcctcatgcagcggatggggctcccagctggcctcgagatgccggccgggggcgccgcgggggggaccctcggcgccggcggtcacatcggcttcgcgcccatgttcgccgggcacgccatgccggggctcgagcttgggctctcgcaggatggccacatcggggtgctcgccgcgcacgcgcagtcgatcagccagttctaccaccaggtcggagctgccggggccagcggccagctgcagcaccagcacgagcaccagcatcaccatcaccagcagcaggaggacggtgaggacgaccgtgaggacggcgagtcagatgaagagtctgggcagtagtgtagccgttcaaccttgcgtttctttctgggtgttccttgaagaggagagaaggagagaaaaagtgtatgcacgccgcacgcaggacacgggatgcttctgctactcttggattcttgttcgtcgagttgtgatgaatttttatgttcattttttcacgtgtgatatcaaaactcaatggaggccttttgctccgaggacttgctggatcaagatcatcctgtggttcttcccactattctgtggatgatcgcccggagccctctcctccgacttccagatgtatgatagctgaaagctggatgaattggatcaatcgcctttgagtgagtgccttatttgtcattgcaaagtgtgtagatattcaggtaattttgctgttagagaggtgttcttttatcggagtggtgatcctctttttaaaacaattaaggtagttgctggcaatccgatcctcctccaaagactgtttctgcaacgcaaatacaactcacaattcaaatgccgcagttacccaaatacctactttaggctacgttactagtaggacaatagaccaaatagaataaca

SEQ ID NO: 6126 - DNA, 254 bp, Setaria italica
  Peptide Sequence Number=SeqID_72100
ggagtttggaaacaattagtcatttcattatttcaccaaattctctatgctattggatggagagatgatttggccaccatcccttgaggtccaccctaaaactcaatccgactggaccatgttttgcatgccagattacaagaaagctgccgtgttccctccagaatgcagccctagaagctgctctcacggtcctcccagatctgcctcaggtaacaaggtgggcattcggtttctttgctactttgcctgta

SEQ ID NO: 6127 - DNA, 580 bp, Setaria italica
  Peptide Sequence Number=SeqID_72101
ctggttcactcatataggtattattaggttgataaagcaatgaatggataagcaataaactgtgtagttgtgttttccacacatatatagttggaagcacgcacacttgacactcaaacatagaagcttacacagatcatcagaacatatatttttctagtgtcaagtgcatattctacttccatagctagctgtttttatcgtagtacatgttgaactaaaggcagctaccaattagtatctccatcgcaaaataaattgtgttgacaacatgggaattaatctggtgcattagtccattctgttccgcaactcaaataagtattaatctccaactcaagtatgttttaagacgcattgtgcaatggtgccctcaagcctcgaagaccatctccatttgacattcagcccatcgaacttagaactcccctgatcccctgatctaggacacccaccgttgtaaccctcatcctcaccctcagtgcaggggacccaaacctgtctaagcaatggtcatccccttcaaagtgtcattgtgcactgcactgcaatagatcgactaccaaatcattgacaagac

SEQ ID NO: 6128 - DNA, 320 bp, Setaria italica
  Peptide Sequence Number=SeqID_72102
tggggcaggtaccgcggatccccagccacggcgcgatgcagccgtcgtggtaccagtgcgcgcacggcagccgcaccacggcgtccgccaccgcgatctcttccgtgcacaccgcgcacaccgtgccggccacgcccgccggcgctcgcaccgccggcggtgccgagacggccggtggcaccgcctccgcaaggcgactgcccacggcggcgggaggagggtcgacggggaaggactcctcgtcgacgtagtccacgaccagcgggttccgcccgaggatcgaggagaggaggtacctcgccgtgatccagtcgccgtcg

SEQ ID NO: 6129 - DNA, 1150 bp, Setaria italica
  Peptide Sequence Number=SeqID_72103
ttttttttttttttttcttactgttagtaagtttcgtctctttttcattgtgacgagaaacaccagtttctctgtacagttgagcccaagggaattcagaaggaaataacacagcacattgcgaagcataaaaacgaccgatccaagttggttcagtatgcaagagaacttcaatgtacataatttaacaatccactaggaacatctccagcgagaggtcgatagcagataaataagttgcccccatcaaaccaggtagatctctcttccaagcgctaactaaagaatcaccaaaccatcaccgaaatctcttgtccttctgaaggaggatatttgggttccgcgaatgattcttagctcctgctagctcgccccatctggtccctgcgccatggacccgtgacgagatgctccatagggtgtctcctggccgaccagctgcctcttggctcggctttgcgatcgccttggatttcatcaggggatgcttgttgcccttgcccatgccagctgcaagcaaccatcttgaaccagattgctgctgtgtttgattgccccatggtttcgtcttttcaggttcactcttgaaaccagcgacatgcacttctgtaaccttgaactgaggaatggaatcctctaattcctcaaccttctgttccacgaccaatgccttatttggaacctcttcagtcttgggctcctcatcatatttctcgctgttacctttatatgaaacagtactgtagatcttgggttttggggggacaaaaaccctttccacttgaattaaagcaagcataggtgtgcccactggctcatagttacgtagtgggtcacgtagttgaaccatgagagcaacagtgaagttattccctaacaagccccatcttctaccagatctcttgctctttttgtctccattccattttttcagcaactaactccatcgatttagcatgatgagcagcaagtatcttcgatgtcctgtcactgtgctgttcttcttcatccactaccccggagtcaagcctcatccactcatctagagtgatagacaagcccattaatccatcaacttcttctccactttgcttaacatccagaagctgcaagcctgcagttccctctaaaaccaaggggaccgagtatt

SEQ ID NO: 6130 - DNA, 1085 bp, Setaria italica
  Peptide Sequence Number=SeqID_72104
ttttttttttaaggaaatatagtgcgatttgttcttctccaaaatgactgaaacatattatccttcgttgttcgttcactcaactgtgcgcatctgcattgccaaatgctaataacttttgactacgaactgtttctatggcaagcatcctccatacaacagttaaacaagttacagaacactctcggatgctccatttgactgaactctcaggcacaacgacattttcaagttcaatattcagtgttggacttagcatcctccatacaattatcacggatctgtcaacgtgattatctttgtagcacaggggcatatggtttcaaagttcaccaaagtgatgctgccaactgaacacgttcacttcttcgatgaaccgaaccctccgaaacccatcatggcagcaatgtctgggtccacatcctcaggctcgtgttgagctgcttgttctcttttcttctcttttttcttttctttgcgttgccgtttcctctcctcctcctcttgctgttgtttcattattctctcatccaaatcttgttcagtaaaggtgcttgggtccttcctcttcttaagtgcctcaaaccttttctgaacctgttcgagtgatgccctttcaacgcgcatagacatgcccaatgctctctgatgcttcttgccatttatatgatccaaatagttggccgaatctttgacaacacattcacatacggaacagtagtatccagcctgctgattcaatggtgcaattggggtcaccacctgagtcttgcccagacgagactcaagatcaacttcatagtctctgtgcttcaaaggctgtctttgcacaagagggcccctttccttgcctttccgggcttcatccttctcccgttgctccctctgtcgagctcgctccaagtactcttccttgtcaaacttcctccgagaagtattgtcgacgccgactggctgatttccagacatcttggtcagctcactgcaaaccgcctggtgtatgctcgtcgccggcgaagggcctggcgaaggggagcgccgctcgcccagcagtcgccgcgaggaagaaggccacgagtagtagt

SEQ ID NO: 6131 - DNA, 532 bp, Setaria italica
  Peptide Sequence Number=SeqID_72105
tcgtccgtccgttccttcgtagttaccttcgtccgtccgtaggttcctcgagctcgcggggaacgcggcgcgggacaacaagaagaaccggatcatcccgcggcacgtgctgctggcgatccgcaacgacgaggagctcgggaagctgctggccggcgtcaccatcgcgcacggcggggtgctgcccaacatcaaccccgtgctcctccccaagaagaccgcctctgccgccgccaaggaaggcaaggagggtaaggagaagaagtcgcccaagaaggccgccaccaagtcgcccaagaaggcggccgccgcgtaggccccgagcggatggtggtgccctgtctctcgctctctccctgtccgctctgaactgaaatgctccttcctagctgtcgtcgtcgtcatgatctttgctgcttgtcgtggttgtttgtgtgtaactgagtgcctttcgctcaatcagcatgcactgtgtaggttcacacacactccttcgaacctaaacaagtgttttcagatcggaccctagacc

SEQ ID NO: 6132 - DNA, 1223 bp, Setaria italica
  Peptide Sequence Number=SeqID_72106
gaaatcgaaacgcgaaaaagggtgacgccaggagagagagggagacagagaggagagagaaagagagggaggaagaggggagagcgcgcgcgcttcgatcggcgatggatgtcggagcgaaggtgccgaagaagggcgcggccgggcgtcgcggcggcggcggccccaagaagaagccggtctcccgctccgtgaaggccggcctccagttccccgtcggccgtatcggccgctacctcaagcagggccgctactctcagcgcatcggcaccggcgcccccgtctacctcgccgccgtcctcgagtacctcgccgccgaggtcctcgagctcgcggggaacgcggcgcgggacaacaagaagaaccggatcatcccgcggcacgtgctgctggcgatccgcaacgacgaggagctcgggaagctgctggccggcgtcaccatcgcgcacggcggggtgctgcccaacatcaaccccgtgctcctccccaagaagaccgcctctgccgccgccaaggaaggcaaggagggtaaggagaagaagtcgcccaagaaggccgccaccaagtcgcccaagaaggcggccgccgcgtaggccccgagcggatggtggtgccctgtctctcgctctctccctgtccgctctgaactgaaatgctccttcctagctgtcgtcgtcgtcatgatctttgctgcttgtcgtggttgtttgtgtgtaactgagtgcctttcgctcaatcagcatgcactgtgtaggttgacactggtctagggtccgatctgaaaaacacttgtttaggttcgaaggagtgtgtgtgaactctgaagggcagtggaggggtgggaactgtgaatcattaggtgctgtttgtaataagattgtgaagatgtgtaaaattatgggccttcattctgtgcttgattgtctggatgtggttttgggaccatgattatgtttatctggttccgtttgtgctaaatggtgactgttcttatgtttatgtggttgcgtctgattaattggtcatagaaactgtaggatgttattttgtttgcagagagtgctgtttcttaccagctcctgttaaagtttgaacttataaaggttatggtttgttttgtaccctaaataagtaggctatggtttggtttcgttgtatgtcaacgcaaggtgatggttgcaaaatgctgtctgatgttaacatcaattgaatagtggctgtcg

SEQ ID NO: 6133 - DNA, 680 bp, Setaria italica
  Peptide Sequence Number=SeqID_72107
tggagcgcgatccagaacgtgagcgacccgcacatccaggagctgggcgggtgggcgctggggcaggcgaaggagaagcagctggccggcgccgggctgcggttccgccgcgtggtgcgcggggagcagcaggtggtgtccgggatgaactaccgcctctacgtcgacgtcgcggacgcggggggccggagcgcgccctacgtggccgtcgtgtacgagcagctctggaccagcacccgcgagctcacctccttcaacaaggcgcgccgcgcccactgagtcaccgctcgtccatggtccattccggcggcccgccgcggaccggcacggcggccggcgacgacggcgtcagtgcccttctctcctctcctcccggataattatatctagctaatactattactagcggtatatgttgcgagcgagtaagcgctgcgtttttactactggttgttgtggggttaatctgtgcgagtcagcggtgtggatgaactatgtgctacaacttctaccagtactagagtataatgatgtaattaatggtttgtgcctgtcttgactcttgcgttaagggagctattattgtagttgttgtactcctaccacggtgtccgtctgtagctaggagataggggtttcacgtgccagtgtctgcgagactgcgactctgcgtgctcgcc

SEQ ID NO: 6134 - DNA, 274 bp, Setaria italica
  Peptide Sequence Number=SeqID_72108
tggtgattatttcatgaagtatgtgaatcttggtgatgaacataaaagttcagtaccaatggacttgggtagcataaagaaggaaaggaggcatagcgaggaagatagtgcagcagtcaagaggaatcgacagatcatggaagatgaggctctggcaagaacactgcaggaaagcttcacagaagagaatacaactgtttccggcatgacttctggccaaaaaataagtccacctgatagtgctggttcttctggaaaacataatgaaagaatg

SEQ ID NO: 6135 - DNA, 1496 bp, Setaria italica
  Peptide Sequence Number=SeqID_72109
tcactgcatcatcttagcagttgtctaaacatgaaatggagaaggaaaagaaatgaagtcaaattgaaactggatgaatgaatttctccgacacagcatgacgcaatgtgcaatgaatgttacctcagctttattgccaagcacattttcttttggatacatcaaaccaaaaaaatatctgaggcttccaaatctgacacgacaaacgtttcgcctccattgcttgcttggagataaaggaactccccacatatgaacatggcaactatgaacatgaacaatagccattgcttgcagtccaaaatgcaaccttctgaacaaacccaccaaaaaaaatgtgctgaaccctcatggagcagaacctgagctctgaaattagccgttagcatcgccttcatggatatggaaaatttgctgccccaaccaaccgatggacgacccccttgctagccataactatcaagcctttctgttactagactagaactctgcaaaaagctcaaaagaatactatgcagcataatcgttctcaatcaccggttgtgtccgtgtccctaaggccacaggtgcctgcgtccgcccaacttgagccatccgcaatgtctccccaacctccgcattccgttccataacctccaacttcttatcccttttgtacctgaccaaacacaacaaaagcgcagccaacagccccaatgctacagcagccccaaccacgctgacggcaatcttccacgcctttgagcttcccttcttatgacctccctctgtcggtatcggaggggaaattgtgccaggtggagcaggagccggggcaatctcactggagttcaccacaattgagatgtgcccttggtgatacgtcgagcacagattggttgcctccaggtcccggaactgcggcacgccattcaaatcgaacaccacacaccgcggcgctgcactgcctgccggcaccgacctgacatcgctgaaagtcacagaaatcggactccctgacgcgataatgtcgagctcctgcagacccacggccgacaggttggccgcgtcgtagaccagcagcccgagcaccggcgcgaggtaagtgtacccggggagcgggtagtagcggtccgacgagttgccgaggttgtggtagacgagcaccacccgctcgacgtgcggctgcacgacgacgccggggggatgccgaactggaggtagtccgcgaagcccttccggcgcaggctgccgctgcgcaggcggaccgcggagaccgcaatgcctgtgaggttggcggggagggtggcgttgtagacaatgccggtgcgcgggcgcacgaacgcccggtacgcgtagtcctgcagcgtcgcgtcgaggatcctcgcaggcgagagcggctgcgactgcgccgccaccccggaagaggtcgccaagagcaggagctggaggaggcaggcgcagatcaagaagcccatagcagtggggggcgtcccacgagctgagccgccgccgga

SEQ ID NO: 6136 - DNA, 1337 bp, Setaria italica
  Peptide Sequence Number=SeqID_72110
aaacattcaacaagcaaccggtgtgcagggctgcactcctttatcgtcaattttctttcagccaaaaaggaaggtgcaagggttcttatttctagaaacatcattgttctttgatcttctatgggaggcatctaaatatgtacactgaatgaactctgatcctcgttatcatcggatcaaacggaagccaaatgaactctgatcctcgttatcatcggatcaaatggaagccgaatgaactctgatcctcactatcatgggatcacacagaactgggtagctggcacttgattatagtcagtaatctcctcttcgagggatgtatgaaccattccctcggtaataagatccactagggggtggagggggcgggtatacatatgtatatccagcctcatagccagcatggcttgtataaccagagtaggctgatcgtgaagctgcagtttctctagcataaggatgacgatctattggatggatatcatattctgcagttcttcgctgatcatatgcatggttgctgtgaactcgacttgtaggagggatgaatccagcatgaggttccagatcagaggcatatgctttagatctcgaacttctatccacattactattgttatgtgctttcttcagtggtctttcatttatatagatatttttattcctgcgagatttcctttccttttggaactgttagatatttgctctgcagcaccttgataggtttgctggctctcatcagcattacaattatttcgcgctttctttgatggtttttggtttacagaggcatttctgttcttcccaacatccctgttcccttcagaaggtttggatgtttgcagtacttctgcagcgccttgtgtggttagctttaaatcataatcatttgataatttacttggtgaattcatcttcccaaggacctcctttgtccgagaggtaagattgttcttattgccttttggcaatttatgtggtgaacctgtatctataacagccttccctgtgtggcctttttcccttagaaatagaactgaaattaggtacgagctaagccagatctcaacagtaccacataagtgttatagacggtcatggccttcattagggcgaagccagaaattccataaggggggcagatagtaataactaagttaattaggggagccaaaatttaactttctttgtttatatggtaaattttgtgtatacatatgaggtgcatctacccaagaattggggcccttgtagttcactcgcaataacagtaacctcaggtgctatagcaacaggctcagtctcacaatgaagccatgttggtttgttcgttg

SEQ ID NO: 6137 - DNA, 350 bp, Setaria italica
  Peptide Sequence Number=SeqID_72111
gttctcttttttttttagtttttttttttttctttgatgcaatacttcactttccttctttcttccacccacagttggggcttatgcattattttgtctcaacacaacaggggaaacagcaaagctatgctgtgaatctgaccaatctcaaaaatacagacacaagaagcttacaggtacagatatacaccactatacaacacgtgcaatacattgatctccttccatcaacccgatcactctagcaaccatccggaatgcagtcaataaaacccacaaagttctgttggaaacctagccaatctgccccaggtttatcatgcacaaccatttcagacctgtgttcaact

SEQ ID NO: 6138 - DNA, 624 bp, Setaria italica
  misc_feature (389)..(389): n is a, c, g, or t
  Peptide Sequence Number=SeqID_72112
aggtcgccagccgcgcgctgctggatcaggtcatgcatgccccctctttcttctttcttcgtcatgcttactactcttactcctggagtaattaacttgtcccaaagcgcaaatcatttccctcatccgtaatttgatttgattaactaatcgtgttgcgagcttgtggttccaatttgtttcagctgccctgaatttaacccttgcacctagctctagttactgatctgcttttataatgacaactttgtgaccgattggtgtctgtaatgcctccttttgctgttcattgtagaaactttgcaggaaactggtgcacataactgttggattagtgtaagtttgtatgtggcctctgttcagttcagatgatgtgtatgccccgtttntgctccgcttatcttcgtgatcaacatcgtaaaggtgacagtgattgggcttggtgtggttaaagatgaaggtgtggttaactcgatgaccaggcatggggactgcagagaacttctcaagggcccattgtattacgcttgtgctataaccctgacaacaatggtcttctggaggacatcacccatctcaatcgccgtgatctgcaatttgtgtgccggagatggtgttgctgac

SEQ ID NO: 6139 - DNA, 595 bp, Setaria italica
  Peptide Sequence Number=SeqID_72113
aaaaataaacagaagacgactacagactgttctaagttcattagtctacgataaggttaataaaactagcagtctgcagattcatccaagcccaggcaggaaggtcagcagcaagagagagtggagaccatgtggacggagaacccggtggtccgggacgccggcgccgccgtgctctccggagtcgccgcggctgtcgtgctccgcttctgggaggaggtcgccaaccgcgcgctcctggaccagacactttgcaggaaactggtgcacataactgttggattggtgtatttcctcatgtggcctctgttcagttcagatgatgtatatgcgccgtttcttgctccgcttatcatcgtagtcaacatcataaaggtgctagttattgggcttggcgtagttaaagatgatggtgtggttaactcgatgaccaggcatggggactgcagagaacttctcaagggcccattgtattatgcttgtgctataaccctgacaacaatagctttctggaggacatcacccatctcaatcgccgtgatctgcaatttgtgtgccggagatggtgttgctgacatagttgggagacgattcg

SEQ ID NO: 6140 - DNA, 324 bp, Setaria italica
  Peptide Sequence Number=SeqID_72114
ccatctcccatcctcccatcccctctacccgtcgaaaccctagccagcaatcccggcaaaaatctcgctccgccgccacctcgccatgggcaagaagcggaagctcgagaccaaacccgcggcagccgctaaggcttccccggccaccgcggccaagtccaccaccgctagggccgccggcctatccgaggtcatcgcccccgtcgcggcggtgaaggaggagccccagatggcgggcggcgaggaggaggaagaggaggaggaagtggaggtcgaggaggaggtggaggtcgaggaggaagtagaggttgaggaggaggagga

SEQ ID NO: 6141 - DNA, 1882 bp, Setaria italica
  Peptide Sequence Number=SeqID_72115
ctgaccatcggagtccattgtgatctgggtatcatactccctccaacccctatcacccactgtaaccagaacatttgcaacgcaagtcaatgactccggactgctatgcccacttctagaactatcaggaagtttctttgcatcatttatcttagcactgctatgagactgtatcttgcgaaaatggcctttgtttttatgccaaattcctcacttctaggagaaattgagtatgaaacctgacttcgtggcttcttagaaccaccagcaaagccagtcaccatgaggtcttctggcagtaattttgaaccatctccaaaagtgcgtgatatagatgtaaaccggttccgatgataggtagtcctgggggcagttggtgtagcacgaccaattggatgttcattcaattcctggaccaagttagatactggttgcttgtctttttcatctttgttaagaggtttgtcattcggtgcatcaatcaccttatcttgaggaatattgatggaaagatgcctctctgaagacttctgtggagagcaaataacattaagattgtaggaacatggtttatcagcatcaagataaggcccattttgatctagaaactttctgcgcattatgtttgcatcaccagtattgccaccattacattctgggcttacagtgctttcagcagtcttgaattccctactagttgagcgagtttggtctgtacaactagcagaagccatatccaatggactatcaggtgatgaactgagattaagtgaacaaactctaggaggcacaggacgaactgtaccagatgaacgttccgttaccaaaagctgctgattctcatccaaagcaaatgaaatggattgttgcgaaccattaatcaaattgatttcagttaacgatttcaagtggtggcaaagcagtagtgaaggtgcagttgtcacgtccagaacattgcgagcaaatttacactgctcatcaagacaataaatgacaggttcagtatctgaataatttgattctggaagaaagtcagctcctgaacatcaaaatccttcgagaaaggatcaattgaagaaaggcctctatgaacaacgtcatttgtgcaacctttagagaactccctttttgaacactggtattgcagctttccttgcaggtgttcccattttgatttctctaccccaacgaagctgaatagcataaacactacttggcgtctaccatgcacaccagatatctgaaatttgatcgaggtgcatggcattgtcgatgccttggtagttctctgcctaggacaccgcttgaagcttccaacaagtaaacaaaaaagagatactgctgatctcaagcatgtctcaagaaggatatgcctcaagcctaaaacattatcgacaagaagtatgtccagctgaacaacaggccacaaggcaaccagtgtaccatgctgaaggagaaagagggcattggaaacccaaacacaacaggcttcacgaatcaatttataaacaggtttcaatgggaggctcaataacagtatgacatatgtcactgaagcaccagtttcactaccagattgcacacaaggaagtgtagcaagaaccatagcaggacttgcacttctttgggaattagaattctgttctgaagtgttgagaaatccattcttttttctgcaaaatcgcctcctagaataaacaaagcgaaatctcctgtccacaggtgtgatcctatcattgagaacttctgcaccaccatttgcaggtgctctacctggtataggatcattaggcaacagcccatcatgcttggcaccagaactgtggcactgcttttggcaaataaattggaatatcagaatgagcgtgatcttgcttgctga

SEQ ID NO: 6142 - DNA, 399 bp, Setaria italica
  Peptide Sequence Number=SeqID_72116
cggccgccaccgccggcggcggctgcggcggcgcccttggccatctcctcccgcttccggaaggggcgcgtggcgagggtgaaggagacggccatgagcgtgaccatgacgatccccgtgaccccctcggcgccggcgaggagggcccggtaggtgggcttgtcccggccgaagaagcgcgccacgaggcggtactcgtcgggccccgacgcgatcagccgcgggaagtcgcacgccaggtggttccccgcgtgcaggcagatgcccagcgcgatcgccgtcgcgatgatcttgtggaaggcgatgctgtcgtcgaaggggacgaagaagcgggcccaggtggagcggagccacgtcagcgtgttgcggcagacggggaggagcacgagcgccatgttg

SEQ ID NO: 6143 - DNA, 325 bp, Setaria italica
  Peptide Sequence Number=SeqID_72117
gggtagggcggtgctcgggggcgaggcggtactcgacggacacggcgaggacccgggccctggacgccagcgcgttcaggtaccggtggtacgtcggcgagaaggccgactccgtgacgaacgcgccgccgtggaagaacacgacgagcggcagcagctggccgccgtccgtctccgtccccgccgtgcggttggtggcgaggcgcggcaggtagaggcgcacggcgaggccggcggcggcgtcgacgaccacgtccctggaggcgacgccggtggccgggtccgtggacgccggcacggtgtccgtgcccatgaagcgccgcac

SEQ ID NO: 6144 - DNA, 260 bp, Setaria italica
  Peptide Sequence Number=SeqID_72118
gggggcggggagcatcgaaccagtttgctgctgaggcgggcgaggaggcggcatgtagctggagatgggtgccgcaggcggcggctgagggagcgccggcactgcagccgcttggggaggaagcgcgagagcgggagctggagcagcagggggaggaatcggggcctcgaggagaagatgaggatgggcgccggggcgtggaacaggtgaaccctgggaggagctggtaccggcggcacagggagactggcggaaggggg

SEQ ID NO: 6145 - DNA, 686 bp, Setaria italica
  Peptide Sequence Number=SeqID_72119
ctgtcccacgtcgccctctaccacggcaggtcgatatgggagcagaccaaggcgacggtgcgcgcgcagaacgccggcgacgtgcacaccaggctgatgaagaggaactacgccgccgtgccgcagtggtggttccaggtgatgctggtcctcgtgctcggcctctccgtcttcacctgcgagggcttcggccggcagctgcagctcccatactggggcgtcctcctcgccgccggtctcgccttctttttcacgctccccatcggcatcatcaccgccacgacgaatcagcaaccgggtctgaacgttgtgaccgagctgatcatcgggtacctgtacccgggacggccgctcgccaacgtcgcgttcaagacgtacggctacatcagcatgtcccaggcgatcatgttcctgcaggacttcaagctgggccactacatgaagatcccgccgcgccgcatgttcatcgtccagctggtggggacggtcctggcgtcgtcggtgtacttcggcacgtcgtggtggctgctggagagcgtgcccaacatctgcgacccgtcgaagctaccggaggggagcccctggacgtgccctggcgacgacgtcttcttcaacgcgtccatcatctggggcgtggtcgggcccctgcgcatgttcggccggctgggcctctacgccaagatgaa

SEQ ID NO: 6146 - DNA, 853 bp, Setaria italica
  misc_feature (8)..(8): n is a, c, g, or t
  Peptide Sequence Number=SeqID_72120
aaaattangtttttttctttcagatgttcaagatgttagtaatcaacactgataataccatcttagtaagtatgcaatcacactctgatggtcaataataatacatcacgaatagcaatgtagtacacacttaggagtacactgttacattgaatcgggcaagaatgcggacaggccattcattgacatgatcctatatgattccaagttctacttgacacttgctacaggttgactcaatataacctactcctcccttgtcgaaggagccattcctgccgacgggctgtctgcaaagtactctgggtgtttcaagttcacaccatgctcacgcaaggctttagaaagatcatccatagtcagtacaagacgtctatccttaggctgtttgctcttattgtctttgataggtgctgctaccctggccttgcagtgctgaagagaatcgcttgcaatgtctgaaaggaacttctgggtggctacagcaaccaatctcgttaagcggaggtcaggacagttgaatccgctgcgtccgaggtagtgctccaccagctcgtcaggaatcgtgggggtgtagtccatgagggaggagaggaactcggtgagcgcggtctcgtcgtcgtgccgcccgtccccgcctccacccacaggcccgcccatgcccggagccatgcccccgccagggcctccgcctccaccgctgctgttgctgcccatcatcctcacgtcccgccgcctcgctgccctcaccgcacgagcagcgtgggagaacgccccgccgccggcgactctggaagcggcgataggtgtcagcgatgacgacggcagtcagcttcgcagaagaggtcaagag

SEQ ID NO: 6147 - DNA, 460 bp, Setaria italica
  Peptide Sequence Number=SeqID_72121
cgggccgacggaggacccccgggcccgactgggcgagccccgccggcgccgactgcttcgatctcggttgatgctctctctcatcttctcctgcccttccattcttccagttccacacgccgcggttttccaagattcgaatttcgattattcagcaaggctagctaaatctttgcagagactagcgctggcgagcacggccagccggtgtacgaggtggtgcaccgggtgaccgacgccgacaacgacctccgcgcgggaacgcgcggcgcgccgagcagcccaccacctactgcgacgcctacagcaacccgcagccgcaggagatcctgcagctcctgccacacccggtgtggggcgagttcggctaccccacggccaaggggcagggctgggtcggcgaccccagggcctgggagctcgacgtcggcgccctgtcccaggcgctctacttctaccg

SEQ ID NO: 6148 - DNA, 618 bp, Setaria italica
  misc_feature (618)..(618): n is a, c, g, or t
  Peptide Sequence Number=SeqID_72122
ggaacggcacccgcgtgcaccgcaccgacgccgcccgcttcccctacggcgcgtaccacgtctactgctcccccgggaacgcgcggcgcgccgagcagcccaccacctactgcgacgcctacagcaacccgcagccgcaggagatcctgcagctcctgccacacccggtgtggggcgagttcggctaccccacggccaaggggcagggctgggtcggcgaccccagggcctgggagctcgacgtcggcgccctgtcccaggcgctctacttctaccaggacccgggcacgccggcggccaggaggcggtggacgtcgctcgacgtgggcacggagatatacgtcagcgagaacgccgaggccgagtggacgctcagcgggttcgatatccttgttccggacacttgcatcaagtcgcagcaagaaggaaccgccggcaacagttgctggtagagtagttgatcaaagggaacatcacgctcgtgtcaacaattctgattgaaacttgtaacaaaaaaatagctaacaaggaagacatatggacagtagtactgcaaaaataaaagagttcatcgatagtaattagacagacgaagaaaaaaaaaaaaaaaactaaagn

SEQ ID NO: 6149 - DNA, 660 bp, Setaria italica
  Peptide Sequence Number=SeqID_72123
gtacaagatcggaggaacagaggctgaattatctggcagcactgtattctcgacacctgcagcacgagaaaccgatcgacctgcagttccgacgaacaaacctaagaacagccagccgatcggtgtgctgcccgacacacgcgcacgcacacggacacggtatatggacaggcactgatcacactcacacccaccccttctgtaactactaggtgattccgtttctgctaccattttagaacacaggagcaaactttgtactactggtgatttggtgaagatgaaggattattgctgggtccaggcgtccagctccgtgttcacgctctcccgggacccttgggcgggtcatggcggttgttggggccggacggttggtagtcgttcacctcaacggccatcctagccgcccgccggccgaggttcctcgccgccatcgccatctcctgagaaaaagccagcttcagagccggcgggtgctgctgcgggttccccaagcgtaagcttcttggcgtggggacggaggaggcgagcgggaggaggatgaggccggacagcacgaggaggagcgcgaagaggaagggcttcccggcgtggcgcgccatttcgtcacaggctcacagccgcgggttcggaatgaggcgaaaggaattctgaatg

SEQ ID NO: 6150 - DNA, 598 bp, Setaria italica
  Peptide Sequence Number=SeqID_72124
gcaaactccaatggagataaaccagtgcctgagcaagggcttgcagctacccaagcaaactccaatggagataaaccagtgcccgagcaagggcttgcagctacccaagcaatctgcaatggagataaatcagtgactgagcaaggccttgaagctatccaaacaacttccaatggagataaacaaacagaagctagcaagcaaactgaggttagtttgactgataaaacctcctccctacttgtggaggatgagaaacaaacgattctagggaagcgtcccagagatgatggtgaacaagactgcaacggggaagtaggtgtagatgttggcaagacatgaggtttgggactcccaaactcgttagactcatgtacatagctatagatatggtaattgaaacccccagggaggggttttactaggttgctgatatcagagcgaattgtcacctctttgtcatacacggacctctactagtgttcttattttgctggtagatgtggtgtttatgttacgagacacagattgcaagctgaatggtacccttcccagtcacgttatatagcagttatttttggtcttggtgtaaaaaaaa

SEQ ID NO: 6151 - DNA, 708 bp, Setaria italica
  Peptide Sequence Number=SeqID_72125
cctctagaataggtagaattatattagtcaaataaagcatcactaaagcaagttcactcattataaataatattgcaatgttagcttagacataccatgtttgtcaaaatggtatcctgtgaaataattgtggttgcattaccattaccttcatgaatagaactctgaatatgtgcctcctgtagccacagcgtagatagcagtatgagtttgtagacaactagatatggccatagcagtatgagtttgtagacaactagatatggccaaagtagttgtatcacaacaggaataggactgtatcatgcttttagcgctagcaaggtactattcaactgtgatcaccctgtctaatattgtgctacaagacaaatttgatgttaaaaaaagggactattcactgaggctaagctctgctgtagttaaggaaatcatgacttgataccactaaaatggcactaaaatctatcttattgctgccacgcaacaactacatcaagctcaggaagtaatcacaattacaaggagtcaaggaccaaaagcaaaagtatttcataagagaaaacaatatgcctagtattgctggcatgcaacaaaaagaaacaacaggaagggcaaacttctagaaacttatgaccctgaaaactgagtaatttgaaggaacaaagcatatccaaaataccaccaaatggctatcagattagaatt

SEQ ID NO: 6152 - DNA, 577 bp, Setaria italica
  Peptide Sequence Number=SeqID_72126
gctgtcaacaacggcaacagcagcatcacgttacactgttgcgctattttgagacaccaagacagctccaaatatacttagcacaggaaaatcacgttgcctgccacttcttccatgaaaccacttccttgctagatccttcagaatcaaccatctagtactgatcataaacggggcttctcctcctatcatagcgatcataaacagggcttctgcccctgctgtaacgatcatatgcagggcttctcctatcatacattgctccatcacggcgatcatacccaggataacgtccacgccgattgtaatctggactgtagtcctttcggtaccttgggctaggtgagcgcatgtaggggttaccgcgacgcctgtcatgagcaccttgcttggggctgccgtatctgtcatccctctcattgtcatcatcccggaaggcatattcaactgtgatcaccctgtccaatattgtgctcttatcagtgttcttgacagcggcagtagcttcctcttgtgtctcataccgtacaaatgcaaagttccttcgaacacgaatgttggcaatcttgccatatgg

SEQ ID NO: 6153 - DNA, 1042 bp, Setaria italica
  Peptide Sequence Number=SeqID_72127
caagaccttcaacataaaccccaacatattcctttccaagcaccgcttcctccaatgtctcgtttggcatcaatagtcactaacttcgcattggccacaattctttcctttgtttcttagtgaaagaagatagactggataacggctcgattctgaccgacacaaattgggggctttaactcttcgagccctcatgtttgtcaaaatggtatcctgtgaaaaatttgtggttgcattaccattaccttcatgaatagaactctgaatatgtgcctccttggcaactgtttgctcactaggtaaagacgtacggtcttgggtggatgtctcctgctgcacttcattcgtgggagagtacacattaccaagtgagtgtgcagggctgtgatcatgatgactttctggttctagaagtccatcttcattatcatgtagatctgctaccatttccttgatgaaatcctcttcaggaaacttttttaacatgaaaccaagctagtgcttcatgaaaccacccatgtgttgcatcttattctccatttcatttactttctcttggtatcttctttcttccttagtttgagtgacaaaagttaaccttgagacactcgaacttcactctagtacttatcatcatagtacctatgtgcttttaactcctttgcaactatatcattgaacacctcattaaaatcttgagctgaaagattaccattgttgttttgttgccttttttctaattcctcatatgttgcattcattattgcatccactttgtgggtagtgtatctgccattctttttcttatgagcaacctcccataattctagcctatgaaccttccttttctggttatcttccatctcttttttcagcttagcatggctttttctccttgatgtgtgtgtattcttctattcttttgcgatccttgagtttgtggcacatactttcttatgttgttctcggcaccaaatccaacaagagctttccattgaagttcattcactttgtttggtttcccatttatgatttcatctag

SEQ ID NO: 6154 - DNA, 474 bp, Setaria italica
  Peptide Sequence Number=SeqID_72128
agaggcagcgggagcgggcgcggagggcgcagcaccggcggctgcggcagcggcaggtgaaggcggagacggaggcctgggcccgggccgccgaggagtaccgcgagatcgagcgggagatgctcgaccgcaggctcgcgcccgcgctgccctacgtcaagtcgctcttcgtcggatggttcgagcccctgcgcgacgccatcgccagggaccaggacgtgcagcgccggaagcgggtcaagcacgtctacgccaagtacctgctcctgctacccgccgacaagatcgccgtcatagtcatgcacaagatgatgggcctgctcatgtccagcaaggacggcaccggcagcgtccgcgttgtccaggccgcgcactgcatcggcgaggctgttgagcgtgagttcaaagtccagtcattctttcagaaaagtaggaagaagaaggatcaaggtgaaaatgatcaagcattggaga

SEQ ID NO: 6155 - DNA, 278 bp, Setaria italica
  Peptide Sequence Number=SeqID_72129
cgtggtccccgcggtgcgggcgctggtgtacctgtcgctgggcatgaccgtgatgatcctcgtcgagaagctcttcgtctgcgccgtgtgcctcgccgtgcgcgcgctccggctcagccccgaccgccggtaccgctgggaacccatcgccgccggtaggggcggcgacgaggagtccggcgacgccgccaagtaccccatggtgctggtgcagatcccaatgtacaacgagcgggaggtgtacaagctgtcgatcggggcggcatgcgcgctggagt

SEQ ID NO: 6156 - DNA, 815 bp, Setaria italica
  Peptide Sequence Number=SeqID_72130
aatagttacaatagtaggtagaaaggcataaacaagtttaagtaatccataaatgtaaaattgaaggtgtaaaaaacattcaattaggatatcttctcctcaaacattgggtggtttaacatcagcatcgtattgttgttaacgatagccttaactgctagctctttagcttctgcatgtttccttttcaataaaatgcatatatcttcaagctcctttctgcaagtctcagctttttctaagttgccatcattttctaacagcataggcaactctagatctgaaatgtctcccatcccagatggcatacatgaagagatcgcattatccatatgagcttttggagttccacttcccagaatcattccatttcccaactctggaacagtttgaggtgattttcttacagctggagacctcatgatgcatttgagaactgtaggagcttttggatctagaactgattcctcaggaaccttttgcattatggctgggctaggcaatgcaggttttccttcaggaacggacttaaggattttggatgttgttacaggggaacccttggtcccactcagttgaaccgattccttctctagaaccctgtcagactttggacttctgattcctaattttgcaattcttgctcctgtcatttgagaaattattgatattttattatctttggagggagcgacttgcaatgaatcagaagcgttgctgctttttagaagcacatgatttgcaacaattttatgaccactgccatgtgctgtgctcattcgagcattcagcagagatgaattccctgagctagg

SEQ ID NO: 6157 - DNA, 418 bp, Setaria italica
  Peptide Sequence Number=SeqID_72131
gactacgacttgtgagctcacactgtcctcaatgccttgatccaatcaacctctagcctaaaatcaccagtcccagtcttggcaccgggaacaccgccttctgcgtttacagagagagacatccccacaatccgagcaggattcatttccaactttgcctcaatcacacttcctctccatgtaggtaaataccgatcaagagggatcttcaagatttgccatctgtcttggggtgtgtacacaaaagcctgccatgaattatcttcttgttgtccaggtgaattcacccaattctctgtgtatatggtagatatgtagcatcttccatcccctttgatcttcattgctattgtatcatatgcatcgaggtcaatgaaaccatcaaacttttttgatcgcatcccgcagaatccatagc

SEQ ID NO: 6158 - DNA, 995 bp, Setaria italica
  misc_feature (1)..(43): n is a, c, g, or t
  Peptide Sequence Number=SeqID_72132
nnnnnnnnnnnnnnnnnnnnnnnnnnnnnnnnnnnnnnnnnnnggtatcaaatgacgagcgttgcattcttaatcatttattcataaatctcaaaaggaaaacaaaattcattattcattggtgccgactgcagcagccttccatgtttaccggcaaacataaacatttcatacacctaaaagtgcatacaggagtgggcactccgcattatggttactcatgtagtcaagtggttttggctgctggcagagcagggtgaaacaaaagagaaagaaagcgccgatgtgaaaaaaaagctacgacttgtggagctcacactgtcctcaatgccttgatccaatcaacctctagcctaaaatcaccagtcccagtcttggcaccgggaacaccgccttctgcgtttacagagagagacatccccacaatccgagcaggattcatttccaactttgcctcaatcacacttcctctccatgtaggtaaataccgatcaagagggatctgaacaaaacagaaacttcaagatttgccatctgtcttggggtgtgtacacaaaagcctgccatgaattatcttcttgttgtccaggtgaattcacccaattctctgtgtatatggtagatatgtagcatcttccattcccctttgatcttcattgctattgtatcatatgcatcgaggtcaatgaaaccatcaaacttttttgatcgcatcccgcagaatccatagcgcctgatcctccatgttgacccctcagacatatccgaagaaagattaccagaaaacacaccagttaatgaagtatctgcaccagcagcaccttcagttatctccaatgatgcagaagataaacctccatactctgaatctgagtacaaatgccaccttttcagctcatcttttgagttgaaattgaatatatatctttcagttggtggaatcagatcatctgaactccatacaagagctctcttggtggagttaaaggaagctt

SEQ ID NO: 6159 - DNA, 513 bp, Setaria italica
  Peptide Sequence Number=SeqID_72133
gcggattcatctacttcaatttcatttcttctggtagccggagtaccttctgaagtgttcttgtcagaagtagcctcaagtaaaaccagaggatccttaatagctctgccatcctcggtgataagtggtgctgtgataattttaccactaccaacatgagaatccatctctcgacagtcttccttccatctggcatactgtaacctgcgtatttgcctgatctcttccctctcatcgaaggtacttctgggatcgaaacagccaagtaagaattcccaaacctcccccctgactgttggatgcacacctcctgtttgtatccgtcttaggactgaggcaatatcaagacagccatcggcactaaatgcagcctgccatttccgggcacttaacgttttgccagccttgatcttgaacttgctcttgggcacatcgtccgtgcaatccgaccggacctcgtagtaggaatccgcgggcgtgccgctgctgagcccccacttcagcatcttcgag

SEQ ID NO: 6160 - DNA, 377 bp, Setaria italica
  Peptide Sequence Number=SeqID_72134
cccgtgtccttgggggtatatgctaccaaggcttgccacaaccgttttgccattggtggtggcgatggtggcgtcgcggcctttgatctcggtgacgacgccgtcgacccaggcctcgccggggtcctccaaccacacgtgcgagccgaacgatgatgttcaccggcgtccccatctggtcgccgatccccggctgccggcgaattcgatcagctcgtcgtcgtcgtcggccgacggcacgaacggctcatgggagctcgcgatcactcgatcggagctgcgagcgagcgagcgagcgatagaggaggttatcgatcagcgggtggctggctgcgagctgatgcgcacgcgaacaggtggaaagggggcggcgcggg

SEQ ID NO: 6161 - DNA, 280 bp, Setaria italica
  Peptide Sequence Number=SeqID_72135
ccaggtagccgccgccgccggcactggacgaagcgcccgcggaggcgccgggtgtgctcccgcgccgggcgcggccaccgcagacggctccaccgtcgcagcagcaacggtagccttctcttccaccggcgacacgggcatgagcggcagcgtcgtcggctggtgatgctgctgcggcggcggcagatgcggcaacgagtccacggacgtcatgcccgacgaggacgaggaccgcgacgacaacgacttctccttctcgcagttccttgttcctttcctg

SEQ ID NO: 6162 - DNA, 1026 bp, Setaria italica
  Peptide Sequence Number=SeqID_72136
tttcaacttcatctaatcctgtggagccatttaccgcattgtcgatggaacagatggaatctgcggaagcagcatctgtgattcctggtatagagcgctcaggctctgaggcatcctctaacctatgatcaatgaaaggattgtagcgatcaattttgtgtggctctctcacatctaatgctgaagctgcatcatggcattcagacatcgttcctgagcaaccgctggtattctccttacttgatgtaccgctactgacaggctgactggtgtttgtcaaagcaacctgtccaactgcctcttcatgaatttcactgctctcggagtttattgtgcttgcatgtcgggattcttctgcactttcgaggcgaagtaactcttgcaagcttatcttctcactgggatcgcctgcaatgcaagaagtagtagtccgatcttcaagatcatactctttaccagaagagtgttgtttctcgttgtcataatcaggagcaaagtcaactgggacaactgcttctggctttagttcgtgcatgtattttttagaatcatctttcttcccatatcttatgtcactgtttgcagggatcatttggcaactgaaatttggggatgaccttttatctactggtttttcttctgaaatcttcctatgaagtattgccccttcatcaacacagacatccttgacaaaattaccaccataattatcagaatcaacagtatctgccaattttatctccatgacatctttctcataaaaacattctgaagtgtgacgtttccacttatctgtaccgtatcttgtgatgaatttttttcttctaccattttttgtgtgaaaaactcagtatcatgttaccataaaaatcatatgatctagtttcaatgtagttgtcctctgctgggataaaaccccggattcgctgctcctccaccgcttggcgaagccgaaagaacgcctggagcggagattgggcccggagcccggccaggatggaatgagaaggggatcgaggatcgcag

SEQ ID NO: 6163 - DNA, 1362 bp, Setaria italica
  Peptide Sequence Number=SeqID_72137
tttttttttctatgaatgctgctacctcaaacaaaccaacgaaaaaaactaaacagaacaaacgaattttcaaagcacattttcggacaaagggggagaagaagaaaagcaccatcactacactacagctatatactaccttcactcaacctgctccgggatcaataaaaggagcagggtaatatgtggagcgcgagagaaccaccgccatgtccaagggggcgtttggatgagtggtatttcgttggaatgctcagtgactatagctcaagcttgttctccgaccccgaactttccaaggaaataccatggacccaaacgagatcccaaggatgtttctttccgcctcgcgcgtgcacccaccgtggaaggagctgaattccgcgggaagggatgcgaagggcgaccgcgatggatcagaatttacagcagatgagtcctttcctccacgcgcggcgccgcctgttgcgccgacgttccgccttcgccatcctcaccgggctgctgatccactccctctgcaacactggaaatgcgaaggaccgggtgctagtggtgctgctatctgaccgaagagagacgttgccagaatacgctatatgaccggacatcgacagtggccctgacatgatactgggaccaaagaagttaggttcagaggggttgtcgttgccaatgcgagcagttgatttcgaactttcagacgccgtttgttccgccacagaatgatcttgcgcaagggtggagctcttattgactgcaccatctgagcctacacggtgctcctcatctatctgatcagcaacaccatcactcacgcatttttcttgattatccccatttgcattgctaggttcagtattgctggatgaagatgtagcaactgcagtttcatccactgcaccagtgatggccttgctaaaaatacttccactatgatcatcactctttccagatgactgaatgtctgaactacttgtactcaccgcatctgtcccgggttcaactgtttcaacttcatctaatcctgtggagccatttaccgcattgtcgatggcacagatggaatctgcggaagcagcatctgtgattcctggtatagagcgctcaggctctgaggcatcctctaacctatgatcaatgaaaggattgtagcgatcaattttgtgtggctctctcacatctaatgctgaagctgcatcatggcattcagacatcgttcctgagcaaccgctggtattctccttacttgatgtaccgctactgacagacttccaaagatggttttcctgatgctcaggttgctttgacaaacaccagtcagcctgtcagtagcggtattctccttacttgatgtaccgc

SEQ ID NO: 6164 - DNA, 351 bp, Setaria italica
  Peptide Sequence Number=SeqID_72138
gtcggatatataagtccttttcgaatagtaccgtaaagacatcttcaactatgaaagtgcaaggatgcctattttcttagctcaagcttgtatctcaggctctcagctaccctatccatgtttgcctcagaatttgtatttttcctttagattcaaatatgaaatcaatagcaagcctcaggaaactaatacattcaacctaagaagcttaaaacatcctaaatatggcttaattgaaacttatttggctggaataggcaaatcacaagtgtgcatcaattcaattgatcagttacatgtaagaatagacaaagttaatttccataaatatggaagttattcagcaagatt

SEQ ID NO: 6165 - DNA, 354 bp, Setaria italica
  Peptide Sequence Number=SeqID_72139
ttctgctctttgagcagctccatccacctcctctgcatgaaaacacaaaattcaagaaccattatgtacacatctcagatttacaattttgcatgtgtataaattctaatgtcaaatttatagctcctattttatttaatagttcaaaggtaatatgtacattttgaatacaatgctctggcactaataactgctagtctatttacatgccaaaatagtcttgatataacatgaaaacttaaaagatttgatgtcaacaaataattaacttctaattttcgtaacaacacaacacctccagtagtctggcatagatgtcaggtcacctaaggcagtatgccaggtcaacaggta

SEQ ID NO: 6166 - DNA, 303 bp, Setaria italica
  Peptide Sequence Number=SeqID_72140
cgtgtctcaggaatcagatggttcagcttcgccttcatcttgcacatgagactggaatccgcaggtggtgaggtgattcgcgagtttctcgcccagctgcttctgccaatctttggtcgccttcgcttcgggtgtcgtccacacaacggcggtcgccttctcaacatcaaccgcggctgcagcaacctcaggctggttctcgaggatccgcttgaccttggcagcgcatccgctgcacgacatccccccgacatggagcacgatggcgtcggcgtcaccgtccgatggctcggcctcacccag

SEQ ID NO: 6167 - DNA, 672 bp, Setaria italica
  misc_feature (1)..(53): n is a, c, g, or t
  Peptide Sequence Number=SeqID_72141
nnnnnnnnnnnnnnnnnnnnnnnnnnnnnnnnnnnnnnnnnnnnnnnnnnnnnttttttttttttttttgtcttcccaacaagggcttcttcaagtgaacaatgaaatatcagtacaaaacaacaccatataatcagatcgaacatctgagagttgagttgtactgttctataacaacaagaacaaaaataacaacaaacgaaaccttttgccccgagcaagcctgggcaggtttgtgctgttctacaaattgcaatgattcaacatgagcatacccgcttgcattcaacaaagttatggcatctctcactttattggaggtctcaagcatacatcagtcaagatatcacttggaagatacagcagaggaaatatgataaaggaactgcccgaagccattggcaaaatgataatcatgattcactctctttagcttgggccattagctccgcctgcattctctttatctccaggtccctttccatcctctctttcttctcgtcctggtggagagcgatccagacgtggaccctgtccatggactgccagaagaggaacgccccgaaggtcatcgcgaagaaggtcgccacccgcaccatcttcttcctcttctccgatctctccggctctccgcggcggattggggaatttggcgacggctgcggcgtcttc

SEQ ID NO: 6168 - DNA, 458 bp, Setaria italica
  Peptide Sequence Number=SeqID_72142
ccggaagttggagatggcctccgctgctagcttgctgccctcggactgtgctcttatcgatctcttggacatgttcttcagtagggcacggcgagcgtagaagccaataatgattagtggttgcgctgctatcattacgacggccaagcgccaagcgataaccaaacccatagtccaggaaacaagcacggaagaaacaacctggatcgctagagccatccggtctcccacaagtgacctgactgcgttggcgtccttagcaagctgcgagcatatggcaccagtggagttctcttcatggtcaaaccatgcaatctcaaatgtgaggatctttgtgagcatatgttctcttatcctcttggtgagacgttcccccatgacaccaaagttgtagtgctgtacaatacttagtaagaacgatgccactgcaagagcaacgaagaagagcacataggtcc

SEQ ID NO: 6169 - DNA, 691 bp, Setaria italica
  Peptide Sequence Number=SeqID_72143
ttttttttttcaggccaatagagaagtcacgattcacgaacagctcaaggacaattggttcagatccatattcatgtagttttctgtagtgcagaaaatattattctacaacatgtcaacatggctacaataatgcatgagaaaggttatcatttacagtaagtgattttttgaaaaaccccgtgaacctttgacatcatatgaactgactgttttctgaatcatttttgcttggtactttcttctactctggtaaaagcatctgttattacatcggtagcccaatccttgacatcctccagtcgcattggttccccagttcttatacgggcatgtggacgagctaattttgattcaaaaggcgtccttggcctgacttcttggacctcttcccattcttcacgactcagcatccttacttttccttgatcagggtggctattatttatcttgcgctctctcctttcttgatctgtagcttcatgttccatcatgaggagcttggtgaagagggcgacggctgctgcggtgagcaccatggggagggagaccgagtcgagccacgccagcgactccggcgtcggcacgaagaactcgtcgcgccccgggtcgcgccgtcgccgcctcgcgcgctcccgctccgccactcgctgccccaaggaggtccctaaggacgaaagaacctaaccaa

SEQ ID NO: 6170 - DNA, 892 bp, Setaria italica
  Peptide Sequence Number=SeqID_72144
tcgacccggacacgcacaagccgctggccgaggccagcagcagccgcgggggcggcgccgccgcagccagccgcacggcggtgttcagcgacgccgagctcatcctgtcgtcggcggcgggcaagcacatgccgccgccgccggtgacggcggagagctacgtgtacagccgcagcatcagcgccgacggcggcgtgagcgacggctccctgcagtcgctgtccgggtacaacggggacttcgccgcgggctacctgcaggaaccggacgcgctgcagcagggcggcccctccgatggcccgccggcggtagttctcccgtcggtgtcgagctccagcacgctgaactcgatggctggcctaagccccccggccaccacggccaccgacgaacagtgcaacaacaacagtagcagcggcggcggcaacgggtcgttcgagctgtcgacgcagcagagctgcagcgctagccagctgccatggctggagctgggcacgagcagcggcgccgccgccgtcttggaccagtacggcgcggcgctggacgagctcaagtggtccgactacgtgttcgacggctacggcggcggcgggcagtaccagcagggacagtgcatctacggcgacagcaaggacgccgtgcagttcgtcgacgccagcggactcagcagcagttggtgcttgaattgatcgtatctcgagccaacgcacacggcggcgagcaattaatcgatcgatcgatcgatcaaaccccccaacactttatacgcgtacatgtgctcgtgtatgtgcctacacggttgttgatagctaatgtttggtggtgagcttctggtttgtaaatttcttcctctttggattaccgggtctgcgttgcgtgttaatttccggtg

SEQ ID NO: 6171 - DNA, 618 bp, Setaria italica
  Peptide Sequence Number=SeqID_72145
gcagacgtgcgtgctatcgcagcggtggagaagcctctggcgctctgcgccccgtatcagcattgacgagcaggacttcgggatctccctgatgatcgaacgtgatgatgccctagaggtgaagtgggcaaggtttgaggatttcgccaccaacctgctgctgttccatgataatacctcatccttgggtgaattccggctttcttctcgcgtctataaccagcgtcatgtggaccgatggattcgccgtggcattgagtactgcccttctgtactcattattctgatactgaactattgtcgcttcaagttgcctccggtagtgggttcaaatttttgtcatcttaagatgctgcgtctttgcagtgtggatttgggtagaaattttgcggacctgctatgttctgcatgccctgtcatggaagatttgaagcttggaaactgcgagttttctggcaattcttctcaagtcattacatcgcccacactgaaaaagttggaattggagtcttgtgtgaacaacacaggttatccattggtgatcacagttcctagccttgcatatctctgtctgtgttatggatactttgaggctggtatttctttattcaagatgga

SEQ ID NO: 6172 - DNA, 540 bp, Setaria italica
  Peptide Sequence Number=SeqID_72146
catcttttagtgctgtgcggtgctgtgcccaggcagacagagtagaaggcgcttgctctgccccagtgccccccctgcgccgccaccaccccggctgcgcgtccggacgcttcgagcaggtgcgtgcgggttcgctagatcgccgccgcggagcttccatttctgagcggggaaggaaggaattgtgggggcggagccggagatgatgcacgccaagtcggagtcggacgtgacgagcctggcggcgtcgtcgccgccgcggtcgccgaagcgtggcggcggcggcgccggcggcggcaacaactactacgtgcagagcccgtcgcgggagtcgcacgacggcgggtacaagtcctcgtcgatgcaggccacgccggtgtacaacagccccaacgagtcgccgtcgcacccctcctacggccgccactcccgctcctcctccgtcagccgcttctccgggaacctccgcaagggcggcgccggacgtaccggacggggtaagtacggtaaaggtactaacttacttaaacgttaacttaa

SEQ ID NO: 6173 - DNA, 438 bp, Setaria italica
  Peptide Sequence Number=SeqID_72147
tgacacagaattctttgttgagtcaatcgtaccaaagctggagtacttcagaacaagacaatgtgaatggtccagcagatcagcatgcatgttgttacttgaatccatgcttatcctccagttctcatcgtctgtctgcattcatattcctccacgttaatggttgattaaaattcagaatcgctgcaaacttacagaataaccactgaatctgatatactgatctctcttcctgtggtacacgcagcttcgcaggtactaccaaccgaggaagagccaccgtatggtgactgcggtcatccacggcgagaaggtacccctctacggcgccggtggcagcctgatgctgtccagcacaggcggggcggtgccccctgacgctggacttcgacctgacctcccggggctacgtgatcggcaagctcgtgcgggtgacgc

SEQ ID NO: 6174 - DNA, 488 bp, Setaria italica
  Peptide Sequence Number=SeqID_72148
tcgtcgcccccgctgcaattgccccgcccgtccgcagccgcttctccccacttctccccggcgtcctcttcctcctccggcggtccggccccacgccgtccatgccaagcaaccgcaattgctgcgcgcgtttttgatccagtcacaccttcctcgaattcctctcccgcagcatatcggttcttcgtcaccgaaagatggtcggcggcggcaatgagttccggttcttcttgtcctgcgacatcagcctcccgctcgccttccgcgtcctccacgcagaacatatcctattgacgcagcaaaaagtcccagagctctttgttgagtgcaagctatatatcgatgggatactatttgggttgcctgtaaagacaaggctggaaccttcaggaccaacgtacttttggaatgaactgataacactaagtaccaaatacagggacctgacttccctctcacagcttgcatttacggtgtgggatgtctca

SEQ ID NO: 6175 - DNA, 224 bp, Setaria italica
  Peptide Sequence Number=SeqID_72149
ggtggctatctcgtcgtcggaagcgggcctgaagctgtcggtgcggccctggggcatggcgaaggacgggcctccggccaggctgacggcgtcgcgggttgcgagcgcgatgatgtcggcgcaggagacggtgggtccgcatgcggcgtgcaccttggcgcggatgttctcgatgagctgcagcgcccggggctgcagggaggcgttgggcccgttggccttct

SEQ ID NO: 6176 - DNA, 481 bp, Setaria italica
  Peptide Sequence Number=SeqID_72150
ggttcgttaaggttacgggttccttccggttcctaggtcttgtacggtcgttcgtcgggtttgtcgagcgcgatgatgtcggcgcaggagacggtgggtccgcatgcggcgtgcaccttggcgcggatgttctcgatgagctgcagcgcccggggctgcagggaggcgttgggcccgttggccttctcgccgtcgagcaggatggaggcgtcgcacccctgcgggaggcagtcgtggaagaagatgcggaggaggccggcggtgacctgcacgtcctgggcgcgcgcggcctgcacggcgccgcgcacgatgccctcaagctgagggcacgacgccgcgtggaagtccacggacaaaccaccgacgttggaggcggcgataatcagcaggaggacgacgacgacacaactagcccttgttgccgccatgtcgatctccgctcgtactacgtagctgctcgatcgatgggcttgtccgcctg

SEQ ID NO: 6177 - DNA, 262 bp, Setaria italica
  Peptide Sequence Number=SeqID_72151
tccctggacagcctgttcagcgcggacgccgtgcagggcagcagcgccgccgttgaagtaggcgaactggtcgccgaagatgaacgcgtcgaacagggcgtccgactcggagtcggaggcccggggcgacgcctcgtcgtcggcgctctccggctcggtcctctggcgcttgctagcgccgccgctgctctggtcggcggcctccagggcggggtgcgccgcggggcctcctcgtcgtacaccgacacgccctgccacgaga

SEQ ID NO: 6178 - DNA, 339 bp, Setaria italica
  Peptide Sequence Number=SeqID_72152
gggggggggggggggggcgggcttgctgattcacaagctaaataaaaagaatcaggaacaacaatactcccaagcaaataaatgaatttccaattttgtcgccaatttcctattcacatgtcgcatggtctccaaactaatcttaaatctaacaaacgacgatcagaaccgagcaacccgtcatccacggtagcagccctaccagatctgactcgaggtagggaccagaagtcagccacgattctcctttctggaatccccctggggggcttggagaggcagccaccgtcgctgccgatggcgagagggaggcggcgctggcgcaggcgactagtacga

SEQ ID NO: 6179 - DNA, 439 bp, Setaria italica
  Peptide Sequence Number=SeqID_72153
gcacatccgttggcgacaaccatggttgaagacagcacagcctgcgccaaccaggttgacgtcgaggcagcccagcaccatgttaaactggaaggtcatgaagtcagcacgagaggagttaagaccccgggaaatttaccacactaggattgcagaccacatcacaaatgactccctttcaatttactctggcatatttcacctgagtggtatttccctgctcgactgtcccagaatatactcttccatcacagggaaagagcatatttgtactcctctaccgataacatacctcatctcaagaacccttcatcaaagtacttaacttctctacagtgaccagacgaccttcaagcacagtgcggtgcaggtacttgatgcagcgtcttgcatcttcaacagtatccatagtcacaaaggcaaagccacgggattcttt

SEQ ID NO: 6180 - DNA, 956 bp, Setaria italica
  Peptide Sequence Number=SeqID_72154
ccgtggcggtggcggtggcgatcgcggtggcggtggtgatcgcggtggcggtgatggtggcacaatgcacaacaagactccaaggtcgctctctggtggcagccctcacgttgatgtagtgggtatgcaatgtcggtgaggaaggtgtagacgacaagcggtgaagatgagctctggggttggtgataagcaccagcacgtcagctgcacatccgttggcgacaaccatggttgaagacagcacagcctgcgccaaccaggttgacgtcgaggcagcccagcaccatgttaaactgagtggtatttccctgctcgactgtcccagaatatactcttccatcacagggaaagagcatatttgtactcctctaccgataacatacctcatctcaagaacccttcatcaaagtacttaacttctctacagtgaccagacgaccttcaagcacagtgcggtgcaggtacttgatgcagcgtcttgcatcttcaacagtatccatagtcacaaaggcaaagccacgggattcttttgagcgaggatcaagaacaacatgacagtttttaacctttccttctttactaaaaaacttctcaaggtcatcttcagttacacgagtagacaatccagtcacataaaggttattccctggattgtctactcgtgtaactgaagatgaccttgagaagttttttagtaaagaaggaaaggttaaaaactgtcatgttgttcttgatcctcgctcaaaagaatcccgtggctttgcctttgtgactatggatactgttgaagatgcaagacgctgcatcaagtacctgcaccgcactgtgcttgaaggtcgtctggtccagggccaagctcaacttcccctcacccgccgacgccgtccagaacagcggcaagcgcggccgcgccgccgaggtcgtcgacctcgtcgccgacgaggaggacgaggcca

SEQ ID NO: 6181 - DNA, 974 bp, Setaria italica
  Peptide Sequence Number=SeqID_72155
ggtcgtggtggccgtggcggtggcggtggcgatcgcggtggcggtggtgatcgcggtggcggtgatggtggcacaatgcacaacaagactccaaggtcgctctctggtggcagccctcacgttgatgtagtgggtatgcaatgtcggtgaggaaggtgtagacgacaagcggtgaagatgagctctggggttggtgataagcaccagcacgtcagctgcacatccgttggcgacaaccatggttgaagacagcacagcctgcgccaaccaggttgacgtcgaggcagcccagcaccatgttaaacttctctacagtgaccagacgaccttcaagcacagtgcggtgcaggtacttgatgcagcgtcttgcatcttcaacagtatccatagtcacaaaggcaaagccacgggattcttttgagcgaggatcaagaacaacatgacagtttttaacctttccttctttactaaaaaacttctcaaggtcatcttcagttacacgagtagacaatccagtcacataaaggttattccctggatttctatcatctaggctcctggatcgactcctatcccttgaccttgacctcgatctaccacgtctcctaggaggaggagaccttgaagtgctccgccgcttaggactccttggatgtggagaccttgaggtactctttgggggaggcgaccttgaagggctgcgcctctttggaggaggcgaacttgaagttccatttctttctgcaggaggtgtaatagaccgtgcggtgtatctaaaaaataaaattttacaaaccagaacacattagatgctaagaagtctatctaaaagataagaagataataagaattcccacatgtagggaatactaacctcacttccttggcttgtgacatctaatacaaaaaacacaagagacggtgtagtgtcagataaacaaccaataacttgtagattgatggaatatataaac

SEQ ID NO: 6182 - DNA, 1650 bp, Setaria italica
  misc_feature (105)..(105): n is a, c, g, or t
  Peptide Sequence Number=SeqID_72156
taagaaatacaactagaagaaagaattgctttgatgggatggttagccttctttatgcagaattgcagagttgagttgcactttgaaatggagatgcaggggttntttgatactaggggatcatccgtcatatcggatgtttgatattgattaaaacaacccctgcatctccatttcaaagtgcaactcaactctgcaattctgcataaagaaggctaaccatcccatcaaagcaatcttctcagtgattctacctcgctgcctgtgaacctggagtgcaagccaatgtttccaaaacaatacccagaccatataacagtattatcctctccgaacgctgacatgataacatacttttcaacagaaaaaaaaacaaacaaacaaacacagcaaggcagttacaactccatgctaacgtctctcagtctgaccattttaaaggtagcatcacaagttcaattgttcacgcagtcacgactagcccgaaaacagaaggttcatcgtaagggaagtgctttctagtctgtcttgtggttcccattgcctgccagtgacctggaccgatctccacgccttctctgagagtcccttgagcgtgagcgttccttcctgcggtcccgtgagcgtgagcgttcccttcggcggtccccgtgagcgagaccgttcccttcgatcccttgagcgggacctttcccttctgcgttcccttgagcgagaccgttccctcctatcccgtgagcgagaacgctcccttttacggtcccttgagcgggatcgctcccttctgcgagaacggtgaggtgatgggctcctttgagatcctcctcttcgaccgcagtattttccaggagtaggagtcctttctcgagtccttttagccttctctacagtgaccagacgaccttcaagcacagtgcggtgcaggtacttgatgcagcgtcttgcatcttcaacagtatccatagtcacaaaggcaaagccacgggattcttttgagcgaggatcaagaacaacatgacagtttttaacctttccttctttactaaaaaacttctcaaggtcatcttcagttacacgagtagacaatccagtcacataaaggttattccctggatttctatcatctaggctcctggatcgactcctatcccttgaccttgacctcgatctaccacgtctcctaggaggaggagaccttgaagtgctccgccgcttaggactccttggatgtggagaccttgaggtactctttgggggaggcgaccttgaagggctgcgcctctttggaggaggcgaacttgaagttccatttctttctgcaggaggtgtaatagaccgtgcggtgtatctcacttccttggcttgtgacatctaatacaaaacacaagagacggtgtagtgtcagataaacaaccaataacttgtagattgatggaatatataaacacttatctaggaagaaaaatgaaaagtccataattaagcctaagagctaagacaagtaatactggaaactgtgtataaatacacatctgataactgttgggcacagtccatttaccataatacttaaggcagtgaagtgaaaagtactaagtaccttgacaaatgaagctgcaaaccgaagtgatgggtaaagagtagagaaaa

SEQ ID NO: 6183 - DNA, 2498 bp, Setaria italica
  Peptide Sequence Number=SeqID_72157
cgactcagtcgcactagttaagggaagtgctttctagtctgtcttgtggttcccattgcctgccagtgacctggaccgatctccacgccttctctgagagtcccttgagcgtgagcgttccttcctgcggtcccgtgagcgtgagcgttcccttcggcggtcccgtgagcgagaccgttcccttcgatcccttgagcgggacctttcccttctgcgttcccttgagcgagaccgttccctcctatcccgtgagcgagaacgctcccttttacggtcccttgagcgggatcgctcccttctgcgagaacggtgaggtgatgggctcctttgagatcctcctcttcgaccgcagtattttccaggagtaggagtcctttctcgagtccttttagcctgaaatggacaacatgaacatgtgttagtttccgcaatgaaaaaggcagtgaacttcaatacgccaaacagagtgtgaacccaattatccaagcttaacataaaatagactggttaaaggaataagaaactaaattatggccctttgctgaaaaacaaatagtgaaggatcattaagcctgtcaactctcgatcaaaattcttgttatgcaagtagatgaataactttacgtagctcaaccaaagatgacacttctgtgcactttcccgtggttggtgtagcctttctccaaggaagcgcctgattatgcctcttgtgatctccatcaaatcaggatcttgctgtcgacgaagattgcaacaatgtaggctagctcagcagttggtgtcgtcgcatgccagcagcatgcaccatgtaagctcagtcgatgcagacaaaccacggagcccgttggatcatgagggcgatgttgacgatggtggttgtggtcgtggtggccgtggcggtggcggtggcgatcgcggtggcggtggtgatcgcggtggcggtgatggtggccacaatgcacaacaagactccaaggtcgctctctggtggcagccctcacgttgatgtagtgggtatgcaatgtcggtgaggaaggtgtagacgacaagcggtgaagatgagctctggggttggtgataagcaccagcacgtcagctgcacatccgttggcgacaaccatggttgaagacagcacagcctgcgccaaccaggttgacgtcgaggcagcccagcaccatgttaaactggaaggtcatgaagtcagcacgagaggagttaagaccccgggaaatttaccacactaggattgcagaccacatcacaaatgactccctttcaatttactctggcatatttcacctgagtggtatttccctgctcgactgtcccagaatatactcttccatcacagggaaagagcatatttgtactcctctaccgataacatacctcatctcaagaacccttcatcaaagtacttaactgaacagcacagagtatgcattgaattaaactgatagaatatactttcaagtgcacagcattatgcatttagctatttatgttgctaagacaaccatgatttcaagatccagatgaaagggggaaggagagaacacaagaccatgcaaaaaccttgtttgacataacagctagctttatcttattttaactgtaataatgatttcagaatattggggggaaatagcacacagataacatgataaaactagcactattcagcagaaatataattgaaaagtgtattaatgtaatgaatcatttcagttagtatctaaccttctctacagtgaccagacgaccttcaagcacagtgcggtgcaggtacttgatgcagcgtcttgcatcttcaacagtatccatagtcacaaaggcaaagccacgggattcttttgagcgaggatcaagaacaacatgacagtttttaacctttccttctttactaaaaacttctcaaggtcatcttcagttacacgagtagacaatccagtcacataaaggttattccctggatttctatcatctaggctcctggatcgactcctatcccttgaccttgacctcgatctaccacgtctcctaggaggaggagaccttgaagtgctccgccgcttaggactccttggatgtggagaccttgaggtactctttgggggaggcgaccttgaagggctgcgcctctttggaggaggcgaacttgaagttccatttctttctgcaggaggtgtaatagaccgtgcggtgtatctcacttccttggcttgtgacatcttgacaaatgaagctgcaaaccgaagtgatgggtaaagagtagagaaaccaacaaaggtggtctaccagatctgactcgaggtagggaccagaagtcagccacgattctcctttctggaatccccctaaccaacggaacaaaaaaagaaatcaaaatcacgcagtgacatgaacccaggaaaaaaatcgaatcagacagaattttagactcgtcctaggggctagcttggttctccaggccagccgcgtcccagatctggcgcct

SEQ ID NO: 6184 - DNA, 1283 bp, Setaria italica
  Peptide Sequence Number=SeqID_72158
tttaattaacattgatcaactcaagcagtcagtaagacttgatgcaatagaattcctcatcaaaggctagatgactatcaacgcttggatatgaaaggatagagcaacatgtttttgagaacggtaatttctgttcttcctcgatccgggaaagatgtttagagaacggtaattgcagctcttcctcgattgaaggtttcaaactagacaaaattttacaaaaccatccgtagtttacaagacatgaccacaggcgaggaagcttaaaacgacaggttgtcctcgacgaggcagccgtcgtcgaagctccacaggcccatcccctcgtccgccgcgacggcggcgctgctgccctgcacggcgtccgcgctgaacaggctgtccagggactcgtaggcgccgccgttgaagtaggcgaactggtcgccgaagatgaacgcgtcgaacagggcgtccgactcggagtcggagggcccggggcgacgcctcgtcgtcggcgctctccggctcggtcctctggcgcttgctagcgccgccgctgctctggtcggcggcctccagggcggggtggcgccgcggggggcctcctcgtcgtacaccgacacgccctgccacgagaagtccgggagcgcgccggaatcggagctctcgctggcctcgtcctcctcgtcggcgacgaggtcgacgacctcggcggcgcggccgcgcttgccgctgttctggacggcgtcggcgggtgaggggaagttgagcttggccctggccccgcggatgtcgcgcgcggcggcgtcgtaggcgagcgcggcggcctcggcggaggggaaggtgccgagccagacgcggacgcccttgacggggtcgcggatctcggccgcccacttaccccacgggcggcggcggacgcccttgtactgggcggccttgcggcgcctcgctcggcgccggagcggccagctcctggcgctgctgcctccttagcttcctcgtcgcggcgaaggaagcgctgaacgcgaacgccggcttgctctccacctcttcctcctcctcgtcgaactcccggaaggccgcctcgtagtcgtcggccctccgctgctgcttgcccttgcttgccgccggccagaggtggcccggcgtgacgcggcccgccggcgtgctcggtatgagctcggccgaggatcgcaccaccacacatcttgctttctctcttgggttcttgcctctctgcttgctggttgttgaagcgagtcactagtcggacgctagctagctcttgtgtttggttt

SEQ ID NO: 6185 - DNA, 1468 bp, Setaria italica
  Peptide Sequence Number=SeqID_72159
ctctgggacagatgaatgatagtgtcactgacagcagtggagaaggaagcaaaactcagaatcctgtcgattttggtgccaatatttggtgcccaccaccaccagaagatgagggtgatgacatcgaatcaagtttatttggattcgatgaggaggatgttgcggactcaagcgcgcttcttgttcctggtagctttagtgctaacaaaatagctggtgttgacgaggtcacaaacattgctcagaaagagggtctgaagattgctgtgctcggtcatttccgagctcttgtggctcagttactgaaggcagaaggcatcgatcctggaaatgatgatgggttcaaaaattggcttgatattgtctcatccttaacttggcaagcagcaagctatgtgaggccagataccaagaaaggaggcagcatggatcctactgattatgtgaaggtcaaatgtatagcatcaggggatccaatcgatagtaattttgttaaaggggttgtttgctctaagaatgtaaaacacaaacgcatggtctctgagcatagaaatgcaaaattactcattttagggggcgcacttgagtaccacagggttcctaataaactggcatctattaacaggatacttgaacaggagaaggagcacatgaaaatggttgttggaaagatcgagtcccggcgacctaatgtggtgctagttgagaaaagcgtctcatcttctgctcaggagctctttccaaaagatatttcgctagttctgaatgttaagaggcctcttttggacaggatatcaagatgcacaggggcacaaattgcctcatcagttgacagtatttcttcagcaaggctaggtcattgtgaattgttcaaggtgcaaaaggttatagaattctcatcaggtaaacagacaaataggttaagcaagacactgatgttctttgaaggctgcccttggcgtttgggttgcacggttctgctgagagggtcatgtcgggaggaactaaagaagattaagcgtgctgtacaacttgcagtctttgctgcttatcacctttctcttgaaacatcattctttgctgatgaaggtgcaacacttcctaaatttccatcaagacctgtggtagttgagccggatatgagagactctacggacaacaattctgctgcaacggccactgttggaattcctcatggacgtaaaccagaacaggataaactctcacaggctactatggtcaacatgatgtttgaaatatctctgtatcacctagttcattaccttcacatgaggaagcacatgggcttgtgggtgactctgagcatacagaaactgaatattctgttgatcatctgaactcttgtgaaccttgtctatcccgtgcaaatgattcatgcaatgggcatgaaacatctctatgttcattggatcatgatttgaggatgaaacctcaatatttgcataac

SEQ ID NO: 6186 - DNA, 705 bp, Setaria italica
  Peptide Sequence Number=SeqID_72160
aagtgtaggaagcacaaatcttaaagagccaaatagcagcagaaagggagctctcagcaagatgcgaggatagcctcgagagacccccaccttttataggggaggtatcaggtatgaaagggcgcctcgaaccatgatccgaagccgaagcggcacccaattaaaaaatgacacgtaagaaatccacagttgtcgtgggatcatttctcctccgacgttcgagggtgactttttttggtaaggcgatctcaaggttcgcgggttcggcccgtcgaagtcaaccctcgtccttgaggtgctactgttggggatcgccaaaaagttaagcacccttgaacgacggatgaagatttcaaaccttagccccgtcatgtcgtacatcatgaacatagagagcggaactctccaacctcgcatgttgtatactgagtgcaaaaaccaattaacctcgcatgagacactcctcataacaaacttggaaccttcgtaccttctcaatcaccgaaatgcttcgaggttaagggatgataacagaaatggctggtcttgccgagactaaccctcgagtcttcagaaggactcgaaacattgtgtgttacttcttgtgcaggaatggatatggaacagtgccactcgaggctagctgtttcatcgagacgttacgaagctggcacctcgaggctaggcattaagctcaggatgcag

SEQ ID NO: 6187 - DNA, 268 bp, Setaria italica
  Peptide Sequence Number=SeqID_72161
ccctcgaggccgcccggaacctgcgcgtgcgccttcttggcttccagcgggaggttgaagaactcggtgatgtccctcttcacgtcctggagcacctcgtccggcacaccgtggttgacgagctgcaggcagtgcgttctgtgagagacaccataacgaaagcaagttgaatctgtttggaaaccgtaggattttcttagattttccacacaaaataactacagtcactacaaacaagaaaggatattgcccgtgttccaaattacac

SEQ ID NO: 6188 - DNA, 1307 bp, Setaria italica
  Peptide Sequence Number=SeqID_72162
taaaaacaaagacgtgcacgtttcatgtcatgatgcatcacaatattttgttttatttttcctacaagcaatcacaaagtttttctagtaattgactcttcacctctcctgccagattcgtttaaaaaaaataacacaatactacttcacaactagatcctcaaagcatccatgtggctcctccgtccatcgagcttcgccgcgaagaagctcttcatgaagtccatgtactccatggatttgtaccgtgccccgccgctgtctttcttcaccagctccggcagtgggccgatcgtcgtgtcggggcacggctgatggaacaccgccgccgagatgcggtctttgtcagggtggaccacggccctgtgctcaatgcttctgtatctcccattgcttagaatctccagtatgtcgccgacggtgacgacgaaagcgccgggcagagggtcaacggcgagccacctgccgtccttcctgatctgcaggccctgcacatcgttgacgtggagcagcagcgccaggccagtggcgtcggtgtgcggcgacagcccgagcacgtcgctggcctgccggcacggcgggtagtaggtcgtcctcatgctctgcggcagcccccggaacgcctccgagaggcgctccggcgccacgcccaggtccgcggccatggaccgcagcaaggacgccgccaccctcgccgtctccgccgcgtacctgtcgacggagcccgtgaaggacggcggccgggcgggccagaacctcgggtcccgctcctccctggggctgatcatgaggtagatcatgtccgcccagtccagcttctgcgtctcggagaagacgaacgcctggccgtacccctcgaggccgcccggaacctgcgcgtgcgccttcttggcttccagcgggaggttgaagaactcggtgatgtccctcttcacgtcctggagcacctcgtccggcacaccgtggttgacgagctgaaagaaaccccagtgctgacaggcatctccgaggttcgcgagctcctcttccgaggaccgtgggtcaagcaacctgctgaggtcgacgaccgggatggcgcggccggcgacgacctcctcggcggcggtctcctccttcctgacgtaccggtcaggcacccgctcgcctgatccgttccaagtctgggcgagttcctgcacgttgggcacctgcagggacgctcctgctttcgcatgcgccattgacgatctggtttttcctctcctctctctttttttgaacgaatgtttttcctctcccctctgcacaagagcaggtgggatgatagc

SEQ ID NO: 6189 - DNA, 1895 bp, Setaria italica
  Peptide Sequence Number=SeqID_72163
gttacccacgcacagcacaagctctcctcacagaccttgactcgcagccgaccacgaccgcgaggccgcgggtcgctccgctcctcttcccggccggatcctccacctcccgctcgtcggtccgctgctgccgtctcagtctactggagcggggatccatcggggcgtcgattggttccttctctttgttgagctggtgagggagcaggagagggcacttctcgcgtgaggatgggcaatctgcagcagctgcagctctactattaggatttgatccttctgacatggctgagggggcgcggtttcatggtatgataggtggtggtggtggcggtggaggaaaggggatgcaagacaatgagatcaatggcttctacaacatgccttattaccaaaagtttggggagggctcccacatgtctgttgacagcgccgacggcttcaacctggccaactgcgctggtggttctgtcgccatgtctgtggacaacagcagtgtgggctcgaatgagtcccgcacggtcatactgaagcacccgggcctccgtgacgctccgactgcaagctattcagttggcaatagtgtcttccgccccaaccgtgtcgctgcacacacgctaaatgaggatgcattggctcgggttttgatggacccgaatcatcctacagagatactgaataactatgagcagtggacaattgatctggggaggttggacatgggggatcctttcgctcaaggagcctttgggaagttgtaccggggaacatacaacggagaagatgttgccattaagctgctggagaagcctgagaatgaccccgaaagagcccatttgatggaacaacaatttgtgcaagaagttatgatgttgtctaggctgagtcacccaaatattgtaaggttcataggggcatgtaggaaatcgattgtgtggtgtattattacagagtatgctaagggtggttcagtccggcagttcctggcgagaaggcagaacaagtcggtgcctttgaggttggctgtgaaacaggcgttggatgtagcccggggaatggcttatgtacatgcattgggatttattcatcgggatctaaagtcagataaccttctgattgcagcagacaaatccattaagattgctgactttggtgttgctcgtattgaggtgaaaactgaagggatgacaccagagacaggaacctaccgctggatggcaccggaaatgatccagcacaggccctatgatcataaagttgatgtctatagctttgggattgtcttgtgggagcttataactggcatgcttcccttcacaaacatgacagctgttcaggcagctttcgctgttgtaaataagggtgctcgtccagtaatccctcaagactgcctgccttctctaacccacatcatgactcgctgctgggatgcgaatcctgaagttcgtccagcatttactgagatcgtctgcatgcttgagagtgctgagatggagattgtgagcaatgtgcgtaaagcacgcttccgctgctgtatgtctcagcccatgaccaccgactgaagtggaaactggtggctagatgaggggaatggagggaagaaaggaggaagagcccatctccatgtattcaccgcatcgatgctagggtctgcgctgaagcccctaggattcgagcttctgtgtggttgcattctatgtgtatgctgcacagctgaagtaatctcttctgaaagtataggtgatgttgccttgtatgttaaagagatctaatggagctttcctatgttaataacacctgcttgttcttgtactcgcacaagtttgcctggtttcgagtttcaacgcccttctccgggtgttggcctgcgtttattaccaaaatgctattctctg

SEQ ID NO: 6190 - DNA, 274 bp, Setaria italica
  Peptide Sequence Number=SeqID_72164
taccgtggaaccttcatcttcatacctaaatgttgcgaaaacaattgtcagttcacataaaagttctttgctagaaaataactttgctcaaaaaagcataaaagttcagtgctcagttcatcatgcctttccaaaaaaaattattgtcaagaagaaacagaaatagtttgcagacggctcaaatacatgttttgaactagtaccttccttagttagtttcgtaagtgactcaagtgtttcaactgagaatttgagatcgtggctcccagcattt

SEQ ID NO: 6191 - DNA, 427 bp, Setaria italica
  Peptide Sequence Number=SeqID_72165
cctcgtaatcgagcactgttgtgttgaatggcggccccaaatcacaccgcataatcctgcaatgtaaaactaagtgcagaattcatattattattgcgggctggattcttgtcgatagttttacattgcaggattatgcggtgtgatttgggtttgccattctcttccaccttgcgattttctcctttccctttcgtggtttaactgccacatcgttgtcttggatgcaagtgatcacgaaacccaggggcttgagcacctcctcgtaactgcatgtgccatgcatgatcaaattgtttgtgagagaagttacagcgtgtgtttagcatgtactggtattgtagatcgagtacagatagctagtgccatcgtccatggcgacgatggtggcggcgtcttactcgagcactgttgtgttgaatggcgg

SEQ ID NO: 6192 - DNA, 466 bp, Setaria italica
  Peptide Sequence Number=SeqID_72166
tggacgggtggaaagcacagaagaatgtgtagtcgaaaatgaggtcgaacagctccggcggctcccaggtgaagaagtctgcggcgacgaaggcgaacaagctcccgtcgtcggccgccgccgaccactgcttggcctttgcaacggcggtctcgcagatgtcgaggccgaccacgaagcggccggggccggagagcgccaccacgtcgtacccctgacgacggaggcggactgaccgcgccgcatcccgggacgaggacggtggcggcgtcgccgggcagcgtcccggacttggcgagctcgacgacggccggcgtgggctggcccaggtcccacggcgtgacgccttcctcccagcaccggctccacccatctggagaatactccgggccaccgatgagctgccgcacgcgggccaccgccgggttcgagccgtccaggacctggccggcggcgaccgccgccg

SEQ ID NO: 6193 - DNA, 508 bp, Setaria italica
  Peptide Sequence Number=SeqID_72167
tcgtatcagtagtataatttcttctggacctcaacactgtttgtctgtctgttgttaaatgtcaacttatattgatatatgatctatctgtggtaggcaagtgttcgctgggaaaagaggcaagcaaaaatcttggaaaaggtcagaacacggatggtgaaccaagagaattcggacacaggcaggtcttggagcgatatctggggacccccaccacgagatgaaaacaacgaggaagaagcatcagagagagccaagagggcggctgctgctgctagacgttggcgagagttctcaaggcgaggcgcagacaggcctccaacatacaaacttccagaggcagtgggcaacaaggattagcccacagaatagagaaacacgtggcattatttggcgaattttggctacctgtacagtgtcattgtttgtagctcccagcccacacccacgctccatttgtaaatctagacgtagtgatgttgataacctgtagaagacaagcaccaaa

SEQ ID NO: 6194 - DNA, 1093 bp, Setaria italica
  misc_feature (1)..(91): n is a, c, g, or t
  Peptide Sequence Number=SeqID_72168
nnnnnnnnnnnnnnnnnnnnnnnnnnnnnnnnnnnnnnnnnnnnnnnnnnnnnnnnnnnnnnnnnnnnnnnnnnnnnnnnnnnnnnnnnnnttttttttttttttttttttttttactaggaaaaatggtttctttgtttattcaagaggagcagcaacttactgtttttgcataatacaaatatgatatgtccacaaacacgatcacaaacaattttaccaattgtttcacacaagaacgagcttggagtcttccatgtaatgagcatacgttttttacttcactagtgcagaattcatattattattgcgggctggattcttgtcgatagttttacattgcaggattatgcggtgtgatttgggtttgccattctcttccaccttgcgattttctcctttccctttcgtggtttaactgccacatcgttgtcttggatgcaagtgatcacgaaacccaggggcttgagcacctcctcgtaatcgagcactgttgtgttgaatggcggcccagcctcctgaccttgagccaggtacatgagagtaatgagttcgccattgggcttgagcaggtcggccactcgcttcgcccatgctggcctcatggacgggtggaaagcacagaagaatgtgtagtcgaaaatgaggtcgaacagctccggcggctcccaggtgaagaagtctgcggcgacgaaggcgaacaagctcccgtcgtcggccgccgccgaccactgcttggcctttgcaacggcggtctcgcagatgtcgaggccgaccacgaagcggccggggccggagagcgccaccacgtcgtaccccgcgccgcatcccgggacgaggacggtggcggcgtcgccgggcagcgtcccggacttggcgagctcgacgacggccggcgtgggctggcccaggtcccacggcgtgacgccttcctcccagcaccggctccacccatctggagaatactccgggccaccgatgagctgccgcacgcgggccaccgccgggttcgagccgtccaggacctggccggcggcgaccgccgccgtggacgccatggccttcctgcttcggaatcaagttattaactacc

SEQ ID NO: 6195 - DNA, 319 bp, Setaria italica
  Peptide Sequence Number=SeqID_72169
gtcggttgtgtcgttgccggcgccggcgccggggtggccgtagaggcggtcggcgaaggacgagcagtgggcgatgccgatcgtgtgcgcgcctgagagccacacgagatcacggacgccaaggccttggtggcgaacaggtcggtgagctgcttgaagctcatggacggcttggggatctcgtcgagcgcctcctgcatgctcgacaccgtgccgtccctcctccccgtcggcacgcgccacgacggcccgccaatggcggcgaccgcgtcccgggcggcgagcgcgaggacgtcggcgcaggagacgacggccgggg

SEQ ID NO: 6196 - DNA, 657 bp, Setaria italica
  Peptide Sequence Number=SeqID_72170
gttgaaagaaaaggaaacggaacggaacgtaacttaacttcttcttctccgaggggggtaagttagctagaggggagaggagcgaggatgagcggaggaggcatggacggggctccgccggtcgccgagttccggccgacggtgacgcacggcggccggttcctccagtacaacatcttcggcaacctgttcgagatcaccaacaaataccagccgcccatcatgcccatcggccgcggcgcctacgggatcgtctggtacgttctctgttcgacccttgcggctaatcgatttgttgcgagttgcgaagctggttgcagatgattggcaggtgttagggttattagttcataggaggatggtcatcgggtcatggattgatagggccaatcatttccttttcttaaaaaatactagagtgagtgctgcagttgaagcaggttcggttaaatttagtatcgcagtggttggtgagctctcgaatcgaatgaatacttcaccttttattaggagtggttgattttgttctgaaaagaaaaattccgtacggatgcgcgcagctcggtgatgaacttcgagacgagggagatggtggcgatcaagaagatcgccagcgctttcgataaccacatggacgccaagcgcacgctccgggag

SEQ ID NO: 6197 - DNA, 1552 bp, Setaria italica
  misc_feature (1503)..(1552): n is a, c, g, or t
  Peptide Sequence Number=SeqID_72171
agggggtgggggaagacgataaagtcaatctgcttgatttgggttgggctcgtgcttgcgaggagtgagaaggcggcggcgtcttcttcttctccgaggggggtaagttagctagaggggagaggagcgaggatgagcggaggaggcatggacggggctccgccggtcgccgagttccggccgacggtgacgcacggcggccggttcctccagtacaacatcttcggcaacctgttcgagatcaccaacaaataccagccgcccatcatgcccatcggccgcggcgcctacgggatcgtctgctcggtgatgaacttcgagacgagggagatggtggcgatcaagaagatcgccagcgctttcgataaccacatggacgccaagcgcacgctccgggagatcaagctgctccggcacctcgaccacgagaacatcataggcatccgggacgtgatcccgccgccgatcccgcaggcgttcaacgatgtgtacatcggcaccgagctcatggacacggacctccaccacatcatccgctccaaccaggagctctcggaggagcactgccagtacttcctgtaccagatcctgcgcgggctcaagtacatccactcggccaacgtgatccaccgcgacctgaagcccagcaacctgctgctgaacgccaactgcgacctcaagatctgcgacttcgggctggcccggccgtcctccgagagcgacatgatgacggagtacgtggtgacgcggtggtaccgcgcccccgagctcctgctcaactccaccgactactcggccgccatcgacgtctggtccgtcggctgcatcttcatggagctcatcaaccgccagcccctcttccccggccgcgaccacatgcaccagatgcgcctcatcaccgaggtgatcgggacgccgacggatgaggagctcgggttcatccggaacgaggacgcgcgcaagtacatgcggcacctgccgcagttcccgcggcggccgttcgcgagcctgttcccgagggtgcagcccgtggcgctggacctcatcgagcggatgctcaccttcaacccgctgcagaggatcacagttgaagaggcgctggaccacccgtacctggagcgattacacgacatcgctgacgagcccatctgcacggatccgttctcgttcgacttcgagcagcaggctctgactgaggaccaaatgaagcagctaattttcaacgaggccatcgaaatgaacccgaatttccgatattagattggatccccagatgtacggttcacatctatgcatgttgtttgtaaataggagtaagatttaagagccgggtagactgaacattgcatttgtttgtttgttgatgttcgagcccaccatcctgtcagtgtaatgctgtgtaagctgttcctactagtttcaggcgtcgctgtaatctattgtaccaagaataaaaggtttggagcatgattttcgaatttcgagacaaaaaaaaaaaaaaannnnnnnnnnnnnnnnnnnnnnnnnnnnnnnnnnnnnnnnnnnnnnnnnn

SEQ ID NO: 6198 - DNA, 260 bp, Setaria italica
  Peptide Sequence Number=SeqID_72172
cccgtccatcaagcgaaggttcgaatcacaagttcatttccatgattatatgacatagctaggtcgatgtctctgctgacacctcgctacaggaagagccagacgaagaaggtggtgtgcatccctgcgccggtggcgccgccgccgggtgtgggcgggcggccgagcacgagcggcgaggtggtgccgtcggacctctgggcgtggaggaagtacgggcagaagcccatcaaggggtcgccgtacccgaggggataccg

SEQ ID NO: 6199 - DNA, 275 bp, Setaria italica
  Peptide Sequence Number=SeqID_72173
catctgcggctgggcaaactgactagcaggcagcaggatgtacactagataagacacagcgagatccatgatccatcttggaggattaaccattctccatggcgacttcctattctctctgtccaacagcaatgggccgcggagatctgtacagtaaagttaaagcacctctgtgtgggagatgatttgatcaggcatcaaatatgaacttttgagtccctctgttaacaacttgatacagaggcaatgctgtataatgttttgtctgctgcttg

SEQ ID NO: 6200 - DNA, 911 bp, Setaria italica
  misc_feature (908)..(908): n is a, c, g, or t
  Peptide Sequence Number=SeqID_72174
ccggatcacctggtacgtcggctcggcaaagtagctcaacgtcgtgccggagtcgataatcgtgccgccggacccgtccttggacacgccccacgtgtccgagctgatgttgaggagctcgccgccgacgagcacgcccttgagctgcacgtagtagaacgtgtccgccggcgaggaggccggcgcgaacgccgtgtagttcagccgcgggtgcgccagcagcagcgcgtcgtcgtcgccgaacaccaccttgctggcgacgtcactgccgtggtcaacgaggcagtaggagaaagtgtggccgtacacggcgcggagctgggacgcgaaggagagcgggccccggccgagcccgagcagccccgccgcgccgtggaagaggccgcggttccggtgcccgcacccgaacaccacgccgtcgacgcgccgggacgcgccgggggccgtgaggttgacggtgaaggactcgagggccaggtcgccggtggtgttggactggtcgccgtaccagtagtagtaggggcaggggtcctcgccggggcggtggcacgctctcggcgcctccggcggcgccacgaggccgcatcgctggtcgccgcaggtcacgttgcggtaggaggaggacgccgcggggtcgaacaccggcccgcgctgctcgaagcagtccaggcacggcgcgcactgcagccagttgaggtcgctgccggtgtccatgatcatctggaaccgccgcggcggcgtgccgacgtacacgtccatcaggtactcgccggacccgaccgccacgccggactccaccgtcgccaccagccgctccgacagcgcgcgccgcggggaatacgcccgctcgccgccggcccgtgccgccgccctccggtgcatcgtctcgatgcggaccgcgtccttcnggg

SEQ ID NO: 6201 - DNA, 325 bp, Setaria italica
  Peptide Sequence Number=SeqID_72175
gcggacggcagagctggtgcaccagtcatcattggacgcggcctcctcgctccttgtcactgccctcaacgaaggccgggacgtgatcatggatggcactctgtcctgggagccattcgtggagcaaacaattgccatggccagggacgtgcacaggcagcggtaccgcatgggacgcggctacaaggtcagcgatgatgggacgataaccgaggagtactgggagccggttgaggctgaggattctagtactgaagaggagaacgaggcaacaggaaggaagccttaccggatcgagctcgtgggtgtggtctgcgatgcctat

SEQ ID NO: 6202 - DNA, 414 bp, Setaria italica
  Peptide Sequence Number=SeqID_72176
tgccgctggagtacgtgctgttccagcccaacgccggcgtcgccgacccgcgcacggggctccgctacgacaacatgctgtacgcgcaggtggacgccgtgtacgccgccatccaggcgctcgggtacacggacgtcgaggtgaaggtgtcggagaccgggtggccgtcgaggggagaccccgacgagccgggcgccacgcccgagtacgcggggacctacatccggaacctcctgcagcggatcgagatgaagcagggcacgccgctgcggccggccacgccggtggacgtgtacgtgttcgcgctcttcaacgagaacctcaagccggggccggcgtcggagaggaactacgggctcttctaccccgacggcacgcccgtgtacaacgtcggcctgcacggctacctcccgc

SEQ ID NO: 6203 - DNA, 1030 bp, Setaria italica
  misc_feature (993)..(1030): n is a, c, g, or t
  Peptide Sequence Number=SeqID_72177
cgctgctttccttcctccgctccaccccggcctttctttcctagcggcgacgacagtaatagcggccactctggcagggtcttcgtaaggcgcgattcgtcggcgacgagcatccgactgaaagatgattaatcttttcaaaataaagggtcaaaagaaagaagaggcggcaagtgctgctggaaaggcccctgttaagaagcagtctgctggggagctccgcctccataaagatattagtgagctcaacctaccaaagacgacatcgatttcttttcccaatggcaaggatgatctaatgaattttgagatcatcatccgacctgatgaaggatattacatgggaggcactttcgttttcacctttcaagtgtccccatcttatcctcatgaacctccgaaggtcaagtgcaagaccaaggtgtaccatccaaatattgatttggaaggcaatgtatgtctgaacattctgcgtgaagattggaagcctgttcttaacatcaacactgttatttatggcctgaatcttctttttacgcaaccaaacgatgaggatccgttgaaccacgaagctgcggttgtccttcgtgacaacccaaagatgtttgaggcaaatgttaaaagagcgatggctggaggctacgtgggccaacactatttcccaagatgcgcttgacttgatggtgctggctgcgaaacgatatctagtgccgccttaagccatctgggctccttgtattagcaccagcgcgcccagctttgctgatttgtgtggttctcagtgcgcgggaagtgcttctggaagcaaaattgaaatcgcccatggcgtgatgtgcctgtttgcccgtccttccttgtgaatgtgtttaacacccgtaaattaaatttggtgatgaggtggtggtacagatgacaaggatatgtatctgaatgaactgtataatttgataaatcctaaatgatgaatgggaaatgaatttataagaaaaaaannnnnnnnnnnnnnnnnnnnnnnnnnnnnnnnnnnnnn

SEQ ID NO: 6204 - DNA, 266 bp, Setaria italica
  Peptide Sequence Number=SeqID_72178
cttctttctttgcttccccttgtgaaataggaattaagctttgttggtttcgttggattttgagaagataaggattgcagtccatcatttattgtttcacttagctattatttctttgtctgttttgatgctgacagcttctacaagaaaataggataattgctgccatttttttttgtaaatatctactgctatgttgcttaatcttcagtattttgatatttgtgtcatcatttttcttattgttaggccttctcttgtaacgg

SEQ ID NO: 6205 - DNA, 748 bp, Setaria italica
  Peptide Sequence Number=SeqID_72179
taaaatgcagaaccagagaagaagcccacagatgaaaagtgcattttgcccaaagatgttccatcagaatgctgctcatgctcaaaattctcatcatgcaagaccaacaagtgcgagtgcagaggctcaggtgcacattgtggtccaggatgtggttgtaaggactccaaatgttctaatagggattcttcagataatacagagatagtcaatcagggaatcatgcttcttgagaacgctttctctgagaaggatgcgcaagatgcaaagacaagaaagcctttggccgatattggtaataatgaggttaaccaaactgcagagacgaagaagaaaccgaggaaaaactggcgcaagtcgacagttcagctcgtcacagtccctctcccaccctctgtgccagagaccaccgaagctgccccgcgggacagagccgacatccccctcaagctgccgagagccatgtcttctgcatccgcagagagcaaccctcctcccctcacggaccgcaatgccgccaagccagacgagtccgtgagcaccgggaccaaggagagcacggctgccacgaggccaccgtctcagctgcgaaagaacgctgccaccgagaaggagaaccagttgcgatgatgtgattcatgcagtagctgtgcggcggaagtctgttgtcgtgacaatggggggaggccgcctcggcgtccttcgactctggaagggaagggagcccttctcgggttccctttggatg

SEQ ID NO: 6206 - DNA, 827 bp, Setaria italica
  Peptide Sequence Number=SeqID_72180
tttttttttttttttctctgagaagcatgtttcatgaccatatataaatgtaggtgtgccggtcgtagcatacattgtcttgacaaaaccaagctaaaaacaggagatgaactgagactttgttgcaactgtggcaaacaaaacccaccgagcatgtatgtatgtaaccacatttctattaatttagcattatagctatagcatcgactcatgtaacacttttgagtacatttaaaggcatacagcatgcacattcagggagcaattcactttccatacagtccgtgctgtgcctcagccatcagccctgacataactccagcatcaagcgaagcattttcttctccatcgctcaacttctgatgctgattcagaaagtctcctcctaagaatagatttttctgcttcgcaactctccatatcaatatcataatagtatgttgacaggatgtcgattcgctcgatcggcatcacaaaaatgccttctctgcggttggaagcctctctagctttctcaatgtatcgtcacctttagtgaccctcaatcagcatactatcaaggtgtaggtaaaaaaattataagggcaggcagtttgtattgaaaatttcaaagattggtgttgctcatgcatgcttgagttaaccaagcaatatttctggtgcggttcaaagaaacgattcgtttttgaggtattcacctactgcacttgacaagttcgtatcctggaggaataaaaaagaaactgcacattatgatttaggggaacaatatattacaaataaattatgttaacaatgttacattggtacaaggaaacctccaaaag

SEQ ID NO: 6207 - DNA, 1350 bp, Setaria italica
  Peptide Sequence Number=SeqID_72181
ccatgtgtttaaggtgtaagttaatgaacacaggacatcttggatggagtcaagtacaagacaaatgagtctacctgggtcactaacaagggcagccatcaatcactaacgtgaacatggtacaccttggatggagttcttgtcagcattaatttctgccagactaatgcactccgtcacatgtccctactcatatttagaccaattaactatcacacgcccagtcccactcggaatgataaaaaatgaacataccattttggcaagcctagtagcgactagtgagactggacatcgtggaatgcaggtactacatgagtgcaaggatcaaattaccaggtcacttacaacagcattagacacatgactttaaatatctggattgtacaagtcaactcggatggcaattttcatacttggtagttccatacttccactggaagatcccttattgtgtgatcaatacggagactactaatccttttaagcatttagtattttcattccaactgtttaacacatatatcaagttgctgccttgtaaatgttatactgaaatcaataagcaagtgtttcacctcagccatcagccctgacataactccagcatcaagcgaagcattttcttctccatcgctcaacttctgatgctgattcagaaagtctcctcctaagaatagatttttctgcttcgcaactctccatatcaatatcataatagtatgttgacaggatgtcgattcgctcgatcggcatcacaaaaatgccttctctgcgggttggaagcctctctagctttctcaatgtatcgtcacctttagtgaccctcccaaatacagcatactggccatcaaggtgtggagcatcgccaagaagaaaggagaaggatgaaccgccgctgtctggatcagagtgccttcccatggataggattcccctgacatgcttgacactactaaattcaccaacaattgttttctctgcttctcttttctgctcctcattcattggggcggttctacctcctacaacagcagcaacttgtgccacaaaaacccttgtcgaccctgaagatatgatttgtgttgtagcatccaagccgcacgagtttgaatatgtggtcaacagtcttaggcgcaacatgaggaaagaaaccgaactcaatatcaccaaaatttgtctggaagacgacgcgggcggatccgaggttggggtccgaggagtagaacgtggaggcaccgtcggcgcagacgaccgcgacggctaggagcgccgctgcggcggcggcggcgtggcggagcatcgccgccatttctttcccccttccggtttttgctccgttttggttta

SEQ ID NO: 6208 - DNA, 486 bp, Setaria italica
  Peptide Sequence Number=SeqID_72182
atttattccttccgtgctgtgggacgggcgatgcggcagggtctagactctagagcgaccgagatctttcgacttttccagagcgagcagagggagacggggaggggcgccggcgatgtcgacggcgacggaggcggcgaatagcggcaccgcggcgcgggtgcggtgccaacggatcggctgcgacgccatgttcaccgacgacgacaaccccgagggctcctgccaataccatccctccgcacctttatttcatgacggcatgaaagagtggagctgctgcaagcaacgaagccatgattttagcttatttttggcaataccaggatgcacaacagggaagcatacgactgaaaaaccagtcacaaaagctgtttctgcaaacccttagtcgaccacaccactccagtattctaagcagggtgtaggagccgatggctgcgcaaggtgtcgtcagggtttctttgctccgaccatggatcgcag

SEQ ID NO: 6209 - DNA, 1222 bp, Setaria italica
  Peptide Sequence Number=SeqID_72183
ttgcgtgtctcagcgatttattccttccgtgctgtgggacgggcgatgcggcaggggtctagactctagagcgaccgagatctttcgacttttccagagcgagcagagggagacgggggagggggcgccggcgatgtcgacggcgacggaggcggcgaatagcggcaccgcggcgcgggtgcggtgccaacggatcggctgcgacgccatgttcaccgacgacgacaaccccggctcctgccaagtttacaaccccgagggctcctgccaataccatccctccgcacctttatttcatgacggcatgaaagagtggagctgctgcaagcaacgaagccatgattttagcttatttttggcaataccaggatgcacaacagggaagcatacgactgaaaaaccagtcacaaaagctgtttctgcaaaccctcccaaggccacaccaatccagtattctaagcagggtgtaggagccgatggctgcgcaaggtgtcgtcagggtttcttttgctccgaccatggatcgcagcccaaggtacaaaaaccagctgctaccgacgatacaaagaaggaacctgttgaaaaatcctcggttccacctccaaagaaaaggattgatataaatgaaccaagaacatgtaaaaataaaggatgcggtaaatcctacaaggagaaggataaccatgactctgcatgcaattaccatccaggtcctgcagttttccatgacaggatgagagggtggaaatgttgtgacattcatgtcaaggagtttgatgagtttatggagatacctccatgcaccaagggctggcataatgctgatgctgtgtgaattcacaccatgcctagggctaattttgtgccgtatctcctgcggcatgtgagaggcaatcttgctgcagtttcttgagagttttacttggaattgtgacaaaaactttgatgggttgcattatcttgctcatagtgattgtcccgaaatcttactgatgctccttgtactgtgaactagaacttgaaaccatatcttgcaacttgatttaaattgaaattgtattagttcgaagctaaatcctttcatttatactccttccatcccaaattactattcgttttgacttttctagatacaaaacttttgatatggatttagatgtatgtatttcaaaaatagtaatttgggatggaggtggcaattgtctaaaaagcagtacatctg

SEQ ID NO: 6210 - DNA, 831 bp, Setaria italica
  misc_feature (3)..(3): n is a, c, g, or t
  Peptide Sequence Number=SeqID_72184
ttnttacctttaagtttattttcttttactttacggtcaacaccaagatctacacggaatcaggaaagaggaggagagggtgagggggaaaactcacatatgctagccgaggaggaagagggtcttatcgaaacagatcgagatggcagagttgctcctgggcagggacggggacacggaggggggcggcagcgcctggatagggacgcggaggggcggcagcgcttggtcgctggtcgaggtggtgtcgatgtggatcaagaaattcgtcgcggagagcaccggagacggcgagtgaacggcggcgttgtcgttgacggggaggcggagcggcggcaccggacgggaaggcgtaggggcagcagcgccggacgggaaggccgacggacggtggcgcttggacggagcggcgggggcttggtgagttggcgctagcttcctcgtgttgcttcggcggtgacggcactcgaggatgcgccgccaggaccctcgaggtgaggaaggctcgccccggggaaaactcgtggatgcggtcaggcgtccccatctcatgggctcccaaacgacgaggcgattcggcccgtggtgagttgcccacgtgggcttccagcccctggaaaatgacgggatccccagcgggattcgagtttccaaactcgccctaaagagttcacaaacccacctggtggaaacagacatttagaggtgcaaggagatgttgaatccaccgtgaaggtgctgccaagagatgttgcaggccaaaaatgcatgatgagttggatgaatgcctgttcgaccaccggcgcctgtaacgcttgcaggagcagcagt

SEQ ID NO: 6211 - DNA, 255 bp, Setaria italica
  Peptide Sequence Number=SeqID_72185
ctgccgcccgcccgcccgctactcgactagcagcaacccgagtcgtccgagcacagccggattgcattgcggccggagcaatccgccgtccgaggcgaggcgaggctccgccgcggcgacgggatggacttcggcgacgacgtcatggacggcaacgacgggcagcgccggaagaagagataccaccgccacaccccgcgccagattcagcagctcgaggcgatgttcaaggagtgccccgcacccgggagagaa

SEQ ID NO: 6212 - DNA, 251 bp, Setaria italica
  Peptide Sequence Number=SeqID_72186
ggaggttccccgacacggcagacctcccgcgcggcgccgctttccctcacctccgggagctcggcctctgcagcgtcgtcatcgagagccgcgacatggacttcatcctcgccaggagccccgtgctcgagatcctcttcttgcaaggccacatgtgtcccccgctgcatctccggctcgtcagccacagcctccggtgcgtgcagatccactggtctcatgtggagaccatcgccgtggtggatgcgccg

SEQ ID NO: 6213 - DNA, 451 bp, Setaria italica
  Peptide Sequence Number=SeqID_72187
agaccttactagaaacaaaatccaacgcaatgaagcaaattccaactcatcaagtggcaaattccgaacctctagactggacaaattctcaggatgataacagatattagatctcagctgccccttttggaggaaaactgacagaagcctcacatcttgaatagcctcgtttgtagtggaaaacaatggtccattcacttctatggaaaaattttcatcaggcctgccagtagcattcaacatcacagaatcccgtgatacggaaaggaagccagtagattgtggcgctagcatcagttggttgagttttattcctgatagagatatgttgccaacaagctttgacacatcagtctcaaccttattttgatcaatgttacttccagaacacccttgattttgtcatcagctatattgctagatttcatgacctttccttgaaattgaccct

SEQ ID NO: 6214 - DNA, 508 bp, Setaria italica
  Peptide Sequence Number=SeqID_72188
gtggaaaaacaatggtccattcacttctatggaaaaattttcatcaggccatcacagaatcccgtgatacggaaaggaagccagtagattgtggcgctagcatcagttggttgagttttattcctgatagagatatgttgccaacaagctttgacacatcagtctcaaccttattttgatcaatgttactttccagaacacccttgattttgtcatcagctatattgctagatttcatgacctttccttgaaatttgacccttccagatgctttcaaatgcaatggtcgtggtgaatcaaaaggtattgaggaggctatatgagcaaactcaaagcctcgcatacgcaaatccaaatcaacaccctccacaattagtggcataatttgttcatttgataagtacccttgttcagtaagtaatcatcaatatatgatgtctgaactcgagtatttaaatcgaaggcaactgatgatgaagtgaccataaggtaaactcatgtgacaaat

SEQ ID NO: 6215 - DNA, 513 bp, Setaria italica
  Peptide Sequence Number=SeqID_72189
cggatccctcccgagcagccgttcctcgtatcttcgccgggctcccgacgaaaccggtctgaccggccagaggagcggcaggagccctccgcacgccatacgttctgagtgcttttcgttggccctgtagatttgcgtcaacggatccctcgccgatccaatccaggcccggactccgtcagccctcgcgcgccggcggaggtgatggcgcacccgatgtacggctccggcccgctccgatccaggaacgcggcgagctcggacgagatccagctgcggatcgacccggtgcaaccggggctcgacgaggagatcgacgggctgcactccagggtccgcatgctcaaaggggtggcccaggagataaattctgaagccaaattccagaatgatttccttaaccaattgcaaatgacccttgcaaaagctcaggcaggagtgaagaataacatgcgaaggctgaacaagagcatcatccagcagggttcaaatcatgttctccatgtcgtcctc

SEQ ID NO: 6216 - DNA, 770 bp, Setaria italica
  Peptide Sequence Number=SeqID_72190
ttagagtttttaatttttttcgttttttattttttgtttttactttattttagttactactaggtaaagccgatcattgaagaaaaatctgcctgctgatcaactcaagatttgcgtcaacggatccctcgccgatccaatccaggcccggactccgtcagccctcgcgcgccggcggaggtgatggcgcacccgatgtacggctccggcccgctccgatccaggaacgcggcgagctcggacgagatccagctgcggatcgacccggtgcacggggacctcgacgaggagatcgacgggctgcactccagggtccgcatgctcaaaggggtggcccaggagataaattctgaagccaaattccagaatgatttccttaaccaattgcaaatgacccttgcaaaagctcaggcaggagtgaagaataacatgcgaaggctgaacaagagcatcatccagcagggttcaaatcatgttctccatgtcgtcctcttcgctctgttttgcttcttggttgtctatctcctgtcaaagttctccagaagatagtttcattgtcaggtggcgtcaaatctaggataccatgagttgtatgtagtctaaagaaaagaatatgctatctgttggactttgtttcagaacaaaccagaaaaaaaggagggaaattattactcttataagataactgctaacctcatcggctgatctgtatgactgagaaactgttgcatttgcaagttgcattcagtaaggtaaaaaaaaaaaaaaaa

SEQ ID NO: 6217 - DNA, 407 bp, Setaria italica
  misc_feature (369)..(369): n is a, c, g, or t
  misc_feature (388)..(388): n is a, c, g, or t
  Peptide Sequence Number=SeqID_72191
gcctgtatctgtccctatcttctgctcttctatcatcacgcctactcctagaatctcggtcttcataccgctctgatcttgatgattcaccatccctagaactccaacgagcgtttgcatttttctgctcatcatgggaaaatttgcaggatgctccacggttgcactcgcctttctggaaagcatagcatatgccacggctctttggtacatcatggtgtttgtcatgctcccatggtgcaccgctatcctctttagaaccccaaccggtgttcgcatttctctgctcatcatgcgaatatctgcaggaagctccgcggttgcactcgcctttctggaaagcatagcagactccacgagccctccctnttctgctgtcgctcctctnatccttcctcctccttctt

SEQ ID NO: 6218 - DNA, 1014 bp, Setaria italica
  Peptide Sequence Number=SeqID_72192
aaaaggtgattgagcttcaattcctcttcgctaaccaagcatcgacgatccaggaggcggccaagaactacttgcaccggcagcaggggatggcaaacacagagctagcacctctcaacatgctcctcttcgactacatcgacaaagcagcggtgctggcagacaggcttcaattaccccatcaggggactgaagcctggtctgacgatcgtcaacccaagccaaagaacaaggaggcgccgatgatcaaggttgcagattcatttgcacgcatcctggaagacataccagctgaaggaaccaatcaagacggtggggaatctatctccttccaggagatgctgccagacccgaccagcgacatcgaaggcacagcatgcgccgacaccagccgcactgacggagctgttaatgacacggacacgacgtccgccgccgcgatgccgaacaacacagaacgcagcagcccgattgacaacacgctcatcggggctttctttaccaggccggagccaatcctccacagcgaggagccaccactggaggagccgaatccgccggcgcacatggagtcagccaaatgtcgccgtccatgacgcatcttcgatatgtctacggaattcctagcaatgttccaggggccactaccacaggaggtgattgcggcgctcacagcggccttcaacctagaagacatacacgctgacgacctcgacgaagctatggccgcggtggcaggagaagccatcgccgacatccaggaagccaccaccactttgcaggcagaagcgctacaggcggccacctaactaccagttcgatgcctcaactagagtcgttcagttcgttatgttaagtgcaccttctgaacttttaagcagtgcaaggcgccactgcagcttatttgaattattcagagacttcgcattcgattgggttgtaatcctaaagctacaacaatgtcatggcggtgtaactccatctgcatggtccattcttcaattgtccgctgac

SEQ ID NO: 6219 - DNA, 325 bp, Setaria italica
  Peptide Sequence Number=SeqID_72193
tcaggagatggagacataggagtactggagtgtagaactccttgaaggcgaacgccgcaatctgttgtctcctggatctctaccccagctatcaacttccatcttcatttgagctaatgcagcaggcccaggcaactttttgcggacaaggccacgtaatctttggcattctgcttctagttttgatattttcttgacgtcctccatatgttgtttagttgcaacatcagctgaacgcacactcatgttcttctcttcattgcgaatgtcaagctctttagagacaacatgtagttcatactttaatgaatttatctccttttca

SEQ ID NO: 6220 - DNA, 365 bp, Setaria italica
  Peptide Sequence Number=SeqID_72194
ggagccagccggccgccggagccaagacgccgccgccggccaagtcgcccccggcgtccgactcctcaggcggcggcggcgggaagaggagcaaggcctcgtccgcgtcggcgtccacgcccaccaggagcatccaggagctgtccgaggagcggggcgcgcagcggctgcgagtgttcgacctcgacgagctcggcagcgccaccaacggcttcagccgcgcgctcaaggtcggcgagggcggcttcggctccgtctaccgcgccttcttccgctccgccggcggcggccgcgtcgtcctcgccgtcaagcgcctcaaccagcgcagcctgcaggggcacaagcagtggctggctgaagtccaa

SEQ ID NO: 6221 - DNA, 423 bp, Setaria italica
  Peptide Sequence Number=SeqID_72195
ctctgccgcgtctataaaaggagctaccgggtgaagcattcagcatcaccaagaatcaccgagacatcagaaaatcagcaacacaccaccacatcgagcaccgaagaaagcaacatcaccgaagacctccacccacactccactcatactccatgaagacatccaccacctcggaacctcgctaaggaaaaagatttagccaccatatttagaatcacccactaccgctgtattactccacctcatccgtaccactactagaataaagggaggccgttggagctcgtccctcggtttgtaagaaaataagttcccaatgttgctaaagagttaacagcaaattcggccggggaagaataatactacatgccatgatgttgtgattgaagtccgcgacgtcaatcattcgggcgtggaagacca

SEQ ID NO: 6222 - DNA, 461 bp, Setaria italica
  Peptide Sequence Number=SeqID_72196
cgcctccggtctccgactcagtcgcgggcaccggcggggtcgagcctggggacggcgctggggacaacggcggcgccggaaggagcggcgcgagcagagcggcggcggccggcggccggttcttgggggcggctgtcggtgtggctctggcgattctggttgctgcgtgagttgagttggtggggtcgtgatgtcagagtaggagttctgccattggttgtttggatttattatgtatttaattttctttatgacctgattttggccctgtttgtatacgcttttctggaactcgcttatctggcaagcaggcttatcagataagcctgctgtctggagaatccgctgtctgaataagctgggtgtatggcaatcctgattattttgtgtcgattgtctgtcctgactggtaaattgacctgaatgccctcgaggctgataatagctcatttttattgtag

SEQ ID NO: 6223 - DNA, 401 bp, Setaria italica
  Peptide Sequence Number=SeqID_72197
ggcggcgacgccgcggacgggcctgccgaggtgtgcctcccggatgtcgaggcggcagtgcgcgcggcggtagaacttggagtggaggaggaggccgaggatgtgggcgcgcgcgcgcagcacgaaggcgagccggacgggcaccaccgcggggccgaggcggccgttgttgggcttgctgtgcaggctcacgcccgcgccgtagagcggcacctgcttccccaccacggacaccgtcaccatccgcccgctcttccgcggctggtagaactccttcatctcgccggaggcgacggtgagctcgccgtagaagaggaggaatggcgtggcggtgacgtgcaggctaaagaaggtgccgcggttgcggaagcgcagccgcaccgtcgcgttcatcgacatca

SEQ ID NO: 6224 - DNA, 304 bp, Setaria italica
  Peptide Sequence Number=SeqID_72198
cttcaaaaatcacgcacatgtccaggtctctcagattaccaaggccaatgccatcccgacggcgagagccacggaagccttggctccgagcacgccaatggtggccgcgccggacgacttcggggccggcgccgccgtgggcgtcgagacggtgggcagcccgtcggtggacggcacggaagaaggctccggcgccattgcaggtgccggggtcggggcgacgctcctctggtgccggggcttgctcttggccggcgcgggcgcggtgaccgcggcggcggcgacggtgacctcgatcttcatg

SEQ ID NO: 6225 - DNA, 1263 bp, Setaria italica
  misc_feature (1)..(25): n is a, c, g, or t
  Peptide Sequence Number=SeqID_72199
nnnnnnnnnnnnnnnnnnnnnnnnnttttttttacgcacgcggaccaggggacactttaacattgcaaccacgcagacaccgagacatgtacacccggacgtgtacatgacgcgtccagtcacgcgtacagtactagccggtccaggcacgtaagacaagacataccaaccgagacatgttcggcacggctatactgccgggtggaacacagaattccaaaggcacgacacgttacattacatcaagtccaggtactactactgacgccacctctgctcgggggtggcatcatgacactggcatacatacagtgatacagagcgccagcaagtacactagtagagtagagtagtatagctcggagacaccagcagatcacacaaaagacggcaagagacgccggccgagcaagagacggccaccgaaccagcctaaactgcgcgcagcaccgtccgtccgtcctgctggacggcggcgacgggccttgtcgcctagaccttggtgaagcggaggtaccccttcttggatggcaggtctgcggtctcgaacccgtcggggaacagcttcctggcctcctcgtcggagacgctgggcccgatgacgacgcggtcgccgggcttccagttggcgggtgtggccaccttcccctgtgtgccttgccgccgtgagcagcgagtccactgcccggagcacctcgtccatgttccgccccgtgcacgccgggtacaggaagctcagcttcaccgtccggtcgggcccgacgatgtggagcgtgcgggaagggaggttcaccccctgcgcgtccttctcgtccgggtccaccatgttgagctgcttgatcgccgaccggtcagggtccgccaggatcgggtacgtcaggttcgtccccggcttgtaggcctcgatgtccttgatccactccttgtgggacgccacgtcgtcgcaggagatgcccagcagcttcacgccacgcttcttgaactcctgcgcgtaccccgccatcgccgccatctccgtcgtgcacaccggggtgaagtcagcgggatgggagaagatgatgacgtagccgtcgccgatgaagtcgtggatgcggattcggccatgggtggagtccagctccaggttggggacggtgtcgccgatggtaaggcccggcatggtggtggacggacgagacgatcgatgcttcgaggcgcgctgcttgcctgctaccactggccacacaaagctacagactcataacaatgctttttgattctttt

SEQ ID NO: 6226 - DNA, 297 bp, Setaria italica
  Peptide Sequence Number=SeqID_72200
ctcgagaggaaggaagaggaacacgtcacggcgaggtgcgcgggcggccgcgtaaggaggaggagatcgaggcgggcgggcgggcgtgcgttggtgcgggcagccgtcggtcccttccatcggaatctgcaggactttgcttgtgcggcctgttcttggaggaggggttgctgaggaagccgcagccggttagccatgtcgtcctccgtgctgagggctgcggtcgacagggccatccggaggcaggcagtcacgctgacggacgccgcggcgtccaggatccggcagctcctcacg

SEQ ID NO: 6227 - DNA, 535 bp, Setaria italica
  Peptide Sequence Number=SeqID_72201
ttgtttgtttcgggtttctttagtttccgttttcggttttccctttttcctttattttcggttaatttctttgttcttaggttacttttgtctatgtaagaacgggtgcgggcagccgtcggtcccttccatcggaatctgcaggactttgcttgtgcggcctgttcttggaggaggggttgctgaggaagccgcagccggttagccatgtcgtcctccgtgctgagggctgcggtcgacagggccatccggaggcaggcagtcacgctgacggacgccgcggcgtccaggatccggcagctcctcagcctcaggcagcggccgtacctgcggctcggcgtcaaagcgcgaggctgcaacggcctctcctacacgctcaattatgccgatgagaaggggaagttcgatgagcttgttgaggagaaaggggttaaagtgcttatcgaccccaaggctttgatgcatgttatcggcaccaagatggattatgttgacgatccattgaagtccgagtttgtgttcataaacccaaatt

SEQ ID NO: 6228 - DNA, 1089 bp, Setaria italica
  Peptide Sequence Number=SeqID_72202
ggcggccgcgtaaggaggaggagatcgaggcgggcgggcgggcgtgcgttggtgcgggcagccgtcggtcccttccatcggaatctgcaggtaagcatctctctgagattcgtcagttttccttcacctcttccgcttgggattgaatcgattcgactggaatcggatgatgaaagggagggtatcaatcaattcctcgcatcgcccgctctcctcttctaatggaattatcatgcagtatcgatttgccaggatatcatctcgaattaattagctgtttctagcccaatctaggtttcataaggagacatcttgatccgtccggttgtcagaatctccatttcggtccaattcgattgacgttttatgtgattccgctaggactttgcttgtgcggcctgttcttggaggaggggttgctgaggaagccgcagccggttagccatgtcgtcctccgtgctgagggctgcggtcgacagggccatccggaggcaggcagtcacgctgacggacgccgcggcgtccaggatccggcagctcctcagcctcaggcagcggccgtacctgcggctcggcgtcaaagcgcgaggctgcaacggcctctcctacacgctcaattatgccgatgagaaggggaagttcgatgagcttgttgaggagaaaggggttaaagtgcttatcgaccccaaggctttgatgcatgttatcggcaccaagatggattatgttgacgatccattgaagtccgagtttgtgttcataaacccaaattccaaaggggagtgtggctgcggtgaatcctttatgactacaagcagcaaagggtccacatcatgatgcgttttgcgttgtaaatgcgtaacaaagtattggaggcctcagctactgattttgttgggtctattgtgctgcagcaggcctgcaggacatgccacaagagtggttatgtaatggatgcgcctaacatacatgtacttcttcatttgcctcagcctgttatgaacatggagtcatttatccatgttttgtatattttgattgcacacgatataagacctcgaatggttaccaatcttttacaaaaaaaaa

SEQ ID NO: 6229 - DNA, 1017 bp, Setaria italica
  Peptide Sequence Number=SeqID_72203
tcgtcggcagcggcgcgccaccgcataccacccgctccagagcctccaggtcgcaccgctccttcgccatccctatcaccaccggcggcgacgccgtcatctcgctgaccgcccacctctccgctgcctccaccacccctttcacgccacgccgcgccaccgtgtcggtgaccagcaccgtcgtctgccccagcgcgatgcccttcagtgcgcagtagaacccgagggagtggaacattggcgcacccaggagcatcctgtcgcgaccatgcctcggcttatgggccagagcgtgagcccccgccaacatcgcggtgaagttccggtgcgacagcgccgcggccttcactcgcccggttgtgcctgacgagtactggatcgtggccgtctccgactggtgcaccaccgccgtttccagcgccagcacctccccgcggtcttcattgtgcaggaaggagcggaagtgatcggaatcgaggaggacggtgggaaggccagccggcagcttggcagcggtcgacgacacggcgaaggcgacagacgcgtccgacagggcgacgaggcgagcgacctcggcggcggtgagcgccgggttggccggcgacacgacggcgccgaacgaaagcagggcgaagtagagcaccgggacgtccagccgcgccggcgcgagcacgaacgcaacgtcgcctcggcggagcctgacccgtgagcgcaggccccccgctagtgcgcgcacctgggaccggaatgccggaaacgacacggtctcgccggtggcggcgtcgagaagggcagggtgcgccgggagcggtgacggcaggagcgagaacgcgaacaccgtgaacgagagtgggccatccgtcggcggcagcggcaccggcggacgcaggctgcggaacgtcttggtctccttgcagtagccgctgcggccgtccacggcgccgggagcggtggcgcagccgtcggcgctggccgcgggcgggggagtggccatttcctcgcggcactctgttgttg

SEQ ID NO: 6230 - DNA, 328 bp, Setaria italica
  Peptide Sequence Number=SeqID_72204
gaaaactcttaacccgaaatggctcgaggagtttaaaataccaatcacttcatgggaagcactcaatcttctttctcttcaagtccgagataaggatcccatctttgatgacactctgggtgattgttccataagcatcaacaaattaagaggtggacaaaggcatgatatatggatttcactgaagaacataaagacagggaggattcacattgcagtaactgtgcttgaagaagaaaatgaaaaggttcttaatgatgaagaggagcagggtggaacaccaagtgggcaaagctagcacaccgaggtcaagcttttcatcgaacgg

SEQ ID NO: 6231 - DNA, 301 bp, Setaria italica
  Peptide Sequence Number=SeqID_72205
ggtggcggcagcagcggaagcggcgctggcggtcgcgcggcggcggcggcggcggttggcgggccgtgggtgaggtcgagcgtgacagtggggaagggcgcggacgcggagatggtggccatgctggaggagcagggcagcacggcgcgcgcgaggaagctgttgtcggcgctgggcatggagcccgagagcagcatggatgcggcggcggaggtggtggaggccatggccatggcggcgggcggcagcgggtggttgtgcgtgccctcgtaggtggtgatgaggatggagcggtcgtcgg

SEQ ID NO: 6232 - DNA, 905 bp, Setaria italica
  Peptide Sequence Number=SeqID_72206
acccgccgctccggtgtgcggcggccacggcgaccagggcgcatgtgtcggtggtcgtcccggacagtgcatgcctccctctggcgtcgctaccgccggcgaccactgttgccggggacctggtgaaggtggcggcggaggagagggacgtgcccgtggagcgcgacctgctgcggaagctgctggagcccaaggtgatctcgccgcgggcggtgcgccccgtgtgctccaccatctacgtcgagcgcatccaccgcaccgacgcgacctgcacagccgtcgtctccaagaccgcggcggaggtggaggtggagctggaagccgacgcgctcccggcggtggtctccgactccagcaaccgcgttcggctggtgaacgacgcgtacaaggagatggtgggccagtccgagtgcccgtggctcgacgccgtggccgccgcgtcgaggaggatcagcggggaggtggcactggtggtgggcgagccagcgtcgctgccggagccccacggggttttcacatgcacggccaggatcgagtgggagtacggcggcaagtgcacctccatcttggcaccgtgcgacgtcagccgtctgcagtgtgagtccagggactacctcttcacctggaggttccgcaccgtcgacgccgacgcatctgttggccgccgctccggcgagacgagcgatagttaggagaagtttgtaccgcctcttgcgtcacgcactgcggtgtgccaaaccaagtgcacaggctaagctgcatgttaaaactagatcaacttcatcttttgcaaagtccatagaatgtagacccagttctgaaatctggagtacatataagatgttgactggataatgcaagggaaaatgtaacttgtaatttcatgaaaccgcccatgttaattt

SEQ ID NO: 6233 - DNA, 1136 bp, Setaria italica
  Peptide Sequence Number=SeqID_72207
gtgctcctccgctggaccccggccgcgacgccgcctccggggcgttggggtgccctccgctcgtcgtctgggaccccgtcaccgaccaacgtagtgatctgccaccgctgcagtgggcgccgtacccgtacagctggaacgccgccgtgctctgcgcggccggcgccgcctgcaatcacctcgactgctgcggcgggcacttcctcgtcgtcgtggtgggcaccaatagcaatgagatgttcgcccacgtctactcgtcggaggcggatgcgtggagtgagcccgcatctgcccggcatcccaacgacagtgttgatttcgcgcccagtgcccttgtggggaatgtgctttactttgcgttccagatgggcaccgcagtcctcgagtacgatttgggcacaaaggaaatggccgtgattcgcctgccgccaccacttcacttcaattggcagcgaattgcgctcacaaccaggactgatggtcgtctgggattcgcaacagcagacaggtccacaatctacctgtggtcgagggaggcgtgtcctggaggagatgcacattgggcacaaaccagagtcattgagctggacacgctgctccccgctggtgccctctcaaccttctctgatgtggttggctttgtcgatgccatcggtctcatttttgtgcggacgggtgatggcctcttcaccattgatctaaagtccagccaggtcacaaaggtatccaaggacaccggcttctccggaattttcccctacatgaacttccacactccagcactgggagtgccctcggcaggtgaggggccaagttcaggtgcctaaggtgcttatgtacagatttctcagtcaagggaaaactgggtcatggtaatggtaaatagtataagctttatggtgggttctggtttgatttgttagtgttcaatggttatatgttttgtttaggggttcctttctcgaattctcgtaaatgtcttagtggatcattgccttgtttgtaaactgtaactctgcgtgtactcctgaattttagcttacaattgaagcttaggatgaatacattcttgtgtaaacatatgtatgctcaacaaaacaagcatttgaatcaatgctcttgaattttcattaaaa

SEQ ID NO: 6234 - DNA, 1938 bp, Setaria italica
  misc_feature (1912)..(1912): n is a, c, g, or t
  misc_feature (1928)..(1938): n is a, c, g, or t
  Peptide Sequence Number=SeqID_72208
gaaatccattcgtccacccagcacacccaccgacaagcacatacccgccagctccgcctgcagctgcaggcccaccaccgcctcctcctcctcctccgccgccggtgggctactgggagagccgtgtgcggaagcccgacacgtccaaagaaacccgctcgccggcgctgtcgccgccaccgcaatctgccactttcaggatcgtccctgcacccaccgacgcgttcccgagccggctgccggagagctcggaccagggcgacaagtccgaggacacgacgccgcggccgaagctgaagccgctgcactgggacaaggtccgggcaagctccgaccgcgtcatggtgtgggatcagctcaaatcaagctcattccaggttaacgaggagatgatcgagacgctgttcatctgcaacccagcgaacgcggcggcgaaggaggcgacgaggcggccggttctgccgacgcccaaggccgagaacaaggtgctagatccgaagaaggctcagaacattgccatcttgctgcgcgcgctgaatgtgaccaaggaggaggtctgcgacgcgctctgcgaaggtaacacggacagcttcggagcagaattactggagaccttgctcaagatggctcctaccaaggaagaggagattaaactgagagaattcaaagaggagaattccccaattaaacttaatcatgccgagaagttcctcaaggcagtccttgatgtgccttttgccttcaaaagagtggatgcaatgctttacatagccaactttgattcagaggtcaattacctaaagaattcgtttgagaccctcgagactgcttgcgatgagcttcgaagcagcagactcttccttaagctacttgaagcagttctgaagactggcaacaggatgaatgttggcacaaaccgtggcgatgcacacgcgttcaagcttgacactctactcaaattggttgatgtcaaaggcactgatggacacacaacccttctgcactttgtcgttcaggagatcatccgaacagagggcgcccgcctctctgccagcacccaaacaactccaagaacccaagcaaatcctctacgagaggagcacgagtgcaagaagctcggcctccaggtagtggctggccttgcaaacgagctcagcaatgtcaagaaggcagccgccatggattccgacgtgcttagcagctacgttaccaaacttgccggaggaatagaaaagatcaccgaggtactacggttgaacgaagaggtgaagtcaagggacgatgcgtggcagttccatgacagaatgcagaagttcttgaagaaggcagacgacgagatcatcagggtccaggctcaggagagcgtggcgctgtcgctcgtgaaggagatcaccgagtacttccatggcgactccgcgaaagaggaggctcaccctttcagaatcttcatggtcgtcagggacttcctctcggttcttgaccaggtctgcaaggaagtcggcaggatcaatgaccgcaccatcgccagctccgtgcgccatttcccggtgccggttaacccaatgatgccgcagttgttcccacggattcatgcgttgagagccggattctccgacgatgagagttcagcggcttcagtgtcatcgccatgatcactggtagtctgccaatataatttttcgcggaccatcagtagaacgccgccggagggcagagggatacaaatggtagcgagacgtcctttttttttttaccttttgtacctgtagattatagaatgtacaagatttttgcaaatatttatttatatatataagaagggataaaatctagatcagaggaggaaaataagcagttcatacgtgtatccatgcggccttggctcttcagttacaaaaaaaaaaaaaaaaanaaaaaaaaacaaaaannnnnnnnnnn

SEQ ID NO: 6235 - DNA, 477 bp, Setaria italica
  misc_feature (475)..(475): n is a, c, g, or t
  Peptide Sequence Number=SeqID_72209
agacgaccagatggatatgtgatagatcaatctgagcgattgctgttagtaggaaaccacgcatgagcaatatacatcacaagcttctaaccaaattcgtagacttcagataattttgatgaactcataaatacctgtgaacatacactgtccttacccttaagtttctgtatcatacctctgtgtatcatcctcataatcggtatcactatctcgcgagccatctgaaccgattctatgactttcctgcatcgcagaaccagtaaaactgtccaatacatgaggttcaattattttccagaacgagtcagcattgcttccctggaaacctatccaaaagaatctccctttcctcttcactttgcatgttaaagactgcgtttgcaaggaattcacgattctttcaacgccatcaatgttcccgccactgaccttaagaacaatatcacctgatttgagtctgaacgccccaaanat

SEQ ID NO: 6236 - DNA, 1962 bp, Setaria italica
  Peptide Sequence Number=SeqID_72210
gtgttggccacctcatccgcctcgtcggcttcaccaccaggagaaaaggcaaaggcaccgccgtaccattcctccaggccaggcctccagtcctcgctctcctcctttcctcccctctcctgcagcttcagccttcggttcaggggatctccattcctcctctgttcgccggtgcgcttcggattggcctgtccggggaggccagagaatcactcagaccgggatacaggaatttcagtatgcaacaaatggccatgtcagcattcgtggtaacctcaccttcatcgcatgactatgccttatcagccctccatgctcgtcattctcaaagattgcacacgagacgcattcgcagccaagtccgggcactggcacaaacacagttgcagtacaataagctgggagattcagacctccttatcagcgaggtcgctcttggaacaatgacctttggagagcaaaacacagagaaggaagcacatggaatactctcttattctttcgatcaaggtgtcaatatactggatacagcagaaatgtacccagttccacccaacaaggaaactcaagggaggactgatctttatattggcaggtggatgcaatcgaagccacgggaaaagataattttggccaccaaagttgccggttattcagagcgttctacttttcttcgggacaacgcagaagtggtgcgtgtcgatgctgccaacatcaaagaaagtgttgaaaagagccttaaacgcttgtctacagactatattgatttgcttcagatacactggccagatagatatgtggcactatttggtgaatttagttataattcaaccaaatggagaccaagcatcccttttgaggatcaactgaaagctttccaggagctaattgacgaaggaaaggttcgctacattggtgtttccaatgagacctcatatggagtaatggagtttgtacatgctgcaaaggctcaaggccttccaaagatcgtgagcatccagaacagttatagtctacttgtgagatgccgctttgaagttgatcttgttgaagtttgccacccaaataactgcaatgtcagactgcttgcctactccccattggctggtggcgttcttactggaaagtatcttgatgctaatgctgacacctcaaagaggagcaggctgaatctcttccctggatacatggcgcgctacaacgcctctctggctaaagaagcgacaaatgaatacgtaaagcttgccaagaatcatgggctaactccagtccagcttgccctcggctttgtgcgggatcgtccatttactgctagctccatcattggagcaaccaccatggatcagttaaaggagaatattgatgcgtttaccagtgctccacggcctctgccacaagaagttcttgatggcatcgaggaccttttcaagagatacaaagacccggcaatcctataggtgctgatcaccattttaacgaaaagaaccagcaattctcaaacaatacaaagatgcagcaaacatattagaacttttgatcataccatttcgttcatgctgatacaactatttctttaatcttccattggctatatggataataccatcagaattatggtttattattttacttttcagtgtatgtagaaaggttttcatactttatacaagtacagtgagtccaaagggaagacattcttttgtactctgttactaaatgcccgatatcttggacattcacaggtctccagtgcacaagtttaaccagtacattttatatggaaatagtagtaaaagattgttaaattactaaattatgcaactttttaataataaatccaatgatactattcagatatgagcaatctaaaggctgcatgacatctaagaaagctacttttacgaatggtactttcatttttcccattgtgtttggaaagtaggaatttcttcaaattccgat

SEQ ID NO: 6237 - DNA, 730 bp, Setaria italica
  Peptide Sequence Number=SeqID_72211
gcttaaatttttggttcgattcatgtggtggagcagaagctggtgggctgacgtgaggagcaaggaggcgacgccgacgagcaatgacagcatgtgattgagaacagacgacgctgtttttttttgaaggagaagctctctgcttttatagaaagcgtataaaggagtttacagaacggaaccgaaagaaacaagaagaaaaaacgcgttcaacacaaaagaccaacactggaacagggagcacagacatctaaagacccacaacatccggtagcaggttgttggtcggttggaagttgctcagccacctcgccatcttcttggtagctccatccaacttctcctaatcatcctccttgagaagagggcgccatttctgcagaaatgatataccaaggagattggagcctaaatcaaggagtctactatgttggagaacttcaagaactcgacggaagctctcttcaatcaaggtcaggaatcgaaggtcgcgcgctatatcaaggctcatcttatgcggaagatgcatttcgaccaaatctccgagatagaagactttgaatcgtagattttacaagcagttaacttagcattcataatttatttagtctgtatcttgtaggctgtagccgtgtgtctgtagattccccctttttcgtctctgatctattatgtatatttcttgacatgtaaagaacgatgataggagttgcatagcaaattctctgtc

SEQ ID NO: 6238 - DNA, 862 bp, Setaria italica
  Peptide Sequence Number=SeqID_72212
cgttctgctataatacttgaaatccgatatgaatcaaaggatggtgcgagagcaagtcatgctccgtcaatgtttccttaccctgagaatgattcttccaacacaacaatgaggaggtccttcagtaaacatagtctgctctcttctggaggtgagaatctaatgaggcggcttaaaaaggatagtgttgttaagggagctagctctagtaagactagatggatgcaatctgatccccacatactaacagagggtgaaataattgaagttgggccttctcacatgcattggcatgctcaaacaaataatggtgttcttgacgtaaatgaaagaagaaaggagaatgtatgggaggaagaagcttcgtcatcactgaaccaagagagcattactagttggaaaggaagaagtgggaacaagcagcgtcaacagaacagcatagtaaaaggaaaggtatcccttgctcatgttattgggagggctgaagcttgttctcaacgaggaggctggtctagacgaaaggctatttcaattgctgaaaagctagagcaagagaacttgaggttggagtctaaatcaaggaatctactatgttggagaacttcaagaactcgacggaagctctcttcaatcaaggtcaggaatcgaaggtcgcgtgctatatcaaggctcatcttatgcggaagatgcatttcgaccaaatctccgagatagaagactttgaatcgtagattttacaagcagttaacttagcactcataatttatttagtctgtatgttgtaggctgttgccgtgtcagtctgtacgaccccccccccttccctttcttctctctctatctcgtcgtcgtacgtacgtcg

SEQ ID NO: 6239 - DNA, 474 bp, Setaria italica
  Peptide Sequence Number=SeqID_72213
agtttttgtgtatttgcggagtttatagtatttctgtgatattataatcttaatatgttttataggtatgtaaagatatcaattataggtcaaagttatgttgtaggagcatggcgctatccaaaacagtagtctcttgttgctggaaggggtatatgtcggaccaattgccagtagggcacatgtgaatcctgtttagcttagagcagagtttcatgagattttttcctttctccagctaatccaattatttcgacggaagctctcttcaatcaaggtcaggaatcgaaggtcgcgtgctatatcaaggctcatcttatgcggaagatgcatttcgaccaaatctccgagatagaagactttgaatcgtagattttacaagcagttaacttagcactcataatttatttagtctgtatgttgtaggctgttgccgtgtcagtctgtagattcccccctcctctttccttctct

SEQ ID NO: 6240 - DNA, 1216 bp, Setaria italica
  Peptide Sequence Number=SeqID_72214
tcttctactaaaggtagtaaaggtaggttccctagtagggttgtccccttgtacttgttttaattacttaggttcttagaacaatttagtcattagtggtacccttgacagtcttgaacgtgaggaagcgactgatctaattaagcgttatggaggccgtgtgactggctctattagtaaaaagacgagttacttatttgctgatgaagacattggtggagtgaaatctaacaaagcaaaagatctgtgtgtcccattcttgaccgaagatggtttatttgatttaatccggaaatcgaagcctgcaaaggctcctgtagacggacatcaaagcagcaacggttctgaaaagctgcagaaattacagacaaagagctctccagctaaagttgagaaacgagctgaagcaagtcctgtgggcaaaagtattgcttcaaagagtaatgtcgcaaatgcctctgctgaaaacagaaaggccaagaatattgaccgtggttctatgcaatggacagaaaaatatcggccgaaagttccgaatgacatagttggcaaccaatcaatggttaaacaacttcatgattggttgaaaagttgggacacacaattccttcattctgggcaaaagggcaagggaaagaagcaagctgataacggagccaaaaaggctgtgttgttgagtggacctccgggtattggcaagactacaactgcaaaagttgtcagtcagatgctaggattgcaggccattgaggtaaatgcaagtgatagccgtggtaaagcagactccaagattgagaaaggtgttggggggagcacatcaaattccgtcaaagagcttatcagcaatgcaactctgaattatagtgacaatcggttaaagcatcctaaagctgtactaatcatggatgaagttgatggtatgtctgctggagatagaggtggtgttgctgatcttattgctagcatcaagatatccaagattcctataatctgcatctgtaatgaccgttatagccagaaattgaagagccttgtcaattactgcctgatgctcaacttcagaaaaccaacaaaacagcagatgagtaagagattgatggaaattgccaaaaaggaaggtattcaagctcaagagaatgcaatggaagagcttgctgaaagagttcatggggatattcgcatggcacttaaccatttgcagtatatgagccctcca

SEQ ID NO: 6241 - DNA, 234 bp, Setaria italica
  Peptide Sequence Number=SeqID_72215
ttatcttgttaactgaagccgacccttttccacattctttggactgcaatttaaatattgaatttcggatggatagattgagatacatctgggtaatattttgaagctttagctgataacctgaatctgtctgcttgcagaagttctatggagagaagttcaatagcccattggagatcaggcatctcccattatttatttgataaaagagtaagctttattttgtaaatagaa

SEQ ID NO: 6242 - DNA, 383 bp, Setaria italica
  Peptide Sequence Number=SeqID_72216
ctatgattattggtgttggtatatatatggtctgaatcctggttgattatggatgcggtgtgattgatcaaatgtcaaagcaagtatcttatgtacagaagttctatggagagaagttcaatagcccattggagatcaggcatctcccattatttatttgataaaagagtaagctttattttgtaaatagaaaatgcaatggaaaggccatgtaatgtgataaattgtgtttgaatcagtttgttggtctgtgatttaaatccaccgactggattgaacactataaactgtgagcaaatgttgtcttgttattgtaacttctattataaatattatctgttgtatttatgagtatgctattcggttatgttatgcgttaaaaa

SEQ ID NO: 6243 - DNA, 1055 bp, Setaria italica
  Peptide Sequence Number=SeqID_72217
tcctgagtttccgtggatattgtgcggatggacctgaacgcatgctggtgtatgactatatggcaaactcagcggagtgtctccttgattggcggaggagagcatctattgccatcggtgctgctcgggctctcttgtatcttcatgaacatgcaacacctcagataatctatgggagcatcaaggtcaccaatgtgttgctggattcagacttccaggcacatgttcaacgacaatatccaacctgctatgattattggtgttggtatatatatggtctgaatcctggttgattatggatgcggtaatttagagggtatatgcctgctaattttttaaaacatgaaactacgagactgcttatttatggagagacagtgtccatgtgatccagttcagtattagatataacttaagtaatttggtcaaatgaaatttagcaatggacaagccccgagggggtgttcattttttattctacgtatacacatgaaatgtttctatgttatgattaagacatatactatatgcttagtattttagacatccagaaataacgtttactaattatgcctccgtggatatttttatatgcaccaagttaaagtaaaatctagaaacttgaaagatttccacgataccgggagaatgtctgtttacacgattctattataacattataacctagattacctccttactgttgtttagtttcagcttaaataacattggctaggtcattacattttgtttctggtaagctagtgaccgattttgtagatgcacacatggtcggaatccatttacactttgtttctggtaaactggtgaccaattttgtagatgcacacttggtcggaatccatgttgcttgctgttgacatataatttgaaatgttctctttgtctgtcccaggtgtgattgatcaaatgtcaaagcaagtatcttatgtacaggtacgtgaatgagaaatcttgagtttgattacagatgtttttttcttgcagacatgaacatattgcagaaccaattgcttgttttcagcatctcaata

SEQ ID NO: 6244 - DNA, 586 bp, Setaria italica
  misc_feature (46)..(46): n is a, c, g, or t
  Peptide Sequence Number=SeqID_72218
aagtggaatttgcttcagaagtcgagatcttgggaagaataagacncaaaaacctcctgagtttccgtggatattgtgcggatggacctgaacgcattctggtgtatgactatatggcaaactcaagtctctatgcacatcttcatggaccactttcagcggagtgtctccttgattggcggaggagagcatctattgccattggtgctgctcgggctctcttgtatcttcatcaccatgcaacacctcagataatccatggaagcatcaaggccaccaatgtgttactggattcagacttccaggcacatgttggtgattttggtctgataaggcttattcctgatggaatggaccatgaaaagataaccagtgaaaaccaacgaggctatcttgctcctgagtacattatgttcggcaaaccaacagctggttgtgatgtatacagctttggaataatattgctggagcttgcgagtggcaaaaggccaatagaaaagtcaggctctgttaagacatacggaattcgaaattgggtgctccctttggcaaaggaggtagatacgatgaaattgcggactcaaag

SEQ ID NO: 6245 - DNA, 696 bp, Setaria italica
  misc_feature (32)..(32): n is a, c, g, or t
  Peptide Sequence Number=SeqID_72219
ggggacaagtttgggatggctctcagattgcngtcaagaggttaaagaatacaaagaatggcacataagtggaatttgcttcagaagtcaagatcttgggaagaataagacacataaacctcctgagtttccgtggatattgtgcggatggacctgaacgcatgctggtgtatgactatatggcaaactcagcggagtgtctccttgattggcggaggagagcatctattgccatcggtgctgctcgggctctcttgtatcttcatgaacatgcaacacctcagataatctatgggagcatcaaggtcaccaatgtgttgctggattcagacttccaggcacatgttcaacgacaatatccaacctgctatgattattggtgttggtgtgattgatcaaatgtcaaagcaagtatcttatgtacagaagttctatggagagaagttcaatagcccattggagatcaggcatctcccattatttatttgataaaagagtaagctttattttgtaaatagaaaatgcaatggaaaggccatgtaatgtgataaattgtttgtgaatgtagttgttggtctgtgatttaaatccaccgactggattgaacactataaactgtgagcaaatgttgtcttgttattgtaacttctattataaatattatctgttgtatttatgagtattgcttatttcggt

SEQ ID NO: 6246 - DNA, 205 bp, Setaria italica
  Peptide Sequence Number=SeqID_72220
catcagtggctgaaatggttgaatataaacatcagacagattcagacctcaagagatgacaaacattgaataatgctgagttttctttacacgcaggaatcatacttgaatttatctgatgcaactttcaaggatcttcggaggaaacttccagttacccgaaccctttttccatggcataacacattttccgagcgctagttct

SEQ ID NO: 6247 - DNA, 821 bp, Setaria italica
  Peptide Sequence Number=SeqID_72221
ggcccggaatgtcggacgaaggcggcgccggcgagccgctcagcgaccgccagaagcgggagatcgccgtctggttcctctccaacgcgcccgccggcgagatccactacgtcgccaaagatgtgcgcgctctgctgggggacgacgcggtgtacgaggccgccgccgcggaggccttcccggagtacaacaaggcccacctcgtgtctctcgagctcccggacgcagtggcgacataatcatcacaacatttggggagcttgacaagaataattatctggaccccaggactgctcaagttgctactgttgatcatattaaacagacttgtacaaaattgaggcctgctgcagatgaggagcttccatcagcttatattgaagagtttagctgtgccgattatggaaaagatatagagggaccaggagcagatttcggttttgcagtagctatttctgctgctaagcgtagcccacagaacttttgcaatgagctggcgtgttcgattcatgtcttctgtcttttccttgttcttaaagaaatcatgttttcttattcttgcacatatggatcagtgtgtttggttctgcattatagggagacttcaacttttatggaccctttttagcctttaaggtgatttaccaattaccattttccatattctctatagtttagatctttattcaggaaagatccttaaaatctaattttctatcagtgtgtccttgcattcctacttattttttttcattcagtatgcaacttttggtcattaggtttttcatgagtaactgagtattactgttttattctattct

SEQ ID NO: 6248 - DNA, 1141 bp, Setaria italica
  Peptide Sequence Number=SeqID_72222
gctccagggcccggaatgtcggacgaaggcggcgccggcgagccgctcagcgaccgccagaagcgggagatcgccgtctggttcctctccaacgcgcccgccggcgagatccactacgtcgccaaagatgtgcgcgctctgctgggggacacgcggtgtacgaggccgccgccgcggaggccttcccggagtacaacaaggcccacctcgtgtctctcgagctcccggaccgcagtggcgacataatcatcacaacatttggggagcttgacaagaataattatctggaccccaggactgctcaagttgctactgttgatcatattaaacagacttgtacaaaattgaggcctgctgcagatgaggagcttccatcagcttatattgaagagtttaggagtgctttagatgttgaattgtcaaaatatgttgctgaagcttatcctaaaggggtctgtgccgtttattgtaccagtggaaaagatatagagggaccaggagcagatttcggttttgcagtagctatttctgctgctaagcgtagcccacagaacttttgcaatggcagctggcgttcaatttggactatggaattcaattatgagttgcaatttgttgatattaaaggaaagatacaggtagatgctcactattttgaagagggaaatgtccagctggatactaacatcgatcgcaaggactccaccataatgcagtcaccggacgattctgcggtttcaatagccagcatcattcgacatcatgagtctgagtatttgtcatctcttgaggaatcatacttgaatttatctgatgcaactttcaaggatcttcggaggaaacttccagttacccgaaccctttttccatggcataacacattagccttcagtctgacgagagacctcgccaaagaactagcgctcggaaaatgaagtctgcagactatgtcaccagatagcttcaagtggaaattttatctccatgccatgtgatgttctgtagattgtgctattcatatgtcgtaaccagcaatcttcatcttttgatcggtgagcttcaccgcccgtgtaaatcaagagaacacactttttgtggagaattgcatttcctgaaaatatacatccattctaaattttct

SEQ ID NO: 6249 - DNA, 238 bp, Setaria italica
  misc_feature (228)..(228): n is a, c, g, or t
  Peptide Sequence Number=SeqID_72223
acctcactcaccttccctaacgaatctcgctacgtgcagcccgcgtcgtcgtgcgcaacattattccggtctgtagctgaaggcaggcagggctcgcctcgctagaggtagccgccacgcacacgcacgcatgggcaactccatcggcgggaagcggcggcgtgcgcgggtgatgacggtggacggcgccacgcacaagtaccgcgcgcccgccgccgccgccgacgnctgcgtggcc

SEQ ID NO: 6250 - DNA, 1449 bp, Setaria italica
  Peptide Sequence Number=SeqID_72224
gttctacgtttagttttttttttttttttttttttggtaaagaaaaactctagcaaattgccaatatgcaagttgaaaagaatgtacagatgtagaacctctgaattctctatatattgtagaaagggaggggagaaagataaaacttagaagcttcactctgctatatcctactttgttcccaccaaaaaaattctctgctatatctaactgtgacacctttgattttctacacccgtgtgtaatttctaatatatttcgtctgttatagttgctcatcctgtgtacctatatcttttatgaccaaaggaaaaaaaggcagggggttgaaaattttgcgacttgttgtacggtcgctgtttacatgcttgacagttgcaagatatcctgaagaaaaatggagagctcctgagctgatctcccaacctcgccttgccgccttgtcagcgacttgaggctggcgtttaccttcttcagctcttggaaacatagactgcaccgctccaacctctgctctgcctcaaggtctacaccaacaggcggcgtagctgacaaagctgaagaaatagtggcaccaaagctcttaacaagactgagaatcatccccaaggcaatgttcacatgccagtcatatttgctttcaagaagactggaggaaagccgcaaaatagaagcgcaaatatctaaactgatacagttactattctccattagagcattaattacaccagtagtgacagcaaaatccaatattctccatgtagcatcaatagatccctttatatcatttctttgccaacaccgataaaccacctctagttttgttagccgagacttcattacatgaataaaatcttgatggttttccattagaccatacatatcatcttcatcactagctgaaccaataagttttccaggaagtgaagggtgcagcctcgagccatataatgttggttcacactggatgctatcataatgagaagagtaaggtcgatgtctaacagcgtgcctttcacttgattccctccatttgctcgttccaatcactccatttctgtcaatgtcggcaaattctggattccatgcagcatcagaattccatttgtcaaaacaagacacgccgtaccagctaccagcttcattagactcaattttttcagtgcatactgaaccagaacggctattgtccccagcacctgaagattctcttataaatttcctctgtgaactaataggctttgacagaaatatatgctcacggtcttttgggctttcttgagccctccttgtatagtcaatatctggattagctctcaaataactttctgggattattttcttatatcttacatcatcagtgattcttctgcagccactttcgtcaaccatccttgacctccttgaatcagttataggtaccaacttgccactttctttgccattgat

SEQ ID NO: 6251 - DNA, 499 bp, Setaria italica
  Peptide Sequence Number=SeqID_72225
ccgggtttttactccccaagttgttctctagagatgggaaagaccattatacccctctcaaagaatggagtgaaattttacctcattccttacatgccactgcacagatcaatgattgtcatatataccgtgatgaaaattaaaaataagtaggacacaacatacatttatattattttagctcacaaatctaacggatagatgttcatatgttgcataagatatgaaataagtagtccattcaaacactgagcataaccgcataatacatatatctccaagttctaatacataggatcgtttgttcttcctcctaacgctatgccctctacatctcatgcccgacggcgttgtgctggtactttccccaactccaaatcggcagcaatcagctcatcctcctccttcctccctgacgtaagttctatgcttttgtataagttggttaccataatcagcttcgagagcatatcaatctctaagtattgctgagtaaagt

SEQ ID NO: 6252 - DNA, 369 bp, Setaria italica
  Peptide Sequence Number=SeqID_72226
cgagccttctgccgtgcgccgcccgtttccctgctctccccatccccgaccaccgcccccgccttcgccgaccagctcatccgcccgccggaggcccaaaacccctaaagccagtgcaaccgcgtctcagccggtatccgctcgcctccccgcccgatctcccctccggacgcggggccatggggctgagcccgtgacggatgcaagcgccccgctgttgcgcgcgccaaggccgtggagggcagcaccagcggaatccggtcgccgagccacgagccgcgaggtctctggtgctgtagcagcagcagcagcagcagccgccgccgccgccgcagcagcagcagcagggcgaagagtagcagcaggagg

SEQ ID NO: 6253 - DNA, 572 bp, Setaria italica
  Peptide Sequence Number=SeqID_72227
ttggttattggcctcatcagccaccttcttggcaatccccagctcctcgaggactttccccttctccttctctttctccaccaactgctctttggccttcacgagctcctcctgaaccgcggcaagctgcgcctgcagctcctgaggcggcttcacggcctgctgctcctgcgccggcttcgtagccttcccttgcttctctggaggcgttgcgagcttggaggcggccttgggcgtgggcgccttgcggtcggccgacccaggggacttgtcggccgcgcgcggcgtgccatgggcggcgctagccttgggcacggccggcttgcgaggcttgctgtccttgggggtcggcggcgtgccggcgccgcccttcttctccttctccggcttgccgttgctcttcgcctccgccaagccagatttggtcttggagccctgcattgctgcgccgctgccgctgcctccgctggtggtgctgcttcgtctcctcctcccgcctgcgcttggtgcgtcactctccaacggacggggagagagagagagagaggcgcttatgaatgctagtaagtcgg

SEQ ID NO: 6254 - DNA, 3148 bp, Setaria italica
  Peptide Sequence Number=SeqID_72228
ccctaacatttaatcctagcctttgcaaaaaatggtgatccatatgcttcctacaccaaacatgttagcagttagtaataaaatacaaaatagccggacggtgagccaatcatctatgttcacagtacaaaaaaactgtaagctgcccatatgtattttcttcaccttccacattgtttacaccataaaatgtatgaagctaaacatggcccatctccataggttaaattctgcattggcgtgcttctatttgcagtactggacatgaaagactttatggtcatcttaagctgattagctccacatctccctaactggcgccagcaggatattcttaatctatctgcttagttatgctgaaacatgttttctcaatactagaaaacatgaaatttatctgctactgtgcttggaggaagtttatgatgttcgactgaatccgtatcagcattgctcagctatttccgatgcttcctttttgtttcagttcttggccgcttttcctcttcccattccctatcatgcatttgttcagcctctcgacgacttggcttgcttgtcgtatccttgccatgcgtcctaggaaggtcatcagtgtgcgaactacgatgctgtgaaattacaccttttctttctcgttctcgtacatcagacaattgtgagctgccagttccatgggaaggaagctgtggagcagaaggtgcgtattccccagcttctaaagaaggctgttctcgcttaacctttcttcgtttggaagcgctactagggtcgctgtcttccttcgtagtagtccctttttccctatctctgtcatctaccttgtttgacggaacatccctatcttcacgctttctatcacgaagatcctcttcccttctgtgctttccatcatcctgaaatgacgaagcattctcctctgactgcctcctttctttctcatcgcgcctgggagatgacctttgtatatgcctggcgctcccaccccttcggtcagcatcttcttctcttcggttggcaccaactgattggggtacaaaacttgtgggaagtggtggaggtggtggcaaactttgccctcggaacctttcatcagtagaatgtgtccggtcaactgaaggttcagcatatttacctttattcctctcatccttatttctatcctctcttcctttttcaggagctttatctgtaactctctcttgcatcctttcaatagaacgttctctcctatctgataatctatctgttgatctgtcaatggcatcttccccacggcgcctttcagctcgatctaatttttctcttggatctctgtcatatttatcatcaaatttctctcttattttttctgccctacttaagttttgttcctcattagtactcttctcatgatctactgaacgaaacttatcaacggcacgtgagtccaaactcttttccttgtctacatggtgttcactcaaatcactgtctcggggttcagtttctcctttccttcgcttacttgacctatcctgttcctcagctggagcaagtcttttttgctgtctcaaagtagagtcagtcagctcattagcctcaccagagggattagctgctccatttaacgctgcatttctttgggaggaggatgaaacctttcgcggcgctggatgcaagttaccattgctactagtggaattggtatcttggacaaaatcggctgcctgagacaaaggttctctgtcaacaggagcggttgaagcttgttgatttacattccggctggaagattttccagtttttgcatcttcctttgccacatcatgcttcaatatcttcccagtgctgtgtgcagcacgcttttgtggcgcccttgtctcagattctgaagtaggcctcgcagaaaccttaaccccctcatcagatacaggttttggaggttcatcagccacacgtacagtccctgaagattttccttgtatggaggaagatggtatttgattatcagatccatttgcagacacagagctcttcttttgttgaacatcaggcttcatagcagcttctgacttttcatgcctactctctatagactttgcacgggcattttgatcttttgccatcgagggatctgtggactggtttccatgtgcagatcttgctgttgctggcttcagatcaatgtggcccatgccaaactcttcttcagatagccaagaactcttgcgagcagccaaagcagcagctacaccagtagcaagaactttaagatcttctctttcatcccctttaagtttagccacccgtttctcaagattgaccccacttttacgaattacaggaaagacactggaaatctttgtaagcacaattagggcattccggatttccatgtattcttttgattccatgcattggttaagcaccttggtgattcttgaactccacttccaatgaacccgaacaaactgactataagatacacgctggctgttagggtatctgaagtatacagcaaaacctggtttgtttacacattcacgctcatacacagattcatcgctcttccaatagtaggccatctttaatgtatcgtgaaaaaaccttccaagcctgccagcttcaaattctgtgcaacagcatatcattggctgaagggtcttacagacgaggacatcaatatgattgactgtgttaaagaatggagtcccaagtgagtgtagtgtttggacaaacgtagcacaatatacggcatcctgcgtactaaaaacacagcgtgggaatatgcagcgctgtaggaactccatgttgatcttcagtgcatctggactggaactcaaccacttatccttttcacgggctagcctttggaccacagatgcaatgtgctgttggtgcttctgagattcactattcagtttgtcaagtaaatcttggattctctccttgtccttcttacgtcttgaaattgcaatgctagagttatctgagctgtcctccaattgtttgagattgtcatgcagcttcttgatttctgtatcgtaacggtcttttgggaagtgaagatcatagagcgttaagccccagaaagtagcatataaatctggtgaaagactgttccaagcttttgctggcagaattgacctgactgtgttaataagat

SEQ ID NO: 6255 - DNA, 320 bp, Setaria italica
  misc_feature (1)..(121): n is a, c, g, or t
  Peptide Sequence Number=SeqID_72229
nnnnnnnnnnnnnnnnnnnnnnnnnnnnnnnnnnnnnnnnnnnnnnnnnnnnnnnnnnnnnnnnnnnnnnnnnnnnnnnnnnnnnnnnnnnnnnnnnnnnnnnnnnnnnnnnnnnnnnnnngtttaggaacaaaatcactgataaatataatcaacccgatcggatcaaccaaccataaacgccacgaatcgcaacaaaacgagataggggaaaaagaatttctcctggggcagtatcaactatcaagtatcaacaaaacgttcggcaacctgatcgccatggcgcctgaggccaaccgcagccaggctgctacttctta

SEQ ID NO: 6256 - DNA, 1252 bp, Setaria italica
  misc_feature (1)..(25): n is a, c, g, or t
  Peptide Sequence Number=SeqID_72230
nnnnnnnnnnnnnnnnnnnnnnnnnttttttttttttttttttaaacgtccacgaatcgcaacaaaacgagataggggaaaaagaatttctcctggggcagtatcaactatcaagtatcaacaaaacgttcggcaacctgatcgccatggcgcctgaggccaaccgcagccaggctgctacttcttggtgttgttgagcacgatgggcaggacgatgacgaggacgatgacgaggacgatgaggatggcgatgaacgtccacttccgggtgctcttctggtgcttccttgccacctgcagctgctcccggccgcggtcgacgaacgacctcgcccttcccacgttgccctcgatgtcgtcgagctgctccccctgcgccgccaccagcaccgccatgtcgttgaacacctgctgcagctccagcaggctgcgctccagctccgccacggcgccgtgccgctcctggatctccgccaccacgcccagcacctctccgcgcccttgctccgcgatcgcccgctgcaggaaccgctccccttccccggactccgccagcgcgtccagcgtcgcctcgtcgggctgcgaccccgtcaccgtgaagtaccgccgcgccaccgtgtcccggtactcggcggcgatgcgggaccggagggaggagaaggcctccatcgagtcgcggagcttcttgcggagcccggcgacgacggaagtgcgcgtccggtcggtggaggaccccggcccgcacccgggcaccgagcggttggcggcgttggcgcggtccagggactcgagccggagcttcacgaccttggccttcttgatcgccgacgcgacgtcgccgtccatccgggaccggagctcgcgcacggcggcggcgtcgtgcagcgacttgctcccctcgttggcctcgtggagggaccgctggatgcgctccaggtcccggagctcatccttgatcgactccacgtcctcgaagaacttgtccaggctcgcgcccgccgcggcacccggcggcgcggacatctccacaccgtcagcgccggactcgatgtccccgccatctcccccgccgccgcgcttccacgagctcgagaacaggctgttcatggcggctggctggctgtggctgtctcctggatcgcgccgctgctctggctctggctctgctcgggtggccgggcgacttcctcccggatcgagatcaagatcgtttcttggagctcgcttcggtggcaggtttcttggatcggga

SEQ ID NO: 6257 - DNA, 594 bp, Setaria italica
  Peptide Sequence Number=SeqID_72231
taagaaaataagaactaaggaaacaaagaaataaataaagaacaattaagacaagaatagaccaaaacaatcaatgcccaatggtttggcataacaaatgaactgccttgtcaattgtcatcttcagcaagtattgactaatctgactcattacatcaggtcaacaaagatgaggatctgtgcttctgattgtcagaagtgtaatgcagcttgatgtcgtaaaggcaacttgctttagaataggctggttacagtgaaaaatggttgttgtgatgcatgattcgagcgagaagacacaagtccttgctgcttggactgatgaaccttctagctctgtatatggttgggctattagtgagaagcatctctaatcttttggtacatcctcctgtatatggtagctccttctagctctgcatggatttctctttctgtccggattcccattggattgtccagaagccatccttcattgtcacagtgaagatctttatcaacacaatcaacatgttccaaaatgtcagagtacccatcaaatctttctctcatgtctgcagctacttccagtacatctgattgtatgagaacctaatt

SEQ ID NO: 6258 - DNA, 505 bp, Setaria italica
  Peptide Sequence Number=SeqID_72232
tctctgctcaggccgccccctccacgccacacacacgcgacgcgcggcttcccttccattcccggcgacccggatcccgcgcccgcgtcgtcagctagcttccccggcgagacgtccgccgcccggagcccagtgagctgtgcggagggtctgggtgtgccggcccgcgggcgttgttggagcagatccatggagccgagccagtagatcgcgaggagtgtcctgcttgctgctgttttgttgggttctagccagtttttagcggcgttcggcttggaagatatggccgcggcgatggacgtggcgaaccctggagcggctgcttcctcaggaatgtcaagcgatgctctgtaccgggagctatggcatgcgtgtgccggtccgttggtcacagtgcctagacaaggcgagcgcgtctattacttcccccagggccatatggagcagctcgaggcgtctacacatcagcagcttgaccagtaccctacccatgttcaaccctacc

SEQ ID NO: 6259 - DNA, 256 bp, Setaria italica
  Peptide Sequence Number=SeqID_72233
gtatttgtaactatggactgtacgggatgtttgacacctggagtaggttcctgcgatcacttttaccggaactgtatggctttcgcagcatactcctacagtcctacttgtcatcatttacgtgtgcgaaataataatggaatgtaccctagagtaccaacattttgctatgtgattgaacgatttcatggagatcagttgaacggatggtactacgttgtagcgaatgaaatcacgagcaagaaacgatttttag

SEQ ID NO: 6260 - DNA, 1387 bp, Setaria italica
  Peptide Sequence Number=SeqID_72234
tgcctggatctcatggatcaggcccacggtcctgtcatatgctcagcaccgataaagtaatcagtttgcaaattactcatcagattatggcaactctgggaaaggaaccctgaagtttcagctgataaaccagcggcaagacttttcatttgcattgttcactggtggactctcaaatccaaaactgatcgccgtatcaaatgcgatcgcttttgcgaacccaaaagctccggtttatccacgcctagcacaggggaaatcctggaatgagatgactgtcacatggacaagtggctatgacataagtgaggcgtatccctttgttgagtggggcatgaaagggagacctgctgtacgcacagcagctggcacaatcacttttgatcgtgaaagcatatgtggagaacctgctcgttctgttggttggagagatcctggtttcatacacacagctttcctgacagacttatggccaaataaagagtactactacaaaattgggcatatgctgcctgatggaaatgtcacatggggcaagttttcttccttcagagcacctccttatcctggtcagaagtcactgcagcgagttgtcatttttggagatatgggaaaggctgagagggatggtagcaatgagtacagcaactaccagcctggatcacttaacactaccgatacactgatcaaggacctcgacaacatagacataatgtttcacattggtgatattagctacgccaatgggtacatttcacaatgggatcagttcacacaacaagtcgaggcgattacttcacgggttccatacatgattgcaagtgggaatcatgaacgagattggcccaacagtgggtcattcttcaatggaacagactctggaggggagtgtggtgtgttagctgagaccatgtactacaccccaacagaaaacagagcaaactactggtattcgacagattatggaatgttccggttctgcatcgcggacagcgagcacgactggcgggaaggcacggagcagtacaagttcatcgagaactgcttcgccacagtcgacaggaagaaccagccatggctgatattcatcgctcatcgcgttcttggttactcttccggttacttctacggcattgacggggctttcgctgagccaacatcccggcaaagcctccagaagctctggcagaagtacagggtggacatggcgttctacggccatgtccacaactacgagagaacatgcccagtctatgaggaacaatgcatgagctcggagaagtcgcactactcgggcaccatgaacggcaccatccacgttgttgtcggaggcggcggtagccacctgagcaacttcaccaccgaggtcccggcttggagcatttac

SEQ ID NO: 6261 - DNA, 1715 bp, Setaria italica
  Peptide Sequence Number=SeqID_72235
atgattccctgcaggaacttctatgcgattcacttaaaaattcaaatgaatttggtggaggggacagtgctgaggaaccaattgaaagtcaatatggaagactcatcgagcatttaaagaatttgttgcatgaccaccatactatgctgtcaaccaatgctgaccttgagtcaagactgttgagtaaatgtgaagaggtcgaggagctcaacatgagatacagttctctaacaaaaaatttgaatgatgtttgtgttatgaatgaagagcttaagtcagcttctttaagacaaaaaatagaccaacaacaaagaatgaactacacagtagatgtcttgctgtagctgaaaagttggtttcccactcagtaaatcattcctcagcaggtgttcaattgatatctgatagtggtgaagggtttaacaaggaagatcatatacttaccacccttctcccatgcattgaggacggtgtggcttcatgcattgagaaatttgaaaatgcagctgaagaaatccgcttgtcaaagatatgcttgcaagatatcaatatttttgaccagatttcattcgacaagtggtcttaccccttgcctacattgttcaatgcggaaatcttaccaaagctgtctgacttgcaagacagaatcaaccagctcaatgcactaaatattcagctggaaactgaagttccagtcttgagggatggcatgaaaaagcttgatgaagctcttggaacttcgcgtactgagcttcagaaaaaggtttctgaacttgaacagtttgatcagaaacttacatctgtcaaggaaaaacttagtattgctgttgcaaaaggtaaaggtttgattgtgcagcgtgacagccttaagcagtctctgttggagaagtctggtgaggtcgagaagctcacacaagaactgcagttaaaggaaacattgctgaaagagttggaagctaagctcaaatcctatacagaagcagatcgaattgaagctttggaatcggagctctcatacataaggaattcagctacagctctaagggactcatttcttctaaaagactctgttcttcagagaatcgaagaagtcttagaagacctggatttgccagagcaatttcattctcgagatatagttgaaaaaattgaactgctgtcgaagatggctgttggcacttcatttactctacctgatggtgacaagagatcctctgttgatgggcattctgagtctggtgtggccatggatgtgataaatgatgagcagaactcaaattcaaatccagcatcagatgaattaaagagcaagtatgaggagctgcataggaaattctatgagctggctgaacacaacaacatgttggaacaatctctagtggagaggaacagtcttatacagaaatgggaagaagtccttggtcaaattagcatccccccacagttcaggatgttggaagcagaagataagatagaatggttaggaaacagactcttggaggtggagcaggaaagagattcattacagttgaagattgagcaccttgaggattcctctgaaatgcttattgctgatctagaagagtcgcataaaaggatatctgaactcagcgcagaggttgttgctataaaggctgagaaggattttttctcacaaagcctagagaaactgagatttgagttccttggactctctgagaaagcagttcaagatg

SEQ ID NO: 6262 - DNA, 347 bp, Setaria italica
  Peptide Sequence Number=SeqID_72236
ccacggctgacggcggaggagcgagacagggtggtgggcgtggtggactgccggaagctgacggtgcgccttgaggtagatgtcgacggcgcggtagacgccgtcgttgtagatgcgggcgtggtcgggcaacgacagcgcgagctcgcagaacttggccggcttcaggttggcgtcggaagcgacctcggcgaggtagctgtccaccagcttgcccacttgcaccatagccacggcggacggccgcgacacctcggcgccggcctcctcctcgacctcgatcgccgccgaagacgacgcgaagccgccgatctcctcctcggcgaggaagtacccgacgatccgct

SEQ ID NO: 6263 - DNA, 518 bp, Setaria italica
  Peptide Sequence Number=SeqID_72237
ctaggttgatccatggcttccatgatgcgaagaagcgaagcactccaaactctgtgcgccagtttcaagataaaactccgctgcaaaacagcgcacagttctcagcaaaattgatgttagcaccgcatcaggattcaacaaaacttcaagcaaaagcgcagctgattaaccttcccgatctgggactttgaactacttgcaagtagcaaccctcacacaaaaaaagaccaaaagggaaagtatgtagcgtcggaaaactgaatttcacaggcacacaacaacacgagcacgcgttcttagattacaggggtacaatctgctgctccaaaccttaactagaaacaccactcagacttggtatgttacagaaagctttttagctatagtagcttccatcagttgacaattgagacccaaactgaccgacggcgatcagtctgagcaaacagcaaagtggtgcaagaaaaggagcaagtacaataagtactgagacacgcaacaggagataggcaaggcac

SEQ ID NO: 6264 - DNA, 388 bp, Setaria italica
  Peptide Sequence Number=SeqID_72238
atacccctgtaatcttaaatttggagaagcagattatacccctgtaatcttaaatttcacaggcacaaccaggcaaatttaagattacagggggtataatctgcttctccaaatttaaatcacacctagaaacaccactcagacttggtatattttacagaaagcttattagccatagcttccagcagttgacacccaaactgaccgacgcgaccagcagtctgagcaaacagcaagaggtggtgcaagacaagggagcaactagtactagcttgtaccatggtactagctagtactagttgctcccttgtcttgcaccacctcttgctagtaccatggtacaaatttacaatacagttccggtcctattggttactaaatttacaat

SEQ ID NO: 6265 - DNA, 377 bp, Setaria italica
  misc_feature (1)..(32): n is a, c, g, or t
  Peptide Sequence Number=SeqID_72239
nnnnnnnnnnnnnnnnnnnnnnnnnnnnnnnncttactaggtctactactaactaactacgtagtctacgcgtttcttagattacaggggtacaatctgctgctccaaaccttaactagaaacaccactcagacttggtatgttacagaaagctttttagctatagtagcttccatcagttgacaattgagacccaaactgaccgacggcgatcagtctgagcaaacagcaaagtggtgcaagaaaaggagcaagtacaataagtagtagttattcaatggtacaggacactccggccgccggccggccggccggagccatccccttccagagcagcaagggtaggcaacaggctgttaggaaataataaggaaacc

SEQ ID NO: 6266 - DNA, 544 bp, Setaria italica
  misc_feature (1)..(38): n is a, c, g, or t
  Peptide Sequence Number=SeqID_72240
nnnnnnnnnnnnnnnnnnnnnnnnnnnnnnnnnnnnnntctagttcttgtaacccccaaaagggaacgtagtgagctggatgagttatttgactgcacagaaaagcgtaggaaaaccaaatttcacaggcacacaacaacacgagcacgcgttcttagattacaggggtacaatctgctgctccaaaccttaactagaaacaccactcagacttggtatgttacagaaagctttttagctatagtagcttccatcagttgacaattgagacccaaactgaccgacggcgatcagtctgagcaaacagcaaagtggtgcaagaaaaggagcaagtacaataagtagtagttattcaatggtacaggacactccggccgccggccggccggccggagccgagccgccgccggaaacactcgccggagcgccacgagaggttgccggataagtggatactggatacatcgatcacttgggtccccagagcaggaggtgcatcaccttggccctcttgccgttgccgcccgccgcggcggcgtggtcg

SEQ ID NO: 6267 - DNA, 648 bp, Setaria italica
  misc_feature (1)..(112): n is a, c, g, or t
  misc_feature (119)..(119): n is a, c, g, or t
  Peptide Sequence Number=SeqID_72241
nnnnnnnnnnnnnnnnnnnnnnnnnnnnnnnnnnnnnnnnnnnnnnnnnnnnnnnnnnnnnnnnnnnnnnnnnnnnnnnnnnnnnnnnnnnnnnnnnnnnnnnnnnnnnnnnttttttnttttttttttttttttttgtcgtcggaaaactgaatttcacaggcacaaccaggcaaatttaagattacaggggtataatctgcttctccaaatttaaatcacacctagaaacaccactcagacttggtatattttacagaaagcttattagccatagcttccagcagttgacacccaaactgaccgacgcgacgagcagtctgagcaaacagcaagaggtggtgcaagacaagggagcaactagtactagctagtaccatggtacaaatttacaatacagtccggccatggtacaaatttacaatacaatccggccggccggccggccggagccgagccgccgccgcaaacactcgccggagcgccacgagaggttgccggataagcggatcggatacatcgatcacttgggtccccagagcaggaggtgcatcaccttggccctcttgccgttgccgcccgccgcggcggcgtggtcgccgccgtgccaccccggctgctgctgctgctgcctcagctccctccccc

SEQ ID NO: 6268 - DNA, 631 bp, Setaria italica
  Peptide Sequence Number=SeqID_72242
ggtgggggcgcgcgtaccgagcgagcgggcgaagcggcgaggtgggtgactgggactctgggagagatgccgggcggcaggaggaggggccccctgtggagcctcccggtggcgaggtcggacgcgctcggcaagctgggcccggccttcggcatcggcgccggctgcggcgtgggcatcggcttcggcctcgtcggaggtgcaggaattggagctggattccctggtttacaattgggatttggagctggtgctggatgtggaataggaataggttttggctatggtttcggaaaaggcgttgcatatgatgaaagtgggagatattcaaacatcaggagaccattccagaactccagaagccttgcttacgacgagcagttcgacatcatgtttgatgaactgatggagagcaccaggaagctgatcaaagcaacatccaaggagctcgacaagtggaggcggatgtagggcaagcggcacacataggaactgcatatattcagaaccagaaggcctcggaggcacactgcacgtgcccctgcgggaactgaactgaccttttgctcgctcgctgttagcggcgaatatcttgagcgattcatgagatatgctgcccgatactcctggt

SEQ ID NO: 6269 - DNA, 389 bp, Setaria italica
  Peptide Sequence Number=SeqID_72243
cgttgaggagctgctccccgtcgtctacacgcccaccgtcggcgaggcgtgccagaagtacggcagcatctacaggcgcccgcaggggctctacatcagcctcaaggacaagtaagatttcctgatggtgctagcgcctctgtattcgcgccgtcttcgttgcctccttgcctgacggaatgtttcgttccaggggcaagatccttgaggtgctcaagaactggccggagaggagcatccaggtcatcgtcgtcaccgacggcgagcgcatcctggggctcggggacctgggctgccagggggatgggggatccccgttggcaagctgtctctctacaccgccctcggaggcgttcgcccatccgcttgcctgccgatcacaatcgatg

SEQ ID NO: 6270 - DNA, 1837 bp, Setaria italica
  Peptide Sequence Number=SeqID_72244
gcatctcgtcacgccgtgggccttctccgtcgccagcggctacaccctgctccgcgacccgcggcacaacaagggcctggccttctcggaggcggagcgcgacgcgcactacctgcgcggcctgctcccgcccgcgctggcgtcgcaggagctccaggagaagaagatcatgcacaacctgcgccagtacacggtgcccctgcagcgctacatcgccatgatggacctgcaggagcgcaacgagcgtctcttctacaagctcctcatcgacaacgtcgaggagctgctccccgtcgtctacacgcccaccgtcggcgaggcgtgccagaagtacggcagcatctacaggcgcccgcaggggctctacatcagcctcaaggacaagggcaagatccttgaggtgctcaagaactggccggagaggagcatccaggtcatcgtcgtcaccgacggcgagcgcatcctggggctcggggacctgggctgccagggggatggggatccccgttggcaagctgtctctctacaccgccctcggaggcgttcgcccatccgcttgcctgccgatcacaatcgatgttggcaccaacaacgagaccttgctcaacgacgagttctacattggcctccgccaaagacgtgccaccggccaggaataccacgagcttctcgaagagttcatgaccgccgtcaagcaaaactacggcgagaaagtcctaacccagttcgaggactttgccaaccacaatgcttttgacttgcttgccaagtacagcaagagccatctcgtgttcaacgacgatatccagggaacagcctcggtggtcctcgcaggtctcttggcggcgctcaaggtggtcggtggcactcttgctgaccacacctacctgttccttggtgccggcgaggctggaactggtattgctgacctcattgctcttgagatgtcaaaacattcggagactccgatcgacgattgccgcaagaagatctggcttgtggactccaagggcctgatcgtggagtcgcgcaaggagtcgctgcagcacttcaagcagccgtgggcgcacgatcacgagcccctcaagaccctgctggaggccgtggagtccatcaagccgacggtgctgatcggcacctccggcgtgggccgcaccttcaccaaggaggtggtggaggccatggcgtccttcaacgagaggcccgtcatcttcgcgctgtccaacccgacgtcgcactcggagtgcacggcggaggaggcttacacctggtcccagggccgcgccgtgttcgccagcggcagccccttcgacgccgtcgagcacgaaggcaaggtgtacgtgccggggcagtccaacaacgcctacatattccctgggttcggcctcggcgtggtcatctccggcgccatccgcgtccacgacgacatgctgctggcggcgtcggaggcgctggcggagcaggtcaccgacgagcacttcgccaaggggctcatcttcccgccgttcaccaacatccgcaccatctcggcgcgcatcgccgccaaggtggccgaaaaggcctacgagctcggcctcgccagccgcctgccgcgccccgacgaccttgtcaagtacgcccagagctgcatgtacaccccaacctaccgcagctaccggtaaagcataggtgatgaccatggccggctggcggccgaggaggaaagggacgccatttttgctgctgggccgtcgtgtgagttgagtcaataaaagttgagctgaagcttgttgctgctgctagaggagtttataccttgtttcgtactgtatttttgtgtatcgttattacgggtcct

SEQ ID NO: 6271 - DNA, 321 bp, Setaria italica
  Peptide Sequence Number=SeqID_72245
tgcccataggcatcacatcatgccatggcaagtgttggaagaagagcagcagtggcagagcattggcacgtttggctagcagctatggaagcagcagacaaagtgaaggaggacaagcctaaggtggactttctcccctccccaaccatgaattacagccgcgaattcatcgcatggacatgagattgcgcctctgggtggcccttctagaggcctgagcagcctttggtgttcgcttcaggtttctcctcaccaacctctctatcttctctattgaggtggacagtttcttttcgtcaatgccagcaacggcaggatcca

SEQ ID NO: 6272 - DNA, 615 bp, Setaria italica
  misc_feature (34)..(34): n is a, c, g, or t
  Peptide Sequence Number=SeqID_72246
accaagacagaacaggagcgccacgggaggttcnctgccctgcatcatcatccaccgcgtgcaggcaaaaccgctcaccggccgtcgtcacagtcgcagcgcctgcgccgcggcaacgacaggctcggaggaggcgccgccaccggcgccgcggcggaggcagcggttggtgccgtaccagacgccgttggagagcgggtcgccgtagtagaaggtggagggcgtgctggaggtgggctcgtacaccctgacccactcgggcgtccacccgacgccgccggtgcggcggaggtagaggtagcagacgccgtagccgcagggcccggtcaccctgaacgtgtccttggcgcaccgctcgaacccgcgcgccggcgtcacccgcgccgcgtacacctcgttccggtacgtgtcgccgaacgccaggctcaccgcgtccggggacctccgcggggacgagcagctcgtcttgatctgcaccgtgtacgtgcacgcgcgccccgcgacgccgccgatgtcgccgctgccggcgacctctccgctacccgcttccagcggtgtcgttgtcgtggtcgtggcggtggggcgcgggagaggccgggtcgtcgtcggcgacag

SEQ ID NO: 6273 - DNA, 521 bp, Setaria italica
  Peptide Sequence Number=SeqID_72247
agttatttgtttgtagctggctgggaagagatactactggaaagagccatggtcttatttttgttgcaatttaatattggtgctttattatttattatagttgtaatttccacctgaatatatgctaatttctgttgctgcaatttgtccgttattagatggtaactagcctatgaagtttcatgtggaggctatgactatcatctaccccttcttggacatcttttctgcactgtgtccctgctatttgtttttgctagttcttcttttcagcttgatgaatctaaaccatgtgtctcttttggttgctatatgaattttcctatgttgcttctctataagattcaaaaattagtatcatgttttgtgatgtagtttcctacccagcctagtcctgatgtgtgaaatgctatctgctcactggttgtgcatgtgttattcaaataaaggcggcatgtagttttgttggaaggtttgctaaacttaataatgaaaatctttctctgacagcctgtgttgat

SEQ ID NO: 6274 - DNA, 430 bp, Setaria italica
  Peptide Sequence Number=SeqID_72248
aggtgccagttcttctgtcagctctatggcctcaggcatcccttctagcacaaaattaaaaattagctgaaaaaaattcaatgctattagacacaaaatggtgcaaccatcagataaatgggaatagaattactctaatatgaaacttttgtgattttatactatcgtggcctacaatgaattaaatgaaacacaacaccatatccgtttaaatcacaaatatttcacattaaagaacaaacaattaaaagttaaagcttcaaagaaagagcagcaattaactatatgctaatctcaaagtggccaggaaggaaaattgagaaaagtttgcaataataatattataatatgagttactattactcgctaagaaaaaagagacaacctaacccataggtccaacgcaccttagcacaaaaaacaaaaaaca

SEQ ID NO: 6275 - DNA, 455 bp, Setaria italica
  misc_feature (1)..(1): n is a, c, g, or t
  Peptide Sequence Number=SeqID_72249
ngaaaagctagtgggagcgccactagctgtacaactgggcaaggtccttctcgtatgccttcttaattatctccctcttgagcttgagggcagccgtaacgaggcctgactctggcgtccatggctccggtatgagcttgattttggctgggatctcaaacttctccagtcgcgcttgtttagcagcctttgccaaagattggaggacttctttgacaatctgttgcttctggcacaaatctgcaaaatcacgatacgtgattccttgttttgaggccccagcctttcagctcgctgtgtgcagctacaacaagggcgacacagtagctgtggaaggggtcagcatggatcatgatctggtcaacatatgggcacacactcaaagctgcctccacctttcctagagatacatattcaccgtgttgaagcttgacaatgtccttcttacggtcgat

SEQ ID NO: 6276 - DNA, 298 bp, Setaria italica
  Peptide Sequence Number=SeqID_72250
ttacacgttcagctgtggagatgatatagagcgccaacatgtcgatgctaaaggggataattcaggtagttgatcatgaggattgtgttttttttgtaaccttaaatttgaagttgtgggcttgtggcttctcttgaatcttgatgctgagaaggtatcctgccatttcaagagcacttctatgtagcctcatgtgatgcttcctgcatgtgtttataataaaatcgcattggattcttaaaaaaaaagttctcttatcctgagattactattggatgctagttttatcaaaaaaaaa

SEQ ID NO: 6277 - DNA, 690 bp, Setaria italica
  Peptide Sequence Number=SeqID_72251
agaagaggggagtgccggtcgatgtgggtggagagcctgggtgcgccgtccgcaaccacagatttgaacggcccgtcgaatcgcactgggaaggggtttccacgcttgctgagctatttgagcaatcatgcgagcagttcgcctacatgcccctatatggcaccaggaagctcattgcaagggagttggaggtggctcctgacgggagatcctttgagaagcttcatttggggaactatgagtggaaaagctatgctgatgcattcaagactgtgtgcaactttgcttctggcctactgagagttgggcatctgaaggatgagcgtgttgctatttttgctgatactcgggctgagtggcagattgcgttgcaggcgtgcttcagacaaaacattgcagttgtcacaatctattcctctttgggggagggagcgctatgtcactcactaaatgagactgaggtcactactgtaatttgtggccagaaagaactaaaaaaattgattgatataagtgggcagcttgacactgtcacacgtgttgtatatatcaatgaggaaggcatctcagatgaagtttctttagctcgaaatagcacgagctggataattgagtcatttgatgaagtgggtaggttaggaactgaagcacctgttgaagcaaacatgcctctcccatctgatgttgcag

SEQ ID NO: 6278 - DNA, 958 bp, Setaria italica
  Peptide Sequence Number=SeqID_72252
taattgtaaacgttccgtttggtccgttgtttggttccttccttcttgtcctttgttcatacattaagttgatagactgggctgaaggtggatacttaacaactgattcaccaatgcctcggggtgaaatagttattggaggtccaaatgtaactaaaggctacttcaaaaatgaagccaaaacaaatgaagtctacaaggatgatgaaagaggtatgcggtggttctattctggtgatattggacgtttccacccagatggatgccttgaaatcattgaccgtaagaaagatattgtgaagcttcaacatggtgaatacgtatctctggggaaggtggaggctgctttgattgtgagcccatatgtggagaacatcatggttcacgctgatcctttccacaactactgtgttgcacttgtggtagctgcacataatgagctggagaactgggcttcgcagcaaggaattaaatatattgatttctctgatttgtgccagaagcaagaggctgttaaagaagtgcttgggtctatagcaaaggctggaaagcaagcgcgatttgagaagttcgagatcccagccaaaatcaagttgataccagagccatggacccctgagtcgggccttgtcactgctgccctcaagctcaagagggaggtgatcaggaagacgtacgagaatgatctggctcagttgtacgcctgacggactgccattctttttgacacgttcagctgtggagatgatatagagcgccaacatgtcgatgctaaaggggataattcaggtagttgatcatgaggattgtgttttttttgtaaccttaaatttgaagttgtgggcttgtggcttctcttgaatcttgatgctgagaaggtatcctgccatttcaagagattagtctaaaaggtcttggtaaagtctaagtcgtcgtattttgtagtaagtttcgtaga

SEQ ID NO: 6279 - DNA, 771 bp, Setaria italica
  Peptide Sequence Number=SeqID_72253
ccgtgttcttaggtgtgaaaggaatccttaattccacaagttagtggctttctgggaatacactgcacattattggctactgaatcacctgcgtcgatctcacttcttacaacctcagctattctcttcacaaaacagctgttcaaaacatactacaactggaacaaacacgaaattcttgagaaaagctagtgggagcgccactagctgtacaactgggcaaggtccttctcgtatgccttcttaattatctccctcttgagcttgagggcagccgtaacgaggcctgactctggcgtccatggctccggtatgagcttgattttggctgggatctcaaacttctccagtcgcgcttgtttagcagcctgaagaagtgtacaccagtacagctatgagctactccctccctccgttccaaattatgagtcattccaactttcttgaagagtcaaaccattttatgtttgaccaaaattatagagcatcacaaaaatttatggcaccgaatagatatattatgaaaatatatttaatgaagaaactaatgatacttatttggtatcataaatattagtactttattgtataaaattggtcaaacttgagatgctttgactttccaagagagttggaatgatttataatttggaacaaagggagtatagtatattgcctttgtatttcttcaaagaaaaattagggataacaaattagattacgtattgttatatcttctatcaaatgcaatcattactgaagcgttaaatt

SEQ ID NO: 6280 - DNA, 2271 bp, Setaria italica
  Peptide Sequence Number=SeqID_72254
gcaccgcgtgcgagagcgacacaagtggcgtgaaccaaaccgaacgcaacttgactctctccgccgccgcccctcgcgcccgccgcgtcctccgccctcgccgtcctcgcgaagcacctacgcgccccttttgcgctgccgtccggaaggttttcgcctaagggcatgtgggtctgttagtttgcctcctgtaagctagtgtagctacaaagatcacccttgcagaagtatgaatccttattttgttggcttccttgttcccgtcgcggtctccctgctgctccgcaagaggagaaaggccgaaaggaagaggggagtgcaagttgaggtgggtggagagcctggatatgcagtccgcaactatcgatttgagcagcctgttgagacgcactggaaggggtgtccacccttgctgagctgttcgagcggtcttgcaaggagtatgtctacatgccactccttggcaccaggaagctcatttctagggaaactgaatcagcacctggtggaagatcattcgagaagcttcatctgggcgagtatgagtggaagtgttacgctgaggccttcaagagcgtttgtaacttctcatctggactaattcgattaggccaccagaagaatgagcgtgttgccatttttgccgagacgagagctgaatggcaggttgctttgcaggcatgcttcagacaaaatattacagttgtcaccatctatgcctcattgggagaggaagcactatgccactcactaaatgagactgaggtcactactgtaatttgtggccagaaagaacttactgttgtctgcggacaactgaaaaaattgattgatataagtgggcagcttgacactgtcacacgtgttgtatatatcaatgaggaaggcatctcagatgaagtttccttagctcgaaattgcacgagctggataattgagtcatttgaggaagtagagagcttaggactggaaaggcctgttgaagcaaacatgcctctcccatctgatgttgcagtgataatgtacacaagtggtagcaccggcttacccaagggagttatgatgacccaccgcaatgtcctggctacactctcagcagttatgaccatcgtgcctgtacttggtagtaaagatatatacttggcctacctcccacttgcacacattcttgagttggcagctgaggcactaatggctgctgttggggcctctatcggatacggatcacctttgactctgactgatacatcgagcaaataaaaaagggaactctaggtgatgcttctgcactgaaaccaacattgatgactgccgtacctgctatacttgaccgtgttcgtgatggtgtgaggaaaaaggtggatggtacgggtggtgcagcaaagaaattgtttgacattggctataaccgccggcttgcagcaatcaatggaagctggtttggtgcctgggggttagagaaacacttgtgggatacgcttgtgttcggaaaggtgcgtgcaattttgggaggaaagattcggtttgtactctcaggcggagcacctctatctggagatactcagagatttatcaatatatgccttggggctccaataggtcaagggtatggtctgactgaaacttgtgctggagggacattttctgagtatgatgatacatctgttggccgtgttggtgctccactaccttgttcatatattaagttgattgattggcctgaaggtggatacttaacaactgattcacctatgcctcggggagaaatagtcatagggggtcctaatgtaaccaaaggctatttcaagaatgaagccaaaacaaatgaagtctacaaagatgatgaaaaaggtatgcggtggttctattctggtgatattggacgtttccacccagatggatgccttgaaatcattgaccgtaagaaagatattgtgaagcttcaacatggtgaatacgtatctctggggaaggtggaggctgctttgattgtgagcccatatgtggagaacatcatggttcacgctgatcctttccacaactactgtgttgcacttgtggtagctgcacataatgagctggagaactttcgacaaactaactagtagttagacaacttagtaggtaagactagacaacttggaactgggctaagggaacttaacgaaaggttatgccctttacactgttctggtccagtgttctttactggttattgactgctatcatttgtgctgaggtgacttcaggtggatggtacgggtggtgcag

SEQ ID NO: 6281 - DNA, 2487 bp, Setaria italica
  Peptide Sequence Number=SeqID_72255
ggaacctcttctgacccactggtttccaggctgttactcccagattcctcaatctttactttcttatcagttttcttggtagcacctggggctttcttagcggtagctgtcctaaccttctgacgttcgctgggtgctttatatggtctaggagatgacttggaaacccttgcccgcttctttggaccatttgcggcatcttgagcatcacagtcagcctcacttcgtattataactgaaggagtcgaaaatgcaggtgcctcctcagctgtgccatcttcatgtttgctactggatggctcagcatcagcacctacactgggcatgttctctacagcagcccagcctacttcttgacttggcaaaggacctttactctctaaatccttcttcttacgtggttggggtaaggttgccttaagtgagagtttaatgttacccctcacgtcctgtccaatacacatcaaagagagcgattggccaacagttacaatatcggagacttttgataccggttcatgtgacagctctgaaatgtgaagaaggccttgctgtccaccattgaactccacaaaagcgccatactccttaactgaggaaacagttcctttgtatgtccgaccaacttcaatttcacgtcccacgagaaactcaaccttctcaatagctttatccataataggttgggttttagcaacaatagtgactgtaccatcactgactgatacccgtgcacctgtttcttgctcaattttcttcctgtggaaaagcagtttcctaagagaatcgctgctgaagctcagtgtagctaatcgaggggcacttccatcattcatagcacgtgcgatacttatttcctggtccatgcggtcaaggatttgagtacgagccttccgtgcaggctctaaactttcacatactatgtccaatggtattccagcaggttttatatccagctgaatagcagtaatacctttccttgttcctgcaattttgaagtccatgtcacccaaatgatcttcaagacccaaaatatccgttaagatgcgataattagaaatatctccagttgttggatctacttgacttacaagacctactgaaacaccagctacatgttctcttactggtatcccagcatccatcaaagccatacttcctccacatactgatgccattgatgtcgaaccatcagaggccatgacttctgaatttacccgaacagtatatggaaaatcactttctggaggaagcacaacgagcaatctaattggagcaagagtgccatgtccaacttcccgtcgattcaggcccccacgtttggcaacttcatttatcgaaaatggtggaaagctatagtgaagcatgaaacgctttgttggagggccaacaattgaatccagtcgctgagcatcaccaggagcaccaagggtaactgtacacagaacctgtgtatctccacgtgaaaacagggcagatccatgtaatactggatatgtgttggcttcacaaaacaatggtctgacctcatcaagttgtctaccatctactctaagtccctcctcaattattcttttacgtatgacctgtttcctcactgtgtcaactgccttggaaagaaacttcaagctgtcctcatcgttttcttcttcaagctttgctttcacagattgtgtgattttttctaaagcttctccccgctcaaacttgccatatgatgaatcagtgaagacttcctcaatgggtgcttctgataatgttctaattttctcgtaggatgtatctgaaatcagagatatcttgtattctttcttctctttaccggctcgcttagccaatcttatttgagggtcaatacatttaattgcctcagagtgtgcaagcttcattcctgcctgaagatctctttcagttatttcacgagcttgtacatctatcattaaagttttatcccgtgaacatgcataaacaagattgagatcactcaaacctagctcatcgactgtagggtttaagacaaaattcccatcaattctcccaacacgtattactccaatcggcccattccaaggtatatcagatagcattaatgcagcggaagaggcgttagcagccatcacatctggatcttgctttccatctgatgaaagaacatttaccatgatctgaacttcatggtaaaagccaggaggaaacagtggtcttataggtcgatcaattatacgcccacacagaagttctctttccttaggggcaccttccctgcgcatatatgttgtgggaataacaccttgcgcatattgtttttcttgataatcaacagttagtgggaggaagtcccggacgggctcgttggacttggcggcggcgacggttgagaggacgtgggtgtcttccatggagatcaccacggagccgttcgcgaagcgcgccatctttcccgtctcgaaggcgattgtgcggcccccgatctcaaactcctcgcgg

SEQ ID NO: 6282 - DNA, 433 bp, Setaria italica
  Peptide Sequence Number=SeqID_72256
ggagacgatgaaggaggcggcggcagtagagcagcagcagcagcagtggcggggcgtggtggaggcccccctgccgtcgaccccggcgtcggcggcgtggccgcacatcgccagcttctgcgcgctggaccggtacctcccgggcatcgacgtgtgcgagctcgcggccggggaggacggccgcccggggtgtgtccgctacgtggcctctctggcgcccgctgctgccagcggggacgacgcggagcgggaggtcgccagctgggcgcgcgaggagctgctggagatcgacggcgccgcccgccgcctcgcgtacgccatcgtcggcaacagcagttggggttcggccgactaacgtacgaccaaaccaaataagaaaccgtaaacgaaaccgaaaccgaaaacgaaaataaaaggaaaacgaaaactaaac

SEQ ID NO: 6283 - DNA, 266 bp, Setaria italica
  Peptide Sequence Number=SeqID_72257
gtccagtaccagcagcagcctgctcctcagccttaattgactccatgagtttgtccatatcaggagagtctttttcttgcatggcacccatcattttctgcatccgggtgcgcatttggaagagctgcgcaaccaattggcccacctgctgttcggtctttccggagtccttggccactcttttccttctctcgcgtgactcagccagtaattctggtctttccctttcctcaggagtcattacattgatcattgactccatgaag

SEQ ID NO: 6284 - DNA, 420 bp, Setaria italica
  Peptide Sequence Number=SeqID_72258
ctcaatattgaaggtggtgacaagtgctgcagcttcttggccagtcatggcatcaacaacaagcagtacctcagtaggattaactgccttcttcacttctttcagttcatccatcatcgctttatcaatctgcagtcttccagcagtatctaccacaatggcatcaatattcttgcttttcgcttcttccacagcattcttggttatctgtggaggtttggcccccattttttctgagtaaactggtacacccacctgttcacccagtatagtaagttgatcaatggcagcaggcctgtaaacatctgcagcgaccagcatacagctcttccccagtttcttcaaatagaatgcaagctttgcacaaacagtagtcttcccaacaccttgtagacctgcctagttaagtattaacttgtt

SEQ ID NO: 6285 - DNA, 639 bp, Setaria italica
  Peptide Sequence Number=SeqID_72259
catctcgtgaattagagctgtagcatccgaacaagagctaaactttagcctaaggatccaaacacgccagtgcatcacaaaaggtactgtagatctgtagctaatactgacaaaatagaaacagctgcacacggccgcagctagaccgagtaaatgcattcagatgcaattccaattacagagcacccgaaagcacttctattttcacttctgaatccaggccaagttcctgggatgctatcgttcatgcaggtagctaggcaggtaggcatacggcagactcagagccgccggtgagcatctcaacgtcggcgaaaaccacgcatcgcatccagttgccgctgcctcaggttgccatacttcctcctgcgccgtccagtaccagcagcagcctgctcctcagccttaattgactccatgagtttgtccatatcaggagagtctttttcttgcatggcacccatcattttctgcatccgggtgcgcatttggaagagctgcgcaaccaattggcccacctgctgttcggtctttccggagtccttggccactcttttccttctctcgcgtgactcattctcactacaagaccaagtaaattactaggtactttaccctttacctacaaggaagtacgta

SEQ ID NO: 6286 - DNA, 2042 bp, Setaria italica
  Peptide Sequence Number=SeqID_72260
gtctagttctaaatttccttttttttttttttttattttagtatttcatcaattatcattaaactaccaaactagtgatccatacataaactgtattcacaaatcatacatacataattgtggcatttttggacttgtaaccaccatttaacgagggcctcatctggacattgcatttgactaggccaaagtcacattctactattctagcgagtccagacagcggtgcccaaccatgcattggcaaggatcacaacttgttgaatttgacaacatttcccaccctcttctaaatccaaacacattaccacaattgatgatgagggtccccagccaaaacttcgagtttcaactccggtgcatcagccagcaggctagctcaaaactgcatccaggttcctctgcttcggcttgatgttcctcctcctccgccgtgcggtgccaggtggtgccttttcttcagctttaagtgagtccatgaggtctcccatgcctgctattgcttcttgtccttgcaccatacccatcaatttctgcatctgagcacgcatttggaaaagttgagcaaccagttggctcacctcttgctcggtctttccagactcctcagccactcttatcctcctttcacgtgattcggctagtaactcaggcttctctctttcctcggcagtcattgcattaatcattgactccacaaatgcaagacttttctcagcttcccttatttgtgcaggagtaaccttgttcatgccaggaatcatgccaattactcggctcatggaacccatctttgcgatcatttgtgtttgcttcaggaagtcattgaagttgaattttgcgctcaagatcttcttctgtaattcctcagcatcttcttgacgcatcacttcttgtgctttttcaacaaatgagagtacatctcccattcccaggatacgctgtgccatgcgatcaggatagaaaagctcgaggtcctccaatcgttctccgcgccctacgaacttgatgggctttcctgacacctctttaacactcagtgctgctccacctctggagtcaccgtccagtttcgtcagtatagcaccagttatgccaatctcatcattgaaggagctgaccaatcctgcagcttcttggccagtcatggcatcaaccacaagcagaacttctgtaggatttacagccttttttacttctttcaactcattcatcatcgctttgtctacctgcagtcttccagcagtatccactacaatcacgtctgtcttctggctttttgcctccttcaaaccgtttttggcctatttgagatggctttgcatcagttccctctgagtaaactggtacaccaacctgttcacccagaatagtgagttgatcaatggcagcaggcctgtaaacatctgcagcgaccagcatacagctcttccccagtcttcacatagaatgcaagctttgcacaaacagtagtcttcccaacaccttgtagacctgccagtaagataactgtcgggccactttttgcaaataccagatcagatacttctccacccatcagttgtacaagttcgtcatgcacaatcttcactagttgctggtctggtcgaactcctttgatagtatctgcacctaaagccttttagctaatggatgaaacaaaacgtctcacaactggcagactaacatctgcttccagaagtgaccttctaatgtcccgcattggttcagtgatattttcctttgttagcacgtcgacgccacgcagcttgttccaggcggactcgagtcccgtggtgagctgcccaaacatctccgcccgcacaaccagcccgttccccctcctcctgcgtctcctccatcccagagagagggcgcgcaaggcggggttccgggacgcgcggaggtggaacgaccctgtggaggagcagcgaaggtgtagggaggcgaaggctagcttctccggggagcagcgggtgaccaccgccgccgggggagagtggagcgcgagcgcggtggcgtccatttcctaggcggagggg

SEQ ID NO: 6287 - DNA, 362 bp, Setaria italica
  Peptide Sequence Number=SeqID_72261
cggcgacgacgttgcccgggcaccggcagttcttctgcgggttcagagacgctggcgcggcggcgtacgggacctcatctggactcgccgcaaaggctgtcaaggcggccagatagatggtgaagttacaactgcaaagcaagtgtagctgaaaagtttaaatctttgtgtatctttcgagggaaatgcaggtgtagttttttagcaaagttaggatcggttgttgagctccctgaggatcgatgtaaatccatgtgaaaagctgtggagatcaatgacagtagacgtcgaagctaaccaacaaccgctctgtatcagagttgattatctactactaatggagcgccccttttttgtgtaaa

SEQ ID NO: 6288 - DNA, 448 bp, Setaria italica
  Peptide Sequence Number=SeqID_72262
taggaagtagggagaggaggtccctacctgaatatatcaatcatgcaatagctaataagtgcttctgaatgaataggtaccaaaagatagaaggaaaagaaaaggaacagagcaagagagatactacagaaagaaattaaaacaaaagatttttgcagagtatgaagcttctgtattaaggcctgttgcatcctgttgtgtcctttgttgaaaggcagacatgcatgttaactgattgacctgagctatgaactctcaaaagggaaaatggggagaaatagaagcctccaagtgtgcatttacgtagattcattaatacagagagcaaggaggctctaaaaaataacttctgggttctattttcatgttttcaaagggcatcctgcttgttactagtaaaggaaaagtaagttactagggacaatagaactaagtagacgaactagaa

SEQ ID NO: 6289 - DNA, 597 bp, Setaria italica
  Peptide Sequence Number=SeqID_72263
cggccgtgtgttgttcttgagttggatatcctggaataaaggcgatttgcgcgtgggagggactccgttacctttctttctttcttttcccgtcatttggctgcatcgatgaacagctctgtatccatggagtctttttaggaaatcatgtacccttctggttccgtctcccagctggacgagccagcctctctgcctctgtcgcttttgcttgtgtgtttgtttgtgtgtaggttctcgcattattcgtgactccttttcaaactaggggagtagtggtattcataagaacctggaatgttatcatcaggtcattagatgtttggattcttccaagtgggtttccaagattttcattagtcttttgattttcatgccttgctggtttggtcccgttctctggtgggtcgatgaaccctggcattcagctggtctttggctgcaactgcaagaaaggcctgcattgctctcacgctttatctgtaaatacctgcaataaattgctactaacattgagcatcaaatccaatgaacggcaaacaccacatttggaatatgatcactgaacgcaccgcaactgatgtaatagcatcccag

SEQ ID NO: 6290 - DNA, 246 bp, Setaria italica
  misc_feature (218)..(218): n is a, c, g, or t
  Peptide Sequence Number=SeqID_72264
cgaacccgtctacgactctccgagccggcgcgcagtgaccgcttcgagaagcttccagaaggtctcccgccatggccgcacccttcttctccactcccttccagccctacgtctaccagagccagcaaggatctgtgacggcgtttcagatatccggaggagatgtgcaggtcctgcaggtgatgttgaaatctcaggagaagttaactgcaaaaccnggtacaatgtgctacatgtccgggaaca

SEQ ID NO: 6291 - DNA, 475 bp, Setaria italica
  Peptide Sequence Number=SeqID_72265
cgccctcccctccaccgaccgctcgccccctcgccgcctcccgttccggtctagggtttataccgttcgcctctcgcccccccacttccgaatcgtcggcgtctccgcaggttcgccgcgcccaaaggggacaacagggtttttgggggcggacggcaagggtgtcaaagtgtggttgatagagagggaggagagacgatgaggccggtgttctgcggcaacttcgactacgacacgcgccagtatgacctggagggcctcttctccaaggacggccccatccgccgcatcgacatgaagtcaggctatgctttcatttactttgaagacgagcgcgatgcagaggatgctataaggcgtctcgacaatgtgtcttttggccatagcaggcgcaggctctctgtagaatggtcaaggcaagtcgagcctgtgtcaaggagccgtgataggcctactggggatgtaaagccaacta

SEQ ID NO: 6292 - DNA, 269 bp, Setaria italica
  Peptide Sequence Number=SeqID_72266
ggtgaacaaaagaatcatcggcaaggccatcgtcgccatgcgaaggcagctgcacgcgcagaccccaggcgccttcgacagtttcagggacgaatacttgctggccatcgcagagaaccgcaccctgatcctgctcgagttcgccgacgggttcaccaccatcatgtcgcacgagaagctcgtgtacatgctcggcatgtacgaggctctcagcgacgccgctcccagcctcctgctcctgttcagcggggcgcgcaaggagctcgtct

SEQ ID NO: 6293 - DNA, 313 bp, Setaria italica
  Peptide Sequence Number=SeqID_72267
ggtctattctttcgtaggggtttccttcaacgggtggtactacgagggcaccaacaacacgctggtttactgggtgaggaagcacgtgttcgtgaaggtatggcactccaccagggtcggcatcctcctctacgtcctcttcgcgcagatcctcttctgggccctcgtctccggcgtcctccaccgcgccggcctctactggaagctctaatttagtgtacagacacggtgcctccgtttgtccaaatttgtttgaaatcagatttgaattgcagtttcgcaggccctgaatttgacagtaaaaaaaaaaaaa

SEQ ID NO: 6294 - DNA, 278 bp, Setaria italica
  Peptide Sequence Number=SeqID_72268
ttggaggttgtggcggcggccgttccgaagaataagcaggagcacgaggtggtgccagcggctgcgtcgactcggaatagcctggaggacgacgaggtggcggtgggagcggcggtgacgtacgcggtttcggcggcggcggcggcctagagtaggatgaaggaggccagcgaggcggtcccggtggcggcgatggggtcggcgacggcggcgtcccgggcgacgacggcgtcccgtccgccgggacggcgatggggagcgtgatgatgagcttctcg

SEQ ID NO: 6295 - DNA, 415 bp, Setaria italica
  Peptide Sequence Number=SeqID_72269
aataaatcagtaatgggcgaccaggcggcggcgccggcgccggcgccggcgtcggaggccagcgagcgtgttgttcgcgtgctatagccgcaagacgtgccgtaagtacaggatgtagggctggtagatcttacttaccgtcagcgagtgatcgttgtgagaacattttttgttaattctcagctcgagttttagaagagctgggaacgaatttttgctgcttcttttcttttttgaagttttgttataatcggattgctgtagacatacacatacacacacgaatgtatagagaagtctgttgtgagcttgagatcgatagcagttgtagaaagtgtggcagtatggggttgctgtttggaagttgctagacgtatgagtggcaaaagttggcctgtttttaactggaatctcc

SEQ ID NO: 6296 - DNA, 2028 bp, Setaria italica
  Peptide Sequence Number=SeqID_72270
caaacagctcgccgctcgccaagcaggtgtttgagctgatgcggaagcaggaggagacgcgcctcgcggagctggaggtcgaaaaggtgcaacacgccatcaacgagaagctgagggacatcgagaggaaacagaaagatgctgaagattacagaaataatttgcaacaacaagcacaagcaaaagcgcaatcattacgctatgaggatgaattagctagaaaaagaatgcaggcggagcgtgaggtacaaaggcgacaagatgccgaacttgtgaagatgcaagaggcatctgccatcaggaaagaagaagctaggcgcgccacagaacagaagattttagaagaaatgatacagactgagaaagaaaaggctaaagcagatcaggaaacagacagaattaaagctttagcagatgcagaagctcgagctcatgaagcgagggaactagaagaaattacaaggagaacgatggtggaaaaatgaagggtgaaaaagaaaagtggctcgctgcaataaatacaaccttttcacatgttgaaggtgggttcagaatgctgttgactgataggagtaaactaatgatgggtattggaggagttactgcactggctgctggagtttatactactagggaaggagcaagggttacatggggttacatcaatagaatcttgggtcagccttcgctgatccgtgaatcatcaatgccaaagttcccactgccaatgtctaggttgctcaaacctagctcagcatctttgtcaagcggagcgggctttgagaatgtcattctgcacccttcactcaagcggaggattgaacatcttgcacgagctactgcaaatacaaagtctcacggtgcaccattccgcaatatgcttttctacggacctcctggaactggcaaaactttagtagccagggagatggctcgcaaatctggcctggattatgccatgatgacgggaggagatgttgcgcccttaggatcagaggccgttaccaagatccatcagatatttgactgggctaagaagtccaagaaagggatgctggttttcattgatgaagctgatgcgttcttgtgcgagcggaacagtatccatatgagcgaagctcagcggagtgctctcaatgcattattgtttcgaaccggtgaccagtccagggacattgtccttgtccttgcaacaaacagacctggtgaccttgatgctgcaatcacggaccgtattgatgaagtcatagagttccccctacctggggaggaggagaggttccaactgctcaagttatacctgaaccagtatatactcaaggaagagggcaaaggctcttccttgggcgcattgttcaagaagcagcagaggaagatacaggtgaaggacattagcgatgatttgctgaaggaagctgcacggaagatcaatggcttctctggcagggagattgcaaagctgatggctagtgtgcaagctgctgtttatggccgaccagactgtatattggatccccagttgttttcggaagttgttgagtacaaagtgactgagcatcaccaacgcatcaagcttgcttctgagggtatgccttgatcagcaagaaagatttacctggaagcttggatcttcatatggatgttcaagttttgagagattaggtatgaagatgaggaacaatcacctcccactgacttcagtagtaatggatgttttggattccggtggagatttctgaaaaatcatttacgtgaagggtctgtttccaccagttttgttccatatggtcgcttgcttgtagcaagagttgtccgtccgagggacacaagtaggccggagctgtgctcaaactgaaattagttgttcactcattatagtaggtttgcactgtctcctgagcctattgatttaaccattcttggttgcactttacgcttgtttatgccaaaaaaaaaggagccaataatttaggtgattgttctatttgtcagatttcctgcaatgctgcaacacgttttctgcaaaaa

SEQ ID NO: 6297 - DNA, 479 bp, Setaria italica
  Peptide Sequence Number=SeqID_72271
attacatttgttcccagtcaagatcaaattttctagcctgattcctcaacactgagcgcacaaaggccgcatcgatcagtccaggaggccggaccactgacttgtgagggagatcaagaatgcgctctatagtcctctcgacagcctgatgcccaatctcgtcatgataggacaccaagtgtgtcttctggggactaatcttagcttcatcgccagacaataacacagccagcccaggggagaaaccactcctcctatggctacagcttccttctgccatcaagctcaggggcgaccttaacgtggagcatgtgattcagttgaacccccaatttctttggaaaataaactgcacccgcaaccttttgggcggattgatcttgcacgctggtgggtgctcgtcaccggcgaagacccaatagcgccgccgctcgcccagtcgtcgccgccaggaaaggaagagcaagagaggagagagc

SEQ ID NO: 6298 - DNA, 1089 bp, Setaria italica
  Peptide Sequence Number=SeqID_72272
cgcgccgcaatcatccatggcggcagaagctgcgccgccgttgtcctcaccgtcggccacagcagcaaaccccggccgcaacccgaagaggaagcggaagcccaagcccaaagcagccggcccctccgccctgaaccctaactgggcgcagctccagtccaagctcccccaacgccccgccgccacccacctcggcaagcgcaagcatgcctccggccctccgtcgccctcccgggcgcccgcggagccgtctccgccccctgaggcggtggtgaagctcgagcctacctccgacgatgccagcttgacgaaggcggtggctattgactgcgagatggtcggggtaggttccgatggcagcaagagtgccctcggcagggtcaccttggttaattcttttggcaatgtcgtgtatgatgaatacgttcgaacagtggagcgaattgtggattaccgcacacgcattagtgggattagacctaagcacatgaataaagccaaagaattctgggttgtgcagaaggaagtagctgagctgattaaaggaagaattcttgttgggcatgcactgcacaatgatcttaaggttttgctactaagccacccaaagaaggacactcgggatacatcagaatatgaaattttccgaagggagagaaagaggcggtcattgaaggatcttgccaatgaagtacttggtgctaaaatacaacagagtgaacactgccccattgaggatgcccgagctgcgatgttcatttacaacaagcacaagaaaacatgggagaagaacatgaaagaacaattcaggttcaaaaagaagctcaagaagcgaggcaagaagaaacctgctgagtccaatgcaaatgaccccaatgtcccgactgtgcttctatagagactagcaaaagatacctgggaacctgtgcgaaccatttccatactcgacatgaagtttttcactctgacaagtggtatggatatgataaatcctactggaactgtctcaagtcagtatctaaccataaaactttcagagaatcttgatgccaatgtcgtgatttgaaaaccattgattcataattctct

SEQ ID NO: 6299 - DNA, 1619 bp, Setaria italica
  misc_feature (1616)..(1616): n is a, c, g, or t
  Peptide Sequence Number=SeqID_72273
tcgcggtggacacggtgttcgacggcgtcgtcggcgcggtccatggtgcggtacgagggcgggtacgcggtggacacggtgttcgacggcagcaagctggggatcgagccgcacgccgtcgaggtcacccccgccggcgacctgctcgtgctcgactccatcaacagcaacatctacagggtccagctgccgctgtcacgatatagcaggccgaagcttcttgctggttctccagaaggtttatctggtcatgtggatggaaggctgcgagaagcgaggatgaaccatcctaagggattcactgtggatgataggggcaacatttatgttgcagacgctatgaacatggcaataagaaagatcagtgatacaggggttacaacaattgctggagggaaatcaattagaggagggcacatagatgggccgagtgatgatgcaaaattctcaactgattttgaaatccagtacatcagtagtagctgctccctcatggtcatcgatagaggaaaccaagcaatccgggagattccactacatgatgatgactgtgcatatcattatgaagctggttttcctctaggaattgcattgctttttgctgctggtttctttggttacatgcttgcattgctccaacgacgggttttggggatggcatcaacaacggatgaacctcaaattcctccaagacccagcattgcaagtatccctccgtaccagaagcctatgaatccttatgttcgtcccccactaatcccaagggaacatgaagctgcaaaacaggaaactgaagaggggttcttcacctcagttggcaaactcattggaggggcaaaatcatccgtggcggagatattaggttccaaaaagaagcgcctgaacagccagtaccatcaccaacagcgaagagctaacccatggccagtgcaagatagctatgccatcccacacgatgagacgcctccacctctggacaccagagcaccaacccctcagaagaactacgcgttcatgacgaaggagcctgagaagatccaccaccatgtccgccacgggcatccttatttcaacggctgggacagccatcaccaccaccctcaacagcagcagccagagcagcaactgtatcaccagcagcaacatttgcagcagcacaggcagtactccacaggcccacagacgttctatgagcagagctgcgaggcgacgaacgagatcgtctttggcgcggtccaggaggtggacagtaatcgtcgcatggtggaaatcaaggccgtgaactatggagacaccttctatgagcagtacgggatgcggtaccgcaacaactacatcggctacaacagcaacaactattgaacagccagcctatcgtgtcccctcctctttttgagttagttacatatttagatttaccgtttgtcttcttatttgcaatcctccacattccctgtaacaaaaatatagaaagtggaaggagtagaagctatctcctgttttgacttgtacaacctggggttttggaagtacaacctggttatatctttccttagacttcctgacgtatgaatttactgacaaatttcagagtttgaaaaaaaaaaaactaaagngaa

SEQ ID NO: 6300 - DNA, 278 bp, Setaria italica
  Peptide Sequence Number=SeqID_72274
cgccctcgccgacgccgccagctggagctgccccgactgctccccggactcctcccccgccccggcccccgccggccccgggaacaacctcgtcgccgccatccgcgccatcgaggccgaccagaccctctccgaccaggagaaggcccgccgccgccaggcgctcctcgccggctccgcccccgccgccgccgatgaggaggacgacgacgacgcggcggacgacgccctcgagatcgtgggaaagaacttcagctgcgtcttctgcatgaagcttt

SEQ ID NO: 6301 - DNA, 545 bp, Setaria italica
  Peptide Sequence Number=SeqID_72275
tgaaatatagatggtatcccacacctgaagtggtacggtgtcgagggggagtacaacgttatggtgatcgatcttcttggcccaagcttggaagacttgtttaactgctcagcggaggtactgatttttgccaacatgaagcttgtaattctgttatggtaactcttgcatgcatttgaaaaaattgtatcaaccaggttttgtgcaaatcttacccatcagagttcgtctcatatttccactattgtcgctcccttctttcttctgagtaactaatgtggccagcttgttattctcgtccattccaagaaccatgttttaaaactgggtctcattattgagctatattgtaggataccaattcgattatgtatttgactggactgcactcaagtaccctcaaatgagttcaaacaataagcttgttcaagtatgtctctttagcttttgatgagttactattgtctttccatttcacaaaagagaaaatgccgttatgtttttcatgcagcaaccaagtgcaagaattagtcttggtagtacta

SEQ ID NO: 6302 - DNA, 922 bp, Setaria italica
  Peptide Sequence Number=SeqID_72276
ctggagtctgttggctatcttctgctatattttttaagaggaaggtttggcctgaatctgtctactttactatataacctattttaccaatatttcaaatgcttacttcacatgctctattgttatgcttagcctcccatggcagggtcttaaagctggcactaagaagcaaaagtatgacaaaattagtgaaaagaaaatgcttacctcagcggaggtactgatttttgccaacatgaagcttgtaattctgttatggtaactcttgcatgcatttgaaaaaattgtatcaaccaggttttgtgcaaatcttacccatcagagttcgtctcatatttccactattgtcgctccctgcgatttgaagacaggccagattactcttttctgaagaaactatttcgtgatgtatttgtccgcgaaggataccaattcgattatgtatttgactggactgcactcaagtaccctcaaatgagttcaaacaataagcttgttcaacaaccaagtgcaagaatagctggagctggaccatctgccgagagaacagacaaagcatcagtgggacaagagatccgggatagattcactggtgctgtcgaggcatttgccagaagaaatccaggctctggtcgccatggagaccattccaggcacaaaagccatgcagattcctttggaacatctaacgaagcagttgccgactcggagaaatcgcgcttcttgtcccggggcgggagctcgtcgaagatgcccgcgggctcgtccagccggccgacctcctcgggggactgcagcgaccagaaccgccggtgggtctcgggcagcagcggcggcagcgggcgcccgtccaccgcgcagaggctccaccactcgggcggcgccgagaacagcaggtcgtcccgcgctccccgtggcccgg

SEQ ID NO: 6303 - DNA, 331 bp, Setaria italica
  Peptide Sequence Number=SeqID_72277
cctcaactatatgtgataatcaaatgaggatgctagtcagctgaaagtacttagcatacatactagatggacactaagtactttcatttgattatcacatatagttgaggatgctagtcagctgaaagtacttagcatacatactagatggacactattttttggatgtttacagagcatacaaaaattctagctagctggtacatttgtttctcattgcaatgcaccagatttgatggaaacagaagaacttaccatgtctggcatgtaccaggttgccgactcggagaaatcgcgcttcttgtcccggggcgggagctcgtcgaagatc

SEQ ID NO: 6304 - DNA, 583 bp, Setaria italica
  Peptide Sequence Number=SeqID_72278
aaagtttatatgctattgcagggtggaagtaagtggattgtattttatatgttttggttacagtaatccatgctcacacctccgaatctcctatttaattaacaatttttttgaaatatagatggtatcccacacctgaagtggtacggtgtcgagggggagtacaacgttatggtgatcgatcttcttggcccaagcttggaagacttgtttaactgctgcaacaggaaactttcaatgaaaacagtgcttatgcttgctgatcaactggtgagttttattgactccatattgggtcttgcgctgaatcccaagagttaggaagcacgtacaattatagagtttgatatcaactaagaaattgttaggaaccatatgtacagaattttcgtgagtattctgccataaatgttgccttattttttggttaatttcaaagttttaggtcgtaatcaatggtagaaatcaaaagaatttcacgaacaccatgtaatattatcagtgtattttgtcctaagttagcataattagaatgattatttaagtttatttttctgagtgagggaggagagtgagatttttg

SEQ ID NO: 6305 - DNA, 412 bp, Setaria italica
  Peptide Sequence Number=SeqID_72279
ctcatggcgcgcaagaccgccggcgccggaggggacggcgacggcgccgaccccgacgaggagctccgcgaggccttcaaggtcttcgacaaggaccagaacggatacatctccgccaccgagctgcggcacgtgatgatcaacctcggcgagaagctgacggacgaggaggtggagcaaatgatccgggaggcggacctcgacggcgacggccaggtcaactacgacgagttcgtcaggatgatgatgctctccgacggccacggcggaggccacgccggagccgccgccgtcacccaacaccaatgaatccgtccggtccgtccatctctacggcggcggcggccggccatatgtagctagcaggctagcgttccttttccatcccattcccagcctccatttttcttct

SEQ ID NO: 6306 - DNA, 1066 bp, Setaria italica
  Peptide Sequence Number=SeqID_72280
gcctcctgctcttctgcctctgcttatcccgttcgctcgacgggctcaaacttctcctcggctcctcgccctcctcccgcggaggatttcgcagcgccagctagcatgggaggcgccgccatctcgagccacggcctcgcctgcgcacccccggccgccgtcccgctgaacccacgggcgcggcgcgcttccgccgccggccaccggagcagccctcagctgctcctgaggagcgacctcccgccgcccgcggtcctttgccgagctcgttcgcagtcttcttcctcgtctaatgtgaacttcgggagaggggacgatgcggacaagttgctcgaggatttgctcaaacagcacggcgaggtggtgtacagctcgggagcttccccggctgccgaggccgacgacgacgccgagtgcttgtcctttgctgtctccctggctaaagctgcaagcgagataaaggctgctgatattcgtgtgctttgtgtgaagcggcttgtttactggactaggttcttcatcattctcactgccttctcaaacgctcagattgatgctatcagttccaagatgagagatattggcgagaagcagtttagcaaagttgcatctggtgatacaaaaccaaattcttggactttactagactttggggatgttgttgttcatatatttcttcctcagcagcgagcattctataatttggaagagttctatggtaacgctacacccattgaactcccattcgacacccaatggcagtgattggtgatcctgcaatcggagactcaatcaagccgattgcttactccactgagaaatgagttttttttttctggaggaagaaaacagtgtattgccgataatcttgacatggccatctcatcgatcagatgtggagagcttccaagagatagatcactcactagtcgcaaaactcaactcgtaaatgtttcctgcccactgctccttagaagtgtaaaagtggcaccttgatgcaaacggtgtcatttctctgaactatctatcatgttggctagaggaataggatctaggagactatcag

SEQ ID NO: 6307 - DNA, 469 bp, Setaria italica
  Peptide Sequence Number=SeqID_72281
atggagagcccgaacgtcgagacctgccgcatgaagtcgagcaggctcccgtcggcgatggtcttgtcaccacagtcacacagggatttgtagcacagctcaaggggctccaggaactcttcaacattcttaaaggccgagtcctccggaatgtcagaaaatccactagttagcagatggcgcgagcgttcgcgtgtgctgtacaatttgtccctcacataaccaagcaccacgcgatacggttcatttgcaggaagttgcctccagaattctgcaccaacgaattctcttcagaaaattggcaaactgacaaggctgattcttgttaacatcatagagactcctcttgaagcctccacatgaaggcacctaggattctaagtgggcactttaaaaaaagaaaaaatactagaaattttcaaaaaagcaaaacatctagccatctatctattcagtatacttaaatcat

SEQ ID NO: 6308 - DNA, 240 bp, Setaria italica
  Peptide Sequence Number=SeqID_72282
aatccgttgaaatatcttgttgctctgatgaatgagaggcaggcaagtctaaaatgagcgagctgaaccttgacagaacatgatataccactgctttcacagatttagatggagaaattccaaggttgattactgccataacacagagaagctcctcactgaggccgtgtgtttgttctttccgttcaagcacgttttcatatttccattcaatcaaaaaggccagaagtttcaagccag

SEQ ID NO: 6309 - DNA, 730 bp, Setaria italica
  Peptide Sequence Number=SeqID_72283
atctgtttgaagcatgctggcatgccaatgatctagtgcttgcatcaagcgatcaacagcccatgtttgtagactgcattcaaagcctggtaccaatttgcattacaactgccagtccagtgtcgtcttggacttggatcagtggctcagggctacatttttgcatcactctaggccttgttgtttgttatgtctgacccaacttgcctgttacttgaattgtttacagttgtttaaccttacatctttcatgctctcaagtctcaactatctctttacatcttctacgattgcttaggtctcaaaaaggagttagtttgtaaactaaattgtagctattttaccatagctacactttagcttactttttatatcgcatcatgcttggaagtttcatgtctaataatcatgtactagcaccttttatctttcagtttttagactgcaaactaggttcagttgtaagtaacaattaatgggaacaaaatttgtattttatttgcacattaatgctcttgctagcgaaactggtacaaattgtatattgacacgtaagatatgactgtctgtagtaaagaaaacaaagctgggatgttggaacctctacatatatttgtcatgggatttcaactttgggccaaaaaaagtccaccctcttaacggcgacctttatgattaaataaaggaacaaggccgcgccccccccccccccccccgcacacgcgcacac

SEQ ID NO: 6310 - DNA, 1080 bp, Setaria italica
  Peptide Sequence Number=SeqID_72284
tggaggcaaaactgcctctatgaagaccttggggctgtcctcacttatgtcaaaagctggaatgttcttcccagccaaaggaaggcctaggattccatggttcaatcaagttcttgcagatattggtgatcaccagtcgctggagcacagcctctctacattcagtgggcacatatcacgcctgcgaaagattgtagaagttgtatcggaggattctctagttctaattgatgagattggcagtggcactgatccatcagaaggtgtagctctttcaaccagcattttgaagtatcttgcgagtaaagtgaatctggccattgtgacaactcactatgctgacctaagtcgtctccagtcagttgatagccgatttgagaatgctgcaatggaattttgtgtaaaaactctgcaaccaacatatcgaatcttatggggcagtactggtaattccaatgcacttagtattgcaaagtcaatcggttttgatcaaaaagtgcttgatcgtgcacaggaatgggttgagaaactgttgcctgataagcaaaaggaacgccaaggtttactttatgattctctcctcgatgaaagaaacattttggagtctcaggcaaatgaagctgcatctgttctttcacaagttgaggggttgtacaatgagattcgctcggaagctgatgatcttgaaagtcgattagctgctctgaggactagagagacccaaaaggttcaacaagaattgaaggttgtgaagtctcagatggacacaataatcaagaacttcgaagttcaactgaagaattcaaaacttgaacaatacaattcactaatgaggaaagcggaagctgccactgcttcagtggttgctgctcatcagccagatgaaataactttcagtgatgatgaaaaccagaccttgtttgttccgcaaattggagacaaggtgtatattcaagggttgggtggaggaactatggccactgttattgaaactcttggagaagatgggagctgcatggttcaatatgggaagataaaggttcaagtcaagagaagcaagatgaaattggttcaacgagg

SEQ ID NO: 6311 - DNA, 586 bp, Setaria italica
  misc_feature (570)..(586): n is a, c, g, or t
  Peptide Sequence Number=SeqID_72285
cagcatctgatcgagaagtgcatctgctacagcatgaacaaggaggagtgcatggtgacgttggagaagcacgccaacatccagcccgtcatcacatccaccgtttggaaggagctggagaaggagaacagggagttcttcgagacgtacaggaaggagaacagggagttcttcgagacgtacaagaaggatcggccgggagaagagtcgacgcagaagaatccatccgacgagaagccttccgctcccaagagctcagagcctcagacgacgacgacgacgacgaggagcagccttccgctcccaagagctcagacgacgacgacgactaggactcggtcgtaacgatggtgcacagcaggtacatatatctagagggctagtatatgcatggagtggtggctagctagcatataggtacagtgtatatcactgccagcatcaccattcaccagtgtacgtagtactagtaatttgcattgcgtatagtgtgcgcgtacgtcgtaggagctagcctgcatggtctcgcataaataacattattatcgggaacaaaaaaaaaaaaaaaannnnnnnnnnnnnnnnn

SEQ ID NO: 6312 - DNA, 329 bp, Setaria italica
  Peptide Sequence Number=SeqID_72286
ggcgaagcaatgaagagctcgagcacgagcaacaccggcggctctggctcgggcacggactccggcaggtctggaccgggctcccgcagctctggctctggctcgggctccttcaacctccggaacctgtccaaggtcatcctgccgccgctcggggggccgtcgtccggccacggccagtcccatggcggctccgacaagcgggtcatctcgccgctcgactccaggtacaggtgctgggagacgttcatggtggtcctggtggcgtactcggcgtgggtgtacccgttcgaggtggcgttcatgaacgcgtcccccaagggcggcct

SEQ ID NO: 6313 - DNA, 480 bp, Setaria italica
  Peptide Sequence Number=SeqID_72287
gagcccttacgagtccgaccaccacggcttcttccctcatggaggcctggctatcatatgccccgagcaacaagtcttgcaaaagttgtgagcacatggagttgtaagggttctttaatcaccgcccggcagatagaacaaccaaactctttcagtagcctctcagccacagacatatgagcacgctttgttgctctccggatttgcttgtcagtctcaggatccccagagagaacaggcttcctgctgattggaggaggcaccacccatttccagccttctttctcctaccatgatgaaaatatgaaatataagctgttcataacacagtacagtaacattggaagaaaagacagaggtacatacaacatagtcccatgaagggcgccctttcctctccgttatatcagttgcaccttgcagctcttttatcttcggcaatggccttggacggtcaccatgatcatcacttaaaagcca

SEQ ID NO: 6314 - DNA, 720 bp, Setaria italica
  Peptide Sequence Number=SeqID_72288
ctttaatcaccgcccggcagatagaacaaccaaactctttcagtagcctctcagccacagacatatgagcacgctttgttgctctccggatttgcttgtcagtctcaggatccccagagagaacaggcttcctgctgattggaggaggcaccacccatttccagccttctttctcaacatagtcccatgaagggcgccctttcctctccgttatatcagttgcaccttgcagctcttttatcttcggcaatggccttggacggtcaccatgatcatcactggtccatggagcgggttcattgtcacagcgtacaaagagatacctgcagaccttgaacttaccctgaataccaatcttcctccaacatttctcaattctgtaaactccatcatacctcacaccagattcaggagcatatgaggaacgcttctctttgtgcgacctcacaaccctgacagggtaacccttcaagcaactaatgcgtaaagcagcattcagcttctcaaatttctgatcagatgattgctccttgtttgtccgcttgttcccacttagatcccttccaccacttccggtgtaaagaaaccactctccgtggtcttcatcatcttcataccctcctgatagagctactgattgagcaccatgtgtagactggccagcgataccagctacatgagggaaatgggcaccccattgcctgcactcaagacggtctt

SEQ ID NO: 6315 - DNA, 464 bp, Setaria italica
  Peptide Sequence Number=SeqID_72289
aggcgacggcggcggccgccacggcgagcgcggccccgaagaaggcggcggccgagagacaggacgcggcggggtggagcagcgcgcccgcctcggcgagcagcagcttgaggtacggggccacgaggaagccgagcgcggcgacgacggccaggagcatgaccgcgtcgaccacggccatcggggtgctgtcgcagaaggcgccggcggcggcggcgcgggccgaggaagcccgcctggatcgggagcacgcggaggccgaggccgagccgtccgccgccttgcggtggtgctcgaacgcgcggaggaactcgatgaggctgcggcactccgccatcgcggcgtcgggagctgctccgcctccgcagccgggccgacgggcaggcaattcgccaccaatttctggtgcgggttcgggaaggggggaaggggaaggaagcgcgagcgcgagcgctgtgtggtgg

SEQ ID NO: 6316 - DNA, 3319 bp, Setaria italica
  misc_feature (292)..(292): n is a, c, g, or t
  Peptide Sequence Number=SeqID_72290
tgcttatttctatgtgaatcctgccctatttaatttctcagtcacattgatttcatatggttcgaagtctatggcagttagtagtagtgactgggttaagaggatgcgaaagcagacaagtggagctcagtatcttgacatgctgctagaatttgttcctgggaactttcattcttctttaagattattacgtcaagataaaggcctgctggaggttgctctattcacaagatacactctacataatatcagtgactaccccttacaatgcacaccttcccatcaaaaaccnctgcctgcgccggaatctggaatgaacaatatcaatcttcctccccgacatggttgtgttttgccctcaatgtcaatgaactcctggtttataaagtcaagcaaattacgaataagcctacatagtgagaaaggatcagaagctattattgatttggaagcattgtctggcttcactgaatttttctatagagatccaagacaatatagcgcctcatcgtatggcagcttttggagtgtcattgcaacctgttatgtataacttgcccgtgccatcacaagttgtactaatagttccaagatatgttgtttcaaacgagtctggtgctgcaattgctgttcgccagtgttttgttgagcatgagatagatggattgacagttgaagctaaacagcgggctaccttacagacatggaaacctggaaaaaagcgagaaataaactactttgatttatttgttaagaagcacagagatgtgtttgaggattctcgcattttcatccagttctgtccaaaagaacctggattcagttggtctggaccaatctgtgtttcatcaattggccgttttttcttgaaatttagaagatcggatggcatgttgacagatggtattaaaagagaccccataaatgatgggaagctgaaactgtttgcttctgttgatgttgttcaagagactacttcttttgtcttacacttcactaaaccaccgaaggttactctgccataccgaatagaaaattacttgaatgaagcatctatcatgtatttccagaaggattcggttgaatcagatgtattatgccctcaagagtcagaacagtacgcttgggatgacttaagtttacctcgcaaattgattgtgcgcattgttgatacacctgcactgcgtgaaattaaaattgataaaatcagtccatggaagccttttttgaagatgcggcaaaataccaggctgaatctggatttctcattcagtgatgggctcagttcaagaaaacaaagatttgatgaatcatttggactgagggtgttcaaaattggctatgaagtgtatgctgatggtttaaccagagttctacgaatatgtgaacatgcagataatcccaaaatcgagaaaatccaacggccaatagcaagcctacagttcagaatttcttatgtgtgtattcatcttcttgacaagggccagagtggggaaaatgtccaattgccatctacaatagtaacagcaaaacttcagcatgtatctgctgattcagttgtcacagatagcttcaagcatggatctgttgcaattcattcagtgaatgtggacgaaaaatgggatggagcttcgtttgggtcaattcttaggaggaacaagcttcaggatgctgctctcgatgaaaatattcttcgtatagtctttgtactgaattcaaccaacagcaatgtcaaacaaatacagtattgttcgataattctacagcctgttgatctgaagattgatgaggaaacattaatgaagctagtaccattttggagagcatcccttgctccttcaggaacaccgagtacacagttttatttcagacattttgaagtacatccaattaagattatagcaagctttcgtcctggtagccgacgcacaacttatagttctgctcaagaggctctgagagcactacttcatagttttataaaggtgcctgaggttagcaactcagctgtggagctcaatggggttctcctaaatcatgctttagttacattccgtgagctactcctgaaatgtgctcagcattattcatggtatgtcttgagggcaatctacgtaacaaagggaagctcattgcttcctccatcttttacctcaatttttgatgactctgcttcatctgttcttgatgttttcttcgacccttctgatggattgctcaatgtccctgggcttaccataggcatgtttaaatttataagccagaacatgaagtcgggtggtttttctggaacaaaacggtaccttggtgatctcgggaaaaccgttaaaactgcaggttcgaatgctctcttcgccgctgtcacagaaatttcagatagtgttgtgagaggagcagaaacaaatggtttgaatggcatggttactggtttccaccaaggcattatgaggttggccatggagccatctgtattaggacaggctctaatggagggaggacccgacagaaagatcaaactcgatcatagccccggaattgacgagctatacatcgaagggtacctacaagctatgttggatgtcatgtataagcaagaatacctccgtgtcagggtggtcgatgaccaggttatcttaaagaatctaccaccaaacagcgctttgataaatgaaatcgtggacaacgtcaaaagctttcttgtgagcaaggcattgctgaaaggagattcttcaacactccgcccgctccgccatctgcgaaatgaacgtgaatggaggatcgcgccgacggtgctcacactgtgcgagcacctgttcgtgagcttcgctgtgcgcgtgctgcaccgggaggccagcaaggccatcggggaggtcatggcgagagcgaagaaacccgctactggaggagagggtgaaggcgactcgtcgccgtccggtggagtcctgctgaagcggaacaggctgtggactgtcgggaggttcgcggtctcgggcatggtcgcttatgtggatggtcggttgtgccggcacatacccaaccccatcgccaggaggatcgtgagcgggtttctactgagcttcatcgaaaacaggggcaacgaataggcaggcagggtacgaacacgggcatcgcgttctgctcctggctcctgcagataaaccgtaccagtttaccacggtgaataggcacgcacgtcgcacaaagaacagatgtgtggtagactagtgcacgtgaccgctcctcactgcaacgtgtagagttgtacagaaattttgaccgcgccgggcgcacgtttggtgtgcagaaacacaggggacag

SEQ ID NO: 6317 - DNA, 537 bp, Setaria italica
  Peptide Sequence Number=SeqID_72291
gaaagagttgctatctgacccaggaacccgtagagaggaatgcttatcgagggatgagcttcttagtagaataatggacaatagaattaaatcacaagcttatttgcgtggatctttctattctagaaacattgtcgtagtaggtgagagggagggaatcacatcagttgatagtaatctacctaaattctagtcctaggtagtcgcttaagggtctacgcatgcattcaatatagctctgtgttggcgtgctgcgtctcttttaaagcataagatcagtcgtacagaatcactcacccttgctgcaaaaaacttctatgagtgcactgaagaacttgctgagtatgtctatgcgaagctaaggatcctaaagaagaagtttgcacgtagagcaggtgaaacgagcaagcaaaatcatacgacttcagtaagcaacatatcaacttgtgaacaggagacttcagttgaactgatgatgaattgatccctagcacttcaattgatagtaacgacttctttgtgatggctcagatacat

SEQ ID NO: 6318 - DNA, 630 bp, Setaria italica
  Peptide Sequence Number=SeqID_72292
tccaaaattcatatcaccatcggcagcacaagcaagagcccatacccctccaattcgtcagactgcgcaggcttctcagcaagtaccgatgaggacttcagtggggggaccctcagcatcatcaattgccttgtcatcaacctgtcgaccatcagtgccaaggcttagagtccaagcaccgcaggtggaacaatcatcgtcactgtcgcagttgtcccgttcatcattgccgtcgtcgcaagtggtccaacctccccccttgatacctggcaatcttttcagaacaacatcagcgactcttagtcacatgcctccaccacgtgggagttatggaggtcagagtgaattggctcctcgagcacctgctcctcatctccagttcaagtcaccacgggcaaattccatgccacctggaaatcagcagcagcttccgacaactagggtggaggcgacgtcccctaggacacaaccagtgttggcagcaaattcatccccaccagattcacacctgggacctgtggcaacctcaggcatgtcaagtttacactcggccctcccagcaagctcattgccctcaagctcacatactaatcacctggtgcaacgtgtgctaccagctccaaacccagc

SEQ ID NO: 6319 - DNA, 3668 bp, Setaria italica
  Peptide Sequence Number=SeqID_72293
gaatatggtcatgctttgaaagaataaaagccctagcctgagccattgtctgcttagttggggtgcatcatttctctttaatagacttgaggaatttcagaaccctagctactcatgtaaaggctctgatgctgctgagcttttcgtggataatgtagcttcggagttttcaacaaaattacccaacaaggttgaactcagcaccgaaatagacaacacagtcatatcacaagcttatttgcgtggatctttctattctagaaacattgtcgtagtaggtgagagggagggaatcacatcagttgatggtgatctgccgaagttctgggcctactggtcaagtttacttcatgggaggtctcctcgttggcaacatgtatctgagccatcacaaagaagccgtagaaagatacagaatgtagaagatcaatcgaaaaacacagaagaacagttggaagtacctagtgaagaaactgatgaagctagaataaaacgtagaagaactggtgaagtcatggattcatctccaaaagtcccaccttgcaagaacaaggacactatattgtctggaaacaataccccatcaagttctcatcaaatatcagttgaagatacatggcaggaactagagagaaacaatcttcatggcacacagaaaggtctacatgttcaactcaagccagaactgtcaaagttatataagttgctgcaactgccggagaacgtgaaatccttatgtgaggaattccttgagtatattttgaagaatcaccaaatcagccaggagcctaagggcattctgcatgcattcaatatagctctgtgttggcgtgctgcgtctcttttaaagcataagatcagtcgtacagaatcactcacccttgctgcaaaaaacttaaactatgagtgcactgaagaacttgctgagtatgtctatgcgaagctaaggatcctaaagaagaagtttgcacgtagagcaggtgaaacgagcaagcaaaatcatacgacttcagtaagcaacatatcaacttgtgaacaggagacttcagttgaactgaggaatgatgaattgatccctagcacttcaattgatagtaactttgagactggttcaaaccgagaggctacaggtgatttttggactgaggacatggtttcaggagagaaagagttgctatctgacccaggaacccgtagagaggaatgcttatcgagggatgagcttcttagtagaataatggacaatagaattaaattagttgataaagttttctacttgagaggaaagagcattcaggataggcattcaaatgaggtctcgtttttagacaggcacaggcaaaaggaagtggcaaaactcagagaagcatgcagtttagtcgtggaacaccttcgtagaagtcaaaatcacattgttcaagaggacagggatgggaaaataaaacaagtaattaaatggtttactatgcttctgtatgcatttttggagcacatgaaatgccaacgtaacaggcttgatacacagcaatcagctacctggaccaaggagtctcatttgaaggaggaaacccttcaggcagcaaaatctggccaattagatcatacatttgatcaacacattcctttaccagattcagaatttgctatggaggaatttagtcactttagggaagttggtggcagctgccatgttcatgcggctgctccaacaccaccgtctttagatgataattcagcaatggaaattacatttgttcgaagtgtaaatacatctgaagtcaacgaagaagaagcgcgtaatagacctgctgaagttcttattcaaggtccagcatcagaagttgtcggtctgtcagtgaatgggatctgcgatgtttctgatggcatcgactcacaaagagatgcatctctggctgttcattcattggaacctccaggtggcgacaatagaagtacacatgttgaggagagtactcctggcgtgccactacaggatggtaccagtgaacatttaggtgatgctgcagtggaagttgacactgaaaataggaacactgctttgacagattcacctcaatttgacacaccagctttgactgctacttcgaggcaggccacattgccagtttctggagaagtcgagatacaaaacaatcttgtgacccagtgtgcgcaacagagtttagtgtcatcacaactttcgcaaggagaatcagagcaagcagacttgtctggtgtaccatcagctcaacctttgcaatctgagaggcaacaatcaatccctgtgtccaataatctgcatgaaagagcacagcctgatcagagtcaaccaagtcatcagacagatgcagcacctggttctgtgcagtctgcggaactctttccagtgacatcaatgatgtttaatcacccacctattgatgctgagccactgaaaaatgagctgcacagattaagattatacatggacacagtccataaaactcatgagctgaagaaaacacaacttcggatggagtgcagccaagaaatagagaaggtaaaacgaaaatatgatttgttaattgaagaacacgattccacccatcttcagcaaaagaagacacttgataatttttacgagaaagttctctgcaaccaatcactggctgaggattttcgggccaaattcatatcaccatcggcagcacaagcaagagcccatacccctccaattcgtcagactgcgcaggcttctcagcaagtaccgatgaggacttcagtggggggaccctcagcatcatcaattgccttgtcatcaacctgtcgaccatcagtgccaaggcttaaggtccaagcaccgtagtaacaacatcagcgactcttagtcacatgcctccaccacgtgggagttatggaggtcagagtgaattggctcctcgagcacctgctcctcatctccagttcaagtcaccacgggcaaattccatgccacctggaaatcagcagcagcttccgacaactagggtggaggcgacgtcccctaggacacaaccagtgttggcagcaaattcatccccaccagattcacacctgggacctgtggcaacctcaggcatgtcaagtttacactcggccctcccagcaagctcattgccctcaagctcacatactaatcacctggtgcaacgtgtgctaccagctccaaacccagctttacaagtggtagcaccgccaggcccgagtacagcaacgccttccatcaccgcaggcatgcaggggtcattatctctggatgcatggcttacagcaaggctggggttgagcggcgatgcgcctagggcgacagctcctgcgacaaatggttctgatatagatgtggtatgcttgtctgatgatgaatcagagtagcagatgcacaagactgacagttagttgactgcttgaaacaaatagattataggtgcgcgcactgaaggcattggtgattcattttagcctcactgtaacctctgagaatttttaacctgtggtgtggcgtaatggtggtgggcttctttcgcccactgttgtagcctggcgctctctgatcgagcatgcaaggtgtacatgtcactcatatataatgcataaccagctagagttgttggttggttgtatgccccgtcactacctgctagaaaaaaaaa

SEQ ID NO: 6320 - DNA, 330 bp, Setaria italica
  Peptide Sequence Number=SeqID_72294
catgtgcttggcaatgacagtagttcaaccagtgcgcaacagagatcatcgttggttcaagttgctacattagatactgaaaatcaacagcctgaccagtttgctacccttatggatgtatgtcctggagagccaactgcatcaaatgacatggtggatgtagtccctgtgcctgcttcaaatggaattgaaatgcatggtgctgatgggcagtccaactcaagattgcagggcagcagctctatcagtaattttgagaggttcggtgctagagatgatttgcatgtgtcttccccgagcaacactgagccaattccatcaacagctggg

SEQ ID NO: 6321 - DNA, 603 bp, Setaria italica
  Peptide Sequence Number=SeqID_72295
catcttcttttagtttctttcaactgcaatcgacagctagtagtaacacagattctttcgattggcatggcattgacgtcgaactgattatgatggcatgaatcttggttgatttgttgaggtgttcgcggagatcttccgggtgctgaagccggggggagtgtgcatcgtgagcttcagcaacccggatgttctacgagaaggcgatcgccgcgtggcgggagggcaccgcgtacagccgcgtccagctcgtgacgcagtacttccagtgcgtggaggggttcacacagcccgaggtgatcaggaagctgccgtcggctggcgggtcggcgtcggtgtcgccgctggacgccgtgatgaggctgttcggcatggccagctccgacccgttctacgccgtcatctcgtataggaacttcaagccaatgtaaagccatagatagattaccgaaaaaaattgctacaactgggatctgtagtgagaaagatagtttgcagatgtgcactggtacttcagtggcgatcagctgaaagttcaggtgcagagacatcgtacatcgaacaacagattcagacatatgctgggaacccaattaaaaaaaa

SEQ ID NO: 6322 - DNA, 272 bp, Setaria italica
  Peptide Sequence Number=SeqID_72296
cggcgacccaccggcgcacctcgtcgtcgtacacccgggctcgcagcgcgccgaagaagtcgatggactgccccgggaaggtgtcgacgagcttcacgacggcctcgtccgggacgccgtcggtgcggaagatgcccttgcagactcctattctatcttcgcgggtgggcgcccagtagaacttgtccatgcggccgtcgcggatgagcggcgcgtacagcgtggagaagtcgttgccggtgacgacgatggggacacggggggttctcctt

SEQ ID NO: 6323 - DNA, 455 bp, Setaria italica
  Peptide Sequence Number=SeqID_72297
atccctgcaagatatatatacctcttcttagttaccctatgattgctcatttggatcagcttgcctcttctcttggagaaggctgagctcagaatgcactgatcaccacgggtgcgcgactgcggcggcgtgctccggtgcgaccgtggtggaggtcggcgcttctacgacgtgccgctggtggacggcttcaatgcaacgcgccggtgtccatgcatgtctacctggtgaagtgcaagaattaggagggaagaaaagaacaagcttacctgggccggagctgcctggttgcttgctgaggtacttgtcggcaagctgcacacgcttgacgttctcctgctccgccaccagcatgtggccgtactcgagcagcttctccagcgtcatcttgggctgctggaacgtcggcgggccgtccttggagttgacgagcttccggctgatgttctcgatgc

SEQ ID NO: 6324 - DNA, 548 bp, Setaria italica
  Peptide Sequence Number=SeqID_72298
ggaggcgaggccgaggcggacgagctgcgagtggtgctgccgcagctcggcgatggtggttagcgggatgggggtcggggcggccatgaccttgaacctgttggcgccgctggagctcttgacatggtagtagttcacggccgccgccgtcgtcgcttgcgtcggcctgagcttcttcccgaggaagctggccggggtggagactggagctacgacggtggaggaggaggcggccgccatctctgcggcgcggcgctgcttcttcttcttcctccttgggcgaccttgctaggaagggcaagcacgagtgatctgtcactgatgcgccgccgccgctagctgctcttcgttctcaaagtactgaggccgagagccaaataaaggagcacgtgtggtggccgtgtgtctgccgctgcggctgcgggtgccgccatggcctgtggtcgggatcggatcggaggtcagcgaagagcctgtggttgtggatcagctcccacatctctcggaggccagaggatggggtttggcagacgtggcgacatcccgtc

SEQ ID NO: 6325 - DNA, 926 bp, Setaria italica
  Peptide Sequence Number=SeqID_72299
cgtcccactccggttactcgagttaaaaagatttattcggtcaatcggttccagaacaaagtttttctcctttttattattccccataataaatctcatgcctgcttccttgtctttgatctctagtttctttcggtgcttcgtaccagaagaggagaaagattccggcgcggagagtccgatgagctgctgacgacgaaggtcagtgtagtgacatcaggtttcctgaaatctcaggaatggttatctgatggggcttttttttgtaagtacttggttatctgatagcttccttctttcccgtgttcacccgtcaactgctctctactcgatcgatcatttttcattcggctcgctaatgcaagtttgatcgatcgatcgagcaagtttgatcattttttctatccgttctacttttctttgtgcattgctcccctgacctcaaatccaggctccgcccgaggattggttgctaaagcagagatcttccctcctccagcttgtcatccctgggccggagctgcctggttgcttgctgaggtacttgtcggcaagctgcacacgcttgacgttctcctgctccgccaccagccatgtggccgtactcgagcagcttctccagcgtcatcttgggctgctggaacgtcggcgggccgtccttggagttgacgagcttccggctgatgttctcgatgccggtctcggcgacccaccagcgcacctgtttggaagacactttgaggagagagaatattttttttgacatccggtgcccctgctccagatctcctcccctacgcaacgtcgtgcagcacgtccctcgtgtcgggcaagtagccctctgccccgatcctcctcatcatgtccctggccatggcgtacacctcctctgcctggtgatggctcaggctcccgcactggaactc

SEQ ID NO: 6326 - DNA, 1911 bp, Setaria italica
  Peptide Sequence Number=SeqID_72300
ttttttattaaaaggaggaagaggggcaccagctctggaagctctgagaaattcccccatttgcttctcttctatctcatctccaaatccccattgaatctctctaaatccaacaatatatatctttacattgacaaaaacttttactatgcccagctatcacttggccagatctggtatcttagtacaaagggtagaacatagatcggatataataaaaatggcaagcttgaaagttgtaaagcagctgccaccgtcgatcctcgccgtcgggtccaagttgcattggtggcacccgggacggtgcaaccttgggtacgctagacttgcaattcgctgctttacctcctcctatgccggccgcctagctatggcaagagggtgtgtgtgtcctggttttctacttgaagaaggcgccggtcttcatggcgtcctcgttggcctcaccaagagccgcctcgctgaggtacttgtcagcaagctgcacacgcttgacgttctcctgctcctccaccagcatgtggccgtactccaagagcttctcgatcgtcatcttgggctggtcgaacgtcggcgggccgtccttggagttgacgagcttcttgccgatgttctcgatgccggtctcagccgacccacttgcggacctcgtcatcgtacacccgggcacgcagggcgccgaagaagtcgatggactggccggggaaggtgtcgacgagcttgacgacgtcggcttccgggacgccgtcggtgcggaagatgcccttgcagacaccgatccggtcctcacgggtgggagcccagtagaacttctccatacggccgtcacggatgagcggcgcgtacagggtggagaagtcgttgccggtgacgatgatggggacacgggggttctcctccttgttgtacatggccggggaggctgcacgttggtggggttgtcggcgatgttcatcagggtggcgttcaccatctggttgttgacggtatactgggtggtccccgcccatgcgaccggcaccggcgtcgagatcgttgatgaagaggcagcacatcttgcccttcttgatgatgtcggcggcctcacggtaccgctgcctgatgagcttggcgggctctccggcgttgccgctctccagctctccggcgctcatcatgatgggggtgatgcccatcttggcgaagacaagctcacactggaaggatttcccttgacccttgcctccccagatacccaggatgaggggcaccttgatgtttggcagggtcatgaagttcttggagaggtggacgacgagcttgtccatgaagggccggggcggatgtagaagccatccttcatgttgtcccacccggtgtagtccctcaagccctggctgaggtactcgtaggagctgagcacggcctcgtgggtgccgtctcccatgggtgcctggaagagggagtcgacgaaacccttgcccctggtgatgtcctgctggtcgtcggagatgtcgttgacgaggcccctccacctgtctttgtcggtctgcttggtctcgtcgacatccttggcggccatgaccttgaacctgttggcgctggagctcttgacatggtagttcacggccgcggtcgcttgcgtcgacctgagcttcttcccgaggaagctgggccggggtggaggccggagctccgacggtggaggagaaggcggccgccatctctgcgctgcttcttcctcctccttgggcgaccttgctaggaagggcacgagtgatctatcactgatggccgccgctgctgctcttctcaaagtactgaggccgagccttgcaaggcattaaataaaggagcacgtgtggtggccgtgtgtctgccgctgcggctgccatggcctgtggtcgggatcggaggtcagggaagagccgc

SEQ ID NO: 6327 - DNA, 527 bp, Setaria italica
  misc_feature (521)..(521): n is a, c, g, or t
  Peptide Sequence Number=SeqID_72301
cgccggcacaagaggtgtgcgtggacacgacaaaagaagttccacgcgacgacacctgcatctgctctaagaactgtgcctgtgctggcatgtgcatcctgcaaggtgagggggatgttaagacctgtttcgtcgattgtgtcctaaagaacgactgccagtgccctcctaaggaccagggcgccgagaagaagacggacggctaagttgaccgtaatgccatgcctgagttctcaggccaccatcatgttgcaataatgatgtattgtgttcttccctcatctcccatgcatgcatgcatatgtcatcattgccgtatgcttgagggcagggttattgttgtcgggtgtcatagcttatatatagctgcaaaataaaatgttcaagtgtgtgtttgtgttatcacgtgtatggtttctatatcgaagttgtatgcatgcatatcatatttgttaaccataataatgtaatattgatgtacaaaaaaaaaaaaacatttgctccaaaaaaaaaaaaaaaanaaaaaa

SEQ ID NO: 6328 - DNA, 419 bp, Setaria italica
  Peptide Sequence Number=SeqID_72302
gcagcttgataagcacatattccattcacagtaatagcaaagcatcgaaatggcttctgctgctaagaccaagatggttgccattggcattatgatggccatcctgttcgtcgggatagcctctgctacgccggcacaagaggtgtgcgtggacacgacaaaagaagttccacgcgacgacacctgcatctgctctaagaactgtgcctgtgctggcatgtgcatcctgcagggtgagggggatgttaagacctgtttcgtcgattgtgtcctaaagaacgactaacctccacctcctcagcagctcctcttcccttcccacctccacctccaccgccaccgcacctcctctcccggccacgcgcttcccctcccccgtgcatgaaaccctaaccctaaaccccctcatcctccccaac

SEQ ID NO: 6329 - DNA, 247 bp, Setaria italica
  Peptide Sequence Number=SeqID_72303
ccggcgagtaccacgtctacttcctcgacaagcccggcagcgagaaggcggccagggagatggaggtcgtggtggacttcatcaatggcggccaagggggctccacaggtttaaggatggacgcctgaagaacgaagctgcttattttgaatgctaagaacctaaagctatcctgtatattcctgtaaaattggaacggttgaatttgtgcgtcaagctatggaaggtctaaacctttcacaatcaa

SEQ ID NO: 6330 - DNA, 532 bp, Setaria italica
  Peptide Sequence Number=SeqID_72304
gtgtttttatttcaggcaaaccaagacacgtccatagtgcgtgagaatgagatgactcgtgaccgcttgctacaatacgttatccacgcccgcaaattcaacatctaccgacgacacattttttgggttcaagcgcatacacacttcgtagcatgtgcaggcacgatttttacttgggcgccatggacttggccgtggccacgaacaagtccttattcgcggtgaaacgggcgagcagcttctccctgtccggcaggcactgctttaccacctcgtgggaggcgtactcctgcccccaccggcacaggtccgggaactcctcgtcggtgaccaggctcacgccggccacctcctcgagcaccggcagccagtgcgcgaacccgctggcggcgatgtcgaggtaccccacggcgtcgccgccgaagaagcgcttccctttcacctgcccctccagcagcttcaggttctccttgatctccttcacgaacccctcctgcacctcgccctccgtccacagcgacagccagaacgg

SEQ ID NO: 6331 - DNA, 422 bp, Setaria italica
  Peptide Sequence Number=SeqID_72305
gctacagaaggcagcgctggccttttctctaccagctcgtattggagaagaaagttgtccttacggactgtatcccaaatctgtgggtcaaagcgaccataagacccacgttcatagagaggagtcttgactagaggctccacgtttgggattcttgtgaaccatgaccgtaattctttatggtaaaaccatcctcgattacatagttcataggcagcatatagctgagcttcatcctttggcatgctgtagaagatgtaaaacagggttaacatgtgaagcttctgaaaaactaggggctgcagcaagaaaggatttgttacaatataataccagacccatcaacagaaaatccaaggaaattatatcatatagtgtggttttaacctatagaagatgtaaaacggtgtgaatatgtattg

SEQ ID NO: 6332 - DNA, 2313 bp, Setaria italica
  misc_feature (1)..(73): n is a, c, g, or t
  Peptide Sequence Number=SeqID_72306
nnnnnnnnnnnnnnnnnnnnnnnnnnnnnnnnnnnnnnnnnnnnnnnnnnnnnnnnnnnnnnnnnnnnnnnnnggtgcagagcagcgaagttccattgtgaagagcagccgtgttgtcatttgaggcggaactaatcctgaacattaggaacctttacagggagtacgcactcccacgatcaaaaaaaaaagaagcaacattcgctaccactggtttagtataattacaagggctgtcagctggacatccccccacttctgttctgcagcctcctcacagcagatcagaacaaccttttagtttgagtttctccccgtccttaagagttaggtaatgatgccctgatgtgaatatgagctttgtcccatccagctgggacaaaattgagtcgggaccaaggaggtacccagaaatttttcatctaacattttgcgctacagaaggcagcgctggccttttctctaccagctcgtattggagaagaaagttgtccttacggactgtatcccaaatctgtgggtcaaagcgaccataagacccacgttcatagagaggagtcttgactagaggctccacgtttgggattcttgtgaaccatgaccgtaattctttatggtaaaaccatcctcgattacatagttcataggcagcatatagctgagcttcatcctttggcatgctgtagaagatgtaaaacagggttaacatgtgaagcttctgaaaaactaggggctgtaatggtgaagattgctcggagaagtagcaagctggaatatgaaaatcaggatccccttttgctggctcatttgaccagggtgagccaaatgtcttgtatagattatcaggtgaattcaagttcaaacccaatgttgttaaatctattcctaaagcaagagatactaattcagcatcattcatccttataactcccagtaatcctaacaagccatatgggtcaggtggtgacggtccaccctgaatcttttgaatctgatcccgaaatgaatgtgcagctgaaggcatctgctgcatcctgaaatgattttgagtctgtggttgctggtattgctgcagaagttgatcatatgatgccaaactaggagtttgactgagtggtcttagtccaatattttgggttccagcattctggactgaattagcaccttgcaggtgttgctgacgatttggtgggtagctacttcctaaattaaagccaactgaccttgccataggatactgctgtgtttgcattacgggcacattctcgtgaagttgttccttatgatgcaactccatagcataatctgaagagttacctttgaatccaggcaaagccgggaagtcttcattttgaatgctgaattcctggttttgttgaacaatggtattaacaccaactccttgcttgcgtaatgatccatattgtccttgtggaccaccagcggaattaggtcgaccagtcaattggggaaaatcatttatgtcaaatggagcagtatcattggcatcatgcaacatacccatagaacttagagaattatttccggcttgaatttggttctgtgataatgaccctccagatgttggatatgaacttccaaacatatttatcaactgaggggatgcttgctgaagcaggccattcataatcctgctggatccttgcacatttagactaccactcgcagcattgccactcagattcatccgtgatgcaatacttggcacagataagccaccagagcttatatttcttccaatattacttccacctacaatatttcctacagaacttgtgatccgtggacccaagtttcctaaagatggagatactgacatcccaggaacagaattgcgactaccaccggcgcccaagctcgaggataagctttgaatgttaccaccaatactcatgctgctactaaatgctggacctgcgccaacattcatccctctaccactgacaccagaatgtgcatgtggaatctgagacatggcaaccggaaggttatttgaagtgaatctcccagaaatgctccctccaggttgttgaaccccagaggatggaaggccactcattgcaccattcctttgtgcaagtggtccaggcatacttggaaggttgaaacttccatgaatgttgtgcaaaccagaatgatggaagcctggaattgatccggattgacccgaaaaggatgctgtaaatggtcttccggttgagtccgtaagatttgacgcggaactattaaggtttgaattcagcaagcctgacattttggagacaacaacaagtgaagagtcaggagcaaatg

SEQ ID NO: 6333 - DNA, 259 bp, Setaria italica
  Peptide Sequence Number=SeqID_72307
ggggtcgcgttcggcggcgttgacgatgtagatgctgaagtagccggcgtcaagggtgccgggctgcgcgtcggggtccttatcccgggaggaggagaagacgatccagtcgccgctgggcgaccagctgcagtgtgtgtcaacccatggcccatcggtcagctgcgtcaccgtgccttcgccccactccccttcctcggcgtcctccatgatgtacaggttcgtgtgattctgccttcctcacgctctggccgttggg

SEQ ID NO: 6334 - DNA, 1044 bp, Setaria italica
  Peptide Sequence Number=SeqID_72308
gacatgaggcgggacctcacgtggtgggacctggtgtggtttggcgtcggcgccgtcatcggcgccgggatcttcgtgctcacggggcaggaggcgcacgacgccgtcggccccgccatcgtcgtctcctacgtcatctccggcgtctccgccatgctctccgtcttctgctacaccgagttcggcgtcgagatccccgtcgcaggcggatccttcgcgtacctgcgcgtggagctcggcgacttcatggcgttcgtggcggcgggcaacatcctgctggagtactgcattggcggcgcggcggtggcgcgcgcgtggacgtcctacttcgccacgctgctgaaccacaagcccaacgacttccgcatccacgcgtcgtcgctctccgccgaatactccgagctcgaccccatcgccgtcgtcgtcatcgcgctcgtgtgcgtcttcgccgtggtcagcaccaagggcacctcccgcttcaactacgtgctctccatcgtccacatcgccgtcatcatcttcatcatcgtggccgggctcaccagggccgacaccgccaacatgcgggacttcatgccctacggcgtccgcggcatcttctcggcgtccgccgtgctcttcttcgcctacatcggcttcgatgccgtgagcaccatggccgaggagaccaagaacccggcgcgcgacatccccatcggcctcgtcggcgccatgacgctcaccaccgcgctctactgtgtcctcgccgtcacgctctgcctcatgcagccgtacggtgccatcgacaaggacgcgcccttctccgtggcgttcgcggacaggggcatggactgggccaagtacatcgtcgccttcggcgcgctcaaggggatgaccaccgtgctgctggtcggcgccgtcggccaggcgcggtacctgacgcacatcgcacggacgcacatgatgccgccgtggctggcgcaggtgcacccgcggacggggacgcccgtgaacgccaccgtcgccatgctcgccgccaccgccgtcatcgccttcttcaccgac

SEQ ID NO: 6335 - DNA, 189 bp, Setaria italica
  Peptide Sequence Number=SeqID_72309
gccagtttcgtcatacaacgaaaaattttagttacgagtgcagttgggtctgataacatcaaaaggtacatccaagagcctaaagacaccataggtcataggagaacaggtggatcatggtatctgtgagagattggaagcaatggagatcgaagttatgggcttgtaggaggtcaatgccagtagtaa

SEQ ID NO: 6336 - DNA, 730 bp, Setaria italica
  Peptide Sequence Number=SeqID_72310
ttccagctgagcaaatatgagaatgtctgatagaaggaaagaaattacaatatataggatggggctaggactgcagcgttcatgttttaccgcccaaaagagcgacccggtgtttctggatcacctgagccaggttgagatcaaacagctcacaccgaatcggcatctccatctcatagaatgggttcttcagaacaaagtccgtgtaaagctcgtatatcaccttcagcagagtctccatattttgtgcgccagtttcacatacaacgaaaatttttgtccctgaagcaatcagagcagatcggtaacatcttaggtgtatgtgacagtaactagccgaataatcaataacatatgagcgcagctgggcctgataacagcaagtggtgtatccatgcttcccagttcccagtgattgaagacacaccaccatagcccatatggggaaggcagggatcatgataatctgtgagagattggaagcagtggagattgaagttgtgggcttgtaggaggtcaatgcctgtacagccagggataggggagagctgctgggagatagcgtgcattgaatgccaaagacttgccaatctaagactgtcattggtgtccatcctccctgctgaacaatagtccttgtagtatataaggccaccagacttattaatgatgaaaaggctgtagatagctgctagtgccataatcacaaagggtggagtagagataaagg

SEQ ID NO: 6337 - DNA, 862 bp, Setaria italica
  misc_feature (852)..(852): n is a, c, g, or t
  Peptide Sequence Number=SeqID_72311
agctattatttgcagcaacatttttctgtacgcaaaactcaaagttacatcacatcacggagaagattacagatgagcaacacactattcaagtaatcgatgatacacaccggtagatcttagaattccatctgagcaaatctgtgtaatttagagaaaggaaaaactacagggtacatgatggggtttagaccataggtttccaagtttcaccgacccagaagcgcaacacggtccttctggatcaactgtgccaggttgagatcaaacagctcacaccgaatcggcatctccatttcatagaacgggttcttcaaaacaaagtctgtgtacaactcgtagatcactttcagtagcatttccatatttggagcgccagtttcgcatacaacgaaaaattttgtacctgtgagagattggaagcaatggagatcgaagttatgggcttgtaggaggtcaatgccagtacaaccaggggtaggggagagttgctgggagatagcatgcatcgagtgccagagactagccaatcttagactgtcattggtgtccatcctccctgctgaaacatagtccttgtagtatataaggccaccggatttgttaatgatgaaaaggctgtagatagctgctaatgccatagtcgcaaaagaaggtggagtagagataaaggtaaatttcctgtatcagcagctaaaaagggatcgcgacccacgtccggttggatgaaggcggtgatttctctggaggcggctcccagttacctcagtccgttacgcggccttgggatgccgcgggcagccgggggcacagcggccggcgggcgacgggcgttgggatccccgcacccgnaggcgccagg

SEQ ID NO: 6338 - DNA, 426 bp, Setaria italica
  Peptide Sequence Number=SeqID_72312
taaaccctattttgatttaccaagcgaacaagcaaatgagagcagctcctctggaggaaccaactcaatttatgcagaacctattcctgtaacatctcatttacaaaggagtgcactgttaaggaggcatgagagcttcactgaaggagcaccattcctcagtgactttttgcaagatgcacggccttcccgttttagaccatactttgttacagaaaacatggctaatgaagaaatcacagatccagttcttgaaggagaaactagtgaaaagagcaactccaaggccagttcagttcaagattcggatagtgcttcatcagttgccgatcaagaaagccagaaggacgttttggaggatttctcaaaccaaggacaacaatcttcattcagtcagacagatgaacatgcacatatagctcggca

SEQ ID NO: 6339 - DNA, 548 bp, Setaria italica
  Peptide Sequence Number=SeqID_72313
gtaactaatattaaagagttgttgtttatttcagcatcttggtggcggctgtatgaaactgaagcaccagctttacaaaagttggcaacaaggatcctttctctgacatcaagctcttcttggtctgttattggagatgcagtgggagcagatcaacaacttgagctgaacttgtgcagcatattgcaggttccagagaacctcttcgatggacggtcgggttgaggattgggcagataggcatttgatcatgatagaaaccactatggacaaggagtcctgtgatgaagtgccaataacgactgaatccagaacttcctctcgctcttcctggcatgatattgacgcaaccaaatcatttaaaacaaaagggccccctttttcatgtaattttggtcccataagtgcttccagtagaatacaaccaaaggagtagacatcatcctccgaatcttccgtttctgcagcattgttttgtaagtatcttttctcttctactaacctcaatagtttagtaataatactacctactagtagaattaatacga

SEQ ID NO: 6340 - DNA, 949 bp, Setaria italica
  Peptide Sequence Number=SeqID_72314
tactagaaagttagaaattaatacttgtttatgcttttgcaggaactgttgttcagcaagaactttctgacagcttcttctgtttgaagccattaacaccagagaaagcacaagcacaataaacaaaataccgacaacagtgactacaagtccaacatccttgtttgatcccttatgagattgttggcaatatttagcttcatgctggtgagcagggccaacactaaagcaattcccatcaaacttaacgaccttgttattcatattgccattcagacaagcaggcagatcacctgtgagtcggttagtggacaggtccacaaagcccagagtactgctgcatgttaagctactcgagagtgatccactaagcatatttgctgccaagttcagataactgatgttggggagagcaaagagcccttcaggaggactccccacaagaaagttgaatgagagatcaaggtgctgaagccggtttagctcaccaaactgcttgggaatttcaccctttagtgaattcttgctgagtaagattgttaccaatgctgtaggcatctctggaagatctccatccaactgattgtcccttaaatccagcatctcaagtttatttaggtaggctaaatttggaacatcccccgagatgctattgccagcaagcgcgagctccgtaagcatggcagctttgccaattgatgctggtatggatcctttcagcctgttactctgcaaccgaagaacagtgaggtttgagaacgagtcaagccaatctggcacactttcattgaaatagttacgatccagtgtcacggtatggagctttgacatgactgaaagcttaggagggatcgatccatacagaaaattggagctcaaatcaagcacttcaagggaagacaagcggtgaatcttatccgggaggggaccccataggcccaaagacaca

SEQ ID NO: 6341 - DNA, 1643 bp, Setaria italica
  misc_feature (1)..(47): n is a, c, g, or t
  Peptide Sequence Number=SeqID_72315
nnnnnnnnnnnnnnnnnnnnnnnnnnnnnnnnnnnnnnnnnnnnnnngtagtgaacgcagcatgtgctgcatttctggattgacgacgggggtgtgaaattcatggcaaaatgctggaagctctacataacaccatggtgacgcactcgttctgctagcagggaaaatgttaccgccgccggctatccttcactgggagtagctagataaccatatccccgctaagcttacagaacttagcatgctatttaaactgcaaaaaatatacagatgccactgggttccagattgcttccatgttgctattttcaggtatgctaacatgcttgtgaggaaacttctgatctctgatcaccatcagttgtcacctgaacttgtgcagcatattgcaggttccagagaacctcttcgatggacggtcgggttgaggattggggcagataggcatttgatcatgatagaaaccactatggacaaggagtcctgtgatgaagtgccaataacgactgaatccagaacttcctctcgctcttcctggcatgatattgacgcaaccaaatcatttaaaacaaaagggccccctttttcatgtaattttggtcccataagtgcttccagtagaatacaaccaaaggagtagacatcatcctccgaatcttccgtttctgcagcattgttttgtaagtatcttttctcttctactacctcatgtttgtatatctcctctgtgattatcgataatccatagtcgctcaactttgacacaaggtgttcgtcaagcaaaatactagaagattttagccggttatataaggaaccaggaattattcctgtatgtaggaaatgaacagccttagctatggcaatcagcaactgcagcctatcacaccactttagggtcttctctggactagagccagaaagataagaagagagagttccaccaggaacatattcatatacaagaaataccctcttcacacttgattcatcaactgcactatcaatgcagtgccccaagaggcaaaccaaatttgggtggcgaagctttgcaaggagatctaaacgaagctttaaatttctgattgaatatctctggtgtaatgccaaacatcttatggcaatcagggtgccattctctagctttcccttgtatagctttccaattgctccctcgcctaaaaatgctgacctttcaaaactttttgttgcttccttgagttcctctaaagaaaatatgcgatatgaaggctgtatttgtgttcctaatttgacagcttgagatatacaccttgcattaactaacaattctgaggacattcctgaagttgaattatcttgtttatgcttttgcaggaactgttgttcagcaagaactttctgacagcttcttctgtttgaagccattaacaccagagaaagcacaagcacaataaacaaaataccgacaacagtgactacaagtccaacatccttgtttgatcccttatgagattgttggcaatatttagcttcatgctggtgagcagggccaacactaaagcaattcccatcaaacttaacgaccttgttattcatattgccattcagaacaaagcaaggtactaagtaatttacttaacctttgtttgttagtttcgtta

SEQ ID NO: 6342 - DNA, 1065 bp, Setaria italica
  Peptide Sequence Number=SeqID_72316
tgtttaaagtttcttttgtttggttgatggggatgtgaagccatcaatgggtttcctatatggagaactactgaaggtaaatagagagatcaaggaagcctatggcaatgttcagtcccgctacaacgaagttattgctattattgacaagaagatgaaaggaagactagattctccattgcatttgactgcctatctgctgaatccatactacagctatggtaacctatcaatctttgataaagccacaataacagaaggatttatcagctgtgtagagactttttatcatcatgatgagaagcaagatgaggctgtcaacactgaactaaagaagtttcaaaatagagaaggaaatttttaacaagaagcttgcaaggagttgtgaaaaatttgattacaatccagcatcttggtggcggctgtatgaaactgaagcaccagctttacaaaagttggcaacaaggatcctttctctgacatcaagctcttctggttgtgaaggaaattggagtacatttgaaatgatacacactaagaagagaaataggcttactacaacccgactcaacaaattggtctttgttcaattcaactccaagttgattaataagaaagaaaggataatgtcaaagaagaccactgatgttctcttgtctagtgagacaactgaagctcaaggttttctgtatgaagatggagataattgtgcaacagttgtctatagagatgaggaagatgaggagatggaaggtacagggataccttggtctgttattggagatgcagtgggagcagatcaacaacttgagctgcgtagaagtgcaagagtgagataactttataaaggagaagaatttgagtccgaagaagaagagtttgatgatgatgaggatggatatatggaaccctattgaagaagatatggcagtggggctttatcaattagacaattatcatgtcatgtttatcactttatcttttaatttatcttcaacttatgctgaaatactatatttatatatattattcagctatatatgctggaaaaataaaaaaaaaaaa

SEQ ID NO: 6343 - DNA, 429 bp, Setaria italica
  Peptide Sequence Number=SeqID_72317
atgagctaatgtgaactttcattacttgttgttgaaaatcacctagtttgtgtatagaagctagtgaaagtatcaaaagtaagtttagcattgcaaactgattacccttttttaacccttaagcacttgatgccaaatttaaaaatatttaatttcaagtacaacattgtagacatgtacttgatcctgatattagccacttcagattggtcaatctgtggcatggttttgtccatcccaatattcaatgtacttgagcatgtagaagccgcagtcatatatatctgccagccaaaaaaaagaaaaaagtaactgatgtagttacttcatgtggatgtggtgtggaaaaaaaaggactagtgaggaaaggtgcaggtggcgcatggtgaagaaaaaaaaaggtacagattatgaaaataaggtagctcc

SEQ ID NO: 6344 - DNA, 366 bp, Setaria italica
  misc_feature (360)..(360): n is a, c, g, or t
  Peptide Sequence Number=SeqID_72318
cactgactttggatgcacctcgaaaatgtgcaaaatactggaataatgatatcagaacaagttcttgaataatggaaattaaaacaaataagtgagctataaaaagagagtaggtgctaagcttgcatgcattgaaggggccaccaaaccgggaattattaacactggttgttgacaatgctacttgaatgctgacttagatgcaactgctacggccatcttcatcacagtcgttaatccccttgcccttgttcccctgcgccgccaggcttcaggccgaggaggcccaggcagaagcccccgccgtcgaggaagcgcgaagcgcctcgacctgaggctgagccgctccagccgccccgnagtagg

SEQ ID NO: 6345 - DNA, 552 bp, Setaria italica
  Peptide Sequence Number=SeqID_72319
taggactgaaacaagctaagttagcatccatcagatctatgagctgttcatatcctgtatacataacttgaatcacagtgactatagtacatagcatatttcccccacacacaaagaaaccttgttttttgactgcttaaacatttagtccttgcatcctgtaacaaataagatatcacaagtgcttcccccatgtatgtggctccctccatgaatgtgactcgctggatttcagttttatatctctattcccttttttaacccttaagcacttgatgccaatttaaaatatttaatttcaagtacaacattgtagacatgtacttgatcctgatattagccacttcagattggtcaatctgtggcatggttttgccatcccaatattcaatgtacttgagcatgtagaagccgcagtcatatatatctgctacggccatcttcatcacagtcgttaatccccttgcccttcttcccctgcgccgccaggcttcaggccgaggagcccaggcagaagcccccgcgtcgaggaagcgcgaagcgcctcgaccg

SEQ ID NO: 6346 - DNA, 510 bp, Setaria italica
  Peptide Sequence Number=SeqID_72320
ctgtgcagcactcatctcctgggcatttcctcctgcaatcatccttggcatggctttcaatgtaccggtatggactgaatatttacatcaggctctgtttcaaacatattggattcttttttctgatcttctatgaggattgaactggactagtgcgaaattcccgcgctccaaacgttcgcccaagcctttcaccctacgttcatgtaactctctactgactggagatgtgcctgcttgtaccaccaccagggcgagtacctctacatcggggcagctctctggatcgtcgtgttctgcatcatcgagatgcaaaagccggacaagccgcacaacttcgagccggagatctacatgatggagaggtcggctcgtgacaagctcatcgccgattacaactccatggacatctgggacttcaacgagaagtatggcgagctctgggacttcaccgtcaacaccagcagggaagacatcgtcaaatcaagctagatggttacctactgcaca

SEQ ID NO: 6347 - DNA, 579 bp, Setaria italica
  Peptide Sequence Number=SeqID_72321
ccggcatcagcccggaggactttgagttcggagtgtacgatggacaccacacctatcacgaaggccaaggtcttgtcctaaaaacttcactgtcattgtatccatgttgtactgatatccttgcaagaaggagcactgattgttatgctatgtgatgtggtgtaacaaatcctgcaaacaattgcgatgacgatgccctatctgaagacaagaagggattttgggaggatgtctccgaatggtaccaagaagctgagcctcctcagggctttcaagcactcatctcctgggcatttcctcctgcaatcatccttggcatggctttcaatgtaccgggcgagtacctctacatcggggcagctctctggatcgtcgtgttctgcatcatcgagatgcaaaagccggacaagccgcacaacttcgagccggagatctacatgatggagaggtcggctcgtgacaagctcatcgccgattacaactccatggacatctgggacttcaacgagaagtatggcgagctctgggacttcaccgtcaacaccagcagggaagacatcgtcaaatcaagctagatgg

SEQ ID NO: 6348 - DNA, 1006 bp, Setaria italica
  Peptide Sequence Number=SeqID_72322
caacgtggtgtccggcatctccgcgtcaccgtctgccgccgccggtgctcgccatcgccatggcgcggtgaagcagctgaggataaaggtagcgcagccacagcagcagcggctgcacggccgccgccggcaaagcggcggcaggggcggcgcggtggtggcgagagccgggcccggggcgctgtcggagatcgagccggacctgaacgaggaccccatcgaccggtgggccacccccggcatcagcccggaggactttgagttcggagtgtacgatggacaccacacctatcacgaaggccaagacaagaagggattttgggaggatgtctccgaatggtaccaagaagctgagcctcctcagggctttcaagcactcatctcctgggcatttcctcctgcaatcatccttggcatggctttcaatgtaccgggcgagtacctctacatcggggcagctctctggatcgtcgtgttctgcatcatcgagatgcaaaagccggacaagccgcacaacttcgagccggagatctacatgatggagaggtcggctcgtgacaagctcatcgccgattacaactccatggacatctgggacttcaacgagaagtatggcgagctctgggacttcaccgtcaacaccagcagggaagacatcgtcaaatcaagctagatggttacctactgcacaagcctttccgtgcaaaacaaatcaagtatagcatagctgctaggaaaaagctcttgaatgaaaggaataacaatgtgtgtatcttcatgcctgaggttctcagccctgtaaaaactgagagcctgaaaatctgctttatcctcacataatggatgtatgtcgggcgtctcacaaaagaaattctgcagaatagcgagcacgctgttgcttcaactttctgcgtggtttcttcatgttttctcttatgttttgagaaaacacatgcaggactgattcaccgaagtaactgaacatttagaactgcctgtttgccac

SEQ ID NO: 6349 - DNA, 441 bp, Setaria italica
  Peptide Sequence Number=SeqID_72323
ttcatacttaccatccaccttggccaacaaatctgaaatgcttcagttccactagcaactcatacaagaaagcaaaattgacagcacaggtaatcgccaattaatttattcgattgttcttcgtcatcatctctgtttggtactacattaccatggtagttcaagggaaaatgcagaaaaccacacattaagtcttacatgcgcacgcgcacggagacttcatacaagatacaacgggcctttgccaggcagcagagttccaccgttccatggctttgtattagtattcttcaccagacgcaccaacagcaggtgatccggttgccgatgaggcggtgccctcagacgagcacctgagctgcagctagcctggcgatgggaaccctgaaaggcgagcaagaacataatccagccccgactttgcaaagaatgcaactgacg

SEQ ID NO: 6350 - DNA, 460 bp, Setaria italica
  Peptide Sequence Number=SeqID_72324
caaagacgcctaaaccgagactccccatcacagtgaacaaacacttccaaagcaaatgaaggtggtgatgtagcaccaacaagggaaatgtttggcgtagaaggagctgcattctgctcaagaaactcacaagcagtgatcacaactggttcagaaaatagcacctcgtcgacgtactcgtccagctgggagtggaggatcgtctgcgcgaacagcacgaccggctccggtcggcccatcgccgtgaatcgattacgcccggacggcccggcttggagccgctgttagcctcgccagcgcgagccaaagcaggcagagaggcctaaaaccctagctcccgccggagcgtgagaggggaggagaggggacgggaagcctccgcgagtggagtccgcagcgtagcaaggccgcgcggttacagctccagttagccctcctctttgacggcgtcggaccgcgg

SEQ ID NO: 6351 - DNA, 903 bp, Setaria italica
  Peptide Sequence Number=SeqID_72325
taagtgattctgtcagaacttgttatttctttttttcccttatcactaccagcattgcttatagtgacatggcttgatctttgcgaactaacggttcagttatatcgccaagccctaatgcgaatggtttttatttttttctgaatgtattcagttactaataatcataatcaatttcgtaaatgtttgttttggtttcctcctttagcattgcagcactatgttatttatgaaaagaaccagatgcagcagcatagcaggttcttctctttcctcctaaccctctttgtcataactgaacacacgaatgcacgtacatgcatacatggattcaaataaaactgcattgcgattccttttacgctccttcaaacttctcttgtggaatctatcgtatgttccttcaatctggcaattcactctttattttgacttctgtatctttatttatcgtgtacctgttgtatctaaagacacatgtaagtaggggtattatttccactttatcatctcctctttatcatgtacttgtggaatctatcgtatgttccttcaatccggcaattcactctttcatgaacaagcctaaaattataatgtctaacgcagtaaagggtttgtagccttcaaacaggtgttgataggttgccactgcgagttatttttcttctagcagtttcgagtctttcagttggcagcaattctatttctcttagatttacctgactgtttagaggtgagggccgccatgtttgaaggacaccatgtttgatccgaacatgtttcttcccctttagcatacagcaggcaagtgcacggcctaggttagtacgtgatccctactctttttctcatttcttatctgtttcatgttattgctctgcaaagaatttttgtctactt

SEQ ID NO: 6352 - DNA, 1124 bp, Setaria italica
  Peptide Sequence Number=SeqID_72326
atgttattgctctgcaaagaaattttgtcactacagccattgtccaattagtaggtgtgtttcatggacacatccaatgggtctggcaatactattagatataattcttgcatctttgtatgaaactggtatcatcacagagatttgcggatcctcactgaaaacttcagaaatctaaaagagcttttaactttgcaaaatgcataactataaactgtaagtatgagacatttttcagaagtatgttaactaattataagatatgttgaagaattggccattcatctccatgattactaaagttagtaatatactgttgcttgagatgtagctctaggaatcagacaattacttttctttaggttatgttataagctttatgttttacaggtctgattttcgtgttagcggtgatgagcttgcaatagttattagctcaaggagagatattgaagaatcgcaaagtggctagttgccgtatcttcaatccatggagcatttcaaacaccagaatgaggaggcattgattatgcaagacatcgacatgaaagggcgtttgtctgctgatcgaagctttctacctgaaacctatgttacctgggagtaacagctatgtgcctatatctacctttctaatatacctttaatttcacataataaccttgttaaaatctatgtaatggaagagaaaattgtgctgtttggaaattgcgcatggtttttacaaagccttccattcttttgattctaaatcttgtgactttgtgatgtttttttaaaaccattcgatttttgttaaactctttgtatttgtcgaagattataggatacctatgcatcagagatagtccttttttatttgttctactggttacctggacacaacatggctctgcttgtgcaaatgttcctcagcaagaaatcagaacccacaacgcagcagatggtgcgtttcaaagaaaatgtattgataatattgctactaaattcggatttggaatttatgtacttttcttctgcttatgtatccacaagggcaaggttaatggctcaccatttcatcatagttaaatattatcatattattgcccccactagagttcaatgatgcacaatgcttgtta

SEQ ID NO: 6353 - DNA, 271 bp, Setaria italica
  Peptide Sequence Number=SeqID_72327
ttcatgaaccaggagaaaatggataggaaacagtataattcatggtaagatttcaagatctcaggtcagttcctaatttcatacaagaaatgaaggtgtaacaatgccacatgatatctctttgtgtttatatacttaaaggttgcatatgagtctaccaggtggaaacagaggcctggcaaccaattcaataaatctaacctacagataataaaaacaactgctcagtcaggagcaagtaatttagatcctactagtctaccacaaccta

SEQ ID NO: 6354 - DNA, 643 bp, Setaria italica
  Peptide Sequence Number=SeqID_72328
gagctcctctgggcggccctgtggctccaccgcgccaccggcagggccgactacctcgactacgtcgtcgacaacgcccactccttcggcggcaccggctgggccatcaacgagttcagctgggacgtcaagtacgccggcgtccagatcctagcaacaaggttgctgctgagaggggagcacgcggcgcgccaccggagcacgctggagcagtacagggcgaaggcggagcactacgtgtgcgcgtgccttggccggaacgcggacggcggcgcggacgccaacgtggagcgcagccccggcgggatgctctacatccggcagtggaacaacatgcagtacgtgaccagcgccgcgttcctgctctcggcctactccgactacatggcagaggccggcgtcgtcaccgtgcagtgtggcggcggcgaggccgtggcggcggaggaggtgtttgcgctggccagggcgcaggtggactacgtgctgggcaccaaccccaggggcgtcagctacctggtcgggtacggccccaagtaccccaaccgggtgcaccaccgcgccgcctccatcgtgccgtacaagcacagcaaggagttcatcggctgcacgcaggggttcgaccactggttcggccgccggagct

SEQ ID NO: 6355 - DNA, 573 bp, Setaria italica
  Peptide Sequence Number=SeqID_72329
tgctgctgagaggggaggcaaccttgttgctaggatctggacgccggcgtccagatcctcgctgcaaggttgctactgaaaggggagcactcgccgcggcacagggagacgctggagaggtacagggcgaaggcggagcactacgtgtgcgcgtgcatgggccggaacgcggccggcggcgcggaagccaacgtggagcggagccccggcgggatgctctacgtgcgccagtggaacaacctccagtacgtctccagcgccgccttcctcctcaccgcctactcccgctacctctccgactcggcggggcccctcctcctccgctgcccccgcggcgcggcagcgccggccgacctgctggccctggcgcggtcgcaggccgactacatcctgggccgcaacccgctggggctcagctacatggtcggctacggccgccggtacccggtgcgcgtgcaccaccgcggcgcctccatcgtcgcgcacaaggccaacaaccgattcatcgggtgcatgcaggggttcgacgactggttcgggcggggccgggccaaccccaagtgctcgccggcg

SEQ ID NO: 6356 - DNA, 1816 bp, Setaria italica
  Peptide Sequence Number=SeqID_72330
gcggcgcggaggcagccgcatgcggaggcgccgcgcggggtctctcctcgtgcaatgagcggcgcgggcgccgcgtcgtcgtgccggcggcggcagctcggggtcgcggttctgctgctgctggttgctctcgcggccgttcttggtggagcagaggggaaggcgcacaactacgaggacgcgctgcagaagagcctgctctacttcgaggcgcagcggtcggggcggctcccgcacagccagcgcgtcgcctggcgccaccactccggcctcaccgacggcctcgagcaaggggtggacttggtgggcggctactacgacgccggggaccatgtcaagttcggcctgcccatggcgttcacggtcacgatgctctcctggagcctgatcgagtacggcggcgacgtcgccgcggccggcgagctcggccacgcgctcgaggcagtcaagtggggcaccgactacttcatcaaggcgcacaccgaagcccgacgagctctgggccgaggtgggtgacggcgacacggaccactactgctggcagcggccggaggacatgacgacgtcgcggcaggcgtacaaggtcgaccgcgaccacccgggctccgacgtcgccggcgagactgcggccgccatggccgccgcctccatcgtcttccgcgactccaacccgcactacgcccacctcctcctgcaccacgcccagcagctgttcgagttcggcgacaggtaccagggcacgtacgacagcagcatcgcggaggtgcggagctactacgcgtccgtgagcgggtaccgcgacgagctgctgtgggcggcgctgtggctgcaccgcgccaccgggcgcgccgagtacctccgctacgccgtcgacaacgcccactccttcggcggcgtcggctgggccatgaccgagttcagctgggacgtcaagtacgccggcgtccaggtcctcgccgccaagctgctgctggagggcgacccgcaggccctgccgcaccgggcggcgctggagcagtacaaggcgaaggcggagcactacctgtgcgcgtgcatgggccggaacgcggccggcggcgcggaagccaacgtggagcggagccccggcgggatgctgtacgtgcggcagtggaacaacatgcagtacgtgaccagcgcggcgttcctgctgtccgcctactcgggctacctctcctcctcgtcctccggcggagagtccgtggcgtcgtgcgcgggcggcggcacggcgagcgccggccgaggtgttggcgctggcgcggtcgcaggtggactacatcctgggcagcaacccgctggggctcagctacatggtcggctacggccgccggtacccggtgcgcgtgcaccaccgcggcgcctccatcgtcgcgcacaaggccaacaaccgattcatcgggtgcatgcaggggttcgacgactggttcggccgcaagggccgccaaccccaacgtgctcgccggcgccatcgtcggcgggcccgaccgccgcgaccgcttccgggatcaccgggagaactacatgcagacggaggcctgcacctacaacacggcgcccatggtcggcatgttcgccatgctcaacaggctggcccgggccgaatcggcggcggccgcggcggtgcaaccgcagcagcagccggcgagcagtagtcctgccgcggaccgaagtgtaaatagatagggatacagaggggggcttgtacaatttttcccctattcttttgttcattctttctctctactagaggtggagccaaagtgaaggcgctcttcacaggaaattatttgtatacgag

SEQ ID NO: 6357 - DNA, 861 bp, Setaria italica
  Peptide Sequence Number=SeqID_72331
taccccttccatgtagcagctgccaccaatgatgcagaggatgtattggatgtgcttactgatgatcctggactggttggaattagcgcgtggagcaatgcacgggatgagacaggcttcacaccagaagattatgctcgccagagaggcaatgatgcttacctgaatctagtccaaaggaagattgataagcatcttggcaaaggtcatgttgtcctcggtgttccaagcagtatgtgctctgtaataactgatggtgttaagcctggtgatgttagccttgagatctgcaggccaatgtctgcatcagtgccaggttgcctcctctgcacccaacaggcgcgggtgtatccaaattctagggcaaggaccttcctttaccggccagcaatgctaacggtgatgggagttgccgtggtttgtgtctgtgtgggcatacttcttcacacctttcccagggtttatgccgcccccacattcagatgggagttgttggagcgtggaccgatgtgagaaggtttaggatgaaataagcctagctttcgtttgtaagttgagagctttagtgtagtgggtaagatcaaaggaacataattgccgtgtgaagaagttcctttgtatttaaagcaggatcctgtcgctgctgtaagcttacacatcgtcaatatcaactatatttacaacctaacatgcttccattacatccatccatcttttttattgtagaattcattcttttcggagcttttgtgaaccatcagaataaaaacatgttcttgtttgtatatatgttgacctcttgtccttatgtgatacaggacaggttaagaattgagacataatatctacacttggaataag

SEQ ID NO: 6358 - DNA, 1530 bp, Setaria italica
  Peptide Sequence Number=SeqID_72332
ggagatgctcagtgccggactgataagattgtcttcaagcttttcaacaaagttcccagtgatttacctccagttttgcggtcacagattcttggttggctgtctagtagtcctactgatatagagagctatattagacctggctgtattattctaacagtatatcttcggctagttgagtctgcatggcgagagctttctgataatatgagcctgcacctggataagcttttgaatagctccaccggtgacttttgggcatctggcttggtatttgtgatggttcgacgacagttagcttttatgcacaatggtcaaattatgttggacagaccactggcatccagttctcaccattactgtaagattttacgtgtcagaccagttgctgcaccttattctgcaacgataaatttcagggtagaaggttttaacctactcagtaattcctcaaggctaatttgttcatttgaaggacgttctatattccaggaagacacaggtactgtagcagatgatgttaattacgaggatagcgacatcgaatgcctcagtttttgttgttccatccctggtccaagaggaagaggatttatggaggttgaagatagtggatttagcaatggcttcttcccctttataattgctgagaaggatgtatgctccgaggtttctgagctggagagcatatttgagtcctccagtaacaaaaatgcagatgccaatgatattgccagggaccaagccttggagtttctaaatgagctgggttggcttcttcatagagcaaacataatgtctaaacaggatgaaatggatacacctcttgctaccttcaacatgtggaggttcaggaatcttggtatatttgccatggagcgggagtggtgtgctgtggttaaaatgttgttagatttcttatttattggccttattgatgtgggatcccgatctccagaagaggtggtactttcagaaaatttgttgcacgctgctgtgcgaaggaagtccgttcaaatgattagatttctgctgagatataaaccgaataaaaacttgaagggaactgcacagacatacctattccgaccagatgctccgggcccttcaacaattaccccccttcatgtagcagctgccaccaatgatgcagaggatgtattggatgtgcttactgatgatcctggactggttggaattagcgcgtggagcaatgcacgggatgagacaggcttcacaccagaagattatgctcgccagagaggcaatgatgcttacctgaatctagtccaaaggaagattgataagcatcttggcaaaggtcatgttgtcctcggtgttccaagcagtatgtgctctgtaataactgatggtgttaagcctggtgatgttagccttgagatctgcaggccaatgtctgcatcagtgccaggttgcctcctctgcacccaacaggcgcgggtgtattgggccaaggacccttttgtttgtctacgttctttgttctttgtttgttcgtttaaggtttaa

SEQ ID NO: 6359 - DNA, 570 bp, Setaria italica
  Peptide Sequence Number=SeqID_72333
gcgcgacgcccggctggcgcaccacgtcctccaccagcaccacccgtccgccatcgtcgtggaggtcgcctgcacccgctccgtcgaggagccccggcggggcatctccgtcgtccggagatgaagaattctactcgccgcgaggctcgtcgacgaagacctccagctcgcgcaggacgctggcaacggcagttcaggcggcccttgaagcgcgcgaccgctcgaggaccccgtcccctggttcggccgtgagcacgccgtcctacccgtcgtcgcctggtgcgacgctgtccccggcgccggcctcgccgcctgccttctccagcccaggcgagtccggccggcgctccgtcaagtcaagatcggagagcgcgcgcgtcgtcgtcctcccgccggttcctccgactccgccgccacctcctcccttcgcaccgacactgccaccacctccacctcctcgccggaaaccaccgtccccgtcaccaccgtgctctcccctaaacgacaaatcggctctcagatccagcaccgacgccatctcaagaaatccattcgtccacccagcacacc

SEQ ID NO: 6360 - DNA, 664 bp, Setaria italica
  Peptide Sequence Number=SeqID_72334
atttcaaaattgcaggatgtatgcttgactgctcagaagttaaatgcacagtgcagaaatttctaagcagtcaagcataacatcctgcaattttgaaattgcatctgctacattattcaaccagatagttaatgtatcagtaaccacatagatgcgttatgcatagcttgactcatggtggatatgtgatcgaactgttttggagcgagttgagcactcaagcctggggcttatcggcggccggctccggctggggctgggcctgcgccggagtgagcgccttcttgatggagacggcgtggatctccgccatgtgcggcgccagcgccgtgttcaccatccggtgccgctccagcagccgcttcccctcgaacttctccgacaccacctcgatctcgtagctcgcaccacaccctccagatgtatccgtcaccacgagatgggaagggctcagagcggaggtgatggccgcctcgacgtcctccttggtgacgcccatcgcttcttcgcctcctcttcgccggtgtgttcaggtggtgcgacggattggcaagcaaagacgacggctttgccctggcgaccgaggccctgtttatttcagaaagctgtgtctttcggcttttgcttaccagaaggtggcttttcgaaagctggctacttaaga

SEQ ID NO: 6361 - DNA, 272 bp, Setaria italica
  Peptide Sequence Number=SeqID_72335
caaaggtccagtgcttatgccatatgccatcagcactggacctttggacctcctcagcctcctacctgacttccattatcaatagattgcaaaactctatcaggctgtgaagggatatccaataattctgagtttgcaacaaatggcaccttttcttcattaaggttatcgttctgttcgtttatctgaaccttgccatccaacatttcctttgagagagaagtatgtggatggcaaggttcagataaacgaacaaatggcaccttttctca

SEQ ID NO: 6362 - DNA, 1846 bp, Setaria italica
  Peptide Sequence Number=SeqID_72336
aagaaccgaaaaccgaaaacggcagcagtaaaaatttacaatcagcgcgagagcgagcgacggggacagcagcagccgcaggcggcggccaccaccgggcaccgcatgggctccgacgccgatacctccgcgggggcggcgcgggagagggaggcggagatcgagaaggccatgcgcgcccgcgtcccagacttcaagaagcaggccgattccttgacccttgaaggagttaggagagcactggagaaggacctaggtttggagatatattcacttgatgcacacaaaaagttcataaagcaatgtgtagacaaggtttttgctgaatctgatgatgaaaacacaaatgataatgcatcagaggatgctgaagctaaagatgatcatttatccaaagaaggatcggatgatgctaaaccaacacctgtttcaaacaaaacaacctccagtgctgatgctcaagtcgtaaaatctagtgagacaggaaaagatcctgaggaagaaaaggataaaatttccagcagtgatattagtgaagacatgataaaagaagccattgaaaagagggcttcttattttagaaagaactcagaaactcttactttgcaaggagtacgccgtactttggaagaagatctcaagcttcagaagaaagctttagatgcctacaagaactttattactacacaattagacaaggttttgcaagaacctgccaatggaacaaagaaaaaaagtaaaaagggacctcccatggatactgaccgaaaagcaagtaaaggctctaaaagagcccgtgaagactcaaacagctctgaattagaaaatagccagagtgagatggaagatagcgatgaagatgcaaggccaagaaagaaaagggcagaaaaacctaaagtcatcaaaaagcagaaaaaagttccagatgagaagaaactgtcaaccctaaaggctaaaaaagttgcaaaacaagattcagatagaagtgctgatgaacagggtggcagctcagcagaagaggataattcacgttcatctgctgaggaagataacaagagaaaacgacaacaggctccagctccagctccagcttacgggaaacatgtagagcatctgaagtcaataatcaagtcttgtgggatgactattccacctactgtgtatcggagagccaagcaagctcctgagcacaaacgggaggcctgtttgataaaggagttagaggatatgcttgaaaaggaaggattgtcaaaaaatccttctgaaaaagaaatcaaagcagtgaagaaaagaaaagaaagagcaaaggaacttgagggcatagacacgagtaatattatcactagttctcgtcgccgaagtacatcaagcttcatacccctgccaccaccacctaaaatagaagctgatagtgatgatgatgaagatgatgatgcgaaagacgatgatgaagatgaggaggagaatctagaggatggagacgcaggtgataatgatgatgcagaagctggcgatggttctgctgatgatgctgcaaaggacagcgattgattcctgcgccagataggtggaatcagttctgaccatataggttcagcttcatgttgactttcggcgagttggctgggtttcgtggatgcctttggatgtaatcagttgttcaggagctttatcttctgatgtttattcatgtgtgattggaacatttgctagcttcagcttcagtgaaacatcagggaacagattgttcttgtaattatgtacaactcgcagcatcttgttcgtcgtgtagatgcaagcgtcgcagaattttaagtagtcggtaattaagtactgtattgtattt

SEQ ID NO: 6363 - DNA, 302 bp, Setaria italica
  misc_feature (24)..(24): n is a, c, g, or t
  Peptide Sequence Number=SeqID_72337
ccgtcccctccgtctcccgtccgngccccgcccccgcgggagacaggagagccgccgggcctggaagcttcttcgcggcgtcgcggcgccagctcgcgcggttgccaggtgcttgtgaatctggtgcagctatatagagcttcttgtttcattgttgtcctcaggaagacggttttctgaggctgctttctttgtctactgtaaattgatgaaattttggtgaccatactatggacaaaaataccccttgtcctattgagggcaatggtgaggttgaaaatggtgtgagctccagtcaaata

SEQ ID NO: 6364 - DNA, 1919 bp, Setaria italica
  misc_feature (1)..(35): n is a, c, g, or t
  Peptide Sequence Number=SeqID_72338
nnnnnnnnnnnnnnnnnnnnnnnnnnnnnnnnnnntgtctccgactcagtcgcactagttttttttttcagagaactgaaagaatcgagaattttataattcctagcgtcactgaaaatcaacaggatagttccatgggcaagcgtgactctggcctatgatacaacaccaccaggtgacagaagatcattctacacctttttatagggaaacaggcaaaagcacacgcgaaacaaaggtgaagatgtaaggagcttaggtatcaagcagatccaaactcagccatccacttctcatgcttctctatgtctgcgggtgagacactcttctggaccttgctcagagcctccacaaagtcgcacatggccactgggtccttcgctatctcgtccttcgccatgttcttgatctcatcgcgggtcttgccagctatctttcgcctcataccgttcattgacgcgtcacggcaaacatttgtaaggtcatctccactgtaaccttctgttttccgagcaacttcatctatgttaacatccgcagctatctgaactgttctaaggttaatgttgataagtgcctttctactttcaaaatctggaagtggaatataaatacgcttctccagcctccgcctcagtgcttcatcaatatcccatggaaagttggtagcagccagaaccataacaattttcggttgaccatcttcagtggtagagctattgtttacaccatcaatttgcactagaagttcagacttaacccttcttgatgattcatgctcaccggaagccccacgggatgtacacaaggagtcgatttcatcgatgaaaattgtacttggagcataggccctcgcaaggtcaaataaacaacggaccatgcgctcactctcgccacgccatttagaagccaatgttgcagacgaaacattaaagaatgttgttccacattctgtagccactgccttcgccaaaagggtttttccagtaccaggtggaccaaacataagaactcctttccaaggtcgacgaataccatggaaatattcgggcatccagagaggaagcacaactgcttcctcgaggagtcgtttggcctcactaagtcctgcaacatcatcccatctcacgcctggagtagagtctagaacatccctttcgagcatggcagctaagtccatatctggaccttcgtactgacccttcttggacttaccttcttcagcatcactactcgcagaatcagccttgcttgaacttgctttccttttctcccaccagtgctagaggcagttgatgatcttactgcagagcttcctttactcccattaggctttgcgctacggctaggtgttccagtccttgatgaaccacgtgcccaggctccatcttgggagggattttcttgcgctagattgacctcttgcaggccttcggttaggtgcatctcttggtggagcccacacatcaggatcatcaaagggtgctggtgatgaagttggatactcatccaacggttggaaatgaaatgatttgttggagcgaataggaggtgacgaggaccgcctcgcaccaggagcttctttaagggactttaattgggcatctaactgtttcacaatttccacttcttcagagattgcttttttgcagttcatccattttgtacgaaccagagcatcatccagagtagttagatgcttgttgatctgggcgatggcgccgtcgaagaagatgatggaggtgtcgtagaggccctcgagcgcgtagtcccgcgcgagcttgaggtggtcctgcagccccgatagggggttcgccatttccgcggccgccgccgccgcggagatccggcgctggggttctcgacgaagcgagtcggatgggaggagacgagcagctcggtggagaagacggggaagg

SEQ ID NO: 6365 - DNA, 325 bp, Setaria italica
  Peptide Sequence Number=SeqID_72339
ctacaattgctgcagaaagtacaatagtagtctttgaataaggctccacttctggatagggatcaggtggagcccaatttacagctttctgccacccaatttccctcttcagaagtggagccttattcaaagactacaattgctgcagaaagtacaatagttgattcagctgttacttttgatcgtaatgattcatccaccccacttcaaagcgcaacaacatgcatacctcctccatcaacagttaggtcagtatcaatgagggatatgggcactgaaatgacttgttgctctcactggtgttcctgtccgggatggttcttga

SEQ ID NO: 6366 - DNA, 1922 bp, Setaria italica
  misc_feature (1918)..(1918): n is a, c, g, or t
  Peptide Sequence Number=SeqID_72340
cacacacactctctctctctcttcaccgcactcccacacctccacgccgcagatctccgcggccggcgcctcccgggggccgccgccatggagtacgagcgcattgagaagccgttccccacccagggcggcgggttctcgcccaagcgcctgcgcgcgatgctgctgggggtggacaagcgccgcaaggggcaagacgcggaggaggacgatgccgacgccggggacgactacggcgccgtgcccaaggcctccgttaaatccgacgccgacgccgaagcgcgcggtggaggtaccatgtgtgaagaatacaaggatgtagatgtggtgagcaccatctcagaatcttcaacctcgcttgagacagggggtgggcaccggtcgcgagatacccactccatgggctccagggtcagggtgcccgaggaggattcgtgtgactctgagagtgtggcttctaactttgaattccacaatgaccgagcggacgccgctcggtcagcggcagcatcagttgttcctcccttctcaaagcctgctccatcaaagtgggacgatgcgcagaaatggattgccagcccgacaacaaaccgtcctagcagggctgctggtggggcagtacccaggaagatggagaaacctagctctggcattgggagactaccagcaacaaaggttgtgttggaggccacggaggagatagatactaagaggattgatccaagccaagagaagagggaaattgggtggcagaaagctgtaaattgggctccacctgatccctatccagaagtggagccttattcaaagactacaattgctgcagaaagtacaatagttgattcagctgttacttttgatcgtaatgattcatccaccccacttcaaagcgcaacaacatgcatacctcctccatcaacagttaggtcagtatcaatgagggatatgggcactgaaatgactcctattgcaagccaagaaccatcccggacaggaacaccagtgagagcaacaagtccaaattgttctcggccaacaactccacgaaggatgttaggtcccaatgcaattggagctgttatcagccatggagaatgtagcaatgccgaattaagtgaacaggatctgcaaacaaaaactaggaaggagataatgcttcttggcacacagcttggtaagacaaatattgcagcatgggcaagcaagaaggaagaggaaaaggatgcatcacttgcactgaaaacagtgcccatggaccaatcaacacagaacataactgaagtccgtgcagctgcttgggaggaggcggaaaaggccaaatacttagccaggttcaaacgagaagagatcaagatccaagcatgggaggatcatcaaaaggctaaaattgaagctgaaatgagaaaaatcgaagttgaagtggagaggatgcgtgcccgtgctcaagacaagctgatgacccagcttgcatcagcaaggcacaacgcagacgagaagcgtgcttcggccgaactgaaaaggaaccgtgcggcagcaaggacggccgaacaggtggagcacatccggagaaccggcagggtgccaccttcgtttggctgctggaactggtgctcgtaggaagcaagctagcgcttttgtctctccctagcatctcctggccatgaagtatcgtcacctgttagtctgttactgtctactagtgaaatgaatatcgaatgtcttgtagaatcgtccatttggattgattcagtagatatgtgacagaaggagaatgaatcacttgtaactatatatataagatgtgtgcctcttggtgtctctgctgtgcagttactgtagtgtcacagatgtctcgaaatcattgtgaagtgaagttcagaatcagaaagttaccaagaaatacaaggactacaattanacca

SEQ ID NO: 6367 - DNA, 221 bp, Setaria italica
  misc_feature (208)..(208): n is a, c, g, or t
  Peptide Sequence Number=SeqID_72341
ttttttttttttaactttttttccccctgaacgcaaggaagatcagaaaacgtttattcccgatttaacctcgcacgcttacatggcagtacgacacatgacacacttctctgcatacaagatacatgctgacatccaaatcatgccgacaacttgcacgcgtaaagccaagtcaccacccttctcacacgtcacgccaccgttcacngctcgaccttctt

SEQ ID NO: 6368 - DNA, 668 bp, Setaria italica
  Peptide Sequence Number=SeqID_72342
ttttttttttttttttttttaaactttaaaaacaagtgattagcaagactacactacactgaaaattagatttcacaatgtcatgggttctccagcataatgcaaatgcagtattattgtgtcgataccagctagctagtgttacattgcaaggcagaccaaaaatttcctgatcaggtccgatcagatcgttcacatatcattacagcatatggctgtcaatatataggaatgttgagaagaacatgactcttctcaaatattaaccagcagaacaagaaacgaagacttgacatcctcgcgacgaattgattgattgggtgattcgatcacagcagagagagtaccgtacggacacatcagagggcgggcacgtatctcttgccgacctgcttggcggccgcggcggcgccggcgagaacccctccgacggcccccgcgacaacggctgaccgcggcccgttggcggcccggaagagcgccccggtgcctagccctgccgcgacgctgttgatccagtcgtcgcggtcgcgggcggcgaccatggcgctctcgatcccggcgtacatcaggcctatgaccccgagcgtgttgccgacgcggcggcctgagctcccgcaggagttgaggacgcggttggcccggatcttggcgggctcccccggctc

SEQ ID NO: 6369 - DNA, 267 bp, Setaria italica
  Peptide Sequence Number=SeqID_72343
ccaaaaaaaaaggttgtgtgcatgaacaaacaagcgcagggcacgcacctcaggcttgcaggccttgcagagcgcgccgagggagttggcgagcgcggaggcgtccaccccgcctccgcggccgccgccgccgccgttcccggtctgcggcggcaggacgtggagcagggtgaggaagtcgcccttgctggcgacgtgggtgagcgcccacatcatggcgtgcttggcgccggagctctggtccaccaccaccatcacgcgcttccg

SEQ ID NO: 6370 - DNA, 468 bp, Setaria italica
  misc_feature (1)..(20): n is a, c, g, or t
  Peptide Sequence Number=SeqID_72344
nnnnnnnnnnnnnnnnnnnngggtttctagatcctggcttttgcatcagcaaagtgaggcagtgaggcacagctacagcagtgtagccaaccaagaggatatataatacacacagcatcacaacagcgtcgcacggacacacacatagatcaggcacacacacactgggacagacagtggaggttattgatgcagttacagctagcttatcgaccttgtttgtaatttaaaagctcagccttggcagtaaaagtttgcacacaatgaggagggcccgtcaccgtcagcgtcagcgtcgtcaagccaggagccagaagttcttctgccaccgggtgctgacgaggtagccaccgacgcccttgctctgccgccgcaccgccagcgtcaggcactccgcccggttgatgcactcctccacgaacgcctcgctcccgctccgcatgaagctgcaccatcaattacatttga

SEQ ID NO: 6371 - DNA, 639 bp, Setaria italica
  Peptide Sequence Number=SeqID_72345
acctggtatgctttactattctttgcctgacaggataagctaaatctgataatagttgaatattctgctgagatctagatataaaaatgattctgaaagtctgagcttcatttttaaacagagcactatggactgacaccataacatattctcccaccctgttactgcccatagttgacctctgagaggttcccatttccaacacacatacgcaatgggcgggataagatagcaagggccacggtgctgagtcacttaccagcttaaccagcagtagggagatggcctgcactggctgagcaccagcacggaggcctccagcttcttcacctggctgaggaccgtggccagcttgggcccttggatcacaagcgcttcaacctccacctcgggcctactggccttgcagagcgtgccgagcgagttggcgagggacgatgcctcctcgcccctgccgctgccggagtgcggcaggacgtggagcagcgtgaggaagtcccccttgttggcgacgtgggtgagcgcccacatcatggcgtgcttggcgccggagctctcgtccaccaccaccatcacccgcttcctcgccgcggaggcagcgtccccctgtttcatgccgccgtagccattggcgccggc

SEQ ID NO: 6372 - DNA, 1124 bp, Setaria italica
  Peptide Sequence Number=SeqID_72346
ttttttttttttttttttattactttaactaggactggtcatttatgcagcattacaggagagtacattacagattacaaaccagagtggagctgcacactggtttgttgggggaagggtcagatctaaggctcttttcgctttacaacaggaggaagcggaacaatccactcacacatacaccgacaaggcagggacaaacgaaatgacagcagatatatggggagtaaaatgtgatcatatagtagtgactaaggctataataacatggttttcaggccaggagccagaagttcttctgccaccgggtgctgatgaggtacccaccgacgcccttgctctgcttcctcaccgccagcgtcaggcactccgcctggttgatgcactgctccacaaactcctcgctgctgctccgcaggaggcagcttaaccagcagtagggagatggcctgcactggctgagcaccagcacggaggcctccagcttcttcacctggctgaggaccgtggccagcttgggcccttggatcacaagcgcttcaacctccacctcgggcctactggccttgcagagcgtgccgagcgagttggcgagggacgatgcctcctcgcccctgccgctgccggagtgcggcaggacgtggagcagcgtgaggaagtcccccttgttggcgacgtgggtgagcgcccacatcatggcgtgcttggcgccggagctctcgtccaccaccaccatcacccgcttcctcgccgcggaggcagcgtccccctgtttcatgccgccgtagccattggcgccggcgccatagtccctcgccgcggcggcccgcttcttggaccaccgccgggagcccctcctcccgccgccgccgcactcctgctggtcctgcagcccgcatcccccgtcgtagccgccgccgccgttgctcgcgctcagctgcctcaggaagcgatcccccgcgctgctcgccatctgctaacccctagctagctagctagctactgggtagctgcgcaatgcgatgcactcgcagctgcacacgcaaagcaagccgaaggtggcgtgttggtgcgaggaggaggatgagtgagtgtactgtgtgcggtgtgatacggctacgtgc

SEQ ID NO: 6373 - DNA, 253 bp, Setaria italica
  Peptide Sequence Number=SeqID_72347
gtgcggtggagaaagaccagttcccggcgtggccgtcggtggacttgaagtagcaggtggcggcgaaggaccggggcggcgcgtaccagaggccgcagcggaggttggcgaccagcggcagcgccggccacagcgccgcgacctccgccacgaaggccgcgtcctccgccacgctccgcagcgcgttgtacagcgtgctcgcccgcctcttgatgcgccgcgccgccttgtagatgctcagcgtggccgatgg

SEQ ID NO: 6374 - DNA, 288 bp, Setaria italica
  Peptide Sequence Number=SeqID_72348
aggaaggggaaagaaccttaattgcagtgaggagctggttgaggacgatgactgatggagagaacactcaaaaatggcttgaagaacgtcaacaagggaccttaattgcggcggcagcagcagcaatggatgaggacgatgatgatggacagaacaccctaattggctcccaaagatacagagaaaatatagctctaaaaagatacagagtgacttgccttcacacatctgttcggtccatccaaggaggaatggaggatacacctgacatgatgctggattggaatc

SEQ ID NO: 6375 - DNA, 429 bp, Setaria italica
  Peptide Sequence Number=SeqID_72349
ttaacttacaagaagaatcaaggcaaaataaaataactaagaacgtaagttaaatagttaattaggggatggttgatgatcctcgtgtggtgctcatcaagctggcagatcgcttgcacaacatgcgaactatttatgctcttcctgtacctaaagctgaagctgttgctcaagagacattggctgtctggtgctcacttgcttctcgtttgggagtgtgggctttgaaagctgagctggaagatttatgctttgctgttcttcagcctcaaatcttcaagaaaatacgatctgaacttactttaatgtggaaccgtacgggcaaatctaaaagtatgagaagatcatcaattagaagcgaattgcttgcctcaatgaaagatggacatatgacgtctatccatgatttgtttagttcctgcaaccaag

SEQ ID NO: 6376 - DNA, 2832 bp, Setaria italica
  Peptide Sequence Number=SeqID_72350
cgcgggcgcggggggcagcggcgcggtgcacggcgcagtggcgtcgacgctcgcgcaggtcgcggtcacggccgtggcgatcgcttcgggggcgtgcctgtccaccaaggtcgacttcctctggcctcgcatcgagcagttgcccgatactcttatatttgaaggagtagaggtgacaggataccagatatttgaggatccaaaggtgcagaaagcaatagtatttgctagtacagcccaccttgggcaatttaggagaacaggagatccatatgttacacactgcatacatactgggaaaattttagccgctttggttccatcaactggagaaagagcagttaatacagttgtggcgggcattcttcacgatgttgttgatgatacatcggagagcttgaagagcatagaagagcagtttggggatgatgttgcaagcttggtatctggtgtatcaaaattaagctacataaatcagctactgcggaggcatcgacagaagaacacaggtggaagcactcttacttcagaagaagcaaataatctgcgtgttatgttattggggatggttgatgatcctcgtgtggtgctcatcaagctggcagatcgcttgcacaacatgcgaactatttatgctcttcctgtacctaaagctgaagctgttgctcaagagacattggctgtctggtgctcacttgcttctcgtttgggagtgtgggctttgaaagctgagctaggaaagaatttaatagactttgctgttcttcagcctcaaatcttcactcaaatcctatatgaaattacgtttccacattaaagtaagttcagatctaaaagtatgagaagatcatcaattagaagcgaattgcttgcctcaatgaaagatggacatatgacgtctatccatgatttgtttagttcctgcaaccaagaaaaaacaaatatgaaggacctattgcaggctgtattgccatttgacatctttttggatcggaagaggcgctcatacttccttagtaatctcaatagtagttctggagaacccatatcaaatcctaagattgttgacgatgctgctgttgcattagcatctttagcatcttgcgaggaagaacttgagcgagaattactcatatcaacatcgtatatacctgggatggaagtgactttgtcaagtagactcaagagcttgtacagtatctactgcaagatgaaaggaaagatgtaggaattagacaagtgtatgatgctcgtgcattgagggtgattgttggagacaaaaacggtgcattgcatgggcctgctgtccggagttgttacagcattcttgatatagtacacaggctatggactccaattgatggggagtttgatgactacattatcaatcctaagggtagtggttaccaatcactacacacagcagttcaggcatctgatagctcaccgctggaggtccaaattagaacccagcgaatgcatgagtatgcagagcatgggcttgctgctcattggctttataaggagagcaaagttgagtacagaagtggcatgagtaagagaataggccaaagtacatcgtattcacctagttcttcagaagatgaaagttctatacaagatgatattccgtcaaagtacagttctctgaaggtggggcatccagtgctaagaattgaaggtagtcacttgctagcagctgtcatagtcagtatagataaaggagggaaagaattgattgttgctgtaagttttagccttgaagcttctgaagctgtagctaagcttaggtcatcttttcagttgaagcgttgggaagcctatgctaggcttcataagaaggtttctgagaagtggtggtgtgcacctggacatggtgattggtcaacaaatctggagaggtacacattatgccaggatgggatatttcataagcaagatcaatttgggagacttttacctacatttattcaaataattgatttgactgaagaggaagaggaagagtattggatggttgtatctgccatattcgagggcaaagagacttccagtctaccatctgaatcgaattatgctgataaatcatcatctgatcctccaagttcaactcctttaagtgatcccatcaacaataaggtgcatttgctcaggacaatgcttcaatgggaggagcaagttcgccgtggcgcatctttggcagagaaaagtcttggtgtaagcaccgtgacaaaaccaatcctgcgtgaggtggccataatcttctggccgaatgggaagattatgaggatgagcactggtagcacagccgctgacgctgctagaagaatgggcgttgaagggaagctgctttgggtcaatggccaactagtgctgccccaaacagagctcaaggatggggatattgttgaagtgagggtatagatgcaagtacagtttccagtacacctttctcaggattattgatctcagattggttcctcagttcttggcatagtctggcagtgctccagactggagaactgtagacagagaaccaaacccaaattgtacagtccatttgtcgaaatgaatcgaaggaagcaggatttaggtgcaggaagtgttgtatcgtacaagagtttactgtgtacataagcaactgcaagtataagctttctttctagctgtgcctatccttgtccatagttaatgtggtagtgtaaattcctgtaagtaaagctgtaatattgtgtagtcagtgtctcagtgatccacagttcagttgctgtgtttgtacgtaagctggcaagaaaacacttgagaaatgtacctgccgtaaacaaaaaaaaa

SEQ ID NO: 6377 - DNA, 480 bp, Setaria italica
  Peptide Sequence Number=SeqID_72351
taatagacgggtagacaaacggagctggcatgcctcccacagggtttgcagcatctttcatccatcagaagcttgacgattgacaactgcagaaaattggaggctttacctgattggttggataacctaccttctctacaatttgtgcagttatcaggctgtcctctgctgcatcacattcctggaggcttgcaacagcgtcctggaatcatcatatatgttgaggactgtcctagtctaccaaaacaacggcttccttgttctccaacacagccatcaggaaaccctgctgataccaagggcaaagaaatcatcatcgaagatgtttagatttcggttttagattatattggtgctgcacgtggtagctaatttcttcaaccgtcgagagtggacatagaaaacttacaaacctcacctcaactttgaggataaaaatgggctaggttatgtttccttttgtggaagcagccagcaggg

SEQ ID NO: 6378 - DNA, 1210 bp, Setaria italica
  Peptide Sequence Number=SeqID_72352
caaccagctgcaaacatcttattcatgaaattcatagcgccgtattaatcctgagccctgcaataagcattgattatagtattgtatgtcactgtgtccgggattagaccattactgcacatgtccaataaatggttgtccaccatcttcaagtttccttctctgcacaaaccgtcgattagaatgttgcttgtgtaaacatcaggaacaaggccactctgcctcatcttctgctgtaacttcaaagcttcagacatattgcctgcccgacaaaatgcagatatgatggagttgtaagtaatattgttcggtacaagtcctcttgttgtcatctcagcaaatgcctgataagcctcattcacgtaatctaatcggcataggccattgacatatgctgagaaggcaataaaatcaggctgcagaccaattttttccatatcatcccaacatttcaaagcacggactgcatcaccctctctgaaggatgcatccaagtagatagtaaatgatgtgcttagacaatatcccttactgaccatgtattctacaacaagctgcgcctcatcaagccttccttgattgcacagccccattaccaagtaacaaaaagtatgtgttgaaggtgccagtcccaacttgttcataattctatatagttgaaaagctgcgtcatggagtccctccttgctataagcagcgatcaacgcattaaatccagcaacactaactggaacaccctgctcaatagcaccacgcagaagctcccaggcaccatccaatcggccatcccaacaaagcctacagaccaacacatccaagtcatcagccgtatctgaacaaaacatttcacggtcatggactaactgggcagcatgcccaaacttgtaggatccagcagcaagaatgttgaaggtgcaggaatccggcactaatcccctcactttcatctccttataggccgcactggcctcatccatcagaccggtctttgcatatccatcaatcaagacattgaaggtgattgtatttgctttgatccccacctgtgccatctcatcgaacaggctcctcgcttccaccatcctcccctcatggcacagaacatccaccagtatgttataggtcacgaccgttggctcacatcctgccctgcgcatttcctcaaacagtttgaaggcgtcccccgaccacccaaacaaacaatgcccct

SEQ ID NO: 6379 - DNA, 543 bp, Setaria italica
  Peptide Sequence Number=SeqID_72353
gcggaactgtacagagcaccatatcaccacggaacgactgcttatcagtgtgcaccatcacaccatcgcacccatactgtatccttcgcacattctgtccatagaatattgggatgccatcagcaagtgcacggacaaactgagaatttccaccaggaataaagcagtgatctccgcccatttcatatggatcatcctggtcccagaaggccatggagagatcagcaagaggggcagcgttagcatactccaggtttgccagatgccagtccagaagcatcctttcttcatgctcagcagcaacaccatgcgctgctcggaatgcctcaagtgccatgcctagggacaaatcaacaccatgtggtacaccatctgcaatcacctgcctcaactggcaaaccttgtccagaagctggttaaaagcagcctcaacacgagcatccatgtcagggtcaactgggcggccatctgggagatacagtgggcatttgtcccgcaccttgtggagcgggaatccaagctgccgtgcaatgacaccaaggg

SEQ ID NO: 6380 - DNA, 255 bp, Setaria italica
  Peptide Sequence Number=SeqID_72354
gcctaaacgtagttgattaatattttaatccaagaaaaccctgaatagtaccgtctggatgcactatataaacatctctatttctaaagcagcaaaactatgtactgctaatactgcgtggtataacttgtctgctacaataattgttattagcaatctaccacatcgccagtttatacatctttcactatttgaatatattctacacacagtggcaaacactggacaaacattataaacattagcgaaactttt

SEQ ID NO: 6381 - DNA, 1403 bp, Setaria italica
  Peptide Sequence Number=SeqID_72355
cggattttgcgtggcgtggaggaccatccgaaaccgggatcgatttcgctgttgcgcggaaccctagcttgcttcgacgttggagttctcgaatccacccacccacccacccacctacgccccaagtagcaaggctgtaccggaattctcgctgagacggacggggaaccggcgagaagatcgaattctgactgcgccggcgatggcgagcagctcggctccgtcgcagatcatctgcgcctccttcaatcaggacaacagcttattttctgtcgggacgaaggatgggttcaagatcttcgacgcccgtaatgggaggctctgctatgaaaataatcttgggggattcaacattgtggaaatgctatttggctcaagccttcttgtcattgttggaaccggtgaaaagcctgcaatgtctcctcgccgtctctgcttgttcaataccagaacaggagcatcaaagaaagatctgaactttaggacttcaattttgtcagttcgattaagtatgaagaggcttgttgttgtattgcaggacagaacttttgtttatgatctaaataaaactactatcttggaagaaattgaaacagtgcccaatacaaaaggtctatgtgcatttgctccaaattcagaagagtgttatttggctctgccagcaagcacatccaaaggatctgctttagtatacaaagcatcaaaaacctgaattaatatgtcagatagatgctcatcaggctccattagctgcaatggtttttccgaatggcatgtacctggcaactgcttctgaaaagggtactatggttagagtacatctcgtcacacaagcaaccaagtcacatagttttcggcggggaacatacccatcaacgatctattcactggcatttagtccatctgttgatctgcctgacgttcttgtcgccacaagttcatcaggctctttgcacatgtttttccttgacgctgccagaaatggaaggagacaaggaaatacattgctcagttcagtaattcctggatcagtaactgatgctttggacccagctaatcatcatgttattcacaatgttgtccctgcaaacatcaagagctgtctggcagtaaacagtgttgaaaattcccaaaattcttccaaacttcctgcattgaagactgtaatttacattgtaacacatgatgggtacttccgggagtatgtgattggcacaaccaaatcaaatgaatcttcgtggtcgttggagcgtgaattcaatctcctggaagctggtttgagtagtctcaagcagaatgagcagcacatagtcatagactgacttgtaatgcttgctgaccactcgctcctccgaccggagcctgttggctgattatgtttgtgtatatatactcatgggggg

SEQ ID NO: 6382 - DNA, 1340 bp, Setaria italica
  Peptide Sequence Number=SeqID_72356
ttttttttgtttttttaaactttttccctttatttgggtaatagccttatgtgcaaccattctaattaagaaatgtataaactttgaacattccagaatattgttctctggttgcaagacaagaaagatacaatcatcgaagatgtgctaactacaccttattcttctgctcatttatcttcattctacaagttgtgcagtcatataagctgttcacagcctctccattcaggctgaaaactcaaacaacatagtgtgcttatacttctcaccaggctgcacgaccactgaggggaagtttggttggttgatggcattaggaaacccttgggtttccaagcatacaccggcatgtttctcataaacagcaccccctttgccagtgatgccagtcacatagttggcagtatagaactgcatgccaggtgcatcggtccagaggttcagagttcgcgagcttgatgggtctctcagcttggctgcacgcttcacaccatttttttctatccccacagtccagcacatagttatgatcataccctccaggaacatcgttgatgcgctccccaatcttgtgctctgtcgtgaagtcaaaaggagtgccctcaacaggcattatctctccagtgggaattgtgttttcgtcaactggagtgatgtgcttcccccagatctgaattgtatgatttaagatgtcaccagagttatggcctgccaggttccagtaagtgtgctgtgccaagttgataggagtggctttatcatgtggtatggcttccatgtcaagtcttagggtggtggcctcaggaagagaatatgttgctctgactgttacatcacctggatagccttcttccccatccttgctgtgatactgaaaggttactgaagggcattcgccatctttatgctctacaacatcccacatgactttgtcaaatccagtcaacccaccatgaaggctgttgggtccattgttgataggcaatgaatactcagctccgtttagggtaaacttcccatccttgatcctatttgcaactcgtccaactatgcatccaaaataaggtgccatgcctttcatgtacggctccaggtcatcgaatccgagcaccacatccgcgacattcccgtgggcgtcggggacgaggagggaggtgatggttgcgccccagctggcgatcctggtggtgatccggccgttggagagctcgatgatcttgggctcggccgccattgacgccgccgaatgggaggggactccgctcgggtgctgaggctgactcgacttgcgaggtttgttcgattgcttgtgggagagcaaaacggccttaaacgtt

SEQ ID NO: 6383 - DNA, 335 bp, Setaria italica
  misc_feature (317)..(317): n is a, c, g, or t
  Peptide Sequence Number=SeqID_72357
ggtctggtgctgggcccgtggcgctgtagaagtccgcggtggtgtcggaggagaagctgtgggacgagaagagcgtcgacctcgtgtcggtcgcctggccctctcccgtcactgctgaacggcgccagctcgccgtcggtgtcggaggacgacgaccaactgtacagcggcgagctgatgcgcctactgccatcgcccttcctgcgcgtgccgctcttaacggcgccggcgcccctcgccgccggcaccggcgaaggcaagactgccgcgccgaccgagcgcgcggagcagtcgatggagatgtgaacagcgcccgngagctgcggcggcggtgg

SEQ ID NO: 6384 - DNA, 593 bp, Setaria italica
  Peptide Sequence Number=SeqID_72358
aaaagaataaagcaaattctttgtcattgccagcagaaagcatatatgaatatgagcatacatggagtgcaatcgagagcaataaaaggatcattttacaatcaggatcagaccatgccagagatatgctgtcagatgatgacttccacgaagttcttcaccgtaggtactatgatctacagcacctcgcaactgaacttgctgtcaccccagacaatcagcagcaacccgagatcatccctgaaacagatgtggttgatccttccatattaggcattgcaagaggtgttgagatggttctccaaagactgaagagagtggaacaaggaataaggggacctcaaggaggaaatagcaagcttgaggtattacgagtatcaccttgtgactgaactccacaggaaaatggactacgtgatgaattataacatccagttggaggaaaggaaagtacctcagatgttctatcttgtaagcctggacaaccggtccaaacagctggtcacaagaatactgcctgggatgcggtccctacgggtgcacatgctgtgtgagttccgaagagagatgcatgtagtagaagaccaactcgg

SEQ ID NO: 6385 - DNA, 602 bp, Setaria italica
  Peptide Sequence Number=SeqID_72359
ctgcagtatcttttacagagccgtcatcatcaacgatatcttgtatggatttcacaagtgacttgttaatgacaacttctaaaatctgcagctcagaacaagaattttcagcgtacgaatggttgaataatataggtgatggaaagatgcaagatagcaaaaggtgagatgtgcttactgtttctgtaagagttgttaatcgactatgcgagccttcatccagcttcctcgcagctttaatatttacttgcaaggattcaacaaacagcatcaggctagcaactgccactgcttccaggccttttatcacggcacctccagagacacaatgtattgctgattctatcgcaatggtatccagccccgagaaatccatcgccccaccagcgttatcaagcagccacacggccacctccgtctcctggagcagcctctggctttgctcatagctaacgtcctccacctcccacagttgtttctttgtggcgtcgcgtccgtgggcggttccggcgaaggaggcgacggcgtcgcagaccttgccccattcgaggaggcggaggctgcgggcggacggcgagagcgaggaggcagcgccggcggcg

SEQ ID NO: 6386 - DNA, 818 bp, Setaria italica
  Peptide Sequence Number=SeqID_72360
tttgatattcactgaatatgggccaatatctacatggttatcttctcctccagcaaagaagcagagagtgtagagtgcaatttcaaactcgggactgacacaaatcaatgtgctggacacagattttaacaccccatgccactcaaactgaatggtgagcagctgtgtttcagagtctggtagctccccagcctccttgggaatatgtacccttgtgatgccgtggcactactggaaacggtaaacttacctgaatccagttgtgaaagcctgatacttcattctcaccttgcttctgccccttgatctctcccacaaacacatgctcaaaggcagaagagctactagagcagccacctcttccacacaaatcaaaccacagggatgtcagcattttcttgaagtcctcatagtcctgagacgtggcctccttcagtaccaaataccggtgcaagtacttgatgggagcactcctagaaatctcctcgataaaagcagcttcttcatgcttgtcgtgctgggtaactgattctttgtatccttggtggaggttgtaattgttaaggagtacacagaaacgggagtacgtaggcctcctcagtacactgtcttccagccagctgaacaggttttcggatgccttatcacccttatgataaaccttcttcccttcaccacattcaattgtgtagtccttgccaggagagaggcggtttagatcaagttcccatagccgagcgcacgcttttgataaattattgagttcctcccctccctggtgggctcaacatttaggccatggtgaatatgactgacat

SEQ ID NO: 6387 - DNA, 451 bp, Setaria italica
  Peptide Sequence Number=SeqID_72361
atgcaccgcgctcgctcttgcggcgttgccggggccgggctcgagggctacgagcacgtccgtcaccgcgtcaacgagttcgtgcacgtgcttatcggcgactaggggccggagctcgtcgccggagacagcgagcgcgcggacgagatcgaggcacgcctccaccgtgggcatgtcgtctaggctcccctcctgatcaccgcgacagctcttggtcttggcgcacgacacggccaggcggagcacgcgctggagcacgccggcgtccaccatgatccgccgcgccacgtcgctctgtgacacgacatcagcagcctcgcggatcacgtccaccggcgggcaacacgctgcgtacagcagcttcttggcgacgtcggcggcgacatcatccggccggtgccctacatccacaggcttatttgaccccgccgccggcgtcgtaggaaacgcg

SEQ ID NO: 6388 - DNA, 422 bp, Setaria italica
  Peptide Sequence Number=SeqID_72362
agatatggtcaagactgacaacaagtgaaagtattgaggttctggaaaaggatcttgcgatatttggttttttcattgctttaggcagaagcacgcaagggtatttgtcttccaatggacttactgatttggatgattcagttaatggcattgtaaggtatgatcgttgtgaatgtagattttgcaccttttcaattaaatgatgtttcagttgataagaagctttaacatacctgatttattgcccacatatgaatatgattcactgtgctgcttaatgagcttacaataattcaggtatcttattggtgggagtgtattatattatccacagttgtcctcgattagttcatatcagctgtatgtggaggtcagtgtgcaggcaatgtactgagcttttaatgctactcagcattcagttg

SEQ ID NO: 6389 - DNA, 480 bp, Setaria italica
  Peptide Sequence Number=SeqID_72363
gttggccttcatccagaaatatgtgccttcaatggtatttagtttatgatcccatggttcctccatgttgttgcaatttgttatataacaatttatatttgtgtatttgtaattgtgtagatcccatccacatatgctcccgataggttagatctcctcaggcagcttgaaaaggtgaaggaaatggaagttgctgaaggcagcagcgaagatttattggagacagtaggttcgagaaccgaaccagtgaaataagctggccatgtacagatggacatgattatactccttagcttacgatctttcctgtaaactgtaagtacatatggctgctgccttcctttctcgttttctatgtacacgtgttgcctcctgtttatttagctctaatatggaaacagctcaagcatagacatcatgcacgtcaatacctatatatatatttttcatcttaaattattttggtttacttgttcttta

SEQ ID NO: 6390 - DNA, 2979 bp, Setaria italica
  Peptide Sequence Number=SeqID_72364
tgatggaaacagtgtatctgttaatggagctccgcaagttgactcggcaagcagcatggaggaaataaggttgaaattgaataaagcatttcaaagtgaagatataagcaatgggcttgtgcagtcaatacatgatgctgcgaggtctattgaattggcttttatagagcacagcaagtcatctaagagctcttggtttccgaagacatggctgggtgttgacaacaatgcatggataaaatcactatcttaccaggctgctgtagactcattgttgcaagcagttatcgatgtttcatctcgcgggaatggcagagatagagacattaatgtatttgttcaaaggagtttgtcccgcctgctcaaccccctagagagtgttatcaagaatgagttgtctaagagggaatctacattatacgaatggtattcatccgatcaaaatcctttggtggtgagacaatttgtaaatatttttgaaagtgatccactatttaactctgcaacagcaatatgctgtgaaggcgagccaatgaatactagcaaaagtgaccttgctctgcttatgctaggtttgatctgtcttgctgcaataacaaagcttggatcaacaaaagtttcttgtcagcaattctcttcaatggtacctgatattattggtcgattcatggatatgcttctcgagtttgtccctctaagtaaagcatataacttgacaaaagatattggccttcagagagaatttttacatacttttggtcctcgtgctgctgttcctaaacttactaatgatcatggacttgagatatcattttggattgatctggttcagaaacagttactccgggctcttgatcgtgaaaagatatggtcaagactgacaacaagtgaaagtattgaggttctggaaaaggatcttgcgatatttggttttttcattgctttaggcagaagcacgcaagggtatttgtcttccaatggacttactgatttggatgattcagttaatggcattgtaaggtatcttattggtgggagtgtattatattatccacagttgtcctcgattagttcatatcagctgtatgtggaggtagtctgtgaagagctcgagtggcttcctttttactatggtgatgttccaagtgcaacaactgatactgaaggtagacaagaagtgtctaaaggagaagtaatatcaagagtcttaaatgtgtgctcttattggatgactagttttataaagtacagctcatggcttgaggacccttcaaatgtgaaggcagcaaaattcctgtctaagggacatgccatgttgagtgactgcatgaaggagcttgacacatcaaaaaataatatatcaaaagaccgaggcttgccagaacctgaagaagaattggataccgggacagagttagcttcctttgacaagtcacttgaaagtgttgaagaagctttggtcaagttagaaaagttgcttcaagaattgcatgtttccagttccaactctggtaaggaggacctaaaggctgcatgttctgatcttgaaatgataagaagactgaagaaagaagctgagtttcttgaggcatcctttcgagcaaaagcagaatatctggaggccgatgcaagtagtggaccactatctcccaccggagaggaaggacgtggaaagacaggtagcaggaccaatgatatcgcagcaccacaaaaatcaggaagcagggtggataataaacgccgtccgttttgggacttctttggtcggccttcgggaaagaatgttgagccagctcttcaagttgcagatcaggatggaactgttgccaatgcggagaagaaagacatggaatcaaatgatatcctccgctttgaacagttgaagcgtgagctgattgagttagaaaaacgagtgcagaagagtgcagatgatgctctaaaggatgaggagatgggtgtcacaaacgaaacaactgcgccatcttctgttgcatcagtgccttccagtcagactaccaagaaagaaaatgttataactaaatcagtggagaaggtcaaggagactacaacgactgtgttgcaagggacgcaactcttagcaattgatacaggagccgctatgggtttgctaagaagagctcttattggggatgaactaactcaaaaggaaaagcaggcccttcaaagaaccctgacggatttggcgtctgttgttcctataggaatactcatgcttttgcctgttacagcagttggtcatgctgctatgttggccttcatccagaaatatgtgccttcaatgatcccatccacatatgctcccgataggttagatctcctcaggcagcttgaaaaggtgaaggaaatggaagttgctgaaggcagcagcgaagatttattggagacagtaggttcgagaaccgaaccagtgaaataagctggccatgtacagatggacatgattatactccttagcttacgatctttcctgtaaacttgtttcagaacaaggcgtccgagaggttttatttcatttaagagtttctttgaatgacttacttctgcaaacaggacttgcaaggctatgcaaataaccaattgttgcatcgagaaactgaaggaagatccttccaagagctgcacttttgtaggctgtatccatactccagagcatacatgggcgctccgggccccttcaacatagtagaggatgaatgtccaaggttctcttggacagtgtctttttagggtagattttgatagaggtttgtatatctagctgatagatgaccaccacgttttttctcatgtacatgtaccctccactgggaaaagacgaaaactggtaaccttgttttcaaaatcaaagggaattgcccgcctgcttttcctctttaaaaaaaaaaaattcatcctctactatgttgtaggctgtatccatactccagagcatacatgggcgctccgggccccttccat

SEQ ID NO: 6391 - DNA, 632 bp, Setaria italica
  Peptide Sequence Number=SeqID_72365
tcatcattgaaactctaaatttttttttttaattttaaattatttgaagtgatgatatacttgtattcaccatggtttcttcttctgaaatgcatagacataaacagctcgcaaactggtagtagcacatatatttcccttttgctccctgaactagctagcatgcaacaaggcatacgagcgcatgcatccatgatggcctcgccggcgcatgatcggtcacatgacggcgcatgcgttggcgttgtcgtcgctgaacatggtcatgtacctgatctcgggcccggcggggtcggccatggcctgcggcgcgctgcggacgaagccagcgggggccttcttgtcgtagacgccgccgacgtaggggtaggaggtgagggtgtagggcgtgtagggccacatctcggcgttcttgccggtgccccgcacccgcgccagcacgttggccggctccacgtaccccgtcaccgtgcacttgctctgcttcgggatcaccgacacgctcgtcaccccgcgcatcgacttcaccgcgctcctcacccgccgcacgcacccctcgcagtccatcttcaccttgatgtgcaccgtctgccgcagcaaatcaaaattggaacaagttcatcagacgaagt

SEQ ID NO: 6392 - DNA, 841 bp, Setaria italica
  misc_feature (1)..(38): n is a, c, g, or t
  Peptide Sequence Number=SeqID_72366
nnnnnnnnnnnnnnnnnnnnnnnnnnnnnnnnnnnnnntttttttttactaaagttagcaaaaaattagccgtcattctattggcttttctcctttttgaaacaaagcacatgtgcataaacataatacacctaacatatacaaactcattaaaggcaaattggtagtagcgtagatgctcaaattcctttttgcactctgaactagctagcatgcatacaagcgcatacacggccatggccactgccgccatcaccggccagcggctcaggggatcatcacatgatggtgcatgagttgacgttctcgtcgctgaacatggtcatgtacctgacctcgggcgcgctggggtcggccatggcctgcggcgcgctgcggacgaagccggcaggggccttcttgtcgtaggcgccgccgacgtaggggtaggtggtcatcgtgtagggcacgtagggccacatctccgccgccttgcccgtgctcttcacccgctccagcaccttggccggctccacgtaccccgtcaccgtgcacttgctctgcttcgggttcaccaccacgcgcgtcacgccccgcatcgacttcacagcgctcttcacccgccgctcgcacccctcgcagtccatcttcaccttgatgtttaccgtctgcagcgggcgcttcttccggagcttgagggcctccttcgtctccgtgatgctgcagagatcggagaagtggtccaggatgcccatggtgattgtgatatgcctcaccaagtgtacgccgtggctattgaacaagcaacaaagcttctcgtcgtcgtttgtgtcggccacgggtgaaatagaagctcattaaa

SEQ ID NO: 6393 - DNA, 535 bp, Setaria italica
  Peptide Sequence Number=SeqID_72367
cctagatgcctggagtagctgtaaaatttgcatggatacactctcacaagcacttgatgcacacaaacaaaatacaaacttcatctgatctttaagtgtactctatctcttcctcacattaagttgtagcgctcataaaacttcaccatctcatgcttgctcgccgtcttgcggtgctagctcagtaccaacagtgcaaaagtggcatgcccagactgctagtgtgcaagctagtcgtggcacaatctttttaagacaaaatcaggggacgtctctccccctggtcgagttcgtttcttttttgcctactggcaatccatttgctttctcatgctagttatagtttttcaacgcagctaattagatagttttgctttacataatatatatagcacttgagttgtgtagctatatatgagattagggtgaaattgcccccaccccctgacttcaatcctagctctgccactgctaatgatatagaatgcaatcgcttgagctcctaattagttcatgcatactttgagaatgcttc

SEQ ID NO: 6394 - DNA, 1685 bp, Setaria italica
  Peptide Sequence Number=SeqID_72368
ggcaggtcacgccgcggtcggcggacttcaacgcctggtacacggacgttatcgccgccgccgagctcgcggactacgggcccgtcaggggcaccatggtcatccgcccctacggatacgcactctgggaggccatccaggattatctgaatgtgaaatttaaggaaacagggcacagcaacatgtacttccctcagttcattccgtactcatttatagagaaggaagctagtcatgtcgaagggtttagtccggagcttgccctggtcaccatcggaggaggaaaagaactagaggaaaagcttgtggttagaccaactagtgagaccattgtaaaccacatgttcaccaaatggattcagagctatcgtgatcttcctctcatgattaaccagtgggctaatgtgacaagatgggaaatgaggacaaaaccattcatccgaactcttgaatttttgtggcaagaaggtcatacagcccatgctacccttgaggaggcagagaaggaggcaatgcagatgattgatgtatataccaagtttgcctatgagcaagctgcaatgccagtcattccaggtaggaaatcaagagtggagacatttgctggtgctaatcggacctacactatagaagctatgatgggtgacaagaaggccttacaagctgggactagtcacaacctcggccagaacttttcgcgagcttttggaacacagtttatggatgaaaatggtcaaattgaacacgtctggcaaacgtcttgggctattagtacccggtttgttggtggaatcatcatgacccatggtgatgatgctggtctaatgcttcctccaaggattgcacccattcaggttataatagtacctatatggaaaaagggtgatgagaaggctgctgttctggaagctgttgattcagtccaaaaaatactcaaagaagcaggaattagagtcaaagtggatgactcagaactgcgcacacctggatggaagttcaaccattatgagatgaaagggattcctgtaagaatagagattggtcctcgtgatgtcacaaataagagtgttgtggtttctaggcgtgatgtccctggaaagcaaggaaaggagtttggagtgtccatggaaccatcaatattggtgaaccatataaagggccgtctagacgatatacaagcatcccttttacagaaagccatcacattccgtgacagtaacatagtcgatgtaagctcatacggagagctgaaggaagccattgccgaagggaagtgggctagaggcccttggtcagctagcgatgctgatgaactgaaggtgaaagaagagaccagcgccaccatcaggtgctatccgttcgagcagccggagggcaccaagaaatgcttcatgactggcaacccagcagaggaggttgcgattttcgctaagtcgtactaggtcatctctgtgtctatctactcccagataccaaaacagccttttcgtttctcttataggattttgccctgtctgcctgtttcctgtaaggcctgcattaaccacggttcatgtactagcagttgaatgcttgtactgctatttctcttgtaaattcgatgaacaataggtcaattttgtgccatgattgcaatccaatctaagtaatgaactttgttgaacaaaaaaaaaaaaaaaaaaaaa

SEQ ID NO: 6395 - DNA, 864 bp, Setaria italica
  Peptide Sequence Number=SeqID_72369
caaagaataacagtgtctaacgcctaaccaaagaacaaagccaacgattgtcgtgaacgcaatcctacgtgccgtatctaacatttatcatctactccttttgagctattgttttctggtactgacgtatacacagatatggaggtagtattcagggttcttcaagttgttggcgacccaaaggaacgggatgtccatgtccagttcgatgccctgtacccttactagcttcactttagcttgcttggtcgcctctcgcagacttgcggaagctggttctgcctcctgagaacttcttgaagagtttgtggtatctgaaccaccaccagctgagcccagttcctctgcattttgggggtctgagctgaagaactcaggaagcaatgtttgtaatgcatgccccagggtaatgtagcttctgccttcgaccttccgaatctcaaatggtcgatttatgtaggacacactttcccagtcactaacaggcattgcatcttctatatcctcaaggtcttcttgaacaccacgcacatagaatcgaacagggaccatggtctgccaggtccaggagattctggctcatcagaactttgttgacgctctgtagaggctgtttgtactaagccatcctcctcaaatggtccaagcttaagcctggtggagatattcttatacccatctaagttacctttcgttacagattgccacagagcaacttgatcagcctgggacatattcatcacactcttactgttcccagtaatgatgaaggtggcctctttcagagaattcatgtagctccacttcacactatcttcaccctcgcatggtgacaaaatttctgagggatatcccctaaaaatg

SEQ ID NO: 6396 - DNA, 289 bp, Setaria italica
  misc_feature (28)..(28): n is a, c, g, or t
  Peptide Sequence Number=SeqID_72370
cctatccctcgtgtgccttggtcagtcnctttttaggtttttttgtttttgtttttttttgttcacaataaaatggcagcacatcatggtaaaagctgcaacatgtagctcaccagcgtacaataatttttttagataaaggaggtaactctgacctacaatcaaacagaattgaaacaggatacgagcaaaggactattattctccatttttatacagctgatttattaaattaaatacaccctacatcattaatagtctaatgagaattctatttcattggattctt

SEQ ID NO: 6397 - DNA, 891 bp, Setaria italica
  Peptide Sequence Number=SeqID_72371
taagaagagaggcttggctgcttattttctaaagataaggttgtttctttgttttctaagtcaggagcattttagcatcataacctggcttgtacaatagcatcaactgtcatttgctcctgggtacttaactgaccaaattcggtatctacacttcgtgtgacctgcccatcagcgataattactaaaacatggtattggccgccactttgctccacaatggttgtggccatttcaattattggggcgaatgatgtaggaccagaaaggcgaaggtgaggaacaatttctctgtatcgagctaaagcttcctgaaaaccattgcatggtctttcgtcaggatagaaagcaaatacatcttggtcatgcgtagatgcatctccaaaaccataacaaggaattaaattatcctcgtcaaaagctgataaggtctgcccaatgatggatattgcctgttcataaggatttggggtttcaccaatatgatgcaggctcatgccattgaacgaattctttcctgtccattcattactctttgtgaaatcgattcctatgattaaattggaagactcaagaccagcttgtgctaatgcttcgataacctcatcgaaggagtggtactggtcaacaatcttggagtacttcctctccagcctcggccgcttacccccagctgcggccgccctcgctggcaccgcccgcgtctccctcagcggaggcgctgacacggaatgcgcatgagccgccgccggcggcggacgcgagtaggcactcgaagacaccactacgtcctcagccggcggcggcgcgatcgcccgccgccggaagctcgaggacgaggagtactcatccgcaacgggagctgagggcgggtacggaggcggcggcggg

SEQ ID NO: 6398 - DNA, 1319 bp, Setaria italica
  misc_feature (17)..(17): n is a, c, g, or t
  Peptide Sequence Number=SeqID_72372
tttttgttttttttttntttttttttttttttttttggttttaaaagctgcaacatgtagctcaccagcgtacaatattttttttagtataaaggaggtaactctgacctacaatcaaacagaattgaaacaggatacgagcaaaggactattattctccatttttatacagctgatttattaaattaaatacacccttacatcattaatagtctaatgagaattctatttcattggattctacttcctgattgagagcgcttcagttatatcctgactagtacaattttactctcgtatcaatgggccttcgacagatggggcaatctgcgacttgtggtccacattccgaacatgtctggtgaccacaaccaaatgccatgtcccggggtttggaaaggcaaactgggcacatttggggttctggaactctagtttcgacagctggtggggatgtcactgatgctgtgatagttgaatctacagttggctcctctctaggacgtgaaggcacgcttcgatagctatttgcccgatatggtgctgctcttgaaacagtgctataacttgcgaagggtggaggaagtggaacccgctcaggcgattttgcaagtcgacgtcctaaaagtccaagctctaatgttgccttgtactgcaatggaatttccatgagtgctgaaagggcaaactccgtttcctttttgctttgacttatcttctttgacatgatcgcagtgaagttcacaaactggaaattgtcaaaagacctagccggtatgttgtcatcaaattccttcatcatgtcccatggaccatctccaactccaaccagaattatagacaagggaaattcactggcttgtacaatagcatcaactgtcatttgctcctgggtacttaactgaccaaattcggtatctacacttcgtgtgacctgcccatcagcgataattactaaaacatggtattggccgccactttgctccacaatggttgtggccatttcaattattggggcgaatgatgtaggaccagaaaggcgaaggtgaggaacaatttctctgtatcgagctaaagcttcctgaaaaccattgcatggtctttcgtcaggatagaaagcaaatacatcttggtcatgcgtagatgcatctccaaaaccataacaaggaattaaattatcctcgtcaaaagctgataaggtctgcccaatgatggatattgcctgttcaataaaggaatttaggggtttacaaccaataatagaatagacaaggactacaatagaaccaaattaagtaaaacgtaaaatttaactttaa

SEQ ID NO: 6399 - DNA, 310 bp, Setaria italica
  Peptide Sequence Number=SeqID_72373
cctaaccagagcacctaccccgccgccgctgccaccgctgccgccgcctcctgctccgccgtgaattcactgctgaagatggggaaagggaagaaggagaagaagccgctggacatcctcgcggggtccgacgacgactccgacggcggcggggaggacagctcgaagatccagatcaacgaggagtatgctcgccgcttcgagcataacaagcggcgggaagcgttgcagcactacgagaatcttaaaaagcaaggcctcgcctcccccgtctgacgacgagaaggactacggggaggtgtcatccgaa

SEQ ID NO: 6400 - DNA, 248 bp, Setaria italica
  Peptide Sequence Number=SeqID_72374
cctcatattcgatcaaaaagacttcacactcgcaattgaagcatttggaaaggttgggtccattgaccaggcagagaagatatgggtcaacatgaattcaacaaagaagttaagccttacagaacagttcaattccattttatccgtttactgcaggcatggtgttgtggataaagcatcagctgtgtttaaagaaatgagagcaagtggatgccagccgaatgctattacttatcgccacttagtcg

SEQ ID NO: 6401 - DNA, 206 bp, Setaria italica
  Peptide Sequence Number=SeqID_72375
caaactgcaactcctacacactcaaagtgagaatcatatatgtatatatgcatatataatatctatttgcatctcatctcttgcacacaccacgagtcagatccgtttatcctgcttctttgcctagtatcaaccctaatggtccactcagccactcaattgtataaaatttccttctgagtcaactagtcctctctctctctctc

SEQ ID NO: 6402 - DNA, 985 bp, Setaria italica
  Peptide Sequence Number=SeqID_72376
tgcgcgtggcgactcgtcggcccgccgcccccccgccctcgcgatcggggccgtcggtcccgggccggacggatgccggtggacgtcgaggcgtcgatggccccgcccccgccggcgtcgacgtgcagctcgtcgtcgatagggagggacagcgacgagtgcccgccgctggggaaggaggaggaaggggaggtgcagagcgcgttcacgggggaaggagggggaggcggcggcctcgcgggtttggaggcattggaggaggcgctccccattcggcgcagcatatccaaattctacaatggtaaatccaaatcctttgcgtgcctcaaagaagctataacatcttctggttctgcaaaagacatcactaaggcagataatgcatactccagaaaacggaagaatcttcttgcctacagcatcatgtatggaaattcacatgaaacagcagctgctcaggtttatgaaactgcgcctcctaagaggcttgctagtttgagcagaaactctttggcgaccttggctagtatcagttcgaggagcagcagcagtatcagcattgaagagaatgagctgcctgagcagctacattctccactctcacctgatgattttatatccacaccacgatcaggatcttttgcgcctaatgcatcatctgcgcctatgaggtcgttgtcaatgatggatttgcattgtctgcatagatcaagttcctcggttcgtctcaaagaaaagaaagaagattagattaaagtttagaggattttccagttccttttgttatctttttgcctcaggtttctagtaccaatcttctctaatatatctaaagttggcatgaaggtttctggataaataagcgagcactttgagtttggtgaggaggtatatgtgtgtttgtaaaatagttgattatagtctgttgtaaattaacatgatgtactaacatggatcgcgtaaactggcatctactcatgtaacg

SEQ ID NO: 6403 - DNA, 718 bp, Setaria italica
  misc_feature (18)..(18): n is a, c, g, or t
  Peptide Sequence Number=SeqID_72377
tattggaattctattaanatattatatgaaagtcgaatttcttccattctcatttgagaatgcgaatacaaggaggtattttgtgtttgggaaagtccgaagaaaaaggatttggaatccaccttttcttttgcttttttcccttagaaaaataactcaatcaaaatccaattatctactctacaagaacgaaatgcttgttatgcctaatatacttagtttaacctgtatctgttttaattctgttctttgtccgactagctttttcttcgccaaattacccgaagcttatgccattttcaacccaatcgtggatgttatgcctgtcatacctgtactcttttttctattagcgtttgtttggcaagccgctgtaagttttcgatgaaatctttactattccgtctgccaaattgaattgaatgatgtattcattccaaaaaaattaaaaaaatggaaatggataagagccgagaagtcttatattatgaaccttcgattctaaaatttaaattcttctacattgaatgtatagctgcagcaataaattgggatccgcctttctaccccctgcgcctacgttgagcaggtacctttaggtacccacacaatacctaaactaattttgatattgataagagtgcttattataaagcaattcttgctaattttttttaagaattgattttttgctatttttaggtgtacaaaaattaaa

SEQ ID NO: 6404 - DNA, 2812 bp, Setaria italica
  Peptide Sequence Number=SeqID_72378
aattaactgcattgatctcggtagctacgccacccacggaatttaaagagcctaaaggagcatgggtcatatattctgccgaacgtcgttcttgccaaggttggatgtcttttttcaacctactcaagtccaaaccgttggggcccttagaggttctaaccacggagcacgaaggtcccaaaaacgcatagtttcccctccaaaaataacctctcccgttggggaacgcattagatatttacctaaacccgtcggtccttgggcagaccctacattagctccaagacgctggtctctaactagaaaagtaaatgcttgagcttgagaagcttctggcccagtgggtccgtaaaactcacttggataagccgtattattgaaccagacaaaacaacaagcgataaaaccaaaaacggataaagcagctaaactataagacaagtaagcttcgccagaccatacaaaggcacggcgagcccatgcaaagggtttggttaagatatgccaaattcctccaagtacacaaatggaacccaaccatacatgtcccccaattatatcttctaaatcatccacactaacaatccatccttctcccccaaaaggggattttagtaaataaccaaatataacaccgggactaagggtcaaattggtaatttttcttacatccccccccccgggggcccaggtatcatatacgccgccaaaataaagagccttgagtactagaagaaaagcacctagacctaacaaaattaagtgaatacccaaaattgtagtcattttatttctatctttccatacataaccaaagaatggaaaagattcttcaagagtctcgggtcccagaagcgcgtgataaatgccaccgaagcctaagactgcggaggaaattatgtgaagtactccagatacaaagtaaggaaaagtatctagaacttctccccctggccctactccccaacctagagtagctaagtgcggaagtaaaattaacccttgttcatacatgggcttttctggtacgaaatgggccacttcaaataggttcattgctccggcccagaatacgattaatccggcatgggctacatgagctccaagtagtttaccggacaaattgataagtctggcattcccagcccaccaagcaaagccggtggtttcttggtcacgaccagctaaaacgaaagttccattaaagagcgtttccacgtggtagaacctcctcagggaatataagattttcatgaggctgatcctgagctgccatccacgcacgaataccctcgtttaaaagaatatttttggtgtagaaagtctcaaattcaggatcttccgctgcacggatttcctgggaaacgaagtcataggcacgtaggttcagagccaggccaactacgccaatagcactcatccataaaccggtgacgggtacaaatagcataaagaaatgtaaccaacgtttattggaaaaagcaacaccaaagatttgggaccaaaagcggttagcagtgaccattgaataagtttcttcagcttgagttgggttaaaagcgcggaaggtatttgcaccatcaccatcttcgaatagagtgttttctacggtagccccatggatagcgcatagcagagctgcgcctaatactccggcaactcccatcatatgaaatgggttcaacgtccaattatgaaatccttggaagaaaaggataaatcgaaatatagctgctacgccaaaactcggcgcaaagaaccaaccagattgtcccagtggataaataaggaatacggaaacaaaaactgcgattggaccagagaatgaaattgcattataaggccgcaattgaacagaccgagcaagttcaaattgacgtaacatgaaacctattagtgcaaaagccccatggagagcgacaaaagtccacagaccacctaattgacaccaacgagtaaaatccccctgtgcttccgggccccatagtagcaacaaagagtgtgctaaactattggcaggagtggaaaccgccgcggttaagaaattgcaaccttccaaataggaactagccaatccatgggtataccaagaagttacaaaagtagtccctgtaaaccaaccccctaaagcgaaataagcacaaggaaagagcaataggccggaccatcctacaaaaacgaaacggtcccttcgtaaccagtcgtccataatatcaaatagatcattttcttctttagtaactctaccaatggctatagtcatagtgatcctcctattcaattacttcaaccatttccgagcacctcatattacttccagggcatacgatagtttgattatctgtggacgatttctttctcgttcaatgccctttttcaatggtctcgaagatagaaattttgcatttttatctatggggtcacaaccaaggttgtggtaaatccacgaattttattcaatttatttttcttacactatagaaataaagaaataaacatttgaattcagcattattccatgattcctatttcaaagcctctcttttaagggaacaataacccctcttttctcattcgctctctattgcatgggtggaagaacaaaaataggattctgaaaaaaagaaagatattgaaaagcaaaattgacttttgaaaccctttttatgtgtaacggaaaagagttgcgatttcttcttattcctatagaacgtctagtaacaagaatatgaaatcgtaaatagcgaaaattcttgccttgcgcgatctaagtctaaggaaatacaaaaatccgcttatacaccaatttcat

SEQ ID NO: 6405 - DNA, 1190 bp, Setaria italica
  Peptide Sequence Number=SeqID_72379
gttacattatttcactttgttcattttgtttatttctctggttacaaagatgaacagacgaaattttatttatatgcagtaggattcgtgtatgttctaaataaatattcatagaaatccgacttatttttcatgcgattttttttggggcaattttcatgcgaaattaatagggtagactggtgtcttgtccgggttgaagagcccaaacttcttctccgtgggatccccgtccttgttgtcctcgttgaacatggcgaacacgtacacctccatcgggcccggcttcctcggcgtgcccttgccggcgtggttgatcaggttctggttgtacgttctcgcgttgtccacggtggcgcccctcccgtcggccgacggccacccgctctccgacaccacgacgtcgacgccgccgccgcctaccttgtccagcgcggcgtggacggcgtccaccatcgcgtcgaagaggttcgtgtaggtgagcccgttggggtcgcccaccgtcgtcgagctcggctcgaacagcgcgtagttgaggtcgatgttctggttgtccttgtaggcgaagtaggggtacacgttggcgagcagcggcgcgccgttgccggcgaggaactgcacgatcggcgacatcacggaggggtccttgaacgcgccgttggacggcggcgaggagttgatgatcgcgtccatcttcaccgccgtggacaccttgatgctgccggcgaggttggccgacgtgagggcgtcgtggacgttcttcatggcctggaggaccgaggccgccccgtcgacctcgtttccgacgacgacgtaccggatgctgacgtccgggtagtaggcctgcacgttgtccttcacccaggacgcggcggcggcggggtcgttggcgaggtcgccgaccttgtcgttgccgacgtcgagggcgaggctgatgcccgagccgcgcagggcgttgaggacctcctggtcggcgaagtagaagcgcatgttggcgatgccgttggacttgtagagctgcacgacgtcgctcttcgatgggaggccgctgccgatcacgccgtagcacacgccaatggctcgcacacttgtagcggtggcggcgaatgccgtaacgaccaatgctgccgcgagcaccggggcaacgcctcgcttggccatcttcctcgacgccggcgagtattcagagg

SEQ ID NO: 6406 - DNA, 631 bp, Setaria italica
  Peptide Sequence Number=SeqID_72380
ccgccgctgcacttgccgtctccgccgccgtcgtcgtcggagcagtccgaggacgagtccgtgcacgcgtcggcacgcatgcacgggcacgggcattggccgcgcccttcctcctcgtcatcgccgccgccgcccttgtccttggcattgtctgcggctcggcgccggtcgcggaccttccagtacacgtagaccgcgacgacgccgatgagcgcgacgcccgccgcgtcggcgaccgagatgagcacgatgaggctcgtcctgatcggctgccgggcgcctccggacgctgcggccgaggacgacggggccggcggggacaatgaggacgaagccgacggggccgcggcgcggcagggtacctggagcgggaagccgcagagccccgggttgttgaggaacgcggtggggccctggctggcgagcgaccccgactgcgggatctcgccggagaggttgttgaagcggaggtcgagcgtgacggtggccggcagccgcccgagctccgccggcaccccaccggagaggtggttgcgtgacaggttcagcgtgccggcgagcgcgggtagcttcccgagctccgcggggatggcgccggagaagttattgcccgaacaaatccagcatctgc

SEQ ID NO: 6407 - DNA, 761 bp, Setaria italica
  Peptide Sequence Number=SeqID_72381
gcatcgccatcacgggcaccgcacgattgccgtcggctatttggggcagtggctgctgtcgcctgcgaactgtgtggagagcgagtggtagatgaggaagcacgcatccaggtcgtgcagcgttggccccgtcgggatccggtatattgggtaccatgcaacggagacaagtcgcagctcctcagggtccgcaactctggaaactgctttgcgaggccacaaatctgcaccaaccaagtgcgcgtcctcagaccatcagagtttcatacaagcaagactgagcctgatatatgatgcttgacgagtctctgtcaggcatgccttatcagcaagcgcctcgcgctgatagggaggctcggactcgaggaactcgaagaggagctgctcgtggcagcttccggacttgccatcgtcactcaaagcttctctgccgctggagctcttgctggtttcttgaactgtggaggcgctgtctcatgctcgaggtcgctgtcgctctcctctgcacccgtcttgcgtttggcatcaatttcagcaatatcagtaggattagttgggtaccatgaccctgtgaccacaaaaggcacaacatccttatttcctgaccgttcattgcatatagttatgtcgtgatatagtactataggtgtcgtaggttttgctaactgagagtatcaaatatgtgtcaaagaagtttcttgagtatactgataaattcagaaaacaaaacctctatgtttgaggctttcagtagcccaaat

SEQ ID NO: 6408 - DNA, 1432 bp, Setaria italica
  misc_feature (1)..(58): n is a, c, g, or t
  Peptide Sequence Number=SeqID_72382
nnnnnnnnnnnnnnnnnnnnnnnnnnnnnnnnnnnnnnnnnnnnnnnnnnnnnnnnnnctaaacaaaactatttagtagtagcactaattttccagcatgttaagctatgcatacagaaaatttgctagctataggtgctaaagtggactaaataaatgatatcacgatcctttaaagattacttgttatcattgtctttccaatacgtcaggatactgaaattcatgctaagcacgtttttcatgtaaacaccgtaccaactaacatgacattgtattgctccacaactatacattttctgctacattttctccaaaaaacttcactggtacatgaaaaaaacattgagaaaacgacttgatgaacactatgtgatcccagtctgtctcactgaagactaactaccttcagacttagtaagatggagccgcatcgccatcacgggcaccgcacgattgccgtcggctatttggggcagtggctgctgtcgcctgcgaactgtgtggagagcgagtggtagatgaggaagcacgcatccaggtcgtgcagcgttggccccgtcgggatccggtatattgggtaccatgcaacggagacaagtcgcagctcctcagggtccgcaactctggaaactgctttgcgaggccacaaatcttatcagcaagcgcctcgcgctgatagggaggctcggactcgaggaactcgaagaggagctgctcgtggcagcttccggacttgccatcgtcactcaaagcttctctgccgctggagctcttgctggtttcttgaactgtggaggcgctgtctcatgctcgaggtcgctgtcgctctcctctgcacccgtcttgcgtttggcatcaatttcagcaatatcagtaggattagttgggtaccatgaccctggaaggccgatgtgcctcatgtatcacgcccttaaaaatcgttgctatggaatcatcttgtttctcgacattgcaatggtacaggattgtcttgcttgggtccaaatcaaggttcatcgaaaaatgattagactgggaatgcgaaatcagaggggtctgtaccctatgtgctccgcaactgcacctttcagccgacgcgacgctaccgacgattccgccaacgagttgaagctgcgccgccgccaagctctatccccagcgctgcctgctccaggcttctagccccagcgccaggctgtcactttggggcgagggctagcgatcgggcgggatctcgcgagggtggccggctgcagttgcgctaagcgcggggcggcggtggctgcctgatgggcagatgacgattgcctggccaggattgtgggcggtcgggaagacggggtcgctgggcaggcaggcggtggcggctagggtggcggtggcgatccgtttttaccggcgagaggctcggcgtggtcgtccagtcgtc

SEQ ID NO: 6409 - DNA, 335 bp, Setaria italica
  Peptide Sequence Number=SeqID_72383
ggtgcatatcaaaagttatgtgtctagaaaagacaaaacaaacagtaacagatggacagatggagtgcttgctatttttatggaaatttggataggtctgcccttgtctattttagtgcgtcactgctagcgctgcacatgcagcccttctgatcggttgcagcggatggctgcaccaccgctgtaagatccgtctatcctgctgaaacatcctaatatccatcgctaacctagaacggtgcccttcaatttgttactcaccgatctaaatctaaatggggatactaaaattgcagaaacatgtcgcatatccttatcaaacctcgctagattgc

SEQ ID NO: 6410 - DNA, 322 bp, Setaria italica
  Peptide Sequence Number=SeqID_72384
cgcaccgccgcctcccgcctccgcgcccgcgcgcacgcgcagcaccaccagatcccattcgaccccgttgtcgcggacctcgagcgccgcctcgaggaccgcgagtgggagcgcctcgccgccgcggggctgcacgcgccgggcatggaggcggcgcccgtccctgaggacctcctctccgacggcgaggccggcgccgacgaggactacatcaacgacgccgcgcggttcaacgtcacgcgccgcgtggaggagctgttccccaggatcgatgtggaccccgccgacggcgccgtcacgggcgacgagctggccgcgtgga

SEQ ID NO: 6411 - DNA, 277 bp, Setaria italica
  Peptide Sequence Number=SeqID_72385
ctcttctgaaggcaaagcccctcgtatgcttcattctcactgtcaacagaatcatgcaacgcaatcttaggtggtctcccatcagtccctccaccacagagcccacaccttctcccttctttaaccaccttaactccccgtttttcatctgaaatgggggatttccgcatcctctcctttggaccatcctcagccaataccacatctgggacatgacccgtctgttcatcctgctggacctcttcctcttgctcagcaggaccagacgggtccagtt

SEQ ID NO: 6412 - DNA, 950 bp, Setaria italica
  Peptide Sequence Number=SeqID_72386
cctctcccttgccttcctctagatcatttgtaccacctactattggtccttcctcctcttcctcttgctctgccggcaccacttcctccaccacagagcccacaccttctcccttctttaaccaccttaactcccgtttttcatctgaaatggggatttccgcatcctctcctttggaccatcctcagccaataccacatctgggacatgacccgtctgttcatcctgctggacctcttcctcttgctcagcaggaccagacgggtccagttccatatgctgctcagaaggaaggttgctctcttctgcaatctgttcagtttgcatgtcaacctgctcagttccgcctgaattgctggccctaacctcctcattactctcatcacaaggtaactcgtcgctaccgtttcctcccaatacaggcaattccaactcttcagttttctcctcccgctgcaaaccctcctccgccaccaattcctctcccttgccttcctctagatcatttgtaccacctactattggtccttcctcctcttcctcttgctctgccggcaccacttcctccccaaccttctctcctttttctccatcttccttttctactacattgacaccctccactgcatcatgtgcgtctacattcaaatcgattgttaaattgatctctctatccgtcagttcccttccttgcgactgcaaacctccactctcctcgctcgactcctcgtcctcagccctctcgcgaacgtccaccaccaccgtcctggcctcctcttcctcatcctccgtttcatcctcctccgccgccgcctcctcctcctcttccccgtactcttcatcttcgaaccacaggctcctcgcccgcccctgcagcttggccttcccctaacacatccctcagccgcgagcgccacaccacactcccctgtcgtcgtcctcttcctcct

SEQ ID NO: 6413 - DNA, 446 bp, Setaria italica
  Peptide Sequence Number=SeqID_72387
ttggatggtgctgagtaatccgattcaatagagcatgcgcatttcattttcatcaaggcaaatataacaattagcattaagagtatctgaaatactacatatcctcataagataagtgatgtaataacaaatatacaaaaatgtaacaatggctggcattaaggttacaaagtcacaagcattttcagaattaagggtcttaaatttcagtaagcataagcaaggtaagacattgcatatccaaggatgaaaaaaaaagggtgatatgccgcgatagcgtcaaaacaattgcaaccaaggtggcatccatgaaaaaccaggcgaaatgattaatttacaaatccagaagcatatagaaaatcatctgagataggtaccagcaactcggtcaggaatgtaacgaagagcactccaagcatgcatgccaccaccagaatagcccacaa

SEQ ID NO: 6414 - DNA, 1867 bp, Setaria italica
  misc_feature (5)..(5): n is a, c, g, or t
  misc_feature (1863)..(1863): n is a, c, g, or t
  Peptide Sequence Number=SeqID_72388
agtcnctttttagttttttttttttttaagagtcaaaaggaagtttataaataacggagtcacattatgacaggttaatcgaattttacagtgactatactaagagcgcaccgagcaggtgtgccgtgcgcatttgggatgagcatttgtacatcgaagtgaaaccgcataatccattgcagcctcctcctatccaaagcttttgccttcaatacttgcgcaagaggaggagctcagtccacctgacgcaggccttatcccatgggcagcgaagaaaagcccgtccaactgtgtggtattgtgttaagtagtagtgtagtagtactagtaacgtcttgtatctatactgctgatcctgaaagccaatcttgatcaggccaggcttgattttccttgttcctgctctgtaacattgtccggtgctgtcgtttcttcggcaagctctgaagccaactcgctgggttgcggggcagggttgatagggccctggggaatgccgaagagcgtggagaatatctgcctgtggcactcgtcgcagaagcagaagtatgagaagtggccttcgtcaagaagcttgtgcactgtagctcccggaaccacccgccggacaaattcagccactgacggcgagaccactcggtcatccattccctgccagatatgtattgggcccagaaatcccacccactctcgttcaacttgattgaaaaaagacttgatgagttcaaaaaagcctcgatcttctttcttttgcatttgaatgtcggacaagctgaaaccccagtcagatacttgcaacacagcttcctctacaaatggacgtgcatcaccctggcgcacagactccgcaacattcctttcccagaatgcattgaactcaggaccatccagtaaagttttgtccttcttccccaatgacagtgacaaccaactctctgcctgtccttgctttccagaaaggaagcttcggcgatagaagaggggtaatagtgatggaaacctccgagctaaaatgtgcattagtttccgttttgttgaccagctatcccatgttttatgcctctcatctttggtcatcttggaatcatatggatttgccataggtgcgaacattgctgcaccagcaactcggtcaggaatgtaacgaagagcactccaagcatgcatgccaccaccagaatagcccacaacccagaacttgtccggaatatcaagaccattagccagatggagcatgtccaatgcagaagaattgagatttcggcctgggtgtggatcactttcaccaaaaccaggaagatcataggtcacaaggcgtgccccaaattcttccagaagggatgcactgattccagggattcctgccagccttgatgaaagaaaagaatgaggagcaatcagtgaaaatcttgccctatcggctgagactccttgttcttcatatgccagatagcgtccatcaggaagttggattctattcgcacttgggggactaatgataagtttctttggaagctctactggagtttcattgccactcccaacacctaaaactaggagcgtgacgaatgcgactccggcgacgatgagccaacacctcacggggtcgcgctcctcggggaggtactcgttcatgaagctgagtcgctcccccgtggccgccgcccgcttcctgagccgccgcgcgagctcgctgtcctcggcgccggcgaggctctgcgcggcgacgtcccacagcccccggcccagctccagcagcatctccgccgtggactccgcgaaccccttcgcctgctgcgcccacccctctccgtcctcccctcttcctcctcgccgtaccacccggcccccgccgccgcaacnttcg

SEQ ID NO: 6415 - DNA, 1145 bp, Setaria italica
  Peptide Sequence Number=SeqID_72389
cagacatttcctctaaagctgagggatggcagcaatggagatggtgatactattgaaataaccgtctatgactactatatgaagaaaggaattgaactgcggtattctggtgactttccctgtataaatgcgggggaaagcaaagcgcccaacatattttccgatcgagctgtgccatcttattccattacaaagatacaccaaagctttatctacactacaaaggacctcccttgttgagaagtctagacagaagcctgaagaaaggatgacagcccttaatgatgcactgcaacgcagtaattacgattccgaccccatgctgaggtcttgtggcatttcagttgctccaaaatttactcaaattgaaggaagggtcctgcaagctccgaagctgaaagccggcaatggtgaagatatcttctcgcgaaatggacggtggaatttcaccaataagaagctatttgaaacctgctctgtggataagtgggcggttgttaatttctctgcacgttgtgatattgggaaacttatccatgatctgatcagaaatgcatctgcaaagggaattcaaatggaccagccttttcatatgtttgaagagagcccctctatgaggcgcgcccctgtgtcaagaagagtggatgatatgtttgagcagataaaatcgaaacttcctggtgctcctaagttcctcttgtgccttcttcctgaaaggaaaaattgtgaagtctatggtccttggaagagaaagtgccttgctgaatttggtattgtcacacaatgtctagctccaacaagagtcaatgatccatacctgcttaatttgctgatgaagattaatgcaaagcttggtggtatgaattcgttgctgcaaattgaaacatctcttgcaatacctcatgtgtcaaaagtacccaccatcatcttgggcatggatgtgtctcatgggcatcctggacaatctgatagaccttcgattgctgcggtggttagctctcgtcagtggcctcgtatctctaaatatagagcatcggtgcacacgcaatcccccaggctagaaatgatgtcatccttgtttaagccacggggaactgaagatgatggcctcattcgggaatcgctgattgacttctacactagct

SEQ ID NO: 6416 - DNA, 1412 bp, Setaria italica
  Peptide Sequence Number=SeqID_72390
ttaagaacgaaactactagacgaaggaagtaaagaaccgactccaactccaccccactcccttctcctctttaggagcagcagacttcggaggcctcgccccgcccgctcccccctgctgctcttgttttgagagtgctgcttgtatttatctgaaaatgggttctcatgatggtgaggccgatgagttgccaccaccccctccggtgccaccagatgtggtgccgattaaagctgaagatgttgtgggagaattgccaccaaacaagccagtgaagcctaagagagtaccaatggtcaggcctggtataggaagaaaagggcagtcaatccagctctattcaaatcactttaaagtttcggtgaagagtactgaagactttttctttcactatcatgtgaatttgaagtatgaagatgatcgacctgttgacgggaaagggataggcagaaaggtgattgataaactgcagcagacatatcactctgagctttctaacaaggacttcgcatatgatggagaaaagagcctgtttacagttggcgctcttccacaaaaaaacaatgagttcactgtagttttggaggatgcagctactggaaagactgctgccaatgggagccctggaggtaatgacagtcctggaggtggtgacaggaagagagtgaggaggtcataccagccgaagactttgaaagttgaattaacttatgcagcaaaaattcctatgagtgctattgttcaagtcattcgaggcgaagaatcagagaactccctggaggctcttcgtgttcttgatatcatactgaggcagcattctgcaaaacagggctgtcttatagtgaggcaatcatttttccacaacaacccttctaactttgttgacttgggtggtggtgtggtgggttgtcgtggatttcattcaagcttccgtggcacacagagtgggctttccctaaacattgatgtttcaacaacaatgattgtgaagccaggccctgttattgattttcttctttctaaccagaaaattgatcatcctaacaaaattgattggcaaaaggccaagcgtgctctcaagaacttgaggattaaaacaattcatgggaatgcagaattcaagatttttggtctgagtgagaggaattgcaatgaacagacatttcctctaaagctgagggatggcagcaatggagatggtgatactattgaaataaccgtctatgactactatatgaagaaaggaattgaactgcggtattctggtgactttccctgtataaatgcgggaaagcaaagcgcgtccacaaatgaagttacaactagtaagttttaggaaggaataagaacaaagaacttaaacttaaggtaaaaaagtaaaacttaaagtaaacttaaagtaaacctaaaaa

SEQ ID NO: 6417 - DNA, 524 bp, Setaria italica
  Peptide Sequence Number=SeqID_72391
taaattgtcgggtaaagtctaaagtcgtccctaactattatttttccgtattcgtagtcttgttgtcctattctttaagctgtgccatcttattccattacaaagatacaccaaagctttatctacactacaaaggacctcccttgttgagaagtctagacagaagcctgaagaaaggatgacagcccttaatgatgcactgcaacgcagtaattacgattccgaccccatgctgaggtcttgtggcatttcagttgctccaaaatttactcaaattgaaggaagggtcctgcaagctccgaagctgaaagccggcaatggtgaagatatcttctcgcgaaatggacggtggaatttcaccaataagaagctatttgaaacctgctctgtggataagtgggcggttgttaatttctctgcacgttgtgatattgggaaacttatccatgatctgatcagaaatgcatctgcaaagggaattcaaatggacctttagctttcacacaaattctgtcacaaatttc

SEQ ID NO: 6418 - DNA, 271 bp, Setaria italica
  Peptide Sequence Number=SeqID_72392
tgcgccacgaaaccccggccttgagcgagtcgcagtagtccaggaacctcgctgtcacgtcgtagccctgatcccacctgcgtccctgccccgggagaacccagctccccggcgcgtagcccgccttcagctggacgtagtcggcgatgccctcgatgaggccgccgttcgcccggccctgcccgttccactgccacacgtgtgtcacctcgtggtacagcacgccggtcacctccttcttgacgtcgccggagtagccgccgacgtactt

SEQ ID NO: 6419 - DNA, 1769 bp, Setaria italica
  Peptide Sequence Number=SeqID_72393
gagtgcctcaagctgattgctggctcttttaccaactttaaatcacttgtccttgtcagctgcgaggggtttagcactgccgggcttgctactatcgccgccaattgcaggtttcttaaggaactggacttacaagagagtgttgtgaaacatcgaggccatcattggcttaattgttttcccaagacttctacatcactagaatccttgaattttgcttgcttggctggggaggtgaatgcttatgcattggagagacttgttgcaaggagtccgaatcttaaaaggttaaggttgaatcgtgctgttccatttgatgttttgtccagaatacttggtagcacacctaagctggaggatttaggaacaggatcttttgcaagaggcaatcaccctgctggatatggcagtctatttgctgctttcgcaaaatgcagttcactaaagagtttatccggtttttgggacgctacgggcttatttcttcaaagaattttttctgtttgcaaggaccttacatgcttgaatctcagctatgctccatcgattcaaagtaccaatcttatcagtattattcgtcggtgtacgaaactccatgtcttatggctgttggacaacattggtgatgaaggattgaaggttgtggccacgtcttgtcctgatctccaagagttgagggtatttcctgataattcaaacgcaactactgttacagaggaagggttggttgccatatcttcaggctgtcggaagttacaatctgtgctatacttttgcaatcgaatgaccaatgctgcactgattactatagcaaagaactgcccacaattgacgtccttcaggctatgcattctcgagctcagttcagcagacgctgtgacaggactgccattggatgaaggctttggtgcaatagtccagtcctgcaaaggccttaggcgtctctccatgtccggcctcctcacagactgcgtgtttctgtacattggaatgtacgctgagaagctggagatgctgtcagtggcgttcgcggggggcactgacgatggtatggtctacgtgcttaatggctgcaagaacctcaagaagctggagatcagggacagccccttcggtgacaccgccctccttgcaggcgtggacaggtatgaggcgatgcgctcgctgtggatgtcctcctgcaacatcaccctaggggcctgcaagacccttgcagcgagcatgcctagtgtcaatgtggaggtcattaatgaggcaggagcgaatatcaacgaggtggatgaggatgccagcaatgcgaagaaggtggagaagctgtacctctaccggacgattgccggacccaggggtgacacacctggattcgtctcgatattgtaagtgctatctgctgtggtggctaaagatggttcctctctgaagctggcttccggatgaactcatcagttttctgaaccgttgcctgcttagttatgctaccctgttttggtagcgttggaaacttacgcactatctgttgcgttaggtgaaaccttggtgctatgtggaccatttgtgagaccaactaatattatgtttgtggaagcttctcatgctggttggcgctcttccagtatctgggtagtttgtgatgttgaactgttggttgcctcgagttgttttttggttttctttgggaaaggagttgaaagatttttgctgatgaataatcttcttctgtgaatgtaaaggttcccagatggtaaaccttaaaaaaaaaacaaaaaaaa

SEQ ID NO: 6420 - DNA, 986 bp, Setaria italica
  Peptide Sequence Number=SeqID_72394
aacaaaaatagtaaccctggcggacaatgccatcagttgggtaaaaagggggcaacgaaaaggccacaaagagaaaaaagtatgacacttttaagctttagcacgcttccattagaaacaggggaaaacaaccgggggttccttcaaaccttacatgactctgtacaaaatttaccgcagaggattacaaacatatctgcagtatcttatttatccataatcatgcgagcagaagtccgaacatgtcaatatctcacatataaagcagtcaattcgcttcaccataggtcgagtgcaaactcaccaacaagcgcctcaataatgtcattctcgatcgcaatgctgacatcaaatgcttcaacctgatttgcatcccacctggcagtcatttggtccacttctttgtcagaaacttgtcttagagcagtcccacttgattccctccaattgctgatatcttccaatacctggcacttcaacagatctccgctcaaactgagtggcaacttcagccaagccttgtatccacatttgccaaaattgcagaatttcgaatccaatgattctacaatgcagtcaaacaggaagttggtgtgttgatatttcttatcttcggtaagatcagaatactctccaccaaacatgtccatagtattttccagcatttcgatgatgaaaggatggaggctactgcccaaaagtagttcagcatttgaaatagatacttctccaatgctgtggagcctggactctaagaatttggaatcatgtgcaagaaaattgtgtgaacatgataacttgtcgttgtcataaagtgtttcttcagcatcagttttctttgtatcaattgacattgctaaattaacaatatcagactccaaattaaacagatcttccatcttgttctcagttgacacaaataagtctttaccttctgaaagaaatgaaaagagagttcatcaaaacaccacaggtgctataaatta

SEQ ID NO: 6421 - DNA, 498 bp, Setaria italica
  Peptide Sequence Number=SeqID_72395
ttgttcgttcttacccgttccgttacggttcccttacccgttaagggttatttcctgaagggatcctccccggccgcctggacctggtggtggtccccctcggcgtgcgccggcagcagctgcagctccgcctcctcgtcctccagctcctcctcgggcacgcccgccagcaggtccggcggcgcgaactccgtcatgctcgtcgtccgacgcatgtgatgccgcgcaggcgccggcctcccggatctcttccccaccatcatcctcgcctactctgtctctctgtcttcctcgtatggtagtagtatacaccttctccgaacctatgtacggctatttactacgtaatccttggagcttctgtgagaaaggctaaaggaggtggtgtatgggtttggagctgtgccgagaagacaaggtggaagtggtggtcgccatggctatggccgtggggagggggagaggagctgaggaagaggtgggtgagcaaggaggaag

SEQ ID NO: 6422 - DNA, 486 bp, Setaria italica
  Peptide Sequence Number=SeqID_72396
ggtccggacaacatgatccggccttgtggtgtgaatagatccggacgatttcgtgcaagttcatccaaaatatggctcaccttcggcaaaacttggccatggtttgtcgcaccgtggcggtccatgactcgtccatcacggtgtacttggtcaccgttccatcaccatctccgtgtccattaacgccttctcggggatatgcatggagggagtcaacagcaagtttttgattcctgaagagaagctaggcaagccgatcaacatagagctgtgtgcaacttatgagagggttgctgagtactgtaacttctctttatatctgaagcaggaggaaattcagatggggctggaccactccaagctgttaaaagaaaataatgctacaattgagagttacattcaagatatctacgagcagttggaaaaagggggtggagaggcttttggtgttccagaccagctaattcaagtttttaagtcctcgac

SEQ ID NO: 6423 - DNA, 1079 bp, Setaria italica
  Peptide Sequence Number=SeqID_72397
gcaagttcatccaaaataatggctcaccttcggcaaaacttggccatggtttgtcgcaccgtggcggtccatgactcgtccatcacggtgtacttggtcaccgttccatcaccatctccgtgtccattaacgccttctcggggatatgcatggagggagtcaacagcaagcaggaggaaattcagatggggctggaccactccaagctgttaaaaggtttgctaattttacttcatctaactaaggctcaatctttaacaagagctttactgatagatacatagtcttgatttgatttgtcctgcttagtcttaatttgatttgtcctatttatttaccattgtttccaaataaatcggaactgttaagtacatgcaattcagaatgcgtgatgtccatgaatcggaactgttaagtacatgaaattcagaatgtgtaacgcccttttaagctcactgtttggttaactgacattaatgcatgctcttggaaatgtttgatttttgtgcccttatggttcaaagttgtatgcttgtatttcatgaaacttgaattcatgatattgtaatgtatgttgagttttgtaattgtggtcgttggaccttgatctgttcaattacttattttttgattaaaacagttaaattgcgatctttacttatttaaaaattgtataccttttgatttattatatatttggaacttaaaaatcattaatttttgtttctgcacctttttgttcttgcagaaaataatgctacaattgagagttacattcaagatatctacgagcagttggaaaaaggaggtggagaggcttttggtgttccagaccagctaattcaagtttttaagttcctcgacatcacctttgctccagtcacacctcctgtggtgatgccaaaccttgccaaaccttgatcagtccgtcctgcaaactacacttatgaagcttgtatttgtatatcttaagtgttgatgcaaaactcttagtatgtcttaagagaagaagtgaaaacattcggcatctcatgtttcgacttctgtattgtgtcattgtacgtcaaatcaattatctt

SEQ ID NO: 6424 - DNA, 1107 bp, Setaria italica
  Peptide Sequence Number=SeqID_72398
aacaacatcggtgtgattgacaactgatcccccatcagggctcctttcatcggtgcttcattcagccatgccaactccaccaagtgaccaagaatgcacagtgtgccactgtcaactgtctgctgttcaaatcatcagaaatctgggcatggatggaccaaaagcaactagcattcggtatcgttgagttgatgacaggaaaaaggaaaccatgcaaggtgatctgaatgatcacaaaatcataactactcatcatagcactactcatcatgcctgggctagcagccaccgtccccggccgcgattgtcccggggtgctcgagtcacttcttcgccgaagggagagggtgccccgagacggtgacgaggtcggcgaggaggcggctagcctgggccatctcttgctctttcgttgcttcagaggagagaggctgccgcgaagagatcggcatcaacagcgactcagaaccagaaccagaaccagcctgttgatcatgatgacaggattcgtgtgaatggacaagaacaatgaacgatgcggatgtacatagaggagatcgacggaaccagcagctagcacggtctcacaaccccgcagggctgccgtccttcctggggtcgctgacggcggtgagcctcccgcggaacacgccgccgcccgacgcgggcggctccgccagctggtgcacgatgaactggcacacagcccccgagtccgtgctccgcagccggtgccccctctgctccaggaacgccttcgccccgtcgctcagcgagatcacctcgccgtcgaccgccgtctcgtcctcgtacgtcaccacgttcgggatcagcttgtggtagaccctgggctgctggacggcggcgagaggatccatgccgacgatgaagtggttcaggaagacctgggtcaccgtggcgatgatgttcgtgccgccgctgccgcccacgacgccggcgagctgaccgttcttgagaatgatcagtggtgtcatggaggacaggggccgtttgcccggcgcgatgaagttggccggcgccggtgggagatggtcaggggcgagcttcacggcggggacggagaagtcgtccatctcgttgttgagc

SEQ ID NO: 6425 - DNA, 964 bp, Setaria italica
  Peptide Sequence Number=SeqID_72399
cccctcgcccctcttccgcggaacttcccagggcggcgtcctcgttcgcggaactcgcccctcgttcgccgccgcccccccgcccccttcctggttgaagggtccggacaacatgatccggccttgtggtgtgaatagatccggacgatttcgtgcaagttcatccaaaatatggctcaccttcggcaaaacttggccatggtttgtcgcaccgtggcggtccatgactcgtccatcacggtgtacttggtcaccgttccatcaccatctccgtgtccattaacgccttctcggggatatgcatggagggagtcaacagcaaggtaaggttactaagttatttaatcgattttgtgcctcacatttaatttcttattttcataaccctaaatcgatctgtcaaatacgccaatctgggcctatgacgcgcgtactcgccatcctgggccggcttctccttctcggcccattcagatcagcgaggggcctatatatttagccatctagggtttagaggaacagattctgtcgccgccattcttatagagcccccttcgcctccgccgtccgccgctgaagggatggacgaatttccgtttgccatccctgacgacgtgcccatcacggttatactacgatgatttttacttctctgtttgctcgattgatttatcgttgttttcttgactagatcgattgattagctgaccgttcttgagaatgatcagtggtgtcatggaggacaggggccgtttgcccggcgcgatgaagttggccggcgccggtgggagatggtcaggggcgagcttcacggcggggacggagaagtcgtccatctcgttgttgagcacgatgcccgtcgacggcgacaggaccttgccgccgaagtagtagttcaccgtcgtcgtcatcgccaccgcgttccggtcgctgtcccaccacgcacaggtggctcgtgccgtgg

SEQ ID NO: 6426 - DNA, 273 bp, Setaria italica
  Peptide Sequence Number=SeqID_72400
acaggaatagcacaaattggaatgatttgcttgttgacattggtacacaaataacatagctgaaacaattcaacagctggattaggcatgaaaaaaatcccctgcatgttgttgatcttattggataggatcagacaattatgcatggagaaaatgttcttaagaagaaaaattgctaagaattgaagataagatactgccaaatgtgatgaaggaccttaatgcaaggagcagagggctgaaataaggtgaaatgttaggtgaagttgaagg

SEQ ID NO: 6427 - DNA, 253 bp, Setaria italica
  Peptide Sequence Number=SeqID_72401
gccatttcttgcttgcttttggagagcgttagagcctttgtagcccggagatgatcttctccactttgtttctgctgttctgcttcacctggtcccttcgtctcaagagagtcaccgctgaaagccatggatcggcaggaacagaccagaactgcagcaccttggatcaggtgaaggagaaactacaaagggttgggctcgagtcatctaaccttgtaatcggggtggatttcaccaggagcaacgaatggac

SEQ ID NO: 6428 - DNA, 323 bp, Setaria italica
  Peptide Sequence Number=SeqID_72402
atctccctggacactcacattggacatggactgttcagcacaatcctgagtatgatgagctgcttctggtctgtctgacccctccatccgcatgcaattgtgttgcaaattcatgatatattgattttattgagtacttattacattgaagcttttgtagagtgctggaacagattcaactgtaaatttatggttggctcaagttagcagcaatgattctggaactgacagccctggttcacccaagaggcaagaagaaccattactcaattcatatactgactatgaagacagcatatatggtattgcatggagctcccacg

SEQ ID NO: 6429 - DNA, 1573 bp, Setaria italica
  Peptide Sequence Number=SeqID_72403
tccgtctccgactccgagcgagcgatcagccgtggggaggatccgaagcgcgcgagaatgcagggcggatccagcggcatcgtctacggcggcctcaagtaccaggcgcggtgcatcgcggacgttcgcgccgacgctggctccaccaccttcctcgccgggactctcagcctcaaggaggagaacgaggtgcacctgatccggctgtcgccggcggagagcgagctggtgtgcgacggcctcttctaccaccccgacgagatctgggacctcaaatcgtgccccttcgatcacagggtcttctccacagtctacacctctggtgagggttatggcgctgccgtctggaagatcccagagcagcatgggcagtcaaactcgccgcagcttgagcagctcttcgagctcactgggcatacgggcaagataagacgcgtactctggtggccacttggaaagcatgataagctaattagcattgatgacagaaatatttatctttggaacatagacacgtcaaataaatcagcaaagatgatatcacagggatcggctgacatgcttccaaatttacgtggtggagcttgggacccacacaatcacaattcaattgctgcaatatcagattcatcacttcacttatgggatctccgttccatggacaaatcaattgcaattgaacatgcacatatacgggatgtggattataaccccaagaagcaaaacataattgcaacagcagaagatgaatttggaattcgcttgtgggatctcagaatgctgaaacatcctctgaaagatctccctggacactcacattggacatggactgttcagcacaatcctgagtatgatgagctgcttctgagtgctggaacagattcaactgtaaatttatggttggctcaagttagcagcaatgattctggaactgacagccctggttcacccaagaggcaagaagaaccattactcaattcatatactgactatgaagacagcatatatggtattgcatggagctcccacgacccatcattattcgcttctttgtcttacgatggaagggttgttttggaatcagtcaagccctacttgccgagaaaatgaagcttgccggtcatcttctgcattcaacagcgtgcaattgatagccaagaatgttgcagaaatcatcttggctgatatccgatcttccgccctcttgggtgatgcgatgccaacagtggtaccaaaaaagtccgatgtagcttcgattggaaagaggacagcacagtcgagattatcagcagttctttcctgtatcttccaagtcttatccactgtgatttccttttcagttgctagaaatttgtctgtgaagatctgatcggagtggctttccgttttcggtttgtaagaaatattgcttcttacttgactcttaggattttgtatatttgaaaaaggcccgttatagggatgctgctttatgcactgaagtagaggcgaactgactttgtaagaccatcgagatgaacagagccagctattttataaaccattcttttcgtgttcaatttttcaaaaaaaa

SEQ ID NO: 6430 - DNA, 1305 bp, Setaria italica
  Peptide Sequence Number=SeqID_72404
cgacgcgggtcaagttcctcctcgtggggaacgagatcctctccgactactccatcgccaactccacctggctgcgcctggtcccggcgatggagaacatccacctgagcctacgcaagcggggcatcagcagcgtcaagatcggcaccacgctcgccatggacgcgctcgccgacggcgacttcccgcgcccgccgtccgccgcggccttccgccccgacatcgccgcgtccgtcgtgcgcccgctgctgcacttcctgaacgggaccaactcctactacttcgtcgacgcctacccctacttcgtctgggcgggccacaacctcaccgtcccgctcgactacgcgctcttccagggcggacacacccgctacgtcgacccggtcaccgggctgacatacaccaacctgctcgacgaaatgcttgacgcggtgaccattgcgatggcgaagctcgggtacggccgcgtcaagcttgccgtcgcggagaccgggtggcccaacggctgcgactacgaccagattggcggcaacgtccacaacgccgccatctacaacaggaacctcgcggcacggatggccaagaacccgggcacgccgctgcggccgggagccaagatgccggtgttcgtgttctcactctacaacgaggacctcaagggcgggccgggcaccgagcggcattggggcctgtactacgccaacggcacggcagtctacccgatcgacctcaccggccggcggccgctgtggtcctacccgccgctgccagcgctggagaacaataccccgtacaaggggccgatttggtgcgtgctctcagccgccgccagcaagaagctgaacgagacagcggtggggaacgcgctggcgtacgcgtgcgggcagggaaacgggacctgcgccgccatccagcccggggagaaatgctacctgccgaacacgacggtggctcacgccagctacgcgttcaactcgtactggcagcagttcaggaagactggagcaacgtgctacttcaacaaccttgccgagcagactatcaaaaatccaagccatggctcctgcaagttccgcagctcgttagactcctaactggctctgcctgggcgaacggagggggagaaagcacattcatgcgattcttgattttgtgtaaacccggctagacgactagcgtacttgagagctaatatagggcggggacgtgcttttggcaccgtagatgtcgtcctcacttctcactcagactttggctgtaacagtggagacttgctctgttgctcgtgctacaaaaaaaaaaaaa

SEQ ID NO: 6431 - DNA, 269 bp, Setaria italica
  Peptide Sequence Number=SeqID_72405
ggtcggcgagagtgcggtaggcgtcaggtgcatgtggagcaggtgcagaaggttgcccggacccggcggcgccgccaccaccggcgtggccacggagtactgctgcccccgcaggagctcccggacgtacccagcgatcgcgtccgtcgcgggaacgccggcgtccggaacggcgagccggtggaccttgtcgacgacgaagaacggtatctgattctccgcgagatacagggctcgcgcaccaccgcgacggcctcatcatgtcgccg

SEQ ID NO: 6432 - DNA, 296 bp, Setaria italica
  Peptide Sequence Number=SeqID_72406
ctgcggccggaacgcctccacgagctgcgcctggtgcgtgaggagcgggaaccgcgcggcggccgcggcgtcgcgggagagccgcccatgcacgacctgagcccgcaggtaccggcccgccgcctccaggaggaggccctcgtcgagccggccccagatgtgctcgggcgtgtcgaccaggtacttggcgcgcgcggcaagcgcgtagagcctcgcgcgccctccagcggacggggacggcgaggcggcgcttgcggcgggggactctccggcggcggcgagagcgacgagaggga

SEQ ID NO: 6433 - DNA, 828 bp, Setaria italica
  Peptide Sequence Number=SeqID_72407
cggacttcgaaaagagcatccttgtctggcacattgcaactcaagtttacctatgggaatcgtccaagtttgacgaccaacattccacagaagaagccagaaatagacagcagcagcttgctgaggcaatcaagatggcatccgactacatgatgttcctgctggtggccaaaccagacatgttgcctagcaccgctcgcgctgcccatatttgcaatagcgagtatgtccatagctgcaagctgttggagcatctctactcaactaatcactaccatggctcctccatctcacaacaaacacaggggactgcgcagaggattcttggcaatttccgcagcattccaaatcgagagagcctcgtcactgaaatgatgtccttcaccggacatatcgatggatctgcttgttattgcggtcttacacttgccgaggagcttctccggatggaatccagcgcacctgacttgttggagatggtgtttgaagtgtggctgcagttgttgtgccatgctgcccaccagtgtgcccgagattcgcatcccaggcagctcaacactggcggtgagttcattacgatcgtgtggcttctgacccaccatatggagacattaggcaagacggagggacaaaaccgtacgatgagcctcgacgttaccggcccggttcgtctaaatgaccatttagcacgtgtaaacactatttgaacgctacataatggttgccgttctatttaatcgtatgtttatcccatttaaatggtgaggtataatgtcaaagtatatttcataatgaatctaattattataattatttggtatcaaaaaa

SEQ ID NO: 6434 - DNA, 657 bp, Setaria italica
  Peptide Sequence Number=SeqID_72408
cacgcccgagtggagcgacctggtacgcggcgaaggggtcgccgaagaagttgaactcggcgaacgggttggcggcggtggcggtgaagaggttgccggcgacccgcacggcgccgccggagacgtagatgcgctccacgttccgcctcaagtgcgggtgcgtcatgaggaggagcgcgaggttggtgtgcgcgccgaggaggagcacagacgtcgggccggcggagagcgtgtccgccatcacccgctgcgccgtgggctgccggagcggccggtacccccggggaccctgcgggaggaagccccttcggacgccggagttggtgtcgatgtcaagccgcccgccgcgccccggcgggatggcctgccggtagcggcagccgccggccgtggacatgccctgatagatgagtggcaggtagccgccgacgttggggcgtatgtcgccggcgccggatatcccgccgtcgccgccgacgccgacggcgatgtcgtcgcggcccatcatgtataggatgtcgtagacgtggttgacggcgtgcccggcgtcgctccactcgttggcgttgatggtaatggccttgacgtcgaactcggagcggttgtgcttgaggatgtagagcagcgccagcacgtcgtccgtgtccatgtccgtgt

SEQ ID NO: 6435 - DNA, 273 bp, Setaria italica
  Peptide Sequence Number=SeqID_72409
tctaccccggaggtgttcagccggcgatggcggaggcggcgacgggggcggtgcgggtgcagaaggtgcgggggagggtcggcgctgacccgctgcttcgccaggtacccgctcaaactcatcgccccctccaagatgggccccgcctcctgcgacgcagtctggctgtacgccctcacctacggcggcggcatcgtctccggggataccatctcgtgcacggtcagcgtcggcgatggctgcacggcggcgatcaccacgcaggcttccacc

SEQ ID NO: 6436 - DNA, 330 bp, Setaria italica
  Peptide Sequence Number=SeqID_72410
cagttgaagaagaaggcaaggcctgtgcgcggcacacgcgaagggcccatccgtcaccccccggcgagaaagcagagatttttcgcatcaggacgctaatcctatcgcctttgtctgacgacgcccctcctcctctcccttcaaacccgtcgctttctcgatgttccgttggacgtcgagcctcagcacggccatggtcggcccgatcttatctgcagacacaaccaacacaccagcatggacggcgaccaggcagcgtgggcggggacgacgcgaccggcttgccatcgccgccgccgacgcggccgcagctgcagccgcagccgcggt

SEQ ID NO: 6437 - DNA, 310 bp, Setaria italica
  Peptide Sequence Number=SeqID_72411
caaggtcagagtcctcctctaatctctgtaacagcgcgattgcgaaatccatggatctagcgagccacaagacggcccttgcacagctatcgaccttccgtgcagtgccctccgtgacctctttctccacgatctccgttagcgtagagtacttggctgggtccaacaagtacagctcctgcagcctctcgatgttccgttggacgtcgagcctcagcacggccatggtcggcccgatcttatctgcagacacaaccaacacaccagcatggacggcgaccagtcgccgaattaaacaagtaaagaaaaa

SEQ ID NO: 6438 - DNA, 669 bp, Setaria italica
  Peptide Sequence Number=SeqID_72412
acccagaggacagcttcatgagcctgatgctgaaggcccagagaccaggtgaaactgccggcagcagcctcctccaccacgccgttgctcatcagtcggatgagagcacgcaattcatggcgtatcacctggcagagctcgggagatacagcaacaacaacgtgtccctgacgttgggtctgcagcacgccgagaacagcctctcttcagtgccaaacacccagacccagccgggcttccccggcgtcagagacgaagacatctacaacgccacagctcctctcaacgttacctccacgtcttcagactatgaatccacgaaccaaatggatcaacaacaacggcagcggttcgagccatcgcctctgatgcatgattttgtggcctgaatttcagctcacacacattctataaaagcgcgaggaaaaagattggcatttgtagtgccaggatgaataacatgcctggattgaattttcaggcgtggaattgtagctgtagttgcaattggggtacagaaggggaggggaggtacatagcattttacatgtataaacgtattccatctttacaggatttctttaccgctatcaccccaccacctacatttacattacatttacgcttagttgtcctaggtattgtaattaactattgtccttggtattt

SEQ ID NO: 6439 - DNA, 649 bp, Setaria italica
  misc_feature (639)..(649): n is a, c, g, or t
  Peptide Sequence Number=SeqID_72413
taaacgaaagaaaacaaagaacctactacttacaagtagaccaggagatacagcaacaacaacgtgtccctgacgttgggtctgcagcacgccgagaacagcctctcttcagtgccaaacacccagacccagccgggcttccccggcgtcagagacgaagacatctacaacgccacagctcctctcaacgttacctccacgtcttcagactatgaatccacgaaccaaatggatcaacaacaacggcagcggttcgagccatcgcctctgatgcatgattttgtggcctgaatttcagctcacacacattctataaaagcgcgaggaaaaagattggcatttgtagtgccaggatgaataacatgcctggattgaattttcaggcgtggaattgtagctgtagttgcaattggggtacagaaggggaggggaggtatatagcgtaaatgtaatgtaaatgtaggtggtggggtgatagcggtaaagaaatcctgtaaagatggaatacgtttatacatgtaaaatgctatgatttaagggccatgctgtaaagaagatttacctgtaatgggtactcgtgatccaggtatatatataccgtgcaggctgttttaaagggaaattgggttaaaaaaaaannnnnnnnnnn

SEQ ID NO: 6440 - DNA, 492 bp, Setaria italica
  Peptide Sequence Number=SeqID_72414
aagaagaagagactgatgggggactaaaagcgagggagtgtcttccaatccacaagagtctggtgccaatgccgctgctgagctttcaactgcggagaagcaagagctccagaataagatggcaaaacttatggcaatgttggatgaggtgtgtgagtctactgcacttgtaccttaccatttcagtaacacaacgatgtttttgctagactgaaagctgtagagtgtagaggtaatatgcatgaagacagacttgttcgcaaagattagtttcacttataatccttaaatattcagatattccaatatgaaggttgataaaccaatactttattatctagggacggctgcagattactttttcttatatattgaaagtcgactccatttccaccttttgtcttagaaaatcctgaggaatcccacccatccgttctgtttgagttgcggcctaaatatcaagtcaaatagttggttcctgatccaaaggcc

SEQ ID NO: 6441 - DNA, 1392 bp, Setaria italica
  Peptide Sequence Number=SeqID_72415
acgggcaatccggaattctaagtatctgaaggcagcacaagaattgcttgatgagattgtcagtgtttggaagagtgttaagcagaaagcagataaaggccctgctgaatcaggaaaaacagatggcaaagagactgatggggggactaaaagcgagggagtgtcttccaatccacaagagtctggtgccaatgccgctgctgagctttcaactgcggagaagcaagagctccagaataagatggcaaaacttatggcaatgttggatgaggtggaccgaaagtacaaacactattatcatcagatgcaacttgtaatgtcatcattcgatatggttgctggttctggagctgccaagccttatactgcagttgccctccagacaatctcccgtcatttccgatgtctaaaggatgctatcaatgatcaaattgctgttatccgcaagaaacttggggaggacgacagtacatctggtaaagagggcaaattaactcgccttcgttacattgatcagcaaataaggcaacagcgagccttccaacagtatggtatgctacagcaaaatgcttggaggccacagaggggactacctgaaaattcagtctcaattctccgcgcttggctttttgaacacttccttcacccgtatccaaaagattctgaaaagctaatgttatcgagacaaactgggttaacaagaagtcagatttcaaattggttcattaatgcccgtgtccggctctggaaaccaatgattgaagatatgtacaaagaagaggttggtgatgtggagttggactcaaattcgtcctccgacaatggggcacgaagcaaggacaaagcgccatcttctgaagaaaaggaggacctgaagacttcaacaagccaggcttgccaaagcagtcagcttgacgaatccaaagccaacgtcggtgggatgatgagcctcggcggagccccagccggcagcttccacaacgaggtgaacccagaggacagcttcatgagcctgatgctgaaggcccagagaccaggtgaaactgccggcagcagcctcctccaccacgccgttgctcatcagtcggatgagagcacgcaattcatggcgtatcacctggcagagctcgggagatacagcaacaacaacgtgtccctgacgttgggtctgcagcacgccgagaacagcctctcttcagtgccaaacacccagacccagccgggcttccccggcgtcagagacgaagacatctacaacgccacagctcctctcaacgttacctccacgtcttcagactatgaatccacgaaccaaatggatcaacaacaacgtcgggtagtattactagtctaactaactaacgttgttacccttagtaacgtttagggtta

SEQ ID NO: 6442 - DNA, 466 bp, Setaria italica
  Peptide Sequence Number=SeqID_72416
gtagccggcggcgggcggcggcgacgcgcgcctcgcgcactccggcgggcgcctgcactacgtggccaacgacggcgcgcagctcaaggtctgggtgctcgacgacgacgacggctcctcacctgctgcgccccggtggcgcctgaagcacgcggtcaggctcgacggcgtcgcggagggagggtgcgggggggacgaggaggtccggttcatggcgctgcacccggagaaggacgcggcgtacttgtggtcggcgcggaggctcgtggagtacgacctgatgaggaaggaggtcaccggagcctgggagttcggcgacggcgagaagaatcgcgtcgtcaaggcctggctcgtgccttcgtcgctgtacctatcggattgccccctggctgatgctcacgtgccgtgctaaactctgacggcctgcagaatctgttcgagtcgtttctgttcttctgctgcctgt

SEQ ID NO: 6443 - DNA, 305 bp, Setaria italica
  Peptide Sequence Number=SeqID_72417
aatttctccaaagaattcagaattgggatagccttccttttcatacatgcaatgcataccgtggcgagtagatgctctcgctgtggcggctgcggccacagctcgatagcttgccgcgtcgccgccaccgcatgccagagaggaagtgaggccgccaccatgcgctgcggcggcggaggcgccgccgctgggctgaggctcttcggggtgcagctcggtgccgcttcaacaagtggcggcggcgcttcgccggcgttgcagctgcacaagagctacagcgtggattgcctgaacctgcaggcttg

SEQ ID NO: 6444 - DNA, 997 bp, Setaria italica
  Peptide Sequence Number=SeqID_72418
agcttgctggggagtatcagattatgcataaatagcataccatcaaatgagcaaaactagggaacgatctgtcggatcaaaaaacaattaggcacagaagacagtatctcaatcagctggtacgcatacttcactaacaagcaggaaacatgatttcccaaatcaacacacattgcgtacagcagccctcattgtaagctaacatatagcaaaaactccgtacgaagaaaagcacctttttcatctggcggcaagtgcaagcatgggtgaaatcattccttgaatcccctgcaacgtgtgctgtatctggatctcttctccaaccattctcttgagattcctgatgtgcatcctcagcttatcatcagatcggatatcctcctctcgcatctccacaaccttgtttgctacacccaacaagaaccttgcataccttggcaatgtcgcattccggcgaaggaactcaagcagcagcccaagttcctctttatccaaattcccaatgcatctcaccagctttctcctcgcaaccagctcctccatcacagccacagcgcttcttgggttgttcttaaccaaagctgaaaccagagcctctttgtgcctgaactttctcagtaacttatcatgctccgcaattttaaccttcttaggcttcttaatcacaaagtcaccctccttagccttctcattctgtccacggaggaagtaccggaagtaatttggcttcaacacgggcttctcaggctctggcgatacccaatcaatctcaccactgccagccttcgtcccttcatcctcctcgtcaacagccttcttcttcctcttgcccatataaatcttcccttttgcagacccagccaccagcacagtgccacagggcgaacaagccacggacaggagcggctgtgggtgccgcaacgagtgcgtgatcttaagcttcccaaaatcaaagcacttcacatacccatcaatgcccgcactaagcagccgggtc

SEQ ID NO: 6445 - DNA, 281 bp, Setaria italica
  Peptide Sequence Number=SeqID_72419
gcgcaatgcccacgtccgtgacattgccgctgcccgccgttggggctgtcgccgcgtcgccggtcaccaccgcggcgggggcagcgacgcccctcaggtgtcgtcctctccgcctcttcgcgactccggccgccaccgcctcttcttcgccctctacctccgcctccgccgtctccagcgcgctgccgtcagcgaggcgaatccgcaagcacctggcgggcagagacggcgccccgtcgaagcccaccaagccccgcgtgttcttcctcgacgtcaacccg

SEQ ID NO: 6446 - DNA, 640 bp, Setaria italica
  misc_feature (615)..(640): n is a, c, g, or t
  Peptide Sequence Number=SeqID_72420
ggaaagtacgggaacgtaagcgaggaagaatccagactctccctcgacgaccaagggcgggcgccgatccgaatccgatcgccggaaaaagaggaggagaccaccggcggctgagagggtagcggcgacggagggatgacgcgcgggaagcagaagatcgacgcgcagcggcgtaacgccgagaagaaccagaaagccaaggggtcccagatcgaggcccgcgccgtcggcctcaaggttgtctgccccatctgcaaggtacaattggcaaatgaaaaacagctgactgatcactatggatcgaaacatcccaaggagaaacctccaagcacatcaaacgcctaatacatatttgctggctgtgatgcagaagcatagattctgctttggctggtttggggatccgctccatgcttggacctcaacgtcaattctacttcatagtgtgcgcatttcaccttgtttcagacaagagctttgataagcatgtgcgttcctacaagtacatcgtgtggtcatactgacagtgtatctcctaactgttggtaccttggataagagagtggtaatatgtcatggtcactcctgttaccctaggaaaaaaaaaaaaaaaannnnnnnnnnnnnnnnnnnnnnnnnn

SEQ ID NO: 6447 - DNA, 235 bp, Setaria italica
  Peptide Sequence Number=SeqID_72421
tccaaatccaacctagccgtcaaggcgtcgagccgccgcgccgccgcctccgcctccgcctcgcacgaaacgggcctgatcgccgccgcccgccgcctcgcgcctcctgcttcttcggcgacgtcagttctcgtgcctcgaaccgggaggaaggtatggctttgttggcccctgccacagctgactagtgactcgtgcaggttttgtacccgcgcagcaaattttacgacaggcg

SEQ ID NO: 6448 - DNA, 1025 bp, Setaria italica
  Peptide Sequence Number=SeqID_72422
aagaaacagaaacgggaggcgcgtccacctcgccctcgacgagaccaccggcgccgggttcgcgtcgcaggacctgttcctccacggcttcttcagcgccgccatcaagctgcccgcagactacgcggcgggcgtcgtcgtcgcgttctacctgtcgaacggcgacgtgtacgagaagacgcacgacgagctggacttcgagttcctgggcaacgttcgcgggcgcgagtggcgggtgcagaccaacgtctacggcaacggcagcacccacgccggcagggaggaacgctacgacctccccttcgaccccaccgacgacttccaccactactccatactctggaccagccgccgcatcgtgttctacgtggacgagaccccgatccgcgaggtggttcggacggcggccatgggtgcggcgttcccgtccaagcccatgtccctgtacgccaccatctgggacggctccgcctgggccacgctgggcggccggtaccgcgtcaactacaagtacgcgccgttcgtggccgagttcaccgacctcgccatccagggctgcgccgtcgaccccaccgacgaccgcctgtccgccgcggcgtgcgatgcgagggccagccttgagtcgctcgccgtgcccgctgggcagcgcgcggccatggcggcgttccggcgcgcccacacctcctactcctactgccacgaccggcggcggtaccccgcggcgctaccggattgcgccggcgcgggactccccggccgcatgttcggccccgacgggatgaagctgcaccggcgccaccgggccggcgccgccgccgctgcgcgcggtcaccgtggcgcacgggacgacgtcatgtgatcccggacttgattcttggctggctgtataaaaggcggagctgggcgggggcggcgggcgtgattgcttgcggtgggatgggggcgtcgtctgggggtggttgttctagcctagcccgcattgtcacgtaccccattcgccattggagtagcagcagctagtgttt

SEQ ID NO: 6449 - DNA, 1403 bp, Setaria italica
  Peptide Sequence Number=SeqID_72423
aacgcgtcagagtctggctcttgatcgtaacgccggtgcaagagagagggagaagaggaagggagggaaggaggcggcggtaaggtgaggtcagaggctgggagcagccatggcggtgaaggccgcgctcttgctcgccgccgcgacgtgggtgtgcctatcggcggcggccgcctccgccttcgagttcgaggacgtgcccaccgtcgccttcgacgagcggttctcgccgctgttcggcgacggcaacctcgtccgctcctccgacgacaggagcgtccgcctcctgctcgaccgccgctccggttctgggttcatctcctcggactactacctccacggcttcttcagcgcctccatcaagctgcccaaggactacacggccggcgtcgtcgtcgccttctacctgtcgaacggggacgtatacgagaagacgcacgacgagctggacttcgagttcctgggcagccggtggggcgggcaatggcgcgtgcagaccaacgtctacggcaacggcagcaccagccacggccgcgaggagcgctacctcctcccgttcgaccccaccctcgaggcccaccgctactccgtcctctgggctcccacccacatcatcttctacatcgacgacacgccgatccgggaggtgatccggcacccggacatgggcggcgacttcccggcgaagccgatggcggtgtacgccaccatctgggacggctccgcctgggccacggaggggggcaagtacaaggtcaactacaagtacgcgccgttcgcgtccgagttctccgacctggccgtcgtcggcccccgcgccgactcggtgctccgcttcccccgccgcgccggcgccggcgcggaccaggacctcctggggctcatgacggccgactatgccgtcatgacgccgcagaagcgcgccgccatgcgcgcgttccgggcgcggcagatgacgtacaccgtgtgctacgacgcggtccggtacgcgtccggcccgttcccggagtgcgacaactcggacgaggaacgcgagaacttctcggcctggggcgagtccaagaccgtcgtcatgaggccgcgcgcccgcggccgccgccggggacgcaaggccggggccggggccggagccaagggacgcaccggcgtggcaagcagctgagatcaaaagcaattccgatcggctgcgcaagctattggcacaatggttgcagatgatcagttgatccggtactgtaattcgaattcttttggggggtcagaagcatatgcaggttgtaaaggtaggtgtagggactagtagggattaatgcattatgattattctttgattccttcatttccttgggtggcagctaataataatacaacatatgatcgaattattaacaattaaaaaaaaa

SEQ ID NO: 6450 - DNA, 744 bp, Setaria italica
  Peptide Sequence Number=SeqID_72424
caattttcttaaatagcaacagtcactcagtgtgagtagtaaatatccgctgctcagcaccagctggttaactctctgtacagaactaaaatatattctacacccactcttttcacttgacataagacacatggtggatccaccagctgcccagcattccaatgagatgcagcacccttccatctggtaattcaacggttccaatagaaaagaacttgtaatcttgaacgtcaacatttcttgtatgcacaagctcctctttccacatagcattattttggcccatctccctatgacgaagctcctgaagaaacaggtatattgaatagcggctaggtctcgagcagtagatgagaagcaagatattgatggtgagacctaatgggtactgccaaccagtcaaaatcagaaacatcaatccaattggcagctgaagtttcctaaccaaaggccagaaggaaccaagctcatttttcaaagatcccgggggtggcctagtaacagcgtttgatggtagatctcttgtggtagcagtaacctttccttgatgaagtgccatccccagtgcggtacaggtcccaaatcctttgagcaggttgaggcctgacagctgcggccggagtccaagggccactctcgcggcgagcgaaggcccgagctcggcagcgcgaggttggaaaacggggctcgaatagcgcgcgaggaattgacgaacagggatggcggcgaccggagcgcgggagg

SEQ ID NO: 6451 - DNA, 366 bp, Setaria italica
  Peptide Sequence Number=SeqID_72425
cgcgaagaagaaggagatgacgatgagccagatgacctcgttggtgaaggcggagaaggcggcggtgaaggggagcgtgcgcgtggcgacggcagcggtgagcccgaggaaggcccacgcgccgacggggagcgggcccagcaccagccccgcgatagtggagaggaagatggagaggagctgccacccctgcaggctcacctcggcgggccgcggcgcgaggaaccgcacagccaggccgatggcgacggagatgacgagcggcacgagcttcgcaccggcggattcgggctcggggttagaatgggatgcttgggaggcgaggagaggcagggggaggccgcggcgaggggcggcggagaggcg

SEQ ID NO: 6452 - DNA, 252 bp, Setaria italica
  Peptide Sequence Number=SeqID_72426
ttaatccatgggatggactggaggaggggcgcggccacctcgcggagcgcccaggaggcgaagagggagagcgcgaagaggccgccgccgtccggcaggcctcgcacgcgcacgccgcgcagcacgacgccaggcacgacgccgcccacatggctgggtggtggctgctctctccgctccgccgatcagatcgcgctgacggtcgggaaggggatcgaattcgaagcccgccgcggcggatttggggatctc

SEQ ID NO: 6453 - DNA, 177 bp, Setaria italica
  Peptide Sequence Number=SeqID_72427
caaggtaatagtcctgaatggcagtagtggtgttgctgagccctcagaatccacatccacaatgcaagagtcaccttctttcacctcaccagcaagcatcttctctgccagactatcctccagaagcctcatgatagctggtgaggtgaaagaaggtgactattaccttgccctcag

SEQ ID NO: 6454 - DNA, 537 bp, Setaria italica
  Peptide Sequence Number=SeqID_72428
aacaagggaccatatgaacagacctgcggttgcccactgggttgcaatcctgacccagacagatggccaccaacatcaacaagctttccgctctcaccaatggaggttgaccagccagtcaagagcattgctgagtacatgctggccagggagaagatgaggtggaagaaagagtaggagtatgtcacaggccttggcacatccttcttatcttctgcctcacttccaactgaaaaaatatctagataaagcgtctaatggggtgggcgagccatgtcaatcaagtttttaccatcatgaggagcccagctgacttgtacagaaggccatctttcagaccaaagatttttctacctcagttaggcacttagagcaggttccaagggctcagcaacaccactactgccattcaggactattaccttgccctcagaatccacatccacaatgcaagagtcaccttctttcacctcaccagcaagcatcttctttgcggcgtgctatcatgaggcttctggaggatagtctggcagagaa

SEQ ID NO: 6455 - DNA, 334 bp, Setaria italica
  Peptide Sequence Number=SeqID_72429
tgtggactcaacctgttcttcattgtcttcacagtcatgtccggatggagtgaaccagtgaaacagaagacccgagaatgagaatgtggcaatgtaacagacaatgaagaacaggttgagtccacagtcatgtccggatggagtgaacctgttcttcattgtcttcacattgattcttgtttttgcgtttgctattgttgccctgcacccaaagatcaatggtagcttgttgcctgcatcagttattggtctctactgcacctatctgtgctacagtggactctctagtgagcccagggattacgagtgcaacgggcttcacatcactcaaagc

SEQ ID NO: 6456 - DNA, 699 bp, Setaria italica
  Peptide Sequence Number=SeqID_72430
gtaaaaataaccatataaattttctgcaagaagaatagagcttttcttttaattctattaaaacctactctgtaaccatatgttcttgactagtacaaaaacagaagctggacagatcccaaaatatattattgtacttcgacatttttgcttctaggataaacaccaaccatgttcccatggatgaaggacaaaacatcaaagtttaagcagcttaactcatccagccaaaggaatcctcgcatacactatgaacatggaagaactaacaacttggggtaatatgaatatgatcaatctttcaataatggacaattgaatcaagcattcctattatgatggcaaatctgtatgtaaatcactgcaggcccttttcgctcgccccagaataaccattaactaaggaaacagaaacaaaactaccactctacaaaaaagtgatccccacagatttatcaacatcaccatgaccaagtcaaacaaactttttaaaaggtaaattgcagccactaaagaaaccagcagtggtacatatttgtatggacatgacatataagccaaagttttataaaagaacggcgctttgcaaacctgatatactgatatgacaactgtgctgcggcaactagagcttcatctgtgtatctcagcttatgatggattcatatctctcacgaagacctcttaagatctgtgttg

SEQ ID NO: 6457 - DNA, 413 bp, Setaria italica
  Peptide Sequence Number=SeqID_72431
ctgagactttctccactggtattccagtccaagaggagacaatatgctgaatgtctgcctctgtgacaagaggaccaacttcaccagattcagtctctgctttaatcatctccttgctcttgtcaataatggctgtaatttgggccttcagctccatttcccgatctcttagttcccctgccttctcaaaatcttggccacgtacagcctcattcttctgcttggttatctgcctgagctctttgtccaactctttggcttcatcaggcagctataacatataaaggacatgttcagaaaagaacaatgcagctaactgtattgtctaggatcagaccaattcactggtagtacctgtgcatgcctcagcctaacacgggatccagcttcatcaatcaagtcgatagctttat

SEQ ID NO: 6458 - DNA, 815 bp, Setaria italica
  Peptide Sequence Number=SeqID_72432
aaagagaataatatcttcattttgcttgatttccttccataagcttcttcaatctttcttcaaactctccacggtacttggtaccagccacaagaagccccatgtcaagagtaataacctggcccagagaaaaaaaaatgttcattttttctgaaacaacatgggagtaatcaggaagacatgatttatttgcaaacaatggttgttctgttttcaactacacttgacaatataagaaatcgatactgatcccaccaagcacaaaatcacacttcatactaatgatgttagtgtactatacaaaagcacaacatcaacttgcctgggcatgttacagtaggaacttacctggtaaaagcaacatgttcgttactacaaactacataatttggaagtgaaaatgatgaatcctcccgcaaggggcacatctgggaagaatagcaagtgcagcaatctattgacacataacagcatggatccaaaataggttggtctaaacaaaccttctttccttcaattgtttctgggacatccccattggcgatacgctgcgccagcccctctgcaatagcagtcttgccaacaccaggctctccaattaagcaggggttgttctttgttcgcctgcccaaaatctgggttacacgctcaatctggttctgtctgccaacaactgggtcaagttttccctcttctgccagttttgtcaaattagtaccatattcctcaagtgtgggcatcttctggccactagttcctccaccaactccagcaccaacagcttccgtgctttcaccaaccattcttatgacctg

SEQ ID NO: 6459 - DNA, 1372 bp, Setaria italica
  misc_feature (212)..(212): n is a, c, g, or t
  Peptide Sequence Number=SeqID_72433
tgggttgcaatccttgtaccctagtactagtattggccacccaacatcaacaagctttccgctctcaccaatggaggttgaccagccagtcaagagcattgctgagtacatgctggccagggagaagatgaggtggaagaaagagtaggagtatgtcacaggccttggcacatccttcttatcttcttgttcatcagccttgctgaagggancaatggcttgtcggtaccacgtggtgagtctggtggagagagcacggttgcggaagagaccaagacaacggaacagcagagtagaccacggaaaggatggtggttagcagtcccagtgtaaggctaccagttgacacagcttttgagtgattgtgaagcccgttgcactcgtaatccctgggctcactagagagtccactgtagcacagataggtgcagtagagaccaataactgatgcaggcaacaagctaccattgatctttgggtgcagggcaacaatagcaaacgcaaaaacaagaatcaatgtgaagacaatgaagaacaggttgagtccacagtcatgtccggatggagtgaaccagtgaaacagaagacccgagaatgagaatgtggcaatgtaacagacaactgagacaaccaatagagccatgtaccagaactgttcatccttagcaacccagttctcattccatccgtgcacaaagtccaacagaagaacaacctgaacaagaaggaacagcccggatccaaacttggaaatcgactcatagaagctgacgacgccgttgggcacgaagaacatgaggaagacgatgatggcccagcagaagatcttggccatccatcctccgtggtggatcttgtcacgggggtccttctggtcctttatcccggccatgatgacggcgaggatggtgaagaagaggaagtttccgaggctgaccctgagcaccgcgtcggtctcgaaccactcgcggtccggcgtcttgtggaagtggttaatccatgggatggactggaggaggggcgcggccacctcgcggagcgcccaggaggcgaagagggagagcgcgaagaggccgcagtaggcgatgcgcgcggagcggcggccgatgctgccgaccgccgtccggcaggcctcgcacgcgcacgccgcgcagcacgacgccaggcacgacgccgcccacatggctgggtggtggctgctctctccgctccgccgatcagatcgcgctgacggtcgggaaggggatcgaattcgaagcccgccgcggcggatttggggatctctagcaaggtgggaggatttgggggaacgcgtgtcggggagggcacggagaggaaggggaaaggaaggtggattcgaccctgacaattg

SEQ ID NO: 6460 - DNA, 259 bp, Setaria italica
  Peptide Sequence Number=SeqID_72434
ggccgttaagagacttgatcgcccttaagatactagccaatacaccaatcacggagccaaccccgacgatggccttccagttgttgtaaaggaacgcgtacaccttaatccgcagcggcctcgtgatcctgtaactctcaatctgtgccatgacgcagccatagcagcgtccgatgcgaaggctctgaaggccggtaaagaagtcgagcgcctgcttgttggaaagccctgcccctccttccaggataccgcttgttcg

SEQ ID NO: 6461 - DNA, 213 bp, Setaria italica
  misc_feature (159)..(159): n is a, c, g, or t
  Peptide Sequence Number=SeqID_72435
gcactcccaagtcctccgaggagcagctggaagcaagcagactgctgcccatactcctcatcacctcatcctcctgcggcacaccactgcgcagtgcacacagctagctaagaaccagccatggctaaagagctccaagaaacttcctcctcctctgcnccaccacctaccgtccgtcgccgaccaccctccctaccgtccgtcgtccgtccg

SEQ ID NO: 6462 - DNA, 580 bp, Setaria italica
  Peptide Sequence Number=SeqID_72436
catcattgatgagcatgcttaccttgctgctcaagctgtggatactggcagcttctttaagaggaagttccgtcagataaaaaacttcgtagcatggcagaagtttactagccagatcagtcaagtagaagctcgaattcagaggctaggagaaatgaggaatcggtatggcatctccgtaggtgaaattcacaggagtaacaagttgaggcaccccaatcagctctttatgtcagaatcttcttacttaaccgataattctgaaatagtggggcatgctgatgaaatcgaaagattgacacaatggctgcttgaggagaaacaagagcgaactctgattgccatctttggtatgggaggtttaggaaagtctactattgcaagcagtgcctacaagaaccaaaagatctcaagaacttttgactgtcatgcatgggttactgtatctcagacttatcaagttgaagaactactaagagaaataataaatcagctgatagaccagagagcaagcgtggcaggtggtttcatgaccatgagtcgcttgagactagttgaggtaatacaaagctatttgcgg

SEQ ID NO: 6463 - DNA, 739 bp, Setaria italica
  Peptide Sequence Number=SeqID_72437
gttatttccttcttcctattctcggccacgtttctggccccgtccatgtccgcggcggtgccgccccgcgccgtcagggacctctcagtatcgctcgcgggaccgcacggccagatcggtcgggggcaccgtggcgggcccgctcgtcgccgccaccaccgtcgttatcctggccgccgcgttcaccgaccttaccttccaccgcctccccctcgaggacgacgcgtcggtgtccgtctccggcagcgccgaagccgacgagcatcgtgggcaccagccgccggagccgcaggacgcgggcgggctgcacccgcacctgcgcagcatggctccggggactcagccggttccatcgtacgctcgccagtcgtcccaggaggtgtggccgccggcgggaagtgcacagcgtccaaggccgccgtatcaatagctccgatcgagcctccgacgacgattgcttttcctgacatcggacgtctgcttcttatacggtcaatggcgctcgacccttcataattacacatctgattatttttcccgtctaattcctctcgagacatttgacagtgtggctagtgttagggtttaatatcagatacatttatgatccaggtactccaaactactccacttcgttagggttcatcattcttatttaatttgaactaggaaggtggcccgctcaatttgcgtgggtagctagccttttgtcatgctaatatttaacctttttttagta

SEQ ID NO: 6464 - DNA, 1322 bp, Setaria italica
  misc_feature (1)..(30): n is a, c, g, or t
  Peptide Sequence Number=SeqID_72438
nnnnnnnnnnnnnnnnnnnnnnnnnnnnnnaagttttaggtaagaggaacatcaatccattacaactcttgctcattcaagtaggtcactgttacaagagttcaccttagcaaccgagcataacgggtgacaaccaaaagccaaacacaactaacagctaaggttggatcatttacaaagtggtaaaaggctaccaagactagcctacaaaacggagcaagccactctgcatcacctagtccttgagttggaaaagctatcaaccttctacaaaggttatctcaaactgctggaagtacgatgtcaagccaacaatgccacggttatagttaacattgactacctggtgttaacaggtagaagcatttcaatttgccatgctaatatgtttcttaatcatggtcaaggtctccataacaccagtatagtgttgcaggactggagaatagtggtcgagtgcaatgtatacttttgcaagaagatctgttaaggcctcaacctcatcaccaagtaaatcgacctcgagctcagctttctgaagattagagcctcttgtctcagatatctctttgtatcgcagtgccttcttccttaaaagattgccttcttttacaaggtgtttacattgttcttttaatacacagaaccttgattcattgtgctggactttatttgcaataacagttagttgatctgacatgaatttttcaaaacctctcacagatttaacaacactttccatgaattcattcaattccttgtctttggaaacagcagatgtcaatcccttctctttttcttcaatgatagtatgcagaacttggttttgtttctccaactcctttagggaggctgaaacggttctgaatctatcattcaactcactcaaaatagcatcatcattctgaacatgctgctgagcttgctccaacctgcccataatattatcaaactccttgtttttttcagatatgtaggaatcttgctttcccactttttctcttagcaaatcaatttcatggcacagagagcccacacgagcctccattgccctcaatccaatctgtgacacaaattcctcctttttcctgactacttcagtaaaagaatccacaattcgcttcaagttctcaatcttttgcttctgtttagattcctcttcagcacaaccctttttctccaacaacaaagaatcaaacattgcttgagcaacagcctcattctgaattactgagcaaacttcatgcttcatatcaagctccatctcataaccatgcaatcttattttcatttcactaaagaactctttcatgacaatcttt

SEQ ID NO: 6465 - DNA, 253 bp, Setaria italica
  Peptide Sequence Number=SeqID_72439
cgcgcacatccccagccccgccgccggacatgctccccacgggtacggtgggcgacgtgggacaggagagccgttccttgtcgccatcccggatgcaaatccgtttgccgtgccggtctctcatgggtggcagccctagcatgccgccgtcgggagagcagcaaaatcctagcgtgtcatcgccggcgcgtctgccgaaaagcaagaggagagccagcacatcggcgtcgcagcctccacggtgggtaccaag

SEQ ID NO: 6466 - DNA, 831 bp, Setaria italica
  misc_feature (1)..(70): n is a, c, g, or t
  Peptide Sequence Number=SeqID_72440
nnnnnnnnnnnnnnnnnnnnnnnnnnnnnnnnnnnnnnnnnnnnnnnnnnnnnnnnnnnnnnnnnnnnnnagagttctcaagatttgattttgttatttgcattgcatggcatgaaaatgcctgtatacaggaggatgaataatccaagatgtgtaggaccaaaagtgaggtgaagtaggtttggtgagaagagaaaaatcttttacattggagggaacaataatgtcaaggatggggggaaatactaatcttaatgtatacgtatgtatttatgtatagttgtgtatatatgtatatatgcatatatgtactactcctttcattggcagccagctggagatgggccctcccaatcattcgacttggaaatcaaggaaaggcaaggatgacacatctttcatcagctcctccaggtcccactccccatgcatgacattcctgctcatgtactgctggtgggccccctcccagtagacagcagccacattgctgctgccgctgttcactaggctcatggcgttgatgttgttgtccttggtgttggtggtgttgttgtctgtgatgttgctctcattgttactcactgttgttgtagtctcggcagtgttgttgctgctgttgtttttagggttgttgttaccaccacttgatgctattagggcctggcctgcctggtcttggtcttgtgctgacatggcatccagcagaggggccacaccaaagaggccttctcctctcatgaagcaccctcctcctccctccattgccatcatcccatggtgatgaggactgcccattccatagtaaccgccattgtctaattagtagta

SEQ ID NO: 6467 - DNA, 541 bp, Setaria italica
  Peptide Sequence Number=SeqID_72441
tacgccgaccaacgcggaaggacctgagagaagtgcaggggcgccatctctccgccgccgccacatggaggctggaacacgccgccgccggtgccggcgctgctcgcgtgggtcaagccggagcagctcacctccggggactggtccgggaggctaacgtgcacggcgccggtgggcgacgactcggctcgtcgtagcctgagcgacagctcgctcgccgccgcggcgaacgggtcccggaagctgtcgccggagaagaaccacgtggggcagcagtacggctcgtggatccagctgccctccatctccccggcaagatgcttggccaccttgggcgcgtgagcgacggtgacatccgagggcgacggctcgtagccgccgtaggcgccgcgcgccgtctccaccggcgacacgctctgtggagcagcagcgcggatcagctggagctggccggcgagcatcgagccgccgtccaccaagaagctcgcggcggcatccgccggttcgccgaacccgataagctgccgtcatggaacaccgg

SEQ ID NO: 6468 - DNA, 370 bp, Setaria italica
  Peptide Sequence Number=SeqID_72442
acaacaagaatgaattttcttgagtttttttccttatcattgtgaatcattggttctttattatgaagtgttcagatgtgtaatgctttatttgaatatctttcatagtattaagcctttgcaaaaatgtaggagcataagaaagtagcacttttggaataggctaattgaacatccaataattccacgctcctgaagttcattcaaattcatcatatcttgtaccatgtggtcaattgcactgcaacaattataccatgatacctaattttattcaaggaatctagatgcaattttcaaggcatgtagtaccctctgataccactaattccaaatgaaaacggaacacagcatacacacctgctcctgc

SEQ ID NO: 6469 - DNA, 543 bp, Setaria italica
  Peptide Sequence Number=SeqID_72443
tcgagacgcagttgaacaaggtgatccaaggtgatacagtaaagtgaatggatagaagctctgtgattttttctctttattttcatgtttcttgatgtacttcttgaactctttggttttctttctcaccatggagtactaatcattaggggcctgcccctccagtacgatgtatttggtatatagaactgatagcgactgcctaactgcaagtaataactttgcagctgcaaggtttacttgaccattgaattttctcgatgaaccagttttcagtttaatgaatcggggaaacttttataatcccccaatctagcaacaatgattcttaggatattaggtgagctcattgtctgcctcaatacacatgtatagcattgtggccattcttttaaggttgccatatttttgctacttagtttatagcaggattcatactttataagctgttttcttttcttttacaacccgcatctgagtatctgacatcatgtgtcatatctttatggagaatcatatatcatttttgaattgagtacaaga

SEQ ID NO: 6470 - DNA, 310 bp, Setaria italica
  misc_feature (308)..(308): n is a, c, g, or t
  Peptide Sequence Number=SeqID_72444
ggtggggaggaacgaggtctccatcgtggggggcgggcgggcgggcgccggagcaacggcgggttctgtttagcgtcggggacggacggcggaggacccgacgtacgacgaaaacgtcgcctgtttgcgatcgtccacggctgagctaggctgagagccaaagtgccgctataggcaccgctctttcgaattattccccccgtttttgaggatgtaacgacaatgtaaggtctccagaagtctcaatcatgcttccatcatcggtagctcactttgcctattccctccgttccaaccgttccaaattnta

SEQ ID NO: 6471 - DNA, 1133 bp, Setaria italica
  Peptide Sequence Number=SeqID_72445
gtacatggcatcactgtgcctataaaagaaggaagaggggaacatccaaaaaattaccaagccacactaatcaatcttattcatccaaaaaattgcatactttcttacactagagataggcatagcaaagtgtatgtatattaatagtctcttcaagccttttccgttcttccctttcactggaatctaatagtgtacactggcgacttgttctggccgttgaagagaccaaagtgcttctctgtctcgtcccctgttttcttgttctcgttgaacattgcgaatatgtaagtctccagcgccccgggcctcttgggcgtacccttgccgacatggtggatcaggttctggttgtaggtctgcgcattctgcaccgacgccccaaagccaccatccgacggccacccgctctccgacacgacgatgggcacgttcgagccgcctaccttctccatcgccgtgtacatggcgtcagtcatggcatcaaagaggttggtgtactcgggtccgttcgacgtcggaggactcggcttgaagagcgcgtagttgaggtcgatgttaccatctgcacccttgtaggcgaagtaggggtagatgttggcgaggagtggcgagccggtgctcgccaagaactggacgatgggtcccatgatggaggggtcggcgaacacaccgttggacggcggcgaggatggcgtgtcgagcacgctcattttgacagccgtggacaccttgatattgctgaggccggccgctgagagcgcggcgttgagtttctgcatggccggaaggatcttctgtgtgtcgctgccttcgacctcgttgccgacggcgatgtacttgaacttgacgtcgtctttgtagggcaggacgtttgcttggacccaaacggacgcgtcggagaggagggcgttgaggtcggtttcatcgacgatgacgtcgatgccagagccccggagggccttcaggatggtggcatcaggggagtagatgcgcatcctgttgatcccgttggaccggtagagctgcaccacgtcggccgccgacggtaggccgtcgccatgggtgccgtagcacacgccgatggaatgcaccgctgttgggatagacgccaatataccaatgagcagtgc

SEQ ID NO: 6472 - DNA, 740 bp, Setaria italica
  Peptide Sequence Number=SeqID_72446
ccggggctgctggagctgaccaacggcacggcgcagctcaagggccacgccgtgcacccggcgccgctgcggttccggcggtcccccggcgggcccgtgcgctccttctcggcgtcgttcgtgttcggcatcatcccggcctacgctgacctcagcggccacggcatcgtcttcttcgtcggcaacaacagcttctcgaccgcgctgcccagccagtacctcggcttcctcaacgacacgaacaacggcaacgccagcaaccacatcttcggcgtcgagctcgacaccatccggagcaccgagttcaacgaccccaacgacaaccacgtcggcatcgacatcaacagccttaattccgtcaacgttagcaccgccggctactacaacgacggcaccggcgcgttccacaacctgagcctcatcagcgccaaggccatgcaagtctgggtggactacgacggcgagaccactcagatcaacgtgttcctggctcccctcaagattgccaagccttccaagcctctggtctcggccacgcagaacctctccgacgtgctcgtggacccggcgttcgtgggcttctcatcagcaacaggcacggtcaagtcgctccactacgtgctcggctggagcttcgccatggacggccctgctccggccatcaacatcgccggcctccccaagctccaaggttcggccccaagccacggtccaaggtcctggacatcatgctgccgatc

SEQ ID NO: 6473 - DNA, 348 bp, Setaria italica
  Peptide Sequence Number=SeqID_72447
gtgtacgcatgcacgcagcggcagctaccgcgggcccttttaaaggcagccgaagcatattcttctagcttacactgcaacagcagcatctatcaagatcttctcaccttctgcaagctgagctctggatcacactgacctttcaaggcgtatcagtggccgcgctgagggagtagtaaattgtgaattctgattagccaccaccatgctcgtgaggagcgcctccacgccggtcctcggcgcgctgctcccgccgggctgccagtcgccggcggtctcctccccggccgtccacttccccgagtcgccggcggccgcctaccacccgccggccatctcctgccaccg

SEQ ID NO: 6474 - DNA, 1435 bp, Setaria italica
  misc_feature (1428)..(1428): n is a, c, g, or t
  Peptide Sequence Number=SeqID_72448
ttccggtctatcgcccaacgaaccattccgcctgacctcgccgccgcacgcatcccgaaggctcctgcgacgggagctcgtcggctggaattccgctcctgttgtcgctgcccgctgcctattgcgcgctgctgctgccccaggtgcgccgatcgatccggacctgggttgattcatccgtcgtggtactagaattgaactgtccttgaggctgcagttagagaggctctggtagtgtgtctacatatttatgtctgtgtcaatgcgataagaatctgtctcaattagatatagaaagatgggtgacggggtggcttttgaggcggcgaggaagattattatgcacccactttatgcgcccaggtcttcaccttggcttgacttgaaggtgttctacattagggtgagcaattgtgtggttgatgagtctgcaccggagcatctcacgctcaaccacatccctttgtcgcctgatacggttattgaggtgaatggccagcggagcagcatgcacactgagtttatatcctcgtcactcaggagggacagggttgacaaaaagactgaggaagctacatttgtgagcacggataatatacggatgacagggagtgtgaggttccaggtctttgataagaatgatctcttgctcacaggagatttggatttgtccaatgccaatggagtagttggggaatcaaagaacagtagcaagaaatggaatatgaaatgtcaatcatcaacatcatgtaatggcttcttgaagggaaaactctccacaggctcggaatatgtacagccagtgattgaagtttatgttgctggcactttctctggcacacctatcatattaacaaaggcaatccagcttatatcacggaggaagtctgaaatgaaactaaagcttgattccatccctgagaatgaggcaactgaacaacagaaagaagagtctgctgaagactctttgaaggtatcagaattccaggattccaaaccagagacggatgtggatgttgactataacagtttgtactcaaggcaggactttctagagggtgaggacggtgagctttcatggtttaatgccggggtccgtgttggagttggaatcggccttggcgtttgtgtgggtatcggattgggtgtcggcttgctggtccgtacataccaaagcaccagtaggaacttcaggcgccgactgccctgatcgccaaatgatccccatgaatgtagatttgtatctaccttggtcttgtaggaagctaactgtccacctttcctgtccatgctatagacatagatgagtgcggctttctgttcttccctttctgcagtctctctgggtatctgatgctttcttgtttgcaatgccaatcatttttgctccttgagatgtaaatatgagtccagtcacaataataaaanaaaaaaa

SEQ ID NO: 6475 - DNA, 280 bp, Setaria italica
  Peptide Sequence Number=SeqID_72449
tttttttttttttgggagaaagtcgaatctactagactcgcagcagagtattgacatacttatacaagctgtattacactcggcctgtacatacgactggcgtacacaacaacccgagcacacgttacaagaacacacgaccatacccataagcacctgcccgcacgtacggctcgtgcctgcctgcccgcttgcactttattttatatacgtatacgtatacgtgtaccgcatggagtgtgcacggttattagctacgggctacggcacggatacgacg

SEQ ID NO: 6476 - DNA, 1201 bp, Setaria italica
  misc_feature (1153)..(1201): n is a, c, g, or t
  Peptide Sequence Number=SeqID_72450
cttcgctgccttcccggacagcagcgagcagtgagcagtccatttgacaaggagataaggcgcgcgccaccacacacgcacagcggcatcccagtaagctccatcggcgggcatgggggcactacccgtcgcccacaagctcgctctcacctcccccttcctcccgcgccaccgccgaccctgccccgccgcccaccaccacgggcagcgccggcggcgacatggagtggtggtggcgtacatggagccgaaccccaattcgccggcggccatcgcggggcgcctcgtcggggcgctccccgtggtgggcctcgttgcgcgcatcctgagtgacgagggcggcgtcggcggcgacatcatcgacttcgccgagttccgccgccgcgtcagcaagaagtgcaccgtcatggactcccaggccttctacgacttcaacgagcgccgcggcaagccgggggatcccttctacgtcctgctgtgctgctggctcgccgccgtcggcgccgggctactcaagacagaggagatcttggaaggcgtggcgcggctccgcatttccaacgacatcgagttcgaggaggagaccttcattgacatgatcaggacggcaaaggagaaacgagcaaagctgaaggctccagctccgcagataccgatggaaacgcgggcggagaaggcccttgaagccatctacgtctgctgcttcgggcaggacatggttgaggaagaggacgagaagcttctccgcacgatactgaacgctgtcttcccctccgtcgggaggccggcgatcgagaggatggtggcgtccatggccaagcaggtggcctccggcgagaggaagcgggacgggaggaccgtgtccaaggaagttcagcagcggcagctcaaggacctacagtttctcaaacagaacaagctggactctgcatgagccatcgagcgtgtttggccgtggtttacttactcaggtatttgagttccgtagttgtagggagacgaggaacaagtcagatgcaatttggtttttaccataagtgtgctaggaggaatcagccatgatagcttgcaatgcaaagatatcgaatgtaattaggacggcaagcgcggttcatagagtcagcacagggaagcagagtaaaagtcaatttgnnnnnnnnnnnnnnnnnnnnnnnnnnnnnnnnnnnnnnnnnnnnnnnnn

SEQ ID NO: 6477 - DNA, 1504 bp, Setaria italica
  Peptide Sequence Number=SeqID_72451
gtgtccctcaattaaccaatccaacaaaaatagaagctgatccttccaatagtggatatgctgttttctctaaaaattgtttgtccaatgtaaaactgtagtgctcccaaaggtgagtggcaagccatggcccacccattggccatagagcccacacaggatcaccagcatccggtgatgtttttgcccacaggtctgtgacttgatgactgacccagccgctagcttcgtaattcacttttgctgtcttagccccattgactgatagggagccaataaagtcaaacagtggttcttggcattcactaaggttacatggaagcgctggccagtaattcatttgcagatttatatttggatggggagctgcatcccatggtggtgaagggtcattgctccatatcccttgcaggttggaaatctgggttcccggccttgagcacgaaatgagtagatagcggccaaattgaaacagaagttctaccagagaagggtcttcattgtccttaaaagtaataattctgtctactgtagacttcacagaatcattaaggactgccgatctagtgcagtcagctctttgaaaagcataatctgacacagtagcatcctgagagccagcctctgctgactgacctagtctattctcccaaagctgataattacagtcatgtgaaagttgcaaggaaacacgctggaaaagactctggtaatcatccatgtggtacgcttttagctgggaatatgacaggctcctagccacacttaatgttgtgaaagcagataccgttggatccagtttagattctgaaggtttgataaatggcccttcaaatgaagtagcagctgcaagaagtaaaataacagagtcggcaccatcaagtttcagcatcttatcctttaatattttcactttgctattagcaccatttgtttgcaggtaaagaatggcacaaaatttaattccaatgggatgatcagaggtcttgttgtctttttgaggccgttcacctggacagctaccctccatgattatttcatttgcatctgttacacggatcttatggtctagtggagtagttaaagacactgtaaaagaaacatttcctggtttgtttgcagagattttagtcgcaatgacttgatgtgggtttgaggagaaatgttcccttgagtagactacctcgccaacagtatatgtgacattgactgttgcagtgtgaagatttagctctcttttgtaattcgtgtgcttgatatgcttaccaaagatcagatcaatatccccaagaggttggtagacctgtgtttggtcaccagagagatcatatgcagcagctgtggcttcaggatactttccattgtcaacaaggttccttactttagaaagaacaggaggtgctttgggatttgtataattaccaggtccacctgtccatagagtgtcatgattaagctggagcctctcggattcgacgccgccccacaccatggcgccgaggcg

SEQ ID NO: 6478 - DNA, 558 bp, Setaria italica
  Peptide Sequence Number=SeqID_72452
cgctgcctcctcgcagccgcggccgccgcggaggcggcgtgggcggcgggcgcttgcgcttgcgccgcgctcttctcgggagccggggccttctcggcggccggggcggccatgaccggcatgaggaagtagatcttgcccttctgcagctcggcattgggcggcaggatgacgggcttctgcacgacgatgccgccgccgccgtcggccgggcacgtggacggcggcttccggaggacgtgcttggggtacgccttcatgatctccccggccagcacgggccccccgctgatctcctccacccggccgttggagtgaacgatccgcaccacgtccagcgccccgcacggcaggatgcacgcgatgcagcacttgacggtctccatcgatctccccgacgaacctcaccgacgacggtctcctccctatccctctcaccttccaccacccgctcccggccagcaagcggccgtgctagctcatatggcggtggcgaggaggtcgatcgaggacgaacgcgagctgggcgatgcgcgcacgagcgagctcccgaggctc

SEQ ID NO: 6479 - DNA, 252 bp, Setaria italica
  Peptide Sequence Number=SeqID_72453
ttcgtcgtggtcttcttggtcctatctcaggagatgtttctcttcattcgtgtcagggttgttgattgggaaagcatattcagcttccttatgatagtagtgagtctgtctctcaacgtccttttgatttagtccactcagatgtatgagatcctgctcccttttcttcgaaaggaggtcacaattactatataatttttattgatgatttctctcactatacttggatttatcttatgtcctctcgtagcg

SEQ ID NO: 6480 - DNA, 356 bp, Setaria italica
  Peptide Sequence Number=SeqID_72454
cgttcgtttccgcttcccacagttcctcctcacgcccctagatccagatttctgcttcccccgccacctcgtctcgcttcgccggtggtagaaccccagcgactgggaaggagggaggcgagcaccatgtcggcgctgttcaacttcaactccttcctgaccgtggtgttgctggtgatctgcacctgtacctacatcaagatgcagttcccggccatcctcaacgaccgcaccggattccgtggtttcttttggaaagctgccaggataggtgagcgacatcagatacggatatcattcgggtgcttggctatgggaatatccacattattcttctaaggccaaagagttaatct

SEQ ID NO: 6481 - DNA, 529 bp, Setaria italica
  Peptide Sequence Number=SeqID_72455
taaacctaaacaaataacaaaagaaataagaacaaagttaacccggaccaatacctacaaacgaaccgcaccggatggcgtggtttcttttggaaagctgccaggataggtgagcgattgagcccttgggtatcattcgggtgcttggctatgggaatatccacattattcttctaaggccaaagagttaatctccataattttagtctaggatgcagaacgttgttttacttgtagaaagaactgttatatttcattttggcccatgtctttagtgaagcattttgcttcaatttttactgggatggagacaagcaccggtctttgtaagagctggcatcctaccactctggtactcgggtctgtgtctagagtggagatgcagaatgagggaacagaaggtaaaatatgttgtaccatctaatgtttgatttgttattatgatgtgatgaacagttcgattggttctcgtaatcatatattgtattttgtacccaagaaaaacttaaatgtatgagagtaagttgtt

SEQ ID NO: 6482 - DNA, 342 bp, Setaria italica
  Peptide Sequence Number=SeqID_72456
cacggaccagttgagtagttgactgatttgctggcgggcaggccggcaggcaggccggcagacccttggcattgcagagcgccagagcgagagagagggggaagactggggaagatgatgacgtcgtggctgctgagccgccggggcccttccggcttctgctggagctccaccgccgaccaggtcaccgagggcatctccgccgccggcctcaccgccgtcgtcaccggggcgtccagcggcatcggcgcggagacggcgcggacgctggcgctgcgcggggcccacgtcgtcatggccgtcaggagcgtccccgccgccccaggccgtcagggaccgcgt

SEQ ID NO: 6483 - DNA, 546 bp, Setaria italica
  Peptide Sequence Number=SeqID_72457
cgcggccacgccatgcggacctcgcgcgtcctcaacctctcgctgctccgccgcctccgcgtggccgccgagctgtctccgccgtgcttctccagggttctccctgcccggggttaccagtcgagaggttattctagtggtggaagctccaacaggccaatgagacagttctctgaacagaatgagtcaagtccccgaccattgatacactacattgctccatcagcactactatgttttgctggattagttgcttttgttcattacaatgatgagaagcgtgcggttcccttagctaaagggggaggacttaccggtgttcctaaaaggtgtactaccaatagacctgcaataggaggaccatttaagctatatgatactgaaaacaatgtggtgactgaatcgaagcttcgaggaagctggactctgatgtgctttggctatacatcatgtccagatgtggggccagcagaagttcagaagatggctgacgttatcaagctgttagagtcgaaatatggtatcaagattacaccactctttatc

SEQ ID NO: 6484 - DNA, 1667 bp, Setaria italica
  Peptide Sequence Number=SeqID_72458
cagttcctcataaattcctagtggaactaatgcgaggaactgttaaggctacttcttgccgcagcgtgcacgcttctaaggaactacagcatcgatcaggtatacaaaaaatcatcgggttgtgcagcacattctaaaatactgcatgatgaagcagcaactgccacatactagaaaaggtattttcacaaactctgcacacactgcgtgttgtcagcatcaatcgattcttctgtatgatccaatcttggacttctgtctgaactcttgttttggactgcctgccttaagaccatcatataggtcattggtgtattgatcattttaactcggccagtcatgttaagcaatcatctgattaaggtgccaagctgttggtgtgatgctacttctttgcggtttcactgccttgtgaagtagctgaagcagcggcactcttttcaagagtcttcgttgtggcattttcagctcctgacggctcagactgtttcttacgcctggctctccttgttgtcatcttgataagatcatctttttgtggcaccttttcttttgttgagccgcttgtttgctgcttgctgttggattctgaatccgcattaggaagcaaagctcgagaacttagtcgtagttggcccttgtcatttatctcaataagcttgacgtctatgcgatcacctactttgaaagcatcctcagccttggccaaccagcccgaacttaactcactgatatgacatagaccctcacgtcctggagcaatttcaacaaaggcaccgtatggagctattgatttgatctcacaattcctgtaaatttccccaacttttggaaccatggtaaggttagctattatagtttttgacttctctaagcttgataagtcccttgcggtaatttttaccgtgccatcatctccagtatcaatagcatctaccccagtctcctcaattatactttttattgtctttccaccagaaccaattattaaattcaccttgttaggtttgaccttcatgacgtgaattaagggagcatgcggagatagtgcttttgatggtggaggtgaagattttgacatttcattcagaatatgccgtctaccatccctagcctgaaggagtgcttgttccatcacaggcagagttatcccaactaccttgatgtccatctggaaagcagttataccactttcattaccagcaaccttcaaatccatatcaccagaggcatcttcagctccagtaatatcagaaagtataagtgggctaccatcgccaccaaattcttgtgtatcaagaaccaagcccattgctattccagcaacaggaaactttataggaaccccagcatctagaagtgctaaacaacctccacaaacagaagccatgctggatgagccattactttcagtgatagtactctcgacacgaatagtgtaaggaaaatcctcttccagaggtaaaattggctccagtgccctttctgcaagcataccgtgtccaatctctctcctactaggtgctccaattcgaccaacttcaccaacacatgatggaggaaatgagtactgaagatagaagctttttgattcctcggtgtctacaaggttgtcaattcgttgtgccatttgataaccacctaaagtgaccacagccagtgactgt

SEQ ID NO: 6485 - DNA, 456 bp, Setaria italica
  misc_feature (73)..(73): n is a, c, g, or t
  Peptide Sequence Number=SeqID_72459
cggctccgggtggcgtacgtgttcctcgccgtgctcgtccccgccgcggcggcggcgctgtacctgatgctgnggccccggcccgtgtacctggtcgactacgcctgcttccgcacgcggcccaactgccgcgtccccttcgccaccttccttgagcacgccaagctggtgaccttcgtggagggcgcctccatcgacgagcgcagcgtccggttcatgacccggctgcttgagcgctcggggctcggggaggagacctgccttccccctgcgcaccactacatccccccgtaccggaacatggaggcctcccgcgccgaggtggagctcgttatcttctcggccatcgacgacctgctcgccaagacgggcatcagtccgagcgccatcgacatcctcgtcgtcaacttgtctaagtaccttactttacgtacgtaccctaattacccgttacta

SEQ ID NO: 6486 - DNA, 482 bp, Setaria italica
  Peptide Sequence Number=SeqID_72460
aacctggtcgactacgcctgcttccggacggcgtccaactgccgcgtgcccttctccaccttcctggagcacgccaagcaggtgccggtgctcaacgagcgcagcatccggttcatgaccaagctgctggagcggtcggggctcggggaggagacgtgcctgccgccggcgcaccactacatcccgccctacaagtactgcaccctcgacgcggcgcgcggcgaggtggacctcgtcgtgttcggggcgctcgacgacctgttcgccaagacgggggtcagccccggcgacatcgacatcctcgtcgtgaactgcagcctcttctgcccgaccccgtccttcgtcgacatgatcatcaacaggtacaagctgcgcagcgacatccggagcacgcacctctccgggatggggtgcagcgcggggctcgtctccgtggggctcgcccggaacctcctccaggtggctcccagaggcgcgcacgc

SEQ ID NO: 6487 - DNA, 410 bp, Setaria italica
  Peptide Sequence Number=SeqID_72461
caaaacacccacgcgtgcagttacagttacagagccatacaggcaggcgcacgcgcatcctgccacgatgaacacgccgcgctccagagaacaagccctgaggaggcactcacggtggcgcgggcgatccggccggcgcactggcttctggcgctgctcgcggccgccgccgccgccaagctgaggcgcatgggccggcccaaggacgtgtacctcgtcgagtacggctgcttccggcccaagccgtggttccgggcgccgttcgccacgtgcctggagcacgccaacctgatgccgtacctaatcgacgacgaaagcgtcagcttcgccatccggctgctcgagcgctccgggctcggcgaggagacgtgcgtgccggaggcgtaccactacatgccgccgtccgtcct

SEQ ID NO: 6488 - DNA, 685 bp, Setaria italica
  Peptide Sequence Number=SeqID_72462
tggtgaacaacatcctggccatcgtcgcggtgccgttcgccgccgcggccgtgctcaaggcggcggagctgggtcccggcgagatcctggcacgcctccgcgcgctccggcccgcgcacatgttcctcgccgcgttcctgccggcggcggcggcggcgctgtacctcaggctccgcccgcgcgcggtgtacctggtggactacgcgtgcttccgcaccaaccccaactgccgcgtcccgttcgcgacgttcctggagcactcccgcgtgtggccgggcttcgacgagcgcagcgtccggttcatgacgcggctgctggagcgctcggggctgggtgaggagacgtgcctgccgtacgcgcagcactacatcccgccgtcccgggacctcgagtcctcccgcgccgaggccgagctcgtcatcttctccgccatcgacgacctcctcgccaagaccgggctgtccccgcaggacatcgacatcctcgtcgtcaactgcagcctcttcgcgccgacgccgtccttcaccgacatgatcatgcgccggtacaagctccgcgaggacgtgcgcgctgtgcacctcgccgggatggggtgcagcgcggggctcatctccgtggagctcgcccggaacctgctccaggtggcgccccggggcgcgcacgcgctggtggtgtccacggagac

SEQ ID NO: 6489 - DNA, 803 bp, Setaria italica
  Peptide Sequence Number=SeqID_72463
tgcccgacttccgcacggcgttcgagcacttctgcatccacgcgggcggccgggcggtgatcgacgagctgcagcgaagcctggggctgtcggacgaggacgtggaggcgtcgaggatggcgctgcaccggttcgggaacacgtccagcagctcggtgtggtacgagctggcgtacaccgaggccaagggacggatgaggaagggcgaccgtgtgtggatgattgggttcgggtcggggttcaagtgcaacagcgcggcgtgggagtgcatcgagccggcgcgcaccgccgaggggccatgggaggagagcatctgccgctaccccgtcgacatcccggaggtgctcaagcactagctagccgttgctggctgccgacgccgacgcctcctgatctgcatgcaatctatctctttcctctccccgtatcgatccttgtgtacacgtaggtaactacaccgcgcgctgtcacgtcccgtcgtctcgcgcatatgcatgtcgtctcccctccgaaactggctcgtggtggatcgcgaccggcgtgcccgtgacgagggaggaggtctcggacgtgacagtgtgtcgtggtggccgtgtccgggccggacgcgttgaatgccgagcctgacgcggtccttgtgtgctccgccgagcgcggggtaggtggttgtgcgcgggtacgccgggttaaatcccggccatttacacacgtatagtactcgtggtccttccagatcacattatgtaccctttctttcttttttcttttaaaacctttttttcctctattttgtttgagcctaa

SEQ ID NO: 6490 - DNA, 767 bp, Setaria italica
  Peptide Sequence Number=SeqID_72464
ctggacggcgtggcccatcagcatctctggccttgctggccgggtgcgcgcggtgcggccagtccacgccctcgcggcggcgatcctggcggccgcccttgccaggctgagacgcctgcgccggccacgggacgtgtacttcgtcgagtacggctgcttccggcccaagtcgtggttccgggcgccgttcgccacgtgcctggagcacgtgcgcctcatgccgtacctggtcgacgaggaggacttcgcctgggggcggcggctgctgctgcggtctgggatcggcgaggagacctgcgtgccgtacgcctaccactacgtgcccccggaccgcagcgtcgaggcctcccgggacgaggccgagctggtcatcttctccgctgtcgacaacttgttcgccaggacggccgtggagcccggggagatcgacgtggtggtcgtcaactgcagcatcttcacgcccacgccggtgttcgcggacatggtcgtcagcaggtacaagctgcgcgacgacgtgcggaccgtgaacctgtccgggatggggtgcagcgcggggctcatctccgtggagctcgcccggaacctgctccaggtggcgccccggggcgcgcacgcgctggtggtgtccacggagaccatcaccccgaactactacatggggcaggagcgcgcgatgctgctccccaactgcctcttccgcatgggcggcgcggcggcgctgctctccaccaacggcgccaacgaaacgacgacggtcttgggactag

SEQ ID NO: 6491 - DNA, 739 bp, Setaria italica
  misc_feature (632)..(739): n is a, c, g, or t
  Peptide Sequence Number=SeqID_72465
cggccgcgcggtgatcgacgaggtccagcacggcctcggcctctccgacgaggacgtggaggcgtcgcggatgacgctgcaccgattcgggaacacgtcgagcagctcggtgctgtacgagctggcgtacatcgaggccaagggaacgatgaagaagggcgaccgggtgtggatgatctccttcggcgccggcttcgactgcaacagcgtcgcgtgggagtgcatcaagccggcggccgacgccgacgggccgtgggttgactgcatccaccgctaccctgtgcagctcccagaaatatccaaggacatatctaactcctagagcaaaagcggagcatgcaactagtggtctcaggcgtatatttgtacgtacctggtatatatacgtatacatatcaagtaacgagtgagagggtatttgtatacggtatacttatgggatatggtatgtcccggatagaggttctttgaaaataagtggatcgatgtcattgatgtagcccgaagtacgggatcttcatgtgctgttaggttggaacaacattatagctgatcgattatactatatatgtatcttcatcaatataattgaaaataaatgctactaaacaaaatattatcaacctaaaatnnnnnnnnnnnnnnnnnnnnnnnnnnnnnnnnnnnnnnnnnnnnnnnnnnnnnnnnnnnnnnnnnnnnnnnnnnnnnnnnnnnnnnnnnnnnnnnnnnnnnnnnnnnn

SEQ ID NO: 6492 - DNA, 970 bp, Setaria italica
  misc_feature (963)..(963): n is a, c, g, or t
  Peptide Sequence Number=SeqID_72466
cgtaggcatagcacgggcaggcaatggcgccggtctcgtctgctaaggccaaggtgctaaaggcatcgtacaagctcgtcgtcaacaacttcctcgccgtcgtcgcagcggtttctgtcgccgctgcgctctggacggcgtggcccatcagcatctctggccttgctggccgggtacgcgcggtgcggccagtccacctcctcgcggcggcgatcctgatggctgcccttgccaggctccggcgcgctcaagaggaacatcgtggcgttcgggcccctcgtcctgccgatctcggagcagctcctggtggcgctgtccctcctgaagcggaagctcctgagccgggtcggcagcaaggtgaggctgtaccgcccggacttccgcacggcgttcgagcacttctgcatccacgccggcggtcgcgcggtgatcgacgaggtgcagcgaggcctcggcctctccgacgaggacgcggaggcgtcgcggatgacgctgcaccggttcggcaacacgtcgagcagctcggtgctgtacgagctggcgtacatcgaggccaagggaatgatgaagaagggcgaccggttgtggatgatctccttcggcgccggcttcgagtgcaacagcgtggcgtgggagtgcgtcatgccggccgccgacgccgacgggccgtgggccgactgcatccatcgctacccggtgcagctccctaaagtcgtagagggaaagggaataatctaattaagaacggtattcaacaggtgctagatcgatgagtgtgtttgtgtcacgcgcataatgtgcttgctatgtaggagaacgactactctatattaatttggcttccaaatgcatactgattttgcattgtgcagctttggctattgatttcttaaaacatctgctatgttgatccgcaatatttggaatctatgctttcttagaaaatttaataaaaaaaaaaanaaaaaaa

SEQ ID NO: 6493 - DNA, 1771 bp, Setaria italica
  Peptide Sequence Number=SeqID_72467
taaaagtaaaagtcacacagagaacgcaatgggaaagctcctcaaagcgtcgtaccacctcgttgtgagcaacttcctcgccatcgccgcggtggcgtttgccaccgccgtggtccagagaggatggccgttcagcatcgacggtctcgccggctggctacacgcccagcggcccgtccacctcatcacggcggcgatcctgatggctgccgtggcaaagctccggcgcgcccgccggcaacgggacgtgtacatcgtggagtacggctgcttccggccgaggccgtgcttccgggcgccgttcgcgacgtgcctggagcacgcgcgcctcctgccgtaccttgtggccgacaaggagagcctgaacttcgcgatccggctgctcgagcgctcggggctcggcgaggagacgtgcgtgccctactcgtaccactacatgcccccggaccgcagcctcgacgccgcccgggaggagaccgagctggtcatcttctcggccatcgacgacgtgctctccaagaccgccgtgaagccgggcagccatcgacatcctcgtcgtcaactgcagcctcttcgcgcccatcccgtccttcaccgacatgatcatcaaccggtacgggatgcgcccggacatccgcaacgtgcacctgtccgggatggggtgcagcgcggggctcatctccgtggggctcgcgcgcaacttcctgcaggtggctcccagaggcgcgcacgcgctggtggtgtcgacggagaccatcacgcccaactactacgtgggcagcgagcgcgccatgctgctccccaactgcctcttccggatcggcggcgcggcggcgctgctgtccaactcccgcgcgaaggcccggttccggctcaggcacgtcgtgcgcacgctcaccggcgcgcaggacagcgcgtacacgtgcgtgttccaggaggaggacgacaggggaaacgtcgggatcaacctgaacaaggacctgatgaccatcgccggcgacgcgctcaaggccaacatcaccgccatcgggcccctggtgctgccggcgtcggagcagctgctgttcgcgctgtccttcatcgcgcgcaaggtgctcaacggccggttcaagccgtacatccccgacttccgcacggcgttcgagcacttctgcatccacgccggcggccgcgccgtgatcgacgagctgcagcgcagcctcaacctgtcggatcagcaggtggaggcatcgcggatggcgctgcaccggttcgggaacacgtcaagcagctcgctctggtacgagctggcctacatcgaggccaagggacggatgcggaaaggtgaccgggtgtggatgattgggtttgggtccgggttcaagtgcaacagcgcggcgtgggagtgcatcgagcccgcggcgaacgcggaggggccctgggcgacgtcgattcacaggtacccggtggacatcccggacgtgctcaagcactaactggctgcggcttgggcatcgacatgttctttcgctgaaattaaatcgcgtgcgaataattgagatctgttaaacaacatgtctgttccatctgtttattattaatccgatatgatccctttatatcacagtagtgtataatatcatgcgtgtgtgcgtggcagggccatgaaacaggaatgttctcacaatatgttgtacacggtaggtagctctcaggtgtctttttgtgcagtctttgtgatcgaccgccgttgccggcaatattaactgctgtcattttcgtttaaaaaaaa

SEQ ID NO: 6494 - DNA, 1913 bp, Setaria italica
  misc_feature (1774)..(1774): n is a, c, g, or t
  Peptide Sequence Number=SeqID_72468
ccggctcgttgtcgacaacttcgtcgccatcttcgccgtggccgccgccgccgccgcgctccagagaacaagccctgaggaggcactcacggtggcgcgggcgatccggccggcgcactggcttctggcgctgctcgcggccgccgccgccgccaagctgaggcgcatgggccggcccaaggacgtgtacctcgtcgagtacggctgcttccggcccaagccgtggttccgggcgccgttcgccacgtgcctggagcacgccaacctgatgccgtacctaatcgacgacgaaagcgtcagcttcgccatccggctgctcgagcgctccgggctcggcgaggagacgtgcgtgccggaggcgtaccactacatgccgcccaaccgcagcctcaaggcctcccgcgacgagaccgagctggtcatcttctccgccgtcgacgacgtgttcgccaggaccacggtcaagcccgaggagatcgacgtgctcatcgtcaactgcagcatcttcacgcccacgccggtgctcgccgacatggtcgtcaacaggtacaagctccgcgccgacgtgcagaacgtcaacctgtccgggatggggtgcagtgcggggctcgtctccgtcggcctcgccaagaacctcctgcaggtggcgccgccgggcacgcacgtcctcatcgtgtccacggagatcctctcgtcgcagtactacgtcggcaccgagcgcgcgatgctactgcccaactgcctcttccgcatgggcgccgccgccatgatcctgtccaactcctcggagcgcgcgcggttcaagctcgcccgcgtggtgcgcaccgtgaccgccgcgcgggacgcggactaccgctgcgtgttccaggaggaggacgacaagggcaacacggggatccgcctctccaaggacctcgccaccaccgccggccacgcgctcaagagcaacatcgtggccttcgggcccctcgtcctgccggcctcggagcagctcctcgtcgcgctgtccttcctcaagcggaagctcctgagccgggtcggcagcaaggtgaggctgtaccgcccggacttccgcacggcgttcgagcacttctgcatccacgccggcggccgcgcggtgatcgacgaggtgcagcgcggcctcggcctctccgacgaggacgtggaggcgtcgcggatgacgctgcaccggttcgggaacacgtcgagcagctcggtgctgtacgagctggcgtacatcgaggccaagggaacgatgaagaagggcgaccgggtgtggatgatctccttcggcgccggcttcgagtgcaacagcgtggcgtgggagtgcgtcaggccggcggcggccgccgacgggccgtgggtggactgcatccaccgctacccggtgcagctccccgatgtcgccaaggacatctgatcaaactactgtgtgcaacgtgcacacgctgcgcagaattatcttcaacgagagatttctgcgaaggtttccgtggacttcgttagttggtgcctccaagtacgtggcaatattgtgtgccgtgctagatgtgatgtctgaaataattaagttggctaaaacgcaagcacttgtgtattcatgggcaatgtaggtagccagtcgtggattgttacgagtgtactcattctgtgtgttgttatcatcactgtcaagttgatgtaatgcacgctgcgttgcgacagcagttatgcacattttatgtgtaaaccgtagaaaaaaacctaaaagggactaatctaattaagaacggtnttcaacaggtgctagatcgatgagtgtgtttgtgtcacgcgcataatgtgcttgctatgtaggagaacgactactctatattaatttggcttccaaatgcatactgattttgcattgtgcagctttggctattgatttc

SEQ ID NO: 6495 - DNA, 918 bp, Setaria italica
  Peptide Sequence Number=SeqID_72469
tatatcattatatcatatataagccagacaatagaaaaaaacttaacaatgtgtgaccacatccgtcatggatcggaacgctttctcttggcagctgtagatttgagctcttgaatttcacatgtaaagacatagctatagtagggcagtatgggggacttccatcctaggacctcaaaattcccatgaggcttaacacttccatacatgacatcttgcatttttatctttggaacctcctcttgtgaagagcattgatactgacaacaaagcacgagatcttcagaaggtgtagccattcttccaagaggtgcagatctattttggtcaacacgtctaagtggatgctcaccaaatctggaaacattcttctggatgatccctctcaacaacgccagaaccttgcaccaaaagcggatgtcaaagttgtccctcagcacacaagtagtgatgtttgcaccaatgaaggttcttttcagtgccctggctatctgcatggccaggtgtgcgagcttcgggtaggtctcgggatccacacttccaaatgctagtgtcctaaagtaataccagtatgcctcgcaggacagaaattttagagttattgcctgagttgttccaagctttttaatctcgtcagaccggcttgtgattatgatcttactaccacttggcaagtaccgcttagaagcagaatacagcctcttccaatcaccttcactgaagtctccagctaactcaacaacaactagcactctcccatctttgttcgacacacaattttggtatttcatcacacatccttctctaagggtggttatgttttcatctctgaagtcatgatcactcaagaaaacaatttctgaaaaataatcatgaactcttccatccttgcaaacatgggcaacaagagtgctcttt

SEQ ID NO: 6496 - DNA, 169 bp, Setaria italica
  Peptide Sequence Number=SeqID_72470
cctctacattaaaaccctgaatcgctggggcaaatatctatggtagaaatatgactcgtgctacctagcaaaaacaactcgtttctttaaccttccaaggtcaagtaacaccatgatacactcgtgtagtcttgcaagtacaaacaatttcagcaatggtagaatgttc

SEQ ID NO: 6497 - DNA, 1774 bp, Setaria italica
  misc_feature (1)..(46): n is a, c, g, or t
  Peptide Sequence Number=SeqID_72471
nnnnnnnnnnnnnnnnnnnnnnnnnnnnnnnnnnnnnnnnnnnnnngtcgagacaaatcttttgagcctaattaatcaatatttggacaataattcacagatacaaacaaaacgctacagtatcgcatttatggcaaattgctaattttgcaactcccaacttgggaagtaaacaagaccttggcaacttgcccatcgtgggattccaccatagaaatttatcaacaactaaccattacaaatccttccggaaaataattatttctaccatagatatttgccccagcgattcagggttttaatgtagaggtatgactcgtgctacctagcaaaaacaactcgtttctttaaccttccaaggtcaagtaacaccatgatacactcgtgtagtcttgcaagtacaaacaattttcagcaatggtagaatgttcagagaccttcatatgctgagatcatttgactaatttttactaggaggctgtttgcagtttcatccttccggtgcggggatgtcaattcttggtactggtgaagggttccagtgaaatctgtaaacagtccatcaacccccacattctttatccagaaatcatattcagcgtagggatcctgatggaagttgaagtgcaggaactggttctcattcctgtaagtgtatggatgcacctggagattatgagcatgtgcccgtgcaacaagatcacttggtggcatcaagtagtttcctgcagctggaacaatggtatctttccatggaccaaggccgacaacgtatttcccaatatatgcaaggtagtcatctgaagttatttcccagtatgactggttcgtgtcttgtgttctcacagttatatcatcaatcaaaaataccttgggagagtcaatcaatttggatacatatataatggaggtgggagcaaaggattgtataaacaatggctgctttagccaattctctgacatgtattgacctttgtatccatatttaagcaaggtatccacaaatttgtcctcaaacttctttccatcagcccacttgacatgcttgttgataaaaactggatctttaatctctgggtatatgccaacagttctatccgcatctagggcaattgaaatgaattcttcaaacgtgatgattgaaaacataccattgtactgttgatctctgaatgagtatctctgcttcactttaagtgttttaagttcctccagggtgaagtccactacaaaccatccagtaacattagaccactccacttcataggttcttcttcgattggcaaactccttatgctcggcaacatcagttgtctcatcaagtgttacatcatgaaaacagatcaaggtcccatctttgctagcaaggatgtcagtctctataaaatctgcaccttcttcaatagccctcaggtatgcaacagctgtttcttcacttacaaggccgtttgagccacgatgagcaatattatatggtcgaaatgtctgtatgggccttttctcttcgttcttcgtcttacttggtagtggaaagagaggtctagcaaatgccaaatgtgatagtagcagaagaaaaaggggaacacaacagcgagatgggcgcatggtgcaggtctgcaggagtgctccctcccccctcttgcccacactcttcttgctccacttccctccagtccctcccgggctctccccgctatatgcgagcgagcaaggcagcgagctccggagtttcagcggagcagaagaggagacggcgcggctccacgctccgtgc

SEQ ID NO: 6498 - DNA, 389 bp, Setaria italica
  Peptide Sequence Number=SeqID_72472
gagccgtgagagaccaaaatcagcaaccttggcaacatcacttctctggaattaatgctcctaaatggaaaccaattgaatggttctttaccagaggagattggcttccttcctaatctgaataggattcagattgatcagaaccatatatctggaccaataccgaaatcatttgctaacctgaacaaaaccaaacactttcacatgaacaacaactcattgagcggtcagattccacctgagctttccagattaccttcacttgttcacctattgttggataacaataacttgtcaggctatattcctccagagctatctaagttaccgaaagtgttaatcattcaactagacaataataatttctctggaagttcagttcctgtatc

SEQ ID NO: 6499 - DNA, 341 bp, Setaria italica
  Peptide Sequence Number=SeqID_72473
ctagggttttattccttcccgccgaaaccaagcgccgccgccgccgccgcccgctgaccgcagccgtagcccggagcccccggcccctccggacatggacacggcggcgaagtcggcgtcgccggcgggagccgactacgcggcgctaaaggagctgttccggccgcacgtggaatcgttcgactccttcctcgacgtggggctggacgagatgctccgcggcatccgccccatggagatcaaggaccccaactccagcgccatcctaaaaataaccttggagaagggtcaagtgctaccgccaatgaggatggtcggttgggtgtacccctctaccccca

SEQ ID NO: 6500 - DNA, 805 bp, Setaria italica
  Peptide Sequence Number=SeqID_72474
ggctggccacttcttggcttctcccttctttttctattgctctgctccctcgcgcgcgccgcccaccagcaccaagcaacagcacctgcagcggtccatcagctcgctcgcttcgcttcgcagttcacacgtactaccccgcggcgcggagggagctccccatccatccccgtccataactaaattgttcactcgcccggttaggcaaccgcaaccaccgagagttgaagcccggggacgcgggaggcatatatagcggagcaccccggggattggattcggaggagcagttggggacgagaagggcggcacgggagcgaggggaagaagaagcgtctcgagtcgacgggaaggggaaagcagaggcagcggcgtcctccgatcatcggcggcagctcctgatgtcctgggggcctgtcggctcatggaaaattcagacgccagaccggttcgccgtgtgagatgtccgaagtgccacagcgttcttgaggagcccggcgcacccgtctaccaatgcggtggatgcggcactagtcttcgagcgaaaaaccgcaccggcaacacaggagatgcgcccaagggttcgccttcaccttcaaggagtgcgctgcctcctcagagcagacacttggactccactgacgtcgcgagcaccagcaggtccagcacccccacttctcttgaggccacgagcagcaggcaccgagccaccgacacgacaagccggcatgagtccggtgatctcgtgtcggcgaggaggcatggttccagtgatgttgccagcaccagcagcactcccactgtt

SEQ ID NO: 6501 - DNA, 420 bp, Setaria italica
  Peptide Sequence Number=SeqID_72475
ccgttggggtcggtcgagggcgggtagtactcgtggtgcacgacggtgggggcggcggcgtacgccggcgctgccgggtagtacccgtacgacgccgacgacggctggtggtggccgtagtactccggcgcgtagctgctggtcgtcgtagggtaggacgagccatagctactcccaccgtacccggagtcgacgcgggagaggctgctgccggcagcgcgggaggaggaggagccgtagtagccggcgtgcagggtgcggagctcgacgaggtcggcgcggcccaccttgcggcggaggcgcgtggtgaggcggttgcagtcgacgccgtcgccgaccacccgcagcaggctcttgtccttccccgagagcgtcaccgactccaccccctccgttgccgccgccaccttcatcgccgcg

SEQ ID NO: 6502 - DNA, 664 bp, Setaria italica
  Peptide Sequence Number=SeqID_72476
atgaggatgagcacgagcaggacgaggacggcgaggaaggtggcgacgacggcgccgctggtgcgctggcagaagccgtggaactgcatgcagatgggcacccagttggcgcgcaggctgccccagtgcgacacgtacacgatggcggctgccgcggcgccggccgccgtcagcagggacatgaccagcacgtcgcagacgagaaggaacaccctcacgccggtggccttggggcggacgatgcccacggcggagaagggcagcgacagcaccaggtaccccgccgccaccgcgttggccaccatgaagaagatgaaggccgtgaagtcgtcgaaacgggcgtggaactggaagaactgagtgaacaccgacagccgctcgtcggcggtgcccgtcgagatggcagccgccagcgtcggcccgaacgcggccacacgcagcaaaaagtcgatcaccgccaggcaccgccggaacccgccgccgccgctggaccgcaggatcagcgggagaccacgaccagcggccttgctgctgctgcctgcggcatcaccagtcgttggaggagccttgccgccgtccatgtggatcacggtcgcgggctcgctcatgtgtttggattgttttgtttgctgcacaatctgccgggatttggtctgaatctttg

SEQ ID NO: 6503 - DNA, 381 bp, Setaria italica
  Peptide Sequence Number=SeqID_72477
cttagctgaaaatgctccattttaacgctgctggcgatgtaattcatgaatgcatcataccaagttctctgtgtgtctgatgtacagttcacgcgcggcggaaccggtcgctgacaaaggaggaggtggaggcgttctggaagcagcgccggaggtcagaggacggtggcgagctcacctcgcccctcgcctcccccgccacggtacgtgcctgccgcctgcatgtttcttgtctcctcgcgtgcatgcacatatagtcgtcgcagctttgctcatcacaaggtgatcgcgacgaattgattgacaggagagtccgttcgggaccttggagaaggcggcccggtcgccgggacgtggcggcgcgtcgtccccgcgggtccg

SEQ ID NO: 6504 - DNA, 297 bp, Setaria italica
  Peptide Sequence Number=SeqID_72478
gccgcctctctccatccccctctcgtccgcgcgacgacgacgcaggttctgttcgggggatttgttcgtcgccgactcgccggcggccaagatgaggccggtgttcgtggggaacctggactatgacacccgccactcggagctcgaccacctcttctaccgctacggcaggatcgagcgcatcgatatgaagtcaggaactaccagggcaaacatagctcccccggggctcctcaactcctgaaattccttcattcactcacccggccatcatttccttcgcttgaaaccattccg

SEQ ID NO: 6505 - DNA, 701 bp, Setaria italica
  Peptide Sequence Number=SeqID_72479
tcttgttcttcgtaacccttagtccgtccttcttcttcctattcccccttcttcgttccgtcgtcgtacgtacgtacgtctaggtttcttgtttcgggggtattttgtttcgttcgccgactcgccggcggccaagatgaggccggtgttcgtggggaacctggactatgacacccgccactcggagctcgaccacctcttctaccgctacggcaggatcgagcgcatcgatatgaagtcaggatttgcttttgtttactttgaggatgagcgtgatggtgatgatgccatacgggctcttgatggttatccctttggccctgggagacgccggctttcagtggagtggtcacggggtgatcgagctgcgagacgtgatggcaacaaaccagaagcaaacactaaggccactaagacgttgtttgtcattaactttgacccaatcaccacaacagtcggtgatatcgaaaagcactttgcaccatttgggaatatatcaaatgttcggataaggaggaactttgcttttgtccagtttgaaacactggaagaagccagaaaggctcttgaagctactcatgctacgtaagcatccttccctcgaagttattgtttctgtgcagtgattttcacttttgccaagtaatcagcggagcacaatttgactttcactgactctgtatttggggaatgtttatctc

SEQ ID NO: 6506 - DNA, 548 bp, Setaria italica
  Peptide Sequence Number=SeqID_72480
ttgtgtgtatggtagggacagatgtttaaatgtttactgtggcgcaggaactaccagggcaaacatagctcccccggggtctcctcaactcctgaaattccttcattcactcacccggccatcatttccttcgcttgaaaccatccgttcatgtgcactgctgtacaccgttactactgctcgagcatgtttagcggaactctgattcgtgccatccaacagtaccatcatgccatgcgatgccacgactagaagtatcaccaacatgacaacgtgctatgtgtactgtatttgataagcaaagagttccgtttacagcgaagcatgttcaatgtctccagtcataatttcttactttggatataagttgttcaactccatgttagctctcatcatgaatggaatctactactctagtgctcttcataccatcagaattatgcaggatttgcttttgtttactttgaggatgagcgtgatggtgatgatgccatacgggctcttgatggttatcccttggccctgggagacgccggctttcagtggag

SEQ ID NO: 6507 - DNA, 1226 bp, Setaria italica
  Peptide Sequence Number=SeqID_72481
caatctgtctcgaaccctagccgcctctctccatccccctctcgtccgcgcgacgacgacgcaggttctgttcgggggatttgttcgtcgccgactcgccggcggccaagatgaggccggtgttcgtggggaacctggactatgacacccgccactcggagctcgaccacctcttctaccgctacggcaggatcgagcgcatcgatatgaagtcaggatttgcttttgtttactttgaggatgagcgtgatggtgatgatgccatacgggctcttgatggttatccctttggccctgggagacgccggctttcagtggagtggtcacggggtgatcgagctgcgagacgtgatggcaacaaaccagaagcaaacactaaggccactaagacgttgtttgtcattaactttgacccaatcaccacaacagtcggtgatatcgaaaagcactttgcaccatttgggaatatatcaaatgttcggataaggaggaactttgcttttgtccagtttgaaacactggaagaagccagaaaggctcttgaagctactcatgctaccacgcttttggatagagtgatttctgttgagtatgcctttagggatgatggtgaaagaagtgacaggtatgatagccctagaagagctggtggctatggtaggtgcggggataacccatatcgccgttctattagcccagtataccgctcacgacctagtcctgactatggtcgcccaccaagtcctgtatatggttcatatggcaggagcagaagtcctgttcgtgatcgctatcggagatctcctggctaccgatcgagatctccgcctgccaaaaggagagcttatgactaattcagaaccgtctctgctacctggggctggaagcttgtatccgctctttcccaatgctatcaactagtagcaagaattttctgtgcctgtactggagcgttttgcctcaagtgtcttgaactcctgtgttttaaagtagacacctttagctatgtgcctatgtaagagaaagttgtcttgaactcctgggttggccgagtcgctggtagggaggctgacccaggttgctcagagctcgcatgttgttcaggcggagatctcctggctaccgatcgagatctccgatagcgatcacgaacaggacttctgctcctgccatatgaaccatatacaggacttggtgggcgaccatagtcaggactaggtcgtgag

SEQ ID NO: 6508 - DNA, 484 bp, Setaria italica
  Peptide Sequence Number=SeqID_72482
taacttagaaacttacaaaattcaatgtagctgtgtgcacgtaaaatccatagctctagcaggttgtttagtacaataaacaacattttgattcatatgtaaaaaaggtaaaatacattgccctagtgcattgttcatcacagtatttgttaatttatccaagactagtgttttgattcaaatagaagtaacaggaagtgattaattattggacttctatatctcactgacatttttggcaggtacaaccaaatacatttgagaagtaacttatttatgaactttagaaacctttaaagataaaatatctgcgcagtaagtggattccatacggagaactagatacagcagatacatgattagaaagaaagaaagaagaatggcagctatctatctttcaacaagcacccataaatcaagtgtattaaatatttacctctctcgtccgtgagatgcttccatcagctggcataatcggaaccct

SEQ ID NO: 6509 - DNA, 237 bp, Setaria italica
  Peptide Sequence Number=SeqID_72483
tgggagcgagctcagggatgcttgtttcgttgcttagattgagtgatcagttgggatgtagtattggttgtcaatttgtcatcatgaactaggctctatcttaggcaccacgctgcccaaatcgacatgttttcttgtttcaaagttcgtttggtgatatgctacctgctctgtattggatgggaatcgaagaaaatgatttggccgatcctccaaaaatatggagatgcaatcagt

SEQ ID NO: 6510 - DNA, 619 bp, Setaria italica
  Peptide Sequence Number=SeqID_72484
ccaacccaccgccccgcacccccgccgcaatcccagacccaagatcctaggggcagagaaagccagaatgcccgcgcagaagcgccggctcccatccgggcctcctcgagaccccgcgactacgtcgcggctcccggctctgacgccgccacctccggcggcggcggaggcgtaggagaaggaagaggaggacgcccgccgctgccgagcggggcgccgccaagcggaggttgaccgagccaaagccgcagcgcggactcgaagacgattcggacgcggaggatggcggcggcgcggacggcgacagcgagtcctcgcagagcgacggcggcggcaacgacgagtttatgcttgtgaaattagcagagatacggaaggaggtacagtgccctatctgtttaggcattatccggaagacaaggacagttatggaatgtttgcaccggttctgtagagactgcattgataaatctatgcgactaggaaataatgaatgcccagcatgtcgcactcattgtgcaagcagacgttctttgagggatgatcctaattatgatgcactgattacagccttatatccagatattgacaagtacgaggaagaggagcttgctttcag

SEQ ID NO: 6511 - DNA, 625 bp, Setaria italica
  Peptide Sequence Number=SeqID_72485
taaagtaaacttaaaattaagtaaaagttaagttaaggtaaattttaactaggtacctaattacttacttactaattcaagctaatggcaatcgtcaaacaagaggcgaacatgttatgaatgtggcatcccaggacacctctcttcttcttgcccaaataagaagggtgtcgaatttatttctgatgaaaagaatgctaatgttgactcagccacggcgtcatcaaagaagagacgaacatgctatgaatgtgggactcctggccatctctcatcagcttgcccaaacagaaggactgaagactctgttcagaataacagggagcctgttgatgatgcaaagtctgcacctaccatcgtgcctgaggaaatgaaaccaggtgatgaatcaaattcagtaccttcgaagaagaggcggaagtgctatgagtgtggaatttctggccatctctcatcagcttgccccaacaaaaaggtcgctgaggttgttgataatgcagtggaacgtgatactggctcaaccattgccgaggagaaagccaatggtgacacaaaatctgcacctgcaaagaaaagaaaggcggacatgttatgagtgtcggcatcgctggccatcctctacatc

SEQ ID NO: 6512 - DNA, 1065 bp, Setaria italica
  Peptide Sequence Number=SeqID_72486
tgcaaattgtctggagagagtgttacaggatcaggaccttgtcagactagtgggcaacaatgtataaatgaagtcagcggtatgcaggtgacttctaatattgaagtgttccatcaaggtcatgaggaaagctatgaaaataatgacggcaaaattactcctggtatccctgccagcggtgtgtctgaagctgtagatattgaaagatcggaaacggaaataggtctggctcctcctggaggaacatcagcattgccagatgagcagcttaacatgaaggttgagagccacgaagttgatgaatacagctgttgctatgatgaggacacttcgagcttatttgacactgaatcgctgtgcagcaaagcatccagtttggacaaagacactcacaaggatcctccaagtgatctatctactctgaggtcccccgaagtatctacagtttttcagaaccagtctgttccaggatcagtaggaatctgtcaaagcagcaggcgaagaggtatagatgaactccgtgctaagctgcagagtttcaaagtttccagcaccgtaaaaggaagctacattgctatgagcgcccctcgcccgaagccaggtgacaacctgggccaatctgcgatcgccttgctccggaacagggagaacgcacctcctgctaaagcaggccatcatgctatgccgaaccctgatcgctcggtcgcgaaggagtcgtcaagactagcgctgcagccgatcagtggaagaccaagggatcactgataggtagttggtcgtacaccgtagtttgttgttgacatttcgcatttgtgttcaacatttggtggtggtggtgttcaacctttggttgaaagattattgggtgtgttcgtgcagcatgtagtgaagaagctgctctgtgcatttgttagtatttaattaacgtagtgtggccatggtagcagtgtttaagaagctggtagtcgtgcagatggttatgcaagtgttgctttggtttgtaccattccagttatcgtggacagatttgttatggtccatggattggttgtttatttgtaaaaa

SEQ ID NO: 6513 - DNA, 399 bp, Setaria italica
  Peptide Sequence Number=SeqID_72487
tgggcgatggtaaaaacaaagatatatatgatgccactgctttgttgatgttgtttttttggtaatgcagccttggctccaacggtaaaagtctctctcacagctcactgtgttttttttaagaccagtcgtttgcgacgcaagttgtttggcgcgagtttgagccacacctaatcggacagggcgttggttgcgcccgggcagtgataaattttcaaacagccgcgaacgtacggctcacccgatgcgcccgtgcaagggggttcgcaccatggcttgttgccgtcgagcgccctgttgcccggtgacagaccgagaccgccccgcagcgccagcaccaccctccggtgcgcctccgagtccatctcgagtggctcctcgtcctccaccctgctgctg

SEQ ID NO: 6514 - DNA, 1465 bp, Setaria italica
  Peptide Sequence Number=SeqID_72488
ccctctcctggtccgcctctgttaagaaggtacacgcttcctcccgtagccagatctggtgttctccttcatatggatctggtcgttgcgatgatagtgtgatctgatagggctcatgttatacctgtttacacgatacattatgcattcctcaaatatatcagaaggtagcttgttaaactagacgccacacgtgaagtttgcttagaggtggacattggagtttaccgtttgctaggttaatgttgcccttgtataatgtcatacgatgggatggaacagtcactcatacaactatcaacttgagtttgccttttgttgctaaggttcaaagcaatggagtgtgaatcatgtgctctatccatgtgggttctcatgtttccccattttgtttaaagtcttgcattttgactcaattaggttcttgtcctaaaaatcagtgttgtatgtctgtactgttgaagtgttgatcagatatcaactattctgtttggacttgagttttgagactgcattgttttggtagttctaaaatggatgatggcattgcatcagcatgattgatttctctgtactctttagtggtgaatacttactgatagtaaatttgtttgaggaagaatacctaatgaaaaagagaaattccatcacagcgttttaatcaaattatgtctgcatacctaatgaacacgtaccttgaaacgataaatctactacagtcagtaatgaagagcaacagtaaattttgaaaagagatgtttcatgtgcaacaagtgactctttttttgttaagtaggtataaaattggaactttgatgatgttagcagtgttttcccccttgttgcactggtcacctggaccatgttcagaagagtactttactgctatactcgagaaatgttgatgcattggcatgtagctggacagatatttaggtcggtatttaccatttattttctgaacaaagtcagtaggttttaccctgaatggggaaatatgccagaaatactactcattactttctttgtgcccgtgttcactgttcaaatataagtcatggaaccaaaggctgagttgataacacatgggcacatcatatggatacaaacatgcaatcagaatatgtctacatatgttgagccattacagatagaagctgaacaaattattgatatttaaagattttgttgtttttatttctctgaagtggcatattagcgtttgtatgatttccttacaagtcctaatagacacgcaatgtgtgtttgtgtttatctgttgcctcctatcaaatctataattagttgacggatgtagtttcttttgttcaaaaatgttggttgctgttttctttgtccttgcagtctgaagtatttgccgtggcatttgctgtcctggcagctggggctataattctaactttaaatgttctgcttctggttggacacatcatcttcttccaaa

SEQ ID NO: 6515 - DNA, 1347 bp, Setaria italica
  misc_feature (1297)..(1347): n is a, c, g, or t
  Peptide Sequence Number=SeqID_72489
gctagtcccaccgaagcaggcaggcaacgcacccgcaaggccgcaactccgcggaccaggacgccaaggtcccaaccccaaacctcccgcaagatctccctcaccatccaccagtccaccgctgcctcctcagatccgcctcgcctcgccggcgcgcgccccacgccggccgccatgtcgcacaaccacggcgacacgatcccgctccacccctcgtcggcgcagtccgacatggacgagatcgagagcctaatccacgccgcgccctcctcggccacggtcctccccgcgcggccgccctccccgccgcgggcctccatcccggtctcctcctccccggctccggcgcccgtcccttccaagcccccactccccgccgcctccatcccgatctccgtctcccccgtgccgcccgcctccgcctccgtttccgtccccatcggcgccgacggcttcggggccccgcccaacacactcaccgagcccgtgtgggacaccgtcaagcgagatctcgcccgcatcgtcagcaacctcaagctcgtcgtcttcccaaacccctaccgcgaggaccccggcaaggcgctcagggactgggacctgtggggacccttcttcttcatcgtcttcctcggcctcaccctctcctggtccgcctctgttaagaagtctgaagtatttgccgtggcatttgctgtcctggcagctggggctataattctaactttaaatgttctgcttctgggtggacacatcatcttcttccaaagcctcagtcttcttggctattgcctgtttccactggatgtcggtgctctagtctgcatgctgaaggacaatgtcatacttaagatcgtcgtggtgacaatcacattggcatggagctcctgggctgcctatccgttcatgagtgctgcagtcaacccaaggagaaaggctctggccctatatcccgtcttcctcatgtatatttcagttggtttcctcataattgccatagattaatggatggggatggagccttgtagtaacgtctgaagtgtccagattttcctcatcgatgattgaatcgccagagtatacgagtttgagtagacaatgctactgccctcatggagtctttgcgaattgtcacgtggggatttttttggtctttacatgagcaggaggcataaggttgtaaaattactcgaaatctatatctgttgtaaagagcgcatgaactttggaccacttaattggctgtcaagctttcttatactaccatatatgattaaattcgaatctttcatgattaacnnnnnnnnnnnnnnnnnnnnnnnnnnnnnnnnnnnnnnnnnnnnnnnnnnn

SEQ ID NO: 6516 - DNA, 458 bp, Setaria italica
  Peptide Sequence Number=SeqID_72490
ccgcacatgaacccgtcgcacatccgccagatgctctccaagtacggcgaggtgctcaggatttacctcgtgcccgaaggtcaaggtcatcgcaagcatgctattgttaaagcaaaggcttacaccgaagggtggattgaatttgcaaagaaaagtgttgccaagagagtggctaatctgcttaacggtgaacaaataggtgggaagaagaggtcttcattttattatgacatttggaacattaagtatctcaggaagttcaaatgggatgatctggttggtgaaacggctgagaaaactcacatcagagagcagaaattaaccttggagatagcagcagcaaagaaacaacgtgatcactacctgtccaacgttcaaaagtctcatgcattgaaacatattcaagagcgcaggaaaaagagcagaagacagaaggagcagaacccagtaatgtcctt

SEQ ID NO: 6517 - DNA, 463 bp, Setaria italica
  Peptide Sequence Number=SeqID_72491
agtggttgttctgtcagtaccaactgctgagtcaatggctgcagaggaggtgcatgaaatctggaagcttattctggattgtacagcctactttgttgttcgtgataatcggtaaactattcacagcagaaggtgagaacaacaggtagtctgcatcttctccagtcgggaagcctagatgagagacatcttcggattgctgtctgagttcagatgattcattgcagacttcatcattgcaaaggttgtatccatcacgtttcatcagtgaaataattgatccacaaacttttctgcatgacaagaagttgaaagagtagtaatgtgcacttgctcatctccatagatggctcccacagttatttgattatccagcgattctgactcaagcaggcaaagtgtgtacagagatttatcaaccaaacctgaggaggaatactgtgaaagggtggaaaagtaaaga

SEQ ID NO: 6518 - DNA, 601 bp, Setaria italica
  Peptide Sequence Number=SeqID_72492
taaaattacttacaacaaggtaaggtatggcagctacccttgctggtgtatgcaaggtgcctctgacatcagtcctcctactttttgagcttacacatgattatcgcatagttctacctctgcttggggctgttggggtatcatcttggattgcttctcctcaaaggttctctaaaagcatcaggagtaagctggattctctggaggagaaatcaagtattgctcaacagacagacagcatgcccactgaaaacaaacaagtcaattccatggatatagctgattcatctcaagaattatgtaaagttgaaagctccctttgtgtatatgatgcaaacaatgataatatgttcgagaatcttactgttgcagaggccatgaaaactaactatttttctgtctcaatgacaaccccgttagttgaggcactagatcttatggttgcagagaagcagccctttgttatggtaactgagagtaactcatctgtaatatgcttgctagcactaaaaaatatccaagatttctgcagagctgcaaaaactacaagggcacaagctgaggtaaaggaattcctggtatgtcatgttaccaagcaggg

SEQ ID NO: 6519 - DNA, 525 bp, Setaria italica
  Peptide Sequence Number=SeqID_72493
cagtagcgaaccagagagtgtcaggcacttgttgggagatatttcaaaagccggctgggctttccacccaccaaaacgatcggtcgagcaacttccttctcgttcatcagccggccatctatcgtcagcaatcagcaggcctagctagctacatgaagatcgtgtgcgacgcgtgcgggcgggcggaggcggcggtgctgtgctgcgccgacgaggccgcgctctgccgccgctgcgacgtcgccgtccactccgccaacaggctcgccggcaggcacagccgcgtcgcgctgctcccgtccaccaccaccaccggcccttcgcccgacctcgccgtcgacggcaccggcagccaccaccccgcctgtgacatctgccaggagaagacaggctacttcttctgccttgaggaccgcgccctgctgtgccggccctgcgacgtcgccgtccacaccgcgggcggtgcccacgtcgcgtcccacaggcgcttcctcatcaccggcgtccgcatcggcggtggcgtta

SEQ ID NO: 6520 - DNA, 310 bp, Setaria italica
  Peptide Sequence Number=SeqID_72494
tcctgccaacctccacgatttatactaaactaggtgctatgtttctttgtactaagagttaataaggtgagaacgaattggctattgataatttagtaggtactgtgttcggtatcatgtgccttctggtgcctagctcaacatgcatgactgggcgtatttttttctatttcttgtcagtgcttatctctctccatgcgtctgttcgttaattgtagcgtgtcaattgcaggtcctaactgaagatattcctactattatttctggtatttcgtttcccaagtcaatgcgctggaactccaatattgtt

SEQ ID NO: 6521 - DNA, 362 bp, Setaria italica
  Peptide Sequence Number=SeqID_72495
aagataagggttagcagagagaattacttgaaccttgaccaatctgccagcctggttcgtaactgaggctttccaacctggaagataatctgcaatcctgtcaattagctttacttatctcattacaaggttaatgtattttcatgccactcactctggattatttcacttgcagattgtttttagtcgtccaatacgctggatcttggcacttcacggagattttgttgtgccattttcttttgctggtatctcaagtgggaattcatcatgtggccttcgtaactcttctgtggctaatttaaggtggaaactgctagaatcatatttatctgctgtggaaaaagctgggctcctgattg

SEQ ID NO: 6522 - DNA, 478 bp, Setaria italica
  Peptide Sequence Number=SeqID_72496
aaagagtcccaaccaagttagacgaaaggacaatttagaaccaaagaatggaaaccccactaaggccgctgagggattttgtcgaaagaataatgtttctgtagattgtttatatagaagaatagatggtaaaacagaatatatctatgctcgagtcagagagtctgctcgttttgctgatgaggtcctaactgaagatattcctactattatttctggtatttcgtttcccaagtcaatgcgctggaactccaatattgtttttagtcgtccaatacgctggatcttggcacttcacggagattttgttgtgccattttcttttgctggtatctcaagtgggaattcatcatgtggccttcgtaactcttctgtggctaatttaaggtggaaactgcagaatcatatttatcttctgtggaaaaagctgggctcctgattgatatgcaggagcgcaaggaaagagtcttgcgtgact

SEQ ID NO: 6523 - DNA, 481 bp, Setaria italica
  Peptide Sequence Number=SeqID_72497
tttattaaattatatgactcgatgaactgattgccaaaacaatgaggtttacacggtgatgttcaacaagaacaaaatagtcttggtaccagaaacaaatagatttgcccacattacagtgcgtcgttagttcctgccaaaccgtggttaatgggttctcggttcttgaatgcagaaaaaaaaaagaccacaatgtttattaaattatatgactcgattcactgattgccaaaacaatgaagtttacacggtgatgttcaaccagaacaagatagtcttggtaccaggaacaaatgatttgcctacattacagtgtgtcttagttcctgccaaaccgtggttattgcagccttacttagtcttcaccttttcagctcgaaatgctgcgcaaatcttcttccaactcctcatgacgatgagtgttggtatccaaacccagatactgtttgcgaaaatgaaatatgcccaaagtagaatggac

SEQ ID NO: 6524 - DNA, 422 bp, Setaria italica
  Peptide Sequence Number=SeqID_72498
aagttaggaagacaagaaggttacaagaaaactcaaggagctgaatcaggaactggaaaggaaacaggcagagattatggaaatgcagaagaacgaggtaattgcttttgtcatttgtaaatgccaaaccttcctatgttcgacttatatattatcttggtgttctttctgcttaagcatgctacttcttctattagtttgccaaaaagaaaaacagagacggaaaaatccggtgaagaaaaactatattgttactttctctcaccttgtgagtggctaattgagcaaccagttgctaaattggttgtaggattcagttagggactcgacctttcttactcttgcagagttttctttcattctggcacatttatgtcaacacataacttcaaatatgctccattatccttctaggttgctta

SEQ ID NO: 6525 - DNA, 767 bp, Setaria italica
  Peptide Sequence Number=SeqID_72499
ggtggagaggaggcataggaggatgatcaagaacagggaatcggcagcgaggtcccgagcgcgcaaacaggcttatacaatggagttggaagcagaggttcagaaactcaaggagctgaatcaggaactggaaaggaaacaggcagagattatggaaatgcagaagaacgagctaccagagatgttgaaggatccattcagacggaagaaacgggtgtgcttgcgaagaacactgactggcccctggtgatggctgtctcgaacagtagatgacctgctacatacctgcactggttcttgtgatctgtatataattcccctccgaatagactagcgatgaacgtagtcagaatcgattgtactgctagctcccttctgccgctttcgtagtgcgcagtactgtggcggtggcatcgcaaactgacatgtagattgtgtaaaccaagttggagtgaagccggcagtaggaaccggctctagccgtcctctagagcttgtgtagagttgttgcctaggtttgcgtcttgccggctcatcgtatagagattggatggtttcagaagatcgatgtaagtagattaatgggatccaactagggagagcatggggccggcttgatgattacctgtgtatctgatggattaagtatggaaatatctgttactgtttgtgtgtgatgaaaaaatcgctcggcgttaattgtagggtgatgctgtgcagagataatggaatgttagtagttaaagtaaaaaaaaaaaaaaaaaaac

SEQ ID NO: 6526 - DNA, 317 bp, Setaria italica
  Peptide Sequence Number=SeqID_72500
ctggggagcccgatacggacgacggtgcggtccgcaaccgggggaaccaccgccgccgccggtttagcggatacggcggtcgtagaggccgccgcccgcggagcgagagagcgggccctcaccgccggccaggggcggaggccaaggcggaagctgggctgtggcgcgggtgactgggatagagggatgcccgtaaactgcgccgccaacatcgccggcatttttgggggggttggtggtgggcgggtggtggctcgctgccgttattcggtggagtgaggctggcggcggtgttcggcggcgacggagcgggtgca

SEQ ID NO: 6527 - DNA, 404 bp, Setaria italica
  Peptide Sequence Number=SeqID_72501
cccaacaataccaaggtcaagatcccctgactgcagtttacgaacaatatccttaggcctttgaaaccaaacctccaggttcggaatcagcgggatatcagcagtgtactgccgcgggttgagctgcctcaccaacaattggcaactcttgagcaggtttagggtttgctcggccatgcggcccttgctggggagcccgatacggacgacggtgcggtccgcaaccgggggaaccaccgccgccgccggtttagcggatacggcggtcgtagaggccgccgcccgcggagcgagagagcgggagcctgcggcccgcgaagggcggaggccgaagctggatggcggcgatggcgactggggtaaggggatggcggcggaatacggccgcgccgccaacatcgccg

SEQ ID NO: 6528 - DNA, 758 bp, Setaria italica
  Peptide Sequence Number=SeqID_72502
gagggaaaaagaacgaacacgtcaacgaatttctttcactacgggcacaaacctcgtgggctttattcatttcaacatgcccaattattcaaaactgcagcaagcaagatcggcacacaaaacacacatccagcaacggatcccgatctctaatcaacaggtacaacaggtactctcacgcaattgatgcctagctagattatgtaactatgtatacacgatggtacagacaaaaaattcctggagtgggcccatgatgagaccatgacaggtattgcaaacgagactcaattcttgcaccaagttacaaccccagctctgtgagaagattgcgccacctgggtgtttcctcatcaaatatgtaggtcagctttgtcaccaagactccgctgccaccaatagatctcagttgttgaatagacttgtaaagcaacttttgtgggacaacgacattcatagcatagtagtccacagcaaccttgccatcgcgtcggcaataaacaggacttattgttgggccctgcaatccacatattgatgtttggctaagaactctctctgccacttcttctgcactgttgcccctcatgtttgctgtgaccattaactctgcagttgctctgaggtgagcctctaatctttcaagcaactcatgggtaatctccaacacacctttacgcttgtgcagagacttcctactcgctacaaagaagtaggacctaggactttacaaacaaactaacgccaccttacaacta

SEQ ID NO: 6529 - DNA, 1448 bp, Setaria italica
  Peptide Sequence Number=SeqID_72503
tttttttttgttcaagaaggtgacgaaccttaccagctttccttattttaaacatgatatggccgattgttcgacgtcacagcgagcaaagtcacaaccacacaacaaatacacgaacacccgctatgaatacatcggtgggaacacggacggtccaacagatgcctggtgtataaacagctgcgccacaatgcacgacggtacagaccaaaatttcccgaagaggtacactgacagtgacagatatttcacacggtagctcacttctgtatatgggttgtttacatgcttcagtaaggactaaatagtgcagtgcacaacagagaacgttgtaagggaccagaagctgacggtgcgctaagttacaaccccagctctgaaaggagattgcgccaccttggcgtctcctcatcgaatatgtaggtcagctttgttactaagactccactgccaccaatagatctcagttgttggatagacttgtaaagcaacttttgtggaacaaccacattaatagcatagtattccacgtcaactttgccatcacgtctacagtatacaggacttatagttggaccctgcaatccacatattgatgtttggctaagaactctctctgccacttcttctgcactgttgcccctcatgtttgctgtgaccattaactctgcagttgctctgaggtgagcctctaatctttcaagcaactcatgggtaatctccaacacacctttacgcttgtgcagagacttcctactcgctacaagagtggcctggctttcaacaactacgccaccttcaacttccttcaaattattctcacgcaaggtagtcccactacttacaagatcaacaatagcatcagccatacccataggaggatatgactcaagagctccatcagcagataaaaggcgaacatgcttaaaacctttctctcttaagaacttatcacctagatatccaaatcctgtaacaacacgtagtggcctttcttctgtccattcaggcatatttaacaaatcctctagagtatttatattttcgaaaatgccttccttaggtaccgcaagggataaacgacaatgtccaaactcaagagcgtcatgaacaactactaaatcctcattgcccttcccgtattcactgactatgtcaaaacccacaataccaaggtcaagatcccctgactgcagtttacgaacaatatccttaggcctttgaaaccaaacctccaggttcggaatcagcgggatatcagcagtgtactgccgcgggttgagctgcctcaccaacaattggcaactcttgagcaggtttagggtttgctcggccatgctattgtcggtcctcaacgtctaacaagtaataacaaggaacttaattaagtttaggtaacccttagtactaaattacctaactaattaatttaagttaatttaagttaa

SEQ ID NO: 6530 - DNA, 230 bp, Setaria italica
  misc_feature (46)..(46): n is a, c, g, or t
  Peptide Sequence Number=SeqID_72504
tcggttgtatgcttatcagattcgtcacttgtagttgaactacatnacctatgatatcatgatatggtgtcaggtcaccaagaaattctgagttcaagctctgtcttgtcgaattgattggttgaagatctagttcatgccacttctgtaaaatgtcattcatttccttaaacagcacctcaacagtagtttttaatctcctggtttcaacctcatggacagcacttgat

SEQ ID NO: 6531 - DNA, 320 bp, Setaria italica
  Peptide Sequence Number=SeqID_72505
attttttcttaggagagcaaacagtgatcccaaggacacggccagtcatgtcataagcctcttgaaatgttaagttacttgtgagatccctcagaagcctttgcatctgactaatgtcatgtagtgcaccataagtggtgacacgcttcatcactgcaaaaattccacctatcctatcaaagaactgcaaggtctgtaatgaatctatgaagtagctctcaatctcaggccaagttcgggtagcaacgattgaacatataatggacgccaacgcttgatcctgctataatccgaggcaaaaggcttatgctcaaaccaat

SEQ ID NO: 6532 - DNA, 454 bp, Setaria italica
  Peptide Sequence Number=SeqID_72506
gctgactatattttctatattcatgttacagaccattagaacaaactggcatgatccaatgatccattgaatgcgattataaattttcatatttttgcaaagttaacttagcaccagtattttcctggaacaaaaattgctagccatatgatctatatccatgtaatttttaacctaataaactacagacttatatttgaaaggaagagcctagaaacagttgcatggtctccaacaatgataagtctctttgcaggatttgcagtggcaattttcatgttctacacaattactcctttcgttcttaaggttaagatctcctgcatgttagggatgacataaactgcacaagtatgaagcaagagaaacttaggcccggccctggttccatgagttatttaaataactaaggataaagaaaagctgtttttaacaaaattggctaactacatag

SEQ ID NO: 6533 - DNA, 1000 bp, Setaria italica
  Peptide Sequence Number=SeqID_72507
actagtatgctgtagttgtgaaggcataccaatactcgtacatcaccagtgtaactttgttggattgttggactgttgtatgggtcatcgtactcacctggtacgctctgggcacaaggtattctatctggcagtttttaggggcagggacatgtgtggcagggcttgcccttgtgctcctttcagatgcacaatcagcaaaggagcaaggtaagctacttcaagcatcttaacagtcaaattaaaaattcaactacaacatcaacataatcatttcatgagacaggaaattagaatttcaattatataggaacgttcatggtattagtagaacaaatccagcatagcaattttagtggtggctaagattaagatggcaataaaacaggtgttagtgtagacatgaatttatgaattaatctacatggaacttttttagcggaaagcaggatcactgctcaatcatgtaagaagagaagcaagtggagttttacatctcttataaatgatgaaatctactttctagtttccatagcagagctacatgaatatttacaccatatggaaacttcaattttctgcagacccaagtaaaataccacttctgggggagtgcccttgttattgctgggacagtttgctttgcgtttagcaatgttggggaggaatactgtgtcaagaagaaagatcgagttgaacttgtcgcaatgcttggactctttgggttgcttatcagtattgttcagatacttatatttgaaaggaagagcctagaaacagttgcatggtctccaacaatgataagtctctttgcaggatttgcagtggcaattttcatgttctacacaattactcctttcgttcttaagatgagtggagcaacattgttcaacctttcactgctaacatctgacatgtgggcagtcgccattcgagttctattctaccatcagcagataaactggttgtactatctagcattcacaattgtggctgttgg

SEQ ID NO: 6534 - DNA, 381 bp, Setaria italica
  misc_feature (42)..(42): n is a, c, g, or t
  misc_feature (59)..(59): n is a, c, g, or t
  Peptide Sequence Number=SeqID_72508
gcactccaccttccagtcttccactcttctgctccgcttccnctttgttggccggcatntaaatcttgcttcagcaactgatctgatccgaggcttctgagctcgggctcatggagttcaaggggaaggacgtatggggcctgctgctggtgctgctcctcggccagctcgtcgccttctccatggctgcctcaagcttcacctcgtccctcattgctaatcttggtactcgatctttcatctttctcactgggcatgaaaatgtccttgtaggagttgatgcaccactcacacagtctttcttcgcatatctgttgttgaccttagtttatgtaccaatcgtcctgcggtgacggctgaacaatgccctcgttgtttcta

SEQ ID NO: 6535 - DNA, 576 bp, Setaria italica
  Peptide Sequence Number=SeqID_72509
ctattttatctgccatacaccttatcgaattattaattggaaacttactcctgcttttgtatttttttatatttttccagataagtctctttgcaggatttgcagtggcaattttcatgttctacacaattactcctttcgttcttaaggttaagatctcctgcatgttagggatgacataaactgcacaagtatgaagcaagagaaacttaggccctgtcaagtggtcatgagttatttaaataactaaggataaagaaaagctgtttttaacaaaattggctaactacatagtaccagccagaagaaaggccctcttattgttacttcaaagtccaatagttttgccttttcttttcttatgccctttttgcagatgagtggagcaacattgttcaacctttcactgctaacatctgacatgtgggcagtcgccattcgagttctattctaccatcagcagataaactggttgtactatctagcattcacaattgtggctgttggattaatcatctacgcgttgaatgaaagttcttcagacgataaaacagctgcaagtacagaagcagcagc

SEQ ID NO: 6536 - DNA, 1831 bp, Setaria italica
  misc_feature (1799)..(1831): n is a, c, g, or t
  Peptide Sequence Number=SeqID_72510
ctagtttattgcacaaggtccatctgccagtcctgcactccaccttccagtcttccactcttctgctccgtcttcctctttgttggccggcatataaatcttgcttcagcaactgatctgatccgaggcttctgagctcgggctcatggagttcaaggggaaggacgtatggggcctgctgctggtgctgctcctcggccagctcgtcgccttctccatggctgcctcaagcttcacctcgtccctcattgctaatcttggagttgatgcaccactcacacagtctttcttcgcatatctgttgttgaccttagtttatgtaccaatcgtcctgcgtcgacggcagaaactgcaaatagcttggtactggtacctagccctggcgttcattgatgtacaggggaactatcttgttgtgaaggcataccaatactcgtacatcaccagtgtaactttgttggattgttggactgttgtatgggtcatcgtactcacctggtacgctctgggcacaaggtattctatctggcagtttttaggggcagggacatgtgtggcagggcttgcccttgtgctcctttcagatgcacaatcagcaaaggagcaagacccaagtaaaataccacttctgggggatgcccttgttattgctgggacagtttgctttgcgtttagcaatgttggggaggaatactgtgtcaagaagaaagatcgagttgaagttgtcgcaatgcttggactctttgggttgcttatcagtattgttcagatgtatcctccaaaattcattataggttatagaccaatatagcaaaactggcacggttcattggcaataccatctataaatagctctcttttaaatggttagctatatcctcgcgaaaaaggttaaactatcaccacaattttcctggaagaaaatgctgactatattttctatattcatgttacagaccattagaacaaactggcatgatccaatgatccattgaatgcgattataaattttctattttttgcaaagttaacttagcaccagtattttcctggaacaaaaattgctagccatatgatctatatccatgttaatttttaacctaataaactacagacttatatttgaaaggaagagcctagaaacagttgcatggtctccaacaatggtaagaaaactacattttaccatgaaactattttatctgccatacaccttatcgaattattaattggaaacttactcctgcttttgtatttttttatatttttccagataagtctctttgcaggatttgcagtggcaattttcatgttctacacaattactcctttcgttcttaagatgagtggagcaacattgttcaacctttcactgctaacatctgacatgtgggcagtcgccattcgagttctattctaccatcagcagataaactggttgtactatctagcattcacaattgtggctgttggattaatcatctacgcgttgaatgaaagttcttcagacgataaaacagctgcaagtacagaagcagcagcacaatatcaacagcttcaaagtgaggataattcaacaggatgggagtctaatgaaggcggccaagaaaggacacgtaatgaagttcacatttgttagtggtcaatgtacaaagagtccttcctgttaatagacagatttgtcccaagtcaaaaatatggtaacatagatctccggagtaaaatgctgctcccttcatctgtaggccaacatgttattatctcaattaaaaaaagggactacatattgttcggaactnnnnnnnnnnnnnnnnnnnnnnnnnnnnnnnnn

SEQ ID NO: 6537 - DNA, 326 bp, Setaria italica
  Peptide Sequence Number=SeqID_72511
agcggactcaactgagcccccgccgaccgcatcgagaagccgaacgaaccctcacgcctcctccttccaccgaacctgagcacgccggccgccgcctcctgccccccgggcctcggatcgacttcctctccctccgtcggcaagggagtggcgatgtctacttcggtgcaatcaccgtaccttcctgctaccactgagtcgatatcaaaggctcaggaagccaaggatgcgtctgagtccatctcaatcctctaccgtgtgctcgaagacccatcttcttcagcggatgcactgagagtaaaagagcttgccattacaaatctgaa

SEQ ID NO: 6538 - DNA, 582 bp, Setaria italica
  Peptide Sequence Number=SeqID_72512
agcggactcaactgagcccccgccgaccgcatcgagaagccgaacgaaccctcacgcctcctccttccaccgaacctgagcacgccggccgccgcctcctgccccccgggctcggatcgacttcctctccctccgtcggcaagtaaactctcgtactagggagtggcgatgtctacttcggtgcaatcaccgtaccttcctgctaccactgagtcgatatcaaaggctcaggaagccaaggatgcgtctgagtccatctcaatcctctaccgtgtgctcgaagacccatcttcttcagcggatgcactgagagtaaaagagcttgccattacaaatctgacaaactacctcacaaaagaaaacagagctgaggatctcaggaatcttttgacccagctcaggcccttttttgctgtgatcccgaaggcaaagactgcgaagattgtgcgtggcatcattgatgctgttgccaagatacctggaacttctgagcttcagatctcactctgcaaggagatggtggaatggacccgtacagagaagcgtaccttcctcaggcagcgtgtggaagcaaggctggca

SEQ ID NO: 6539 - DNA, 400 bp, Setaria italica
  Peptide Sequence Number=SeqID_72513
atttgcaacgtgagaacgctaacgaattcgttttcggaggtttaactgaaccctaactatgtttttttcccgccattgaattcgtctctatcatcagaacgcggtcaaaaatatggaatctgatgggttctatttcattcactgtcatgggtgtacagtgttgtactcaacaaagttttgaaaccagagtctgacttctgatattgtacccttttcctctgtggtctgatgaaccacacttgcagcgattgaagcaggaggtgccaggagttaaccggagatgaatgccccggatcgatatgagcgctttgtggtgcccgagggcaccaagaaggtgtcgtatgagagggatacaaagatcgtgaatgctgcatccttgtaattgtcttgtctattcctt

SEQ ID NO: 6540 - DNA, 1133 bp, Setaria italica
  Peptide Sequence Number=SeqID_72514
gtagcggaggacgacgtcgccgtagagctcgacctcggcgaggcggaacccgaggccgagctcgacgggcttgaacgcggggcgcgcgccggcggcgacgctggcgcggaaggcgtcctcggcgtcggcgacgcggagccatctcgcacgcaacgggcggacttaaactgagcccccgccgaccgcatcgagaagccgaacgaaccctcacgcctcctccttccaccgaacctgagcacgccggccgccgcctcctgccccccgggctcggatcgacttcctctccctccgtcggcaagcgattgaagcaggaggtgccaggagttaaccggagatgaatgccccggatcgatatgagcgctttgtggtgcccgagggcaccaagaaggtgtcgtatgagagggatacaaagatcgtgaatgctgcatccttcaccatcgagcgtgaggaccacaccattggcaacattgttcgcatgcagctgcacagggacccaaatgtgctctttgctggctataagctccctcaccctcttcagtacaagattattgtcaggatccataccacaagtcagtcgtccccaacacaggcctacacccaggctgtcaatgacctagacaaggagctcgagtaccttaagcaagcttttgaggttgagaagaacaggtatgaggaaagggcgaagcaggggttctgaattcatggtgcctgatatctgacataaaaactccgtgggttagtcttatctttatccgatgcgtgagtcgccttgaaacaaacacccaagggttgtgactttgtgagcatgatgtgggactgatccctgaaccccaaggcgcatgagtcgcctgaaaaccattgctcaaggatattgtgtaacctgctgccagactgatctctgaactatgagtgcctttgtctatcacgaacctgtgccaagagtccagtaccgcgtggttaatctgacatttgcccacgttatctgtttctctgtcatgcatgtgccaacatcgtcttgttgctgcaccatgatcttttaagttgcaatgcatgttaactgtgaatctgtgataaagaatggcagtagtactcatgagtgaatgtgatagaacgatggaattttacagtaaaaa

SEQ ID NO: 6541 - DNA, 1149 bp, Setaria italica
  Peptide Sequence Number=SeqID_72515
gaatttctttcaaaaatttgatcctgttgtcagaagggacctgcataagcgtgattctccatcctctaccgcaaactgcataacgatattgaagccatctcgaagaaatcaaagtactgccactgagagcaacttcagtgagcaaaaggaagtgaaacattctttgaggaagccatatcctaacgtgtcctatcaatccctaaaagaagagtctggttcattgaggcagaaactgtcaaggtctggtcaccatgaaaatgctggaaatcaaggctgtcccacccggattgttgtcttgaagccaagtcttgagaaaccccatgatgttgaaggagcccttcccctgcatcatgaaatctctcattctgattataggaagcacaaagaatatcaggatgttggtagatggagtccgtatactgaagattacatgtgtcaggtgccccttggagattctgaaacattaggccgtatggggaagggatctagagaaattgctagggagatcaccaaacaaatgagagctgctaggggtggaagtaggaaacatgttgtcaactcagagaccataacttttgcttcagatgaaaggtcacagttcctgtcatctgtttctaagcacaagactccagaggcaattcatagatcttctgagatatgtgatgtttggccttcttccagcttcaactcttcaccaacatattcagctgaaacatcagtaagcaaggaagcaaagagacacctctctaacagatggaagaagacccatcagtgtcaggatcaagtaactgatagtgatggcttcagcacacttggggatgtgcttgctctctcagatcaggaagcatcaaaagttgctacccacaaaatggcatgcaggaaatgtcccaagggagaagttcagagtgatagaatgcaaggctcatgcatctatcctcttggcatcagcagcaatgatggatggagagacacggctgctagtaaattgacaaggtccaaatctcttccaccatccttcatccgcggagttcaaaagtcgaacaatagaaaacgagctggtagtgttaggtataatgagttttcgatgcttaaagatgttctgaaggtgggaccgcactattctgagtatgcatgttcgttggtctaggt

SEQ ID NO: 6542 - DNA, 414 bp, Setaria italica
  Peptide Sequence Number=SeqID_72516
aaatgtgcctaacattgagtctgaagactgtctcgtgaaaaggtgcagcgcgacgagaggatcaccttcagctccaccatcagttggtgctggtcccacggtcttgacagcagccagagcattcccattcagcggattcagcaactcaaccacgccgttcttccttgcaacagccaggacggggtcggccgctcggtcggcgagggaggcggcgacgatgccgcgggaggcgtccggggcgccccatgtctccacgatcttggcggcgcccgcgggcttcgcgtgggcctcgacgactttgacgaggccaaggatgtcggtggtgagggcgcgaagcggcgggcagccggggctctccaccacggtggtccgcggcatccttcagctccgaggtcgtttcggctcgccggcgcg

SEQ ID NO: 6543 - DNA, 226 bp, Setaria italica
  Peptide Sequence Number=SeqID_72517
gctccagtctagtatggcgggatgcaggctcagacaaactatgcaaaaagacgcacaccacgaagcacataagccatatccgagccttgcccaagctccaaacatacagcaaggagatgaagaggaagtgaggacacaagtttttccatgtccacctgctttggacttccatcttctgtcttggactgcaaaacaagctgtctgactccttcagcatctcaccaag

SEQ ID NO: 6544 - DNA, 401 bp, Setaria italica
  Peptide Sequence Number=SeqID_72518
cgtaccctgcttttatagaaagccaataaggtttgggttacagaccttgcgacacactggggataccagcttacagataacgagcaaaagagagcacacgagctcaaccctcgacactacagcaaacaaacttctaccacacagagatataagaaagtaaagacacagattcttcagataaacgattctccaggtggttgatccttcagcttttccagaaagtcttccgtccatccccgcacttgggtcatcaggccatccaagtgttctcggtcagtaccccccggttgcactcgccatctctcgttattcaacttctcttaatcttgcatcgaccaaccttctgcgttccttctgaatattagtcctctgctccaccgattacgaatgcaacagcaaga

SEQ ID NO: 6545 - DNA, 859 bp, Setaria italica
  Peptide Sequence Number=SeqID_72519
ctacaacatacgtattcgatggctcgatgcagtcacgccaacgcctgcgatgaactgatgatgcaccaaagcctcattttcaggagtacctattttcttgaatgaagaggattcatagattttgctatgcactagatatatattatgtctagatgcatagtaaaatgtatgaacctagaaaatccaaaacaattttataatttgggatggagggaatgtatactaaatgtgtaaaaatccacattgcaacaattcagcagtgcgagaatgcagcacacagataaagatttgtaaacaacaatagtaacttaagtactacacactacaaaggtactgtaggagtcaaaagcataatggaaggaatgctaatttttgccaacaaccaagaatctcctcctcattctggtaaactggtagccatgtgttggtttacacctcgttattcaacttctcttaatcttgcatcgaccaaccttctgcgttccttctgaatattagtcctctgctccaccgattacgaatgcaacagctgaagatatagtggatgagactactaggtcccgcggccatacaggctgcaattatcaattgccggtgacaagctgccactaccgaggtggtattgcgcaagatagggtcttcctgaacgaatgaagacaacattgtcacccttcactgtaggcagtaccttagaggagacacttatattcctttcttcaaggaacaaggtattgcctctgatgtcttttgttgggataaacctttgcagcacaaggtctgcgagtttgcaaactaaaatctgcgacccagacaaatcattgtggccaagcacgtctactaaggaacccttcggtaacct

SEQ ID NO: 6546 - DNA, 356 bp, Setaria italica
  Peptide Sequence Number=SeqID_72520
tggcgccgtgacaccagcccccccccccccccctctcggacctggcccaaccggcctcctccaccaccgtggcgggaggcgccgctgccgcccgccgttccgcccacaccccaccaccaccgccggtccggcaccgacccctcggccatccctctaagcccggcagccaccaatcccctccccaacccgaaacccgaaaccctaacccgatctggagctcgccggagaggaggtgctcgtcggagaagaagagatcgccggagtgctcgtcagagaagaagaggtgatcgctggagttggattgcattctttgttacttttctttggatttttgtttttttttcctttttcccttt

SEQ ID NO: 6547 - DNA, 454 bp, Setaria italica
  Peptide Sequence Number=SeqID_72521
gggggaggaggcgctggctggctggctggatggatggattagggaagttatattgtaataactacaagaactagatgaggtacttaacaatatggactctgagatcagagctattatggcacagtatatgccactggacaatcaaggagaggtcccaaatcatacacatgaagaagatcgttcataaaatgtctcctttacgtgcacacaccgttacatggtaggcccatatggcctaagtgacagcaaggaggatacgcaatgtttgagcagtgatgacgtatacaaactgatactgcaggtgataatggttttatttagagcgaataggggtatgttattcacctgctaatttattgggagcagtttcatcttgtataacattgtaagctccatttatgcgatgtacatctgttaggttttttttgttgagcagtccagttttcatagtttt

SEQ ID NO: 6548 - DNA, 363 bp, Setaria italica
  Peptide Sequence Number=SeqID_72522
taaactaacaataggggtggctatgactgcacttgcagcggtgaccttttatacatcagagagcatgacacgtgcataagtaatttccaacttaactgatgtttttttcagtgatcttttagaggatcaattaactattatatggttggttaatctgtaggcaagacagcagttcaggctaaagcagcatgggctgcagtgtggggtatcttgatagttatcgttgttgtggcagcgggaagttatattgtatacaaatacagactgaggtcttacatggactctgagatcagagctattatggcacagtatatgccactggacaatcaaggagaggtcccaaatcatacacatgaagaagat

SEQ ID NO: 6549 - DNA, 1388 bp, Setaria italica
  Peptide Sequence Number=SeqID_72523
ttagtttcgttacttaactttaagtttgtttacgtacgaagtgggtacagtccaagcaagggcgaagagaggtcggcgcgattcggagatgggcaagggcggcgagctgtgggacgactccgcgctggtggacgccttcgaccgcgccgtcgccacctacaaggaaatgcatggcaagagtaaccgagcaacgccatgtgaggatgaaaagccagaacatgctgctgctgctgctgctgccactgcacaagtagaggaagccgtcactgctgaaacagcggatgagcacagagagaaagatgccaaccgtgataacacagcctgtggtatggcggagacaccacagctgccctctgaagaaaaacaagcagttgagcaagctcctcttcaagaaactgatccaggcaaagagacacatgttccagagtctaaggcaatctcagatgctacagatgctgatggaaatgtcagctcaagccagcaaacatgggagtacaacgaattgctcagacagtactatgagcttgaggagaagagtcggaatgttcttcagcaactccaacaagcgaactactggaattatcaagcatcaggatattcttctacaacccaacagcagcaaattcctgcctatagtgccacagctccagatcctcactcttcaaccactcaatcctcatgctgctactggaatgtgcccctggtatctgtctcctgctgttcagctggccaaccaagtgaaggttctgctagtatgccacctagtggtggctgcagcgtatcattgacttgtgaccagtgccctggtgcaagcaccacataccctagcatttcaaactccatgcagctcccaacaaagttatctcccaatgatgatcaagttgccaaggctgcaatgatgaccgctgaaggtgccttgaattttatgagaagtacagtggctggacagcctggctcccaaggaaacgagtcagaaactagaaaggaggaaaacacaagtatgggcatgaacccgaaccttgacataactggagcagatagtgatcttgccgctctcttaaatgcatggtatgcggctgggttctacactggcaggtacctcgcgctccaatctacgaaaaattcaaaacaatagtttatgaggagggccatggtgtggtagatttctaaaaaaaaatgtcagttattgtttcacccatgttgccagtgcggcaatgccccctacggatgaatgtatctactcaatttgttatgtaactggacattccgatggagccgtgctgttttgcgcttactagtgctttttcatgctagaatcacggtatgctcatgtatgaacctgttgttatttgacagaaaaggcggtgaaacgagtaaactgttgcctc

SEQ ID NO: 6550 - DNA, 244 bp, Setaria italica
  Peptide Sequence Number=SeqID_72524
agttcgacatcacctgggcgacggccgcggcaagatccgggacaatggccagctcctgacgctcacgctcgaccgcacctccggctcggggttccagtccaagcacgagtacctcttcggcaagatcgacatgcagcgcgagcagcagttccgcctctggttcgatcccaccaaggacttccacacctactccatcctctggaacccccaagcacgtcatcttcatggtggacgacctgccgat

SEQ ID NO: 6551 - DNA, 388 bp, Setaria italica
  Peptide Sequence Number=SeqID_72525
aagcacgagtacctcttcggcaagatcgacatgcagctcaagctcgtccccggcaactccgccggcaccgtcaccgcctactacgtaagaacccattgatgatgaggatcacatgtgcgttttgtttgattttttggcctgctggctgatcgatcgatcaatgtgtaccgtacctctgcagctgtcgtcgcaggggaacacccacgacgagatcgacttcgagttcctggggaacgtcacgggcgagccctacacgctgcacaccaacgtgttcacgcaggggcaggggcagcgcgagcagcagttccgcctctggttcgatcccaccaaggacttccacacctactccatcctctggaaccccaagcacgtcatcttcatcggtgga

SEQ ID NO: 6552 - DNA, 417 bp, Setaria italica
  Peptide Sequence Number=SeqID_72526
aagccacagatcgatagatgccggcagcgatggcttctggtcccaagctgatgagaacggtggctcttggtgttctatgctcggcggtgctgctgctcgcgggcggcgcgagcgccgccggcaatttctaccaggacgtggacatcacctggggcgacggccgcggcaagatcctcgacggcggccagctcctgacgctgtccatggacaggtcctccggctccgggttccagtccaagaaccagtacctctacggccgcttcgacatgcaactcaagctcgtccccggcgactccgccggcaccgtcaccaccttctacctgtcgtcgcaggggtcgcagcagttccgtatgtggttcgatcccaccaaggacttccacaccttacttccgttggttgttggtaacccgtagtcct

SEQ ID NO: 6553 - DNA, 623 bp, Setaria italica
  Peptide Sequence Number=SeqID_72527
cgacatgcagatcaagctggtgccggggaactccgcgggcaccgtcaccaccttctacctgtcgtcgcaggggagcacccacgacgagatcgacttcgagttcctgggcaacgagacgggggagccttacacgctgcacaccaacgtgttcacgcaggggcaggggcagcgggagcagcagttccgcctctggttcgaccccaccacctcgttccacacctactccatcgtctggaacccgcagcacgtcatgtgagtcatccatcgccgccttcgagttcttgaaatccagacatggccgctgttgcgcgcacgtgacctgaccggcctttgttctctagcgagctagagtgcgagacgtatgtcgctgacagctagttctttcctcttgcttttgcagcttcgcggtggacgggacgccgatccgggacttcaagaaccacgaggcccgcggcgtggcgttccccaagtcgcagccgatgcggctgtacgcgagcctgtggaacgccgacgactgggccacgcagggcgggcgcgtgaaggcggactggtcccacgcgcccttcgtcgcctccttcaggggcttcagcgccgacgcctgcgtctgggccaacggcaggcag

SEQ ID NO: 6554 - DNA, 827 bp, Setaria italica
  Peptide Sequence Number=SeqID_72528
ttcgagcgccacacatcttcttcctctggtatcttctccttacaaccatggctgctcgggtctctttggtgctgggcgtgctgctcgcctgctcggccgcgcttgcggccgccaacttcaaccaggagttcgacatcacctggggcgacggccgcggcaagatccgggacaatggccagctcctgacgctcacgctcgaccgcacctccggctcggggttccagtaccaaagacaacgagtacctcttcggcaagatcgacatgcagctcaagctcgtccccggcaactccgccggcaccgtcaccgcctaactaacctagtcgtcgcaggggaacacccacgacgagatcgacttcgagttcctggggaacgtcacgggcgagccctacacgctgcacaccaacgtgttcacgcaggggcaggggcagcgcgagcagcagttccgcctctggttcgatcccaccaaggacttccacacctactccatcctctggaaccccaagcacgtcatcttcatggtggacgacctgccgatcagggacttccggaacctggagagcaaggggatcgcgttccccaagaaccagccgatgcggctctactccagcctctggaacgccgacgactgggccacgcagggcggccgcgtgaagacggactggtcccacgcccccttctccgcctcctaccggaacttcagggccgacgcctgcgtcgccgtcgccggcggcaagacccgctgcggcgccaccgtcggcaccgagggctccgccggcgccgccgccggcgactggtacaaccaggagctcgacctcaccctgcagca

SEQ ID NO: 6555 - DNA, 750 bp, Setaria italica
  Peptide Sequence Number=SeqID_72529
atcacaaagccaaggaactgaagcattggtgtcctttcctaggacgccagccagaggtggctgagagtctcaaagccacagatcgatagatgccggcagcgatggcttctggtcccaagctgatgagaacggtggctcttggtgttctatgctcggcggtgctgctgctcggcgggcggcgcgagcgccgccggcaatttctaccaggacgtggacatcaccgtggggcacggccgcggcaagatcctcgacggcggccagctcctgacgctgtccatggacaggtcctccggctccgggttccagtccaagaaccagtacctctacggccgcttcgacatgcaactctaagtcttcgttccccggcgactccgccggcaccgtcaccaccttctacctgtcgtcgcaggggtcggcagcacgacgagatcgacttcgagttcctggggaacgcgagcggggaaccctacacggtgcacaccaacgtgtacagccaggggaagggtggccgggagcagcagttccgtatgtggttcgatcccaccaaggacttccacacctactccgtggtgtggaacccgagccacatcgtcttctacgtcgacggcacgcccatccgcgacttccgcaaccttgcggcgtccgccgcggggtgccgttcccgacgagccagccgatgcgggtgtacgcgagcgtgtgggacgcggaggagtgggtcgtacgtctagggcgggcgcgtcaggacggact

SEQ ID NO: 6556 - DNA, 1283 bp, Setaria italica
  Peptide Sequence Number=SeqID_72530
ttcttaaagttccttaaggttaactttgttaagttctattttggttgttccttttccttaggtacgtcctagtcctagtaggttggtcttgtagtagttcttcaaagccacagatcgatagatgccggcagcgatggcttctggtcccaagctgatgagaacggtggctcttggtgttctatgctcggcggtgctgctgctcgcgggcggcgcgagcgccgccggcaatttctaccaggacgtggacatcacctggggcgacggccgcggcaagatcctcgacggcggccagctcctgacgctgtccatggacaggtcctccggctccgggttccagtccaagaaccagtacctctacggccgcttcgacatgcaactcaagctcgtccccggcgactccgccggcaccgtcaccaccttctacctgtcgtcgcaggggtcgcagcacgacgagatcgacttcgagttcctggggaacgcgagcggggaaccctacacggtgcacaccaacgtgtacagccaggggaagggtggccgggagcagcagttccgtatgtggttcgatcccaccaaggacttccacacctactccgtggtgtggaacccgagccacatcgtcttctacgtcgacggcacgcccatccgcgacttccgcaaccttgcggcgtccgccgcgggggtgccgttcccgacgagccagccgatgcgggtgtacgcgagcgtgtgggacgcggaggagtgggcgacgcagggcgggcgcgtcaggacggactggtccaaggcgccgttcgtggcgtcgtacagggggttcgccgcggccgggtgcgcggggagcgacgccgcggcgtgcgcgagggccggcggcgcctggatgttccaggagctcgacgccgccgggcaggaggagctccggcgggcgcgggccagctacatgatctacgactactgcaccgacaagtacaggttccggcagggcccgccgccggagtgcgccgccgccaagtagaacaattcgtgtgggtttgaatggatagagtacacaaatctgtcatcgattggatggatatacgtgactgatacggtatgagtttggcgcgtctacgtagacgccggcacgccgccgtgccatgtatatgtacgtgcagtatagtcgtctgatgtgaagaaagcttgagcatgtcacgccaatgacttctttggtagacgatgactgcgtcaacactgcgtcattaggtttgtcaaaaggggcttttaagatgacgagaacttgtgggtacaaaaaa

SEQ ID NO: 6557 - DNA, 799 bp, Setaria italica
  Peptide Sequence Number=SeqID_72531
ccagctcgatctctccttttcctttccttcgagcgccacacatcttcttcctctggtatcttctccttacaaccatggctgctcgggtctctttggtgctgggcgtgctgctcgcctgctcggccgcgcttgcggccgccaacttcgaaccaggagttcgacatcacctggggcgacggccgcggcaagatccgggacaatggccagctcctgacgctcacgctcgaccgcacctccggctcggggttccagtccaagcacgagtacctcttcggcaagatcgacatgcagctcaagctcgtccccggcaactccgccggcaccgtcaccgcctactacctgtcgtcgcaggggaacacccacgacgagatcgacttcgagttcctggggaacgtcacgggcgagccctacacgctgcacaccaacgtgttcacgcaggggcgaggggcagcgcgagcagcagttccgcctctggttcgatcccaccaaggacttccacacctactccatcctctggaaccccaagcacgtcatcttcatggtggacgacctgccgatcagggacttccggaacctggagagcaaggggatcgcgttccccaagaaccagccgatgcggctctactccagcctctggaacgccgacgactgggccacgcagggcggccgcgtgaagacggactggtcccacgcccccttctccgcctcctaccggaacttcagggccgacgcctgcgtcgccgtcgccggcggcaagacccgctgcggcgccaccgtcggctaaccgaagggactacca

SEQ ID NO: 6558 - DNA, 808 bp, Setaria italica
  misc_feature (1)..(1): n is a, c, g, or t
  Peptide Sequence Number=SeqID_72532
ntttttttttttggttacataatcagcgatagttctttaaaaggctatatttgcatatccaacgctcatcacgagttagcaatgcaagaaaaatgtaatgccactaacaaggtcagcagaatcaacgcaaaatgtactggacccaacatggtcagcagaacctatgaaggtgtcttgccatcaggtgaatcattcacagctcagataaatgatccaatgagtctactaggccttcacatattcgcgaatgaattgctcaacagccaaaacattaccagtcaaaccaccaccttcagcaactgtcaccttgttctggcattgactgaagttaaaggcctctccgggtaccccaagcttgacttcatcagagatgtcagctgatgatatggcgttccttgattcccgaagcttgtttatctctttttccaactgcttcttgatgaattcctttgagtgagctgtaactttatctgtcttgttgcagaatattagcacaggaacccttttcttcactacagaggccttcgttagagtgtcatacaggtacgattttagacaagatgctgcgataagcaccaggattgtgatcgcaaccaccgcggccgcgacgtagatctgctccgggggctgctgacggatccagctctcggcttggcctgcccacgactccgcttggcgaatccactcgtccatggctccttgaaccacgagaataattccggcggaatgatctcccgtgcctcgccgacggcgaggagcgcggcgagttgcggcagtggcagattaggaaaggagcacagtaggatgc

SEQ ID NO: 6559 - DNA, 1237 bp, Setaria italica
  misc_feature (1)..(48): n is a, c, g, or t
  Peptide Sequence Number=SeqID_72533
nnnnnnnnnnnnnnnnnnnnnnnnnnnnnnnnnnnnnnnnnnnnnnnntttttttttttttagtttcttaacaagctgcatatttttcatatccaatgactgtcagaagttagcagtgcaatgcctctctaaaaaagggtcagcgaaaacctggtttggtatatgcaggaatagcacattgacacaatggacgccttgcctcttgccctctacctatgagccactcgcagctccgataagggtctacgccttcacacattcacggatgaattgctcgacagccgaaacgttaccggtcgaaccggcaccttctgcaaccgtaaccttgttctggcactggctgaagttgaatgcctctccagggaccccaagctggacttcatcggtgatgtcagctgatgatatggcattccttgattcacggagcttgtttatttctttttccaactgcttcttgatgaattcctttgagtgggctgtaactttatctgtcttgttgcagaatataagcagaggaacctttttcttcactacaattgcctttgtcagaatgtcatacaggtactctgcagcagcttgcatgctagacaagaaatcttgagcatcaacaacaaaaacaaccccagcagctttaggtaggacttcatcaagcttgggtttgagccttgcatgaccaggaacatcaacaatatgcacaggttttactttgcctttcctttcttgctccgaatgcagcacaaacgtatcattgttttcttccattgaagtcacagttccttgatgcgatgatccatcccgaagctggtagaaaagagtagttttgccacctccattaagcccggatagcactatagtgtttggttttgatgattttagacaagatgctgcgataagcaccaggattgtgatcgcaaccaccgcggccgcgacgtagatctgctccgggggctgctgacggatccagctctcggcttggcctgcccacgactccgcttggcgaatccactcgtccatggctccttgaaccctagagcgcccgaaaaattagggagaggaagctgcgtgccaaatacgagaataattccggcggaatgatctcccgtgcctcgccgacggcgaggagcgcggcgagttgcggcagtggcagattaggaaaggagcacaggaggaggcgaggcggagcaggattacgagaccttgtagttgtcgttgtcggtcgttgttatttattttcttt

SEQ ID NO: 6560 - DNA, 862 bp, Setaria italica
  Peptide Sequence Number=SeqID_72534
cgatgctctcgtttccttcccggtgcctgctcgctcctgctcgaccttggaatcttgccctgcactttagaccttgttcctcgcctatctctacaccctaccctagcttctagctaccgtgcaggcggccagcgagtcagcgaccgagctgcgagctagagagagagagaggagctctctttccgtgcgagtgtgcgactcagaccttgctcacctgcagctttgaatgctcagggctcggtcagggcctgaaagcactcgagccttgtcccttgctcgcaaacccttgccgccttttggtcacctcgggcgccgcgcggagcagcacctgtgctctgccctgtcctccccctgccctgttcaccgctctcttcttctcgctggcctgccaggcagggggcagcctttcctcgccggtcgccatctcccatttataaatccgctccctcctgcttgcctctcctgctccgtgctctgctcctgcttgtgtgagtgacccgtgaccgtgagcttccttctgttggtgagcttgctctgcacggcctgagccctgaggtgagggagagagatactagggcggtgaccatggcatggcggggccggctcggggagaccgcggacagcggcctcgagctcagccttggcctcccggcctacttcgccaagacctcatcagggttggacgccggcgaggatcccggcgacgctgctgcttttgctctccaggccaccaaagggagcgatggctccaaggcaagggtgaggcctgcagctgctgctccggtggtggggtggccgccggtgcggtcgttcaggaggaacctggcgtccaccaggcagtcgccgcagtcgtcgtcggctc

SEQ ID NO: 6561 - DNA, 360 bp, Setaria italica
  Peptide Sequence Number=SeqID_72535
gtgagggcgtaccggaagaacgcgttccacgccgcggcggaggcggcggcttcggtgaggaggacgaagggcggcgacgcagggaggcctttacgtgaaggtgagcatggatggagcgccctacctccggaaggtggacctgcggacctacggcgggtacagggagctgagggacgcgctggacgcgctcttcggctgcttctcctcctcctcgcccgatgctggctgccagttcgccgtcgcctacgaggacaaggacggcgacctcatgctcgccggcgacgtgccatgggatatgttcatctgttcctgcaagaagctgaggatcatgaggagctccgaagcaagatgatcggagtg

SEQ ID NO: 6562 - DNA, 278 bp, Setaria italica
  Peptide Sequence Number=SeqID_72536
catcttcatcccctccttctgtgacaaaggcaacacggtatggcctcccgttgcgagtaatatcagaaatatgccccggcttcacatcagacaagatcatgatatcaccaacactgggagcataacattcaggctgattacatgatttagcagcctgggagtcagaagcaacacaaatctcgtatttgcctttcttttcttcaatccatgatatcctgacagaaggcatggttgatagggattccaagcttgatgacatctcagctctcaactcctcc

SEQ ID NO: 6563 - DNA, 748 bp, Setaria italica
  misc_feature (1)..(45): n is a, c, g, or t
  Peptide Sequence Number=SeqID_72537
nnnnnnnnnnnnnnnnnnnnnnnnnnnnnnnnnnnnnnnnnnnnnttttcaaatcatcgtatggctgttttttttgagaatgtacatatatatttcataagatgttctcaaatacagtgaaaatgggtaccattgaatgcactgaaccgtctaaccatcttattacaagcaatcgaggtctaccaatcaccaacgcatcttactgcgagccgccattaaccgagggatcaggcttgtgagcggccagcaagaagtccagcatgaccttgttgaaccgagccgggtcctccagctgcggagcgtggcccgtgttcttgatgacctccattctagcgctcccgttcagagacctctgaactgcgaacgctttctccagcgggaacagctgatcgtggtctccccagacaatcaacacgtcctgagatattggagtcacttggaatttatccgtgccgaccgtaatccccttgaggagatgaacaagacgctccctgttgtccgtgaagagtttctggatgaagtcccggagcatgaagtccggcatcatcgcccgcggcggcgggcggtatgacgccagctcgatgagcttccgcatcgcggcgggctcggcggggaggaggatctcgtcgacgccgccccacccttcgccggcgcgcttcaggaaccccctgtcgtcggccgccgtcttgagcaggtcggagctcgcgatcaccacggggccgacccggccggccccctaccgcgtcgt

SEQ ID NO: 6564 - DNA, 452 bp, Setaria italica
  Peptide Sequence Number=SeqID_72538
tggccggtgttgggatttgcacggtcacggacgtcgaggtcaatgccaagggattcatctgcgcgtgcgtggcggtattctgcacgtcgctgcaacagattaccattggctcctttcagaagaagtacaacattggatcatttgagctactgagcaaaactgcaccaattcaagcaatttcacttattatactgggcccctttgtagattactacctcaatggacgatcgttgttgaactacaatttttcaggaggagcaactgtaagttataacttctgtcacaatttcagttcttgaaagcacactgtacttatgaatgctacttgtcctgagtgttctatcttcaactctaaattcatgaccagtattctcagctctttcaatgatatatttcttttactggagtgaacacccgactcagtagcgcacatgtactgaaattgtgatgcc

SEQ ID NO: 6565 - DNA, 1593 bp, Setaria italica
  misc_feature (1488)..(1593): n is a, c, g, or t
  Peptide Sequence Number=SeqID_72539
tgtattcccccggtaactaagtagtcgtactattgtcttggtacggtcgtaggtacgttgtcccgggttcgcgtgaggctgcgctcgctcgccgccgctgccgccgccggggaggagggccaggcgagatggaggcggagaagaagccgccggcggtgtccgacatgggcgcctgggcgatgaacgtcgtcagctccgtcggcatcatcatggccaacaagcagctcatgtcctcgtccggctacgccttcgccttcgccaccacgctgaccgggttccacttcacggtcacggcgctcgtcggctggatctccaacgccaccggctactccgtctccaagcacgtcccgctctgggagctcgtctggttctcgctcgtcgccaacacctccatcaccggcatgaacctcagcctcatgctcaactccgtcggcttctaccagatctccaaattgagcatgattccggtggtctgcctcatggagtgggtgctcaacagcaagcactacaccaccaaggttatttctgcggtggtcgttgtggcggccggtgttgggatttgcacggtcacggacgtcgaggtcaatgccaagggattcatctgcgcgtgcgtggcggtattctgcacgtcgctgcaacagattaccattggctcctttcagaagaagtacaacattggatcatttgagctactgagcaaaactgcaccaattcaagcaatttcacttattatactgggcccctttgtagattactacctcaatggacgatcgttgttgaactacaatttttcaggaggagcaactttcttcatactgctttcatgctccctggccgtcttctgcaacatgagccagtacctctgcattgggcggttctctgcgacgtcgttccaggtcttgggccacatgaagaccgtgtgtgtgctgatcctcggctggatcctgttcgactcggccctcaccgtgaagaacatcctcgggatgctgctcgccgtgatgggcatggtggtctacagctgggccgtggaggccgagaagaaggcgtccaccccgatcccccggaacaagagcgacatgctggacggcgaggacgtgcccctcaaggccagggtgagcggcctgaccccctccgacctggaggaaggcgagttgaagagctagctggtggcggtggtgaagattcactgattcttcttgttcttttgtaattgtgcgcgctcgctcaatccaagttgcatcttcgaggactcctcgaagctatcgacgctacacttgtgttaattttggccattgttggggggagttcgtccataggtgacgacggctgcccccggtttcgacgtagatgaaacaacactatgacagtttgctagggatttgtcaggtggggggaggtggagggagccattgttaattccgtgatggcgtgttgttatagaagatggtgacaagactcgtataatggaatacaggtgtttctccgtcnnnnnnnnnnnnnnnnnnnnnnnnnnnnnnnnnnnnnnnnnnnnnnnnnnnnnnnnnnnnnnnnnnnnnnnnnnnnnnnnnnnnnnnnnnnnnnnnnnnnnnnnnn

SEQ ID NO: 6566 - DNA, 304 bp, Setaria italica
  Peptide Sequence Number=SeqID_72540
ccgccgccgtagcagctgcctccgcctccgcgcccggcgcgatgcggccgtgacgccgccgggcccggggggaggcgtgtggagccgcgcgtcgctcgccggcagcggcagggaggcatttgtggccagtcaggcccccatctacatgaatcaggctcctccacatatgtctagaccatctattattctcaagctcattttggggctgatctggggcatcatccacttggcaatcagcctttttaatatatggtctcttctgatttataatctagaatgctatattatttcgtctgggttgttg

SEQ ID NO: 6567 - DNA, 226 bp, Setaria italica
  Peptide Sequence Number=SeqID_72541
tttgtgcctctgctattcctcctcagcagccctctcagcggctcagcgcagctgcgactgctatggattccaaagccatggaggcatttgtggccagtcaggcccccatctacatgaatcaggctcctccacatatgtctagaccatctattattctcaagctcattttggggctgatctggggcatcatccacttggcaatcagtcctttttaatatatggtctt

SEQ ID NO: 6568 - DNA, 421 bp, Setaria italica
  Peptide Sequence Number=SeqID_72542
tatgtgtttgtttggcaatcgagagttgaaaattataaactaacactagggtgcataagcaagatgaatgatgcaatgtgacaagtgtacatctatcagctgctgttatgcaagccagaacagtaagtgcatgttgacatcaaattatctgaatgcgttgagagttagaatctaaaccttactaacattttttgatttccttagatatatttctgtgatcccgtggagtgcataacctgatcacagaaatgagagcatgacaagttgtaattgctctgtgtgcagatgtctagaccatctattattcttaagctcattttggggctgatttggagcatcatccacttggcaatcaagtctttttaatttatggtctcttctgatttataatctagaatgatatattatttcgtctaggttg

SEQ ID NO: 6569 - DNA, 1284 bp, Setaria italica
  Peptide Sequence Number=SeqID_72543
ctcaatctgtgggttctcatcctcaaactcgacgatgtgttgcagccaattcagtaacactgccatccaattcagcagcaccggcaactgattctgcaactgtagccaagtacttcagtcgatccagatgtctagaccatctattagtcttaagctcattttggggctgatctggggcatcatccacttggcaatcaggctttttaatttatggtctcttctgatttataatctagaatgctatattatttcatctgggttgttgcggaagtatcggtacctccacctggatcgactgaagtacttggctattgtggtggatagcaaagaagctaaaaaataccgtgaagatcaggcagctattgtgctggctctcaactatgggtgtgaagtatatatgtctctacgacattgagggagtcatgaagaaatcatttgaaccggctatggagggttcaagagatgggaagggtattagtgcaagcatttcacactctagccacaaggatttggcaatagagtgtctttctggttctgatggcaaggagggtattgctaaagcagccaatttactttgctcaacttacttaaatggtgatactcatggagatggcaaaacggagccaacatttacagaagctgacatggccagtgcgctgaaagctgtaggttgtggtggaccagaacctgatcttcttctcatgtatggtcctgctagatgtcattttggctttcctgcatggagattacggtatactgaaattatgcatatgggaccactaaaatcaatgaaatatggtgccattatgaaagctttatataacttctcgaagaaataccaaaattatggtaaatgagagttggtacttttgtaacgaagaccagtagcagtttactccctccaccattttttctgctgctgagtacaatactaaattcgtcgtcacaccccacactgtatttcccttgtacaagatcggaagtgccactgacagaatatacgggatcagaaccctttgtaaaagtcgcgtcaacagtactgattaatgaacctgccctcgagcacgactttgcttgttcagttgcctcgtcaagattcgtgcaagcagtagtccatcggagggacaatggctgctagcttgcacaaagaaaaaaggaaatcttttttcaacaaaaaaaattggctaagcactcactgaaatttatttattttccttctaggaacttttggtaaagctacaagtctttttactttaatattaagagaaatagacattgtagtac

SEQ ID NO: 6570 - DNA, 553 bp, Setaria italica
  Peptide Sequence Number=SeqID_72544
catagtagtgatggcacactatttttaggaagtagccttgctatgctaatgaataagtggtgtgccatgtgttaataaaacctgttaattaggttatcggtgtccatcgtggttatgtacttctcaactaaatggattcccttccgttttagcttcctgtgtttctttttatctctcatgtaggtgtgggatgtctcatctggtgaggaccctgagattgttggtggggccaccatatttcttttcaacagcaaaaggcagcttaaaacaggaaggcagaagctgcggctatggcccaaaaaggaagcagatggaggagtccccaccacaacccctggcaaggttcctaagaacgagaggggtgagatagagcgtttggagaggcttgttaacaagtatgagagagggcagatacaacatgtggattggcttgatcgtctttccttcagtgctatggagaaagctaaggagaaagagtgtgagcggaaggccaatttgtaccctagcctagttgttgaattgtgcagtttcgaacatagagttgtcttgttct

SEQ ID NO: 6571 - DNA, 478 bp, Setaria italica
  Peptide Sequence Number=SeqID_72545
attggtagaaaatgttagcttcccaaagtagagacaatgtatgatttccatttacactttgaataaaccaaataggaagatgtgtttcgttgtcaatttcgttggagatcaccattaattatgaatcaaaatttaatgccctggttataccttcatagtagtgatggcacactatttttaggaagtagccttgctatgcctaatgaataagtggtgtgccatgtgttaataaaacctgttaattaggttatcggtgtccatcgtggttatgtacttctcaactaaatggattcccttgcgttttagcttcctgtgtttctttttatctctcatgtaggtgtgggatgtctcatctggtgaggaccctgagaattagttaggtaggggaccaaccaaataaatttaacttttaacaaaacaaagaacaaaaaaggaacaaagaacttaaaaaacaaaggaaaggcagaagctgcggcta

SEQ ID NO: 6572 - DNA, 273 bp, Setaria italica
  misc_feature (1)..(20): n is a, c, g, or t
  Peptide Sequence Number=SeqID_72546
nnnnnnnnnnnnnnnnnnnnttttggtagaaggaacttccaagcatttcagacacaagaaatggagaaattacagcaagttttgtttcttgaacacagacgaccgtggctctagcctcacgcgtgacatcacgcaaaacgtctcgtcggcaacatgcgttcaacccacgcacgttccaaaccaggacattctggtttgtatcttgcatgaaaatagacagcaacccaaggcactgatgcttccgccgtcagtcatcaggcaccggctgcttgg

SEQ ID NO: 6573 - DNA, 322 bp, Setaria italica
  Peptide Sequence Number=SeqID_72547
taggggccactcgtcggcgtctcccccgcacctactgcacggcgactggggctgcctccatctgccgtggcaggtgtgcagtggcacattgaggcatgaggcgaggacgctgtcgcgagatgttgccgccaagtactccggggtcatcgacgctgccgtagcggaagatgatagccaccaactaggctgcttcatatatgaattccaagacccatctcactgtacgtttatggctgattttcacggctgagaatgtcaaacgaaaagacttcagcttgatgaccataaagaagcttcttatggtgccattaccccacaccgg

SEQ ID NO: 6574 - DNA, 345 bp, Setaria italica
  misc_feature (26)..(26): n is a, c, g, or t
  Peptide Sequence Number=SeqID_72548
aagggctaatcaagactcaaggatanaggggttcaactcctatgctttaggaacagaaccaggagtggcgcatcaagcaacctgtcaaacgaaaagacttcagcttgatgaccataaagaagcttcttatggtgccattacccacacggccacactggtaagagtgcattactggagacttctttgggcttctttcacatacagcacaatggttgcttctggcccctcactttcttcatttgatgtttcgaaaatggatcgagctccatagctaactttagtctgtacgagtacaatcatttggccatgaccaccaatttgttgctgatgacaaatgtagtcttg

SEQ ID NO: 6575 - DNA, 428 bp, Setaria italica
  Peptide Sequence Number=SeqID_72549
gtaccggcatcttctaccccctccccctacgccgccgccgccccggcttcatcggccgtcgtcaccttctccttccagaagcttgtgatctagtatgtctgggcgaacaggtcggtggcctcctcccccctcttcctcttcactctcggcaggcgcgggccgagggccccgggagctgccatggttgcggcgttatctgatttctaagattcgaccttgaggctcattcaagatcggattatatgtgaacaaacgccaagatacatggcaccaactgcacattccaggagggagagggagccagacctgcatgcatctctcatgagttgtgcggaagaaagtcgagcagctagtggggacacagccacacacacatggatggtgaatgccaatttgcgatactctattttacacttgtgaaaatgtat

SEQ ID NO: 6576 - DNA, 538 bp, Setaria italica
  Peptide Sequence Number=SeqID_72550
cataggacttcagttgctgctcttctgccgtgttcatgtctaaaataaccgcaccattctccatcaccccacagccaattgcgactgcaagatgtttcaaagggaagccagcaaatgagagggcagtgcaggaagcgttaattgcacatggcaaaagagagccatcatcacccacgacctgaagcacgacagaggtggtggtgtttggatgaacggtgagcacgcagatgctctgcaatgtcctcttgagcgtcatctcatactccttctcttgccttccgatttggccggtcttgggcttccacacgacctctatggaggccttctcggggttctccccttcctggtccccggcttgggcccgtacacggcggcgagcacaacggtgtccccctgcgcccagcgcgcggagccgtgggcgcggttgagcgggttgccggtgcagctgaacggccggagctggttcgggttccgcccgtccgcgcggctagttccttccatcctctcctcccctattctccggtgggcaatggcggcg

SEQ ID NO: 6577 - DNA, 197 bp, Setaria italica
  Peptide Sequence Number=SeqID_72551
gaagtcctcttccatgccaccttcttggtgtaattgttaaattcattgccgatccctgacgaatgatagtgaagtttgggaatgtggaagctggtgacagattgcaggaaaggctcatgtctgaagctatctccaatgaggatcatcaagtatctttagctatcattgccgtattcccttgtacgtaattgtattaa

SEQ ID NO: 6578 - DNA, 949 bp, Setaria italica
  Peptide Sequence Number=SeqID_72552
gagcacgactcgaacccgtccccttcccttgcggcggccccggaccgtgaatgcggagagagcgagagcgagagagagagagagagatcatggtggccccggacctgaaggcggagacgatgaagctgatggatcggcggggggcgctcgaggcggagatggacgccatcatcgcccgcctcaccgcgcccggcgggccgggcatcaccggcggcctcgtcgacgccgagggtttccccaggtccgacatcgacatcccgaacgtcctcgcccaacgccggagactcgctgagctgcgaaatgatcacaaggatgttactaacaaaattgataagaatctggagattctacattcatcaaagttgtcgaggaatgagcaatcagcctcaagggggtctgatacaacagcttcatcgcatattgggttatctcaaattgaaccaatggaagaggatccggtcaccagacttccttttgccatgattgatgagatcacagatggttctcctgctgctgtggatggtttgcaacttggagatgagatagtgaagtttgggaatgtggaagctggtgacagattgcaggaaaggctcatgtctgaagctatctccaatgaggatcatcaagtatctttagctatcattcgtcagggatcggcaatgaatttaacaattacaccaagaaggtggcatggaagaggacttctggggtgccattttcgaatgttatgaagagtctgcgttcttcagccaataatgttcgcccttctggacggctctagcatcaattgatgacttaggtcgtgattgaactgattaactgaaagtgtgtaacgtcctacagaaagctgaatgcgttacttatttttatctgtggagcgcttaaaacataccggcgtatactacctggttgccttggttgagattttacttacgtaaaaaaaaaaaaa

SEQ ID NO: 6579 - DNA, 247 bp, Setaria italica
  Peptide Sequence Number=SeqID_72553
gcatcatgggacctctgctcggcgccctggctttgtccacgctgccattcggattgggatggctcgatgctgctgcgatgtgcagttgctcaaaactgtcggtaaccatcgaggccgacccgatgttgcgatgggtgcagtctggccctgatggacatcactgaactaacaaggatagggcacgacacggcaatccgtgtcggtaactctgatggaaatgcgatcgagatcggcatgactgagccat

SEQ ID NO: 6580 - DNA, 373 bp, Setaria italica
  Peptide Sequence Number=SeqID_72554
agatgatgtgctcctcactaccctcgtcatcatcctcatcattgacctcggactttgacttgtcaaagtccgaggtcaatgatgaggatgatgacgagggtagtgaggaggaggaagacgatgacgagtgaactcagctgatgttttactgaataattctagtagataggataggctccttataattcccgccacggggcctttgcattcaccactccatcgttcagtggagcacatcatcttcagctgagttcactcgtcatcgtcttcctcctcctcactaccctcgtcatcatcctcatcattgacctcggtagtgaggaggaggacgacaaaagtaaaacatcacgatgtgaagtgaaactgaataatt

SEQ ID NO: 6581 - DNA, 831 bp, Setaria italica
  Peptide Sequence Number=SeqID_72555
ggcgggaattataaggagcctatcctatctactagaattattcagtggagcacatcatcttcagctgagttcactcgtcatcgtcttcctcctcctcactaccctcgtcatcatcctcatcattgacctcggactttgacttgtcagactcctcttcatcttcctcctcttcctccttggcaggagccttcttggcagcagcagtgctctcgcccttgttgtaggcggcaatggccttgttgtactccgacttgagcttattggccttggctaaataaggagccttgtccgcatctgtcagggatttccacctgttaccggctgcttttcccacctccgcaacagacttgttcttagggttcttctccttgaactccttgcggaattcctccctaaccagaaatagatcaaaccacggccaaccgaaataaaaactaacttttcctaaaactaaaaaaggtaagcagctaggatctcacatgaagacgaagaaggcgctgggcgccctcttgggcttgttggggtccttgccggcctttcccttcctgcccttggcgggcttctccgctcccttgctcttcaccgccaacttggcatctgccttggcggcgcccttggatttggcccccttcatggcggattcctgcggagacaccgagggaagcagtcagatccgcgcggggcggagcgaatcccgcttggaatcgggcgcaacggcggcgaatcgagggcgaattggggggcgggggcggctcacctggaccggagggagacgagggcaagcctggccttgggaggggaaagggaaggaggaggagacagagagaggcg

SEQ ID NO: 6582 - DNA, 445 bp, Setaria italica
  Peptide Sequence Number=SeqID_72556
cccgcttgttacctagattactgtttccatcgtcatcggctaatattgtgataagcggggcattgcatcccgccagacgccggtggcgccaacaaggagcgctatccgttataggacgaccaaaagtaaaacatcacgatgtgaagtgaaactgaataattctagtagataggataggctccttataattcccgccacggggcctttgcattcaccactccatcgttcagtggagcacatcatcttcagctgagttcactcgtcatcgtcttcctcctcctcactaccctcgtcatcatcctcatcattgacctcggactttgacttgtcagactcctcttcatcttcctcctcttcctccttggcaggagccttcttggcaagacaagacaagtagactactacgaccctttagtttagttaaggtacggtactaaattaggta

SEQ ID NO: 6583 - DNA, 801 bp, Setaria italica
  Peptide Sequence Number=SeqID_72557
aaagaatgctaccccccaaaccgcccctgcatgtcaccaccacaccaatcattagccacccccattccattccattcctccgcaaagattcaacccatcaccttgtgcagtcatgtacatgtatgtatcactgaaacggcaattggacacacgactgctactttgctgccgaactgctgcaaagtagcagcagtgcagcaacaacccaaacgaatcccacaacaaaaacaggcatatatgtcaccaagcacagcgccagtcaaaaccaagcatcatggagcgggacaacaccgagactaaccaaagacaacaatgattacttcatctaacattacccaaactgatattatcacaatattagccgatgacgatggaaacagtaatctaggtaacaagcggggcattgcatcccgccagacgccggtggcgccaacaaggagcgctatccgttataggacgacaaaagtaaaacatcacgatgtgaagtgaaactgaataattctagtagataggataggctccttataattcccgccacggggcctttgcattcaccactccatcgttcagtggagcacatcatcttcagctgagttcactcgtcatcgtcttcctcctgcaaacacagcatgcaatgcaggttttagcctccacaggacaaatcatctcaacagggagatccaccgctatacttagcatctaccaagagagtaaaatctactagtcagataataattcaatctgctagtacctagagtagcctataccaatgcaacttttctaaaagcatgagcagaatag

SEQ ID NO: 6584 - DNA, 356 bp, Setaria italica
  misc_feature (326)..(326): n is a, c, g, or t
  misc_feature (346)..(346): n is a, c, g, or t
  misc_feature (351)..(351): n is a, c, g, or t
  Peptide Sequence Number=SeqID_72558
cgggaggaaggagtccagcgtggcttggagcccgcggatgacctcgtcgtcggggagcgactccaggtgcgcggcctcccgcccggcgaaccacgccagcactacgcgggagcccgcgtggacggggcagatcgactcggtgccgcgcatccaccaggggatcttggccacgtgcccccggaacgccatgtgcaggaacgggaactccggcggctggccgccgccgccttccgggcccggcgcctcggcaggctccacctccatgaacagcttgttcacggcgccgaagccgaggcgtgcgacggcctgcgcttgaactgcgggancggcgggtcaaggcatggcncccgnggcgg

SEQ ID NO: 6585 - DNA, 334 bp, Setaria italica
  Peptide Sequence Number=SeqID_72559
ccaaagttgaaatccatgaagggcgtgcaaacaaatgcaactctcaacctgcttcagtcgattccaaaggtgaacatgatcataactccaacttgtacccctcaactaatactaaagttgtcagtatgtctaatatggagtcatctgcaggtgaaaatccggatgcctgtactgtccatagaaaagttgaagatggttgtacagacaaagatagcgctgttgaatctgcattgggcagccagtgtagcttggttgtttccaatgaaattcaaaattgatccttgccggggaatcttcattgtctgctgctgataaacaacctggcttgtttatc

SEQ ID NO: 6586 - DNA, 734 bp, Setaria italica
  Peptide Sequence Number=SeqID_72560
tctcctgagctagcggatcctaaagcagttggatcttcagccaaagttgaaatccatgaagggcgtgcaaacaaatgcaactctcaacctgcttcagtcgattccaaaggtgaaaatccggatgcctgtactgtccatagaaaagttgaagatggttgtacagacaaagatagcgaggttgaatctgcattgggcagccagtgtagcttggttgtttccaatagaaattcaaaattgatccttgccggggaatcttcattgtctgctgctgataaacaagcccagggtttgttaaagtcaactaataataagcagcttctgggtgtatcagaccacccacgaacctttgatagacgtgacagtattgctggcaaattagatttgatggctacggaggtgaaaaaggctgatgctgttcgagatagtagcacagtgcagaatgaggatgaaaagaaggaacaagctacttcctctttggctgatgttaccaaacttgtaggagcagcgtccccacttggtgtggcaaatgtgattaaggagacgaaagaatcaaaagacagttccagtgaatccaatgttcatgtaaaacctgaaggtcttaattctcagcaaagtgagcatagtgcaaagcagagttcaaagaaatccagtgatggtgtgagtggaaaagaggacggaaaagaagacctagtctcatcagatgagggttcttctctagctgctcgcacaaagtc

SEQ ID NO: 6587 - DNA, 481 bp, Setaria italica
  misc_feature (423)..(481): n is a, c, g, or t
  Peptide Sequence Number=SeqID_72561
tcgtactttgtagtctagtttgtcttttgtcttagtattttttcttttagtcttgtttaggtctttttggtttcttaattttacttctaggtaggggttgttgggtcttttgggtagggttggaatctttgtgaccctgagcccagcccagcctcttcaaagatctgggagccactgtaattagcccgctctgtttgttcttgataaaagtcttgagagcacattcatcagctttacataacaatttagatgtgacctggctttagctgacatttcaacactatggagcgacaagtagcatatcgctgcgccgtcatgtatcttgtgttgcgctgcagctgtatgtataagaattcaaacagatcagcaagttataatatgtcaccgtttccttgttatcaggtttataaacatctaggtttnnnnnnnnnnnnnnnnnnnnnnnnnnnnnnnnnnnnnnnnnnnnnnnnnnnnnnnnnnn

SEQ ID NO: 6588 - DNA, 1337 bp, Setaria italica
  Peptide Sequence Number=SeqID_72562
aaaactaacaaattacaagacccaaatagaatgctctgattgaaattaagtattctgaagctagtcattccttgcaacctggggatgacacagctatgaatcttcttgctagtgttgcaggagaaatatctaaatctgaattggtttccccatcttcttcccccggaagttcatctgcaaagaaattggtctgtgagggtgacaatactggaaagtgtaaagcagaaactgatgttgggcctgtacaggatccagggccgacaatactggaaaatgatgctttggttgcaaaggaggaacaacgccaaactgtgccatctcctgagatagcggattctaaagcggttggacctccagccaaagttgaaatccatgaagggtgtgctaacaaatgtaactctcagcctgcttcagtcgattccaaaggtgaaaaatctggatgcttgtactgtccctgtgaaagttgaagatagttgtgcagacaaggatggcgctgttgaatctgcattgggcagccagtctagcttggttatttccaatagaaattcaagatcgatccttgctggcaaatcttcactgtagaatacaacaacaatagagcctttgcagaggagcaagcaagaatttaccaaatgtcaggtgtaggaacaaaaagaaaggaacctgatggcagttgggacacagaaagatctacatacaagcaattatcatggcaatgaggactctggaggagatcactttacactgacttatgtcacgtgtgtggataggtagctggacgtataacaggtggtgtattcttcccttgctggactatactcccatggattcatcccaacgatgatgatgatgcaggattgtgtgaggaaacaaacactctgctgtaattgttgtaaatgttcatcacatttcatgctctcattgaaacaattttcctcgacttgagcagttgctttgctagatttttctttagctgttaggcttttggttctaatttactcaggagggtgtggctttggaggtggaatctttgtgaccctgagcccagcccagcctcttcaaagatctgggagccactgtaattagcccgctctgtttgttcttgataaaagtcttgagagcacattcatcagctttacataacaatttagatgtgacctggctttagctgacatttcaacactatggagcgacaagtagcatatcgctgcgccgtcatgtatcttgtgttgcgctgcagctgtaatgtaataaagaaattacaaaacaagaatacaagacaaagttaataaataatagtacaaccgtttaccttagttaatacaaggttttaaaaa

SEQ ID NO: 6589 - DNA, 651 bp, Setaria italica
  Peptide Sequence Number=SeqID_72563
gacttgaatgaagggatacctggggatgattgccatcagtctgagccagctgtctcacctgttatatgttcctcagcgatccatttacctggtctttcgccattcacttcacctgttacaagtgggctgcagccggctccaataacagtagctgctccagctaaaggaccctttgttccccctgataacctactaagagcgaagcctgagattgggtggaaaggttcagcagctacaagtgcatttcgtcctgctgaaccgaggaaggtgttggagatgcctgtcaccacacgtgacattccagtatctcatactgctgggaagcagtctcgtcccacccttggctttgatttgaatgttgcagatgaccaagctcttgaggaagatgtcccgcagagttctgcacagactacttgttctgaatctggaaataccagaagtcgtgatggctcttcacgaagtgctggcattgagtttgatttgaacagagctgatgaagttgcagacaatggccaatttgtaccaaatgctgcacacagagttgaagtcccgttgttaccagcaagagcattacctggagtcttctctaatactggcatgaatagctcgagagactttgatcttaatagtgggccgggccttgatgatgct

SEQ ID NO: 6590 - DNA, 5579 bp, Setaria italica
  misc_feature (5544)..(5544): n is a, c, g, or t
  misc_feature (5560)..(5560): n is a, c, g, or t
  Peptide Sequence Number=SeqID_72564
cggaggcccgcggatcagggtttcggagggcctagggttgcgcccggcgatctggtgatggtggcgcggcgcggcgccggagctcggcgaggaggagggatcggcggcgccgtcagggaagatgcagcgggccggatatgcatgggtggcgcggcgctgaggggtgcgacggcaggaggcggcgtctcgttcggctcatgtggccagccgctcgcgtagaggcagaagctccaccaccaccggcacagggaccacctacttccccttccagctcatctgttcccccgtctcggactacttcttatccgccggaatcggcggcgcggaagcaggactgcgtcgattcccctcgccccgtgtcacccgactcgtttataaaggacgggcgtgagattcgagttggcgattgtgcactttttcgggctgttgatgttcctccatttattggattgatacgttggattgagaaaaagaagaaggctatcccaaattacgcgttagttggctttatagacctgctgacgtgaagcttaacaagggcatccaactcaacgctgcaccaaacgagatcttctactctttccaccaggacgaagcatctgctgtttccctgctgcatccttgcaaagttgcctttttacgtaaaggtgttgagctaccagctggaatttcttcatttgtatgttggcgtgtatacgatattgacaacaagtgcttatggtggcttactgaccaggattatattaatgaacggcaggaagaagtaaatcggcttctacacagaacaaggctagaaatgcgtgccgcagtgcagtcaggtggacgctctccaaagcggttaaatggcccatcagcttcccaacaaccgaagacctcttcagatggtactcagaatggtggtttatctaaagggaagaagagagatagaggtgagcagggaattgatccagataagcgggatcaagatcgtctgcttgtcgatgacagtgagcctggaagcaagttggacgatatgaagtctgaaatagaaaaatttgaaaaaggtggacttccaaatgcagaagcagttgaaaagcttgtgcatcttatgcaacttgatcagactgaacagaggatagacctagctggtcggattatgcttgctgatgttattgcagctacagagagcactgattatcttggcagatttgtgcaatcaagaggccttcctgtgttggatagttggcttcaggaggctcataaagggaagtctggtgatgggagtaaaggagataagcctattgatgaccttctcttgtccctgcttcgtgcactagctaaattgcctattaatctcagtgcactgcaaagttgtagcattggaaaatctgtcaatcatctgcgcggccataaaaatttggacattcagaagaaagctaagtgtcttgttgagaactggaagaagcgtgttgatgctgaaatgaagtcaaatgatgcgaagcctttagcctcaggtcaatctgtttcctggtcaggaaaagcaggtttccaagaaatttcaaatactgcaaacaaacgaggtggctcaagtgagagcagtccaaaaaatccagtgcccactgtttcatcatcaaaagttttgactgataaacctgggggcacagatgcagctgcgaagttgaatcctgtggtacctgcctcatcaaaactacaacatatgcaaccaacaaatgtcgccaccaacttgaaggaccagccctgtaaatcaactggtgggactggtggttctgagctacctactgtgaaagaggaaaaaagcagcagttcaagccaatcaccgaacaacagccagtcgtgctctagtgagccatcaaaggatgcgagaagttcaactgctgcttctggtggtgctagtaaaccttctggaagttcctcacggagccatcggagggcaaacaatggtcttgtttcagggaacctgaaggaagcatctgcgggaagatctgtttcccttgatcgatctttgctgcaagataaatcatctcaaagtgggacggcttctgaaaaaggagttgatactccagctgatcacggaaacaatcatagattgattgttcggtttccaaatcctgctcgtagtcctgctagaagtgcaagtggaggatctttcgaggacccatctgttactgggggtagagcttcatctcctgtggtcgcagatagacatgagcagactgaccgcagagtgaaaatgaagactgaaagttctcggcctcatttagcttctgatgctaatgcagagtcttggcatagcaatgatattaaaggagctgaggaaggtgataaatcaccatgtgctatgttagatgatgacaacagcaggactcctgacgattctgttaaggatgcacatgtatcacgagttgcatgttcttatatgaacgaaaaagttgtctgctcaagtgaaactagggtgggaaattcattcagcccaatgaacgctctgattgaaattaagtactctgaagctagtcattcattgcaagatggagatgacacggctatgaatcttcttgctagtgtggcaggagaaatatctaaatctgaattggtttccccatcttcttcccccagaagttcatctgcaaagaagttggtctgtgagggtgacagtactggaaagtttaaagtagaaagcgacgtgggtccatcacaggattcagggccgacagatgctaagaaagtcattgtggggaaggaagtgaaaaatgatgcttctttggttgcaaaggaggaacaatgccaaactgtgctatctcctgagctagcggatcctaaagcagttggatcttcagccaaagttgaaatccatgaagggcgtgcaaacaaatgcaactctcaacctgcttcagtcgattccaaaggtgaaaatccggatgcctgtactgtccatggaaaagttgaagatggttgtacagacaaagatagcgctgttgaatctgcattgggcagccagtctagcttggttatttccaatagaaattcaagatcgatccttgctggcaaatcttcactgtctgctgctgataaacaagaccagggtttgttaaagtcaactaatcacaagcaatttctgggtgtatcggaccacccaggagtctttgatagacgtgacagtatcactggcaaggctgcagaggtgaaaaaaactgatgacattggagatattagcacagtgcagaaagagaacaaaacgaaggaacaaccttcttccgatttggctgatgttcccaaactagctgtagcagcagcagccctgcttggtgtggcaaatgtcattacggagaagaaagaatcaaaagacagttccagtgaatccaataatcatgtaaaatctgaaggtgtcaattctcagcaaagcgagcatggtgcaaagcagtgttcaaaaaaatctgatgatgctgtgagtgttaaagaggatggaaaagaagaccttgtctcatcagatgaggattcttctctagctgctcgcaccaagtctggttctgccaagcttgacttcgacttgaatgaagggatacctggggatgattgccatcagtctgagccagctgtctcacctgttatatgttcctcagcgatccatttacctggtctttcgccattcacttcacctgttacaagtgggctgcagccggctccaataacagtagctgctccagttaaaagaccatttgttcctcctgaaaatcttctaagagcgaagccggagattgggtggaaaggttcggcagctactagtgcatttcgtcctgctgaaccaagaatgattatggaggtgccacgtgacatttcaggatctggtgcttcagagagccagtctcgccccacacttggctttgatttaaatgttgcagatgaccaagctcttgaggaagatgtcccgcagagttctgcacagactacttgttctgaatctggaaataatagaagtcgtgatggctcttcacgaagtgctggcattgagcttgatttgaacagagctgatgaagttgctgagaatggccaatttgcaccaaatacttcccacagagttgaagtgtctctgttaccggcaagacctttacctgaagttttctctaatactggcacgagtagctccagggactttgatctcaataatggaccaggcattgatgaagctggcacagaacctgcaccaaagaacccaccagctaaaaatacaagcagtatacaattcttaccacaagttcctggtgttaggatgaataacgctaccatgagtaatatatcaccatggtttgcctctgccaacccttgcggtcctgtagctatacagtcatttttgcctgctagaggagaacaaccttacccgattgagatgacacctggaactcagaggattgttgcaccaacagctgatggtggtcaatttggaggtgatcccagcagggctccagttatttcatcgtctccaacaatggtttttcatcagcctgcatatccgtatgcaggatttgcttttcctcccagtgttcaccttcaaacaccgggattttcaattgggtcaacaacatttcccaactctgttccgtcaggggtgccgtattttcctgccatttctccatcgcttgttgggccaacaggtgcattaccatcccatcattcaaggcagtatgcaataaatcttgttgagggcagcagcagcagtggacgtgacaataatcgtaaatgggaaagtcagggccttgatcttaactcaggccctggaagtatagatctagaaggaaaggatgaacgggcacctttacaaattagacaaaatttgatcccacccccacatggctttgcagaggagcaaggaagaatttaccaaattccagttgtaggaacaaagaggaaggaacctgatggcagttgggacacagaaagatctacatacaagcaattatcgtggcaatgagggctctgaaggagatcagttagcagcgacttgtctgcactgagcataggtcctgcaatgtagaacttgggctgggtgttcttccgtcactggactatactcatggatccatcccaacgacgatgatgccgggttgtgaggaaagaagaaactttgctgtaattgttgtagatttttcttagctgttaggcttttggttctaatttactcaggagggtatggctttggaggtggaatcttgttgatcctgagctctggagccgctgtaattagaccgtccgctctgtttgttggtgataaactgttgagcacatgctgcagctttacataaaaatttagatgtgactttgtactttgttggggaagcgttacttcagctgaccatgtaagcactgctgcactggtgcagcgtctagcgtgacgagttgcgccgtcatgtatcttgtgttgccgtgcagctgtatgtataagaattccagcagatcagcaaagttatattttgttgctgtttctctaaaaaaaaaaaaaaaaaaaaaccggtttgcatcatgctaccaaaaaaaaaaaaaaaaaaaaaaaanaaaaaaaaactaaagngacacgcaacagggagtag

SEQ ID NO: 6591 - DNA, 292 bp, Setaria italica
  Peptide Sequence Number=SeqID_72565
ccctcgtctcggtccccgtgcccgactccccgcccttcgcgcacctcctctacctccgcctcaccgtcgctttcttccgatctcctcctcctcgggtccgtcctcttactggcgagggacgcgcgtcggaggcagcggccgttcctcgctctcgcactcgtcctgtggtcgccggcgctgctcgccgtcgaccacgtccacttccagtacaatggattcctcatggggctgctgctgctatcgctgtactttctcgagcaggggtgggatcttgccgggggaatggtgttcg

SEQ ID NO: 6592 - DNA, 868 bp, Setaria italica
  Peptide Sequence Number=SeqID_72566
ataaggctattgaagtttttaagtgcatgcctgagaaggatgtagtatcatggagttcaacgattgcaggattttgcttcaaccataggaactttgaggctctttactatttcaggcatatgctggcagattttaaagcccaattctgtcacttttatagctgctcttgctgcttgtgctgctactggggctttgaggagtggtaaggagatccatgcacatgttttaaggtgtggtattggatctgaaggttatttacccaatgcacttatcgacttgtatgtaaaatgtggccagacaggctatgcttgggcacagttctgtgtgcatggtgcaaaggatgttgtgtcctggaatatcatgcttgctggttttgtagctcatgggcatggggatactgctttatcgttcttcaatcaaatggtgaaaactggagagtgtccagatgaagttacgtttgttactctgttatgtgcttgtagtaggggtggaatggtcaatgaaggttggtaactttttcacagcatgactgagatatactctgttgttccaaatctcaagcactatgcatgcatggtggatctactaagtcgtgctgggcaacttacagaagcttacaactttataaatgaaatgcctatcacaccagatgctgctgtttggggagccttgctaaatggatgccggatacaccggcatgttgaacttggggagcttgctgcaaaatatgttcttgaattggagcctaatgatgctggatatcatgttcttttgtgtgatataataatagctagaatagactaggtaagaatagggaataaaattagtactaagggtaaagaaaaaaccaatagacgggaataaagga

SEQ ID NO: 6593 - DNA, 1415 bp, Setaria italica
  Peptide Sequence Number=SeqID_72567
ccgcgagacaagaactagaagcagctagcagccgtgcgctaatttagccatggccgagggggagcgtggaggaatcgctcctcgccgcgggccgacccggggaggagtgcctgagcgtgcgggaggaggtgaagaagcagctatggctggcggggcccatgatcgccggcgcgctgctgcagaacgtgatccagatgatctccgtaatgtacgtcggccacctcggcgagctccccctcgccggcgcctccatggccaactccttcgccaccgtcaccggcctcagcctgctgcttggaatggccagcgccctggacactctgtgcggccaagcgttcggagccaggcaatactacctcctcggcatctacatgcaacgcgccatgttcctgctcaccctcgtgagcgtccctgtcgccgtcatctggttccacaccggcgagatcctgctcctgttcggccaggaccccgacatcgccgcggaggccggcaactacgcccggtggatgatcccggcgatcttcggttacggcctgatgcagtgccaagtccggttcctgcagacgcagaacatcgtgatgcccgtgatggcgagcgccggcgcggccgcagcgtgccacctggtcgtgtgctgggtgctcgtgtacgggctcggtttgggtagcaagggcgccgcgctgagcaacgccatcgccttctgggtgaacgtggtcttgttggctgtgtacatcagggtctccagcgcgtgcaaggagacgtggaccgggttctccatggaggcgttccatgacgcgctcagcttcttcaggctcgggatcccatcagctctgatggtctgcttggagatgtggtcgtttgagctcattgtgctcctttcaggccttctccccaaaacccccaaattggagacgtctgtgctatctatcagcctcaacacggctgccttcgtgtggatgatcccctttgggcttggctcggccgttagcactcgcgtctccaatgagctcggcgctgggcggccccaagctgcacgccttgcggtgcgcgtggttgtgttcttggccgtctcggaaggactggtcatagggctgatcttggtctgcatacgctacatttggggccacgcgtacagcaacgtcgaggaggtagtgagatatgtggccaagatgatgctggtcatcacggtgtccaacttctttgatggaatccagtgtgtcctttcaggacttgtacgaggagcccacatatgatgcccaaccacaggcccatcccgccaacatgcaagacgaaagctatgaggtaagctgaaggaatgccggcgatatagtaggcactaccgttaatgcaagcaccaatcttctgccatccgctagtccttctttgtctaactaccttgtaaaggttactacttactt

SEQ ID NO: 6594 - DNA, 348 bp, Setaria italica
  Peptide Sequence Number=SeqID_72568
tggcattggaagaccatctattgatgcaataagtgtcatagcacctcttatctccggaagttccacaattgcctcagaagaaccagggaaattgaggggaataatgttgtacttgtagttcttgaaatgacgacccttttactcgatcatttccgcacaccttatcacctggggatcaactttgttatccgttacatcccttaacacttcataaagagcagaggccacttggtaatatctagccatctcctcgaagttcctctttgttatccgttacatcccttaagcacagtacttcttatagaactgttgtatctcgcttgcatcattgcccagaacttgtgtgtc

SEQ ID NO: 6595 - DNA, 262 bp, Setaria italica
  Peptide Sequence Number=SeqID_72569
ttacagcagtatctacaaccccctttccgggctccgtagcaggaaattatatattctgtcaaagaaagtccctcgcgtaaattgctttgaataggtaaatcaatcatttgtccttgaggatccgccattaaccctctcatacctactaattggtgtacctgagatgcatttcctctggctcctgaaaaagcattagatagactggattagaaggatccgttattacgaaaattagaattcatttcttgtttcaaattattca

SEQ ID NO: 6596 - DNA, 284 bp, Setaria italica
  Peptide Sequence Number=SeqID_72570
caacccggggttgggctgcacgacctcgccgacgaccgctcgcatggccctgtccccgacccccgccggtggcgacgaacgcggcgatgtcgagagcggagatcatcccgatgaacctgaccccggagggcgggtcctcaggcgcggcccgcgggcgccagacgggcacggcgccctcggggctggaggcgatggcgcgcgcggcgtcctcgagcgtgtcggtgtcgtggagctcggagacctccggcttgccgcaggtgaggtcgccgacgacgtggtggaag

SEQ ID NO: 6597 - DNA, 289 bp, Setaria italica
  Peptide Sequence Number=SeqID_72571
tttttttttttcttagtctaagctacaatcagcttttttttcctaaacaacagtcactgaaacagacgacatacaaatttgcaaccctggctggacacaactgtacagtttcttcacccaaaccagtgtgacatacaagaactaagatcaaggactcgataaaaaaccatctctacatgatctgatataagcaaatgtacaaggacaacaattgtgtgctaagtcactaaaatgctgtcacctggggcacgggcacagcaagggagagcaattctgaggccccctcgct

SEQ ID NO: 6598 - DNA, 310 bp, Setaria italica
  Peptide Sequence Number=SeqID_72572
taaattggtcctattattggttattgtcggtattgtcgacaacatcgcttattgcaagccgaattcgacgttcgggacctgcgtgataccaccaccgccgccgccatcaccacccacgcccggccgcagaggtgcaggagcaggcgatgcgagtgcggcaacggggcggtctcatcatcaatggagcttcttcctgggactggcgttgttgctctgctaagaatgaccaattcatgcattgaggccttgtgcttccggcggcaacttgatttggttttgctttggtttgtaacctctaattttgcctgag

SEQ ID NO: 6599 - DNA, 796 bp, Setaria italica
  Peptide Sequence Number=SeqID_72573
gactcagtcgcactagtacgcccgccgctccgacgcccgtgacgtcgaggggaacctgccccgcaccaacatgtcggcgcgcgccatggcgcggctcttcgccagcaagggcatcacgccccgggagatggtggcgctggccggcgcccacaccgtgggcttctcccactgcggcgagttcgcgcaccgcatctacggataccgcggcgccggcggccacgacccgcgcctgaacccggagttcgccctcgcgctgcagcgctcctgcgccgggtaccggagcgaccccaccgtctccatcttcaacgacatcgtcacgcccagggacttcgacgaggcatactacaagaacctgccccgcgggctgggcctgctcgcctccgacgccgcgctctgggagtacccgcccaccagggtcttcgccgagcgctacgccggcaaccgcaccgccttcttcgaggacttcgccgccgcgatgcagaggctcggcgccgtcggcgtcaagactggccgccagggcgtcgtcaggcgccgctgcgacgcgctcgactgagatgagcggaattgctgcgcattccgtcggtggcttgttgtaagggttcgaattcgataggttaggattcgattggggaatggagctgttgtctgaaactctgaacatgaaaaagactcgggcatgtgagttcttgacaggccgatgaactgaaggcaaagctagttctgaatttcatacagattgggtgtccttgctagtgccgcacggtgaactagaccgtgccatcatcaattcagcata

SEQ ID NO: 6600 - DNA, 245 bp, Setaria italica
  Peptide Sequence Number=SeqID_72574
taccagactgctggaatgctggagactgtccttcgggttggtgtgcttggagaagatgatactggcgaagaatcccccagtaaaaaaaaataactagcaacaaatgtgcttgttatgctgtgaagctcttatatgaggcaatggtcgagtgagggctttccacataatggacccaaagggagtgcttgacacacttcttgtttttcatgagaggcagggatctgtagtgccacagccacttatac

SEQ ID NO: 6601 - DNA, 259 bp, Setaria italica
  Peptide Sequence Number=SeqID_72575
ctcacccactccactcgccatggcggaagctctcgtgggcctccgcttcgccgcccccgccttcccgcagcctcagagccagaggcaccgcgaccgccttctccccgccgcgcgcttcaccccactctggcgcggccggctgtacaccgcccgcgcggcagtcgcggggccgccggaggtggacgaggacgaggccatgagcatcgacaacctgcatcgtttcttcgaacttaacatcgtttccggattcgtgatttgg

SEQ ID NO: 6602 - DNA, 451 bp, Setaria italica
  Peptide Sequence Number=SeqID_72576
cggattccctcacccactccactcgccatggcggaagctctcgtgggcctccgcttcgccgcccccgccttcccgcagcctcagagccagaggcaccgcgaccgccttctccccgccgcgcgcttcaccccactctggcgcggccggctgtacaccgcccgcgcggcagtcgcggggccgccggaggtggacgaggacgaggccatgagcatcgacaacctgcatcgtttcttcgaacttaacatcggcaagtgggacggctcgttctacgtacgcctcgccctcttcgcatctaatcttcgagcctttatgcagtttccggattcgtgatttggctgagtgctgtgcgcgcccgtgattgtgttctctgtagcaattcgacgcacacgggagggttctgcaggggattagcacgcggctatccgtgagcacggtacggggaaggaacaaa

SEQ ID NO: 6603 - DNA, 689 bp, Setaria italica
  misc_feature (601)..(689): n is a, c, g, or t
  Peptide Sequence Number=SeqID_72577
gtgtctccgactcagtctatactattctggcgtggccttttttctgcatcaaaacatatttataggggaaaaggtccatttacagtagtggtgtattctcttcaaaagaatgtaaataagaatttcgctgtttctgttcataggatactatatcaactaaaatcggaactggcacaacaacaacggtcaactggatggaatcagcaaataacaacttgcttcagtttgatggaggatatgaaataacattgctacctggtgggatgtacatgggatatccatcggatattagcaaatctgttgcccagttagattcttttcatttggagttttgttggatggaatcaccaggaaagaggcagcggcttgtgcgaacttatgactcagctggtttggctgtttcatcgacctattttcttgagaccaaagtatgagttacactgttacagctttcactttaatgtatgcaatgattttgtagtatttgcattgcgttgttcagtgcatgataattgagtatatattgccaggcatctttctctaattaaaagacagaaaattatgagcaaatatttttcttattctgctaccaaaaaaaaannnnnnnnnnnnnnnnnnnnnnnnnnnnnnnnnnnnnnnnnnnnnnnnnnnnnnnnnnnnnnnnnnnnnnnnnnnnnnnnnnnnnnnnn

SEQ ID NO: 6604 - DNA, 735 bp, Setaria italica
  Peptide Sequence Number=SeqID_72578
cctccgcatcgtcgcctccgccgtccctcagcctcgaaccctccactgctgcctcctccgcacagcgctccgcggcggccagttccggggcggccggctgcgcgcccgcgccgcggtcgcgggggcgccagaggtggacgacgacgatgcaatgagcatcgacaaccttcacaggttcttcgacctcaacgtcggaagatggaacggatcgttctaccaattcgacgcacatgggagggttctgcaggggattagcacgcggctatccgtgagcacgtacggggaggacgaacttatcagcctcctgcaatcgctgtatattaagcaagcttcctctaggatgtcaattgtagacgaagaggattctgaacctgaatgggtggagtacaaaatcaaagagacgaatatgttcactgtggacaaatatcagcagataggattctttcctgaagagaaggcatttgctctgaggtaccagactgctggaatgctggagactgtacttcgggttggtgtgcttggagaagatgatactggtgaagactcccccaaaaacttgaagataccttctcgtaagccatctattgtatgcgagaattgtctttactcccttgaagccaatggccgagtgagggctttccacattatggacccgaagggagtggtcgatacccttctggttttccatgaaaagcagggatctatagtgtcacagccacttttcgactcatcagt

SEQ ID NO: 6605 - DNA, 867 bp, Setaria italica
  Peptide Sequence Number=SeqID_72579
tgctgtgaagctcttatatgagtgtaacatcgctattttgtcttcaccagaaacctgaagataccttctcgtaagccatctattgtttctttttactttcccttttggaagtcctaattggtcgagtgagggctttccacattatggacccgaagggagtggtcgatacacttctggttttccatgagaggcagggatctgtagtgccacagccacttatacattctccaattggtaccgagaatgccagcagtgataggattaatgcactacttggaagatgggaggggcattctgtgactaagaggagtggggtgtatggagcaacactcgctgaggcagatacagctgttgttctcaaaatggacagcaatggactactaactcaggatactatatcaactaaattcggaactggcacaacaacaacggtgaactggataggatcagcaaataacaacttgcttcagtttgatggaggatatgaaatcacattgctacctggtggaatgtacatgggatatccatcagacatcagcaaatgcgtcgcccagttagattctttccacttggagttttgttggatggaatcgccaggaaagaggcagcggcttgtgcggacttacgactccgctggtctggctgtttcgtcaacctactttttagagagcaaagtatgaaccacaggttccacccccaaaacgtgtggaaacgattttgtaagtttcctggcaacctcactgattaattttgctttatattgctcggtacacgataattgagtatatattgtcatctgtcagacatcgctgtacatgcaaaatacagaaatgaatcaggtggttcattaattctgccgaaaaaaaa

SEQ ID NO: 6606 - DNA, 560 bp, Setaria italica
  Peptide Sequence Number=SeqID_72580
aaaaatccacttgaactcgaggtttccctgccttcccacgcacactgagctcgactgatctccatattttacactgtcaaaaatcacttgaactgagtttcctgccttcccacgcacactgagctgctgatctccatattttacactgttggcctctgtgtgatataaattatctggaccactacgaatagaagtccatgtcattccccatctaggtgcataatcgtcaccgagaaacatataacctccaccaccttgctctctagtgatacaatgaccgaaaatgttggaaataatcccatggctagccagctgactgggaaggcttatcgctgcactgctaagtccaagaatcccatcagctttgctggtgaggacagaagctggccttgctgatcatatgcacacccgaagacaaaatctagcttttcccttccaccatttgttgcgatcagatgcatatcatcccttgcaaggacacccatagaagagctttggtctgcatattcaatttcattagttctactatttgtctttgttcttaagtttctttcttactt

SEQ ID NO: 6607 - DNA, 513 bp, Setaria italica
  Peptide Sequence Number=SeqID_72581
cgtttgcgcagtttgtacatggtgcatcacactggatccacgtcaagtcgcttccagtatcaacatcaagaaagtacggtcttggaggattgccaacaaagatagatgtataatactggccatcggggaagacattccccttgatcgggagcaaagccgtggagttggcccccgccgcagccgccttcttgacctccatcttgttcgtcgccttcattccgccaccgtcgaccctcttggcggcgagcttgacgtccccgaactcccgcagcgcgcggccctgccgtgccttggggtagagcggcagcaggaaggacctggtctcgttccgctccttctgcgcctcctcctgctccatgcccaggaactgcacggccacgtcggagtagaagcagtagtaggccgcgaccgcgagcgcgcccagcacgagcaccatggccgccacccgacgcggcgagagcctccgcctggaccgcctcctggtctccgccgccaccgggtaccccatcggta

SEQ ID NO: 6608 - DNA, 376 bp, Setaria italica
  misc_feature (79)..(79): n is a, c, g, or t
  Peptide Sequence Number=SeqID_72582
accaccacacgccagttgaacgcgaggtgggccgagacgcgcgcggtgcgggaggccaggcgtagcagcccatcgttgngcccggcggcggcgcgcgggtccgcggcggagaggacgaagcaggcgaggacggccgcgcaggcggcccccgcggcgacgtaggcgaggagcccccgcgtgctggccctgttgaggcggccgtagagtgagcccgcgttcccctccatcaccatgcaggcgccgcgcgcggcgacggcagcagcagcagcaccttccacgagcggaggaaatgcggagagaatttgaggaagacggcgaagggggagaggggaagatgacacgcaacaggggataggcaaggcacacaggggatagg

SEQ ID NO: 6609 - DNA, 899 bp, Setaria italica
  Peptide Sequence Number=SeqID_72583
gaaaaaggagagctgcagtcggccactgctcgccacctcgcgcagctccactgcgcgcaccagccgccccccattcctctccctccccaagcgcgggacgccgccctcctctcgagcggcgcgggaacaggcgccgggctgcgcgtgcggtgtgggcaaggcgcggcggcgtcgaatcttggagtggcgcaccgggtggagggcctcgccggcggtggggagggaggcggagatgagccggggtcggtcgccggagccgttggatttcttcatatggactgtgcaggatgtggggttatggttggaggaaataaatcttggaagctatcgtcaatcatttgaagaaaatggtgtgaatggggagtatctagaaagcctgtcgatgttcactacagagcagattcttcgattcataagacggtgtcatatgaaatggggagattttattacactttgtaaagagttaaggcgcatcaaagttgcctgcctgaaaggggagcaggaagtccgcaggccgtggtgggcgccgtcatgcctctccgtcgtgttcgtgcgggtggccaagcgtaaccggcagtcccgtgtcgtctccctgaagctcgaggcttagcaggcttgccgccagccgcctctgctgtgccaccaccaccccctgcctgccggggcgttctaaggcgcctctcgctctgtaccatacagcactaggtcacaatggtccagaaacctgttttcgccgtagaatcgtcgtggagtgtgacctgcgtgtgtttctgtaacttgcttctttcccacatatatagggtcgtggatggatccgagatggtaaagatggtgtagacgaaggacatacatgtggttttttgcgttctgtgcagatggttgctctttaaagtgtctag

SEQ ID NO: 6610 - DNA, 854 bp, Setaria italica
  Peptide Sequence Number=SeqID_72584
tggccactgcctttggcccccatgtgtaaaatgtcgaatctcctccactaaaaactctgtgatcttgtcatccaccacctcgctcttggtgtccaatagcttgctcacccagaacagcttcttcacctccccaatgcccaatgctccagccatcttcctgatcatgctcatcactcgctgggagaggtttacctgctcgttgaagcctatatagcttaaaaggctgtactggcccattgttcctgaccacaacagcctagtctctggcaatccaaacactttgctggagagaagaaacctggatatggaagcgagccttcggtacccttcagcctccagccatgcccatgtccaaggtgacgccaacatcataatcactgcacaaacttctagaaggaaacctccggtaaataatatgtaggtgataacaatgtcagctctgccatatctatctgcttgttttttgctagtaatagagaagagcacaagagcaacaatagcagacacctgagagatgcaccggagtatgattccactccttgtacgcagcaatggagccttcgtgtagagatcatcatacattattataccaagttctacatctaacaacttgatcaactggctgtgatcaagtgtgttagtagcatactcatcaagaaaaaaagcgcgttcatacgagcaggcctctcaaattgattgtctatgtcgtcagtcatacgccttgcaaacagcattcggattcctgaagcccatagcaatgcaaagcagataaaaccataatatccatcatctagacccatctgtggagtcttctcattaaaaaaggaactgcctgctgatctactattgtaaag

SEQ ID NO: 6611 - DNA, 297 bp, Setaria italica
  Peptide Sequence Number=SeqID_72585
cgctgccacacccttgggaacgcatgagtggcttcacttggaagctgattccgttcatcagctcagtccttccacgctgccatctccattgttctcacttctcagcactgcacccttgggaacgtatgcggtatgcctcaacgcactgccgctctcatctagtcctctcgtcgtattccagcctcctctgttccgaagcgaagcccgtgagaattgagatggccatggcactactaaccaggagggattttggcatcgacgactccttgaccgacgacgtcttctccgccccgccgg

SEQ ID NO: 6612 - DNA, 735 bp, Setaria italica
  Peptide Sequence Number=SeqID_72586
gcggctccaccgcccgactattacgaaggtgtgaggcggcgcgccggggacgtgctctcggaggctcagattaaggagtgccaggaactgggggtgctggtggacagggatgaccagggggtgttgctccaaatcttcaccaagccagtgggggacaggtaaagaaaactgaacttttccagtatttgcattgcatgcctgcatgtcgaattccaaatcaataggaacaatttcaggtttgtagtagtcaactaattgatcgactgcatgcatactgtacagaaaaggtatgggacataagatttctcttggaactcctttttgtgccctgatgcatgatgcatctttatggagattgtgacaactaaaagggattgaaagaaggatgtactgagtgaaaaatcaaatgtttgattcttcttgcaagcacaccctatctctcaactgattacataaactaattatcagctgtggtcatttgcacttaatttttgaagattttggtttgagatgtcagggttaatgctttaatatggaaccctgtattctagtgttttctgactgcatcgattgctaatttctctacttctatactattctggatctaattggatcagctatgtcatccaggcaaacattgttcttggagataatacaaaggattgggtgcatggagaaggacgagcaggggcaggaataccagaagggtggttgtggcggttttggaaagggaaa

SEQ ID NO: 6613 - DNA, 295 bp, Setaria italica
  Peptide Sequence Number=SeqID_72587
caagaacgccgaccggagctacacgttctcgacggccatcgtcgacacccgcaaggagaaggagctggacgaggcggcggtggcggagttccggcagaggatggggtcccttgtgcgattcgaggagcgggtggtggtgggcaacatgatcgaggaggtggtgtcgatcgggaagagcagggagtacggcctggtggtcgtcggcaagggccggctgccgtcgccgatggtggcgcagctcgccgtccgcccggcggagcacccggagctcgggcccatcggcgacgcgctcgcg

SEQ ID NO: 6614 - DNA, 1575 bp, Setaria italica
  Peptide Sequence Number=SeqID_72588
tttttttttttttaggaacagaaaatgcgccacggcgagagagatccattagccaaggaacaggatgtcgaaagtgagcgcatacatctctcagagacagattgtcaacgtgctgacacccatagtagggatcgattagaagtctgaaaactgcagcgggacaaccacaagcaacaaaacggaaaccaaattccgtgaccgtgggtatataccagtacaccactcacacaagcggacggaggtgaattattgagactgggagttgtgtgactcatcacttgtccacgacttcgatcagtgttggctcatagtgatcaggggcttcaaacccatgaaggttcatgacggtcgccgcaacgttggcgaggccggcgtttgggaggtccgtccggaacctgaccccaggggcaagcccaggacctcctatggcgattggaaccggattcagcgtgtgtgaagtaagggtctggaccttcccgtccttgtcacggagcggttttccagatttatctcttttcgccatgtcctcggcgttgccatggtcggcggtgagtacgaaaatgccacccacttgctcaatggcatcgaggatgatcttaacagcctcatcagctgccttgcatccaactatagttgcctcaatgtctcctgtatgaccaaccatatctccatttgcaatgttgacccttacctgatcaaattttcggctcaggatggcatcccttgccttctgtgcaatttccaaggccttcattttcggctgatcattgaaggggatgccgatgtcgctaggaatttcttcatatttttccaaacttgggttgaaataaccagatcggtttccattccagaaaaaggtgacatgaccaaacttgactgtctcactgcaagcataggtgcgaacaccattccgggctaagtattctcccgatgttctctctatctctgggggagcaacaagataatggctcggaagttttagctcgccgtcatactggagcataccagcataacgtatcttggggaacctgactcgatcaaatttgtcaaagttctcatactccaatgcttttgcaagcatcaccatccggtcagctctgaaattgaacgtcacaacagcatccccgtcctgtatcgggccgaccggttttccactttcatcaactataacgaagggtggtaaatactggtcgttggcctttggatcctccctgagctttttcacagcctcaagagcgttcttgaacttgtgtggggcttcgccaaggacatgtgcatcccaaccccgcttcacgacctgccagtcattctcataacgatccatcgtgacgtacatcctgcctccaccagacgcgattctcgcgtcgacgcccttctcccgtagcctggcgaggtcctcctccagcatctccacgaacctgatgctgctgccgtccagcacgtcgcggccatccgtgaggatgtggacgcgtaccctcttggccccgtgctcgcttgcccctttcaggagcagctgcaagagccagaagaaagaagaagaaaaaaacaacggcggcagacagtaaccgtcagctg

SEQ ID NO: 6615 - DNA, 185 bp, Setaria italica
  Peptide Sequence Number=SeqID_72589
gggggtggcggagatcgaaggagggcagctgggcctggggggaagaaggcggcggggctggcatcttggccttggggaagctctagcacctcgacgaatccgccggcgcagcgctactactgccaccagtgcgaccgcaccgtctccatcgccccgcccgcatcccaggacgacgatgtcctctg

SEQ ID NO: 6616 - DNA, 481 bp, Setaria italica
  Peptide Sequence Number=SeqID_72590
agaagggaggagaattcccatccgtggatcctcctcctcctctctcaccaattcaattccccaaccaaagccaccaatccaatccaatccaatcccatccttgagagatcggatcggattgcaatcgaccatcgatcgatccaatcgcatcccaccaaaccctaaatccttccggccggccatgtcgtcctcgtcggcggcgcagcgctactactgccaccagtgcgaccgcaccgtctccatcgccccgcccgcatcccaggacgacgatgtcctctgcccccactgcgccggcggattcgtcgaggtgctagagcttccccaaggccaagatgccagccccgccgccttcttcccccaggcccagctgccctccttcgatctccgccaccccagcgacctctccgccttcttcggcccgccctcgcccgagccgctcggccagggcctcttcgacccctccaacttcctccacgacata

SEQ ID NO: 6617 - DNA, 256 bp, Setaria italica
  Peptide Sequence Number=SeqID_72591
ccacttctatgggctacatgaaagcaacttggtgattaggttttggtctgttgctcttgtcttggaataactgctgctaatatttgaacagtcttatatttctgcaggtctattgactttgacctaagccaattcttcattttgaaaaaaatggttccgtgtaactccattctgacgatttgattatatttcagggaagtgaaggatggctggacccactgccgaggctgcttcttttgtgttgctagatgcgaaa

SEQ ID NO: 6618 - DNA, 511 bp, Setaria italica
  Peptide Sequence Number=SeqID_72592
gatgccgaagcactttactacaaccatagagtccatgaagtgctgaacactgacgacagtcgtcctattgatgtagatgtgtgcccattgtgcagaaatgtcaggctggtgtttgattgtacaaggaaggactgtagggaagtgaaggatggctggacccactgccgaggctgcttcttttgtgttgctagatgcgaaacatgtggtgggtgcatcgacctggaggagctcggcgagactggactggcctgctctgacttcctgtgtatggactgctggctcaagctcccaaaatgctccacatgcaatcgtccctactgcgagaggcattcaaatttgaaagaaaatttatcgccgtctggccagttcacctgtcaagaatgcacagcgttcgatacctcactcgaaagtctgggagatggtgattagaagtcagaatgaatttatgccttctggcaacaaataatcagttattttgatatgtggctggctatcctttgacagcctttct

SEQ ID NO: 6619 - DNA, 477 bp, Setaria italica
  Peptide Sequence Number=SeqID_72593
ttcggcacgtatccagacagtgatgcagggcgtgcgctgccacacgattgagttccttcacgatcggaccacggatgccagcatgccacagcactcagtgtccccctgctgcaaccagcgtgaggacctcagctggcgttcacggccatcttcatccccatcccgcagtgcccgttgaggctgcagatgaagtagttggtcccggggccgagcgtgatgcggtcgctccccgagccgtaggccctgccggaggagctgcagccgtagtagccgccggcgtccacggccaccacgttgtgcagggaggggtcgtagttgaactcgaggacgtccccagcgcggaagctcttgcccctggaccagctgtccgcgttggaggaccagtcgaccctgtgcgtggccgcgtcggcggcgccgaggaggaggcacgcggcgagcaggcccgccggagggcgaggcacctcgacgccgcactgc

SEQ ID NO: 6620 - DNA, 357 bp, Setaria italica
  misc_feature (11)..(11): n is a, c, g, or t
  misc_feature (327)..(327): n is a, c, g, or t
  Peptide Sequence Number=SeqID_72594
acgacgagggngaccccacggaggctgggtggcgggcgcggacggagcggggcgaagaggaagagggtgtcggagggcggcgccgccgccggcgggagcggcagcggcagcggcagcgggagcgggaagatgatgcggttcttcgagggcctgatgaagcaggtgatggagcggcaggaggcgatgcagcagcggttcttggaggccatcgagaagcgcgagcaggaccgcatgatccgggaggaggcgtggcggcggcaggagatgacgcggctcgcgcgcgagcaggagatcctcgcgcaggagcgggccatggctgcctcccgngacgccgccgtgctctccttcatccagaag

SEQ ID NO: 6621 - DNA, 498 bp, Setaria italica
  Peptide Sequence Number=SeqID_72595
atatgacttggtcatagtgcttggcgcttgaatcctgcatgttttgcttgttatgctatttggctggaatctagcttgttaagagatggattttgtggctgtgtgtttatgatcctgatcctagttatgcttatggggattaacataaatgcctgggatatgggtgattggatggcaagttggtgttcacgtttgtgttctttttgggaatcaagggatcaactatattctgcttgaacacacctacaagaaaaatcaacttctgaaagcaaacgatgaatcgtccgtaaggcttctttttggttatttgttccttgttctggattggttactagtgtcctaagagatcatttcacttgttccattattgtctggcaagtggttccccatgttcaaagagttctttgattccatcctatgtgccattagcattggaggaccactgcaaagagtctcctccttggttccaatctatgtaccattagcattggaggacca

SEQ ID NO: 6622 - DNA, 439 bp, Setaria italica
  Peptide Sequence Number=SeqID_72596
ggtcaaggaaggcgcgggcaaggcggacgcgaaggccgaaggaggcggccaaggacaagaagcagcctgaagccgagggcaaggagaagaagccggagaaggacaagggctccgacaagaagcccgagaaagccgaggccgcgaaacccaaggacgaggccaagaaggacgtcgaggtgaccccgccgaaggagaagggctcccctgagccgacaaaagaatccgcagccgccgcctcgccggacgccgcacggtgtcgagttgtagttagagggaggctttcgtaatagaggcctctcctgtcgtggttactataggtggtagagtactggagtactgtcaattaggtggtcaaagctccccttgaccagaatttttttcttctctccttataaattgctctttagtgcaccatgtaatcaggtgatgatattctagc

SEQ ID NO: 6623 - DNA, 383 bp, Setaria italica
  Peptide Sequence Number=SeqID_72597
gaggaagacccaagacaagcggacaagaagggcaagaaaaagaagaacaagcagcagaaggagggcggcgagtccgagactgcaccggcggagaagacgccgcagccgtcgatgccagcgccggtcccggcgcccgcgccacctcccggtccggagcgccccctcggcgggttcccgtactacgcggcgcagccggtgatgagctacaacgtggcgcacccgagctccagcgtgtcgtactacgcgcccacgccggttgggcacatgcagccaatgccgacgacgatggcgccgtacgggtacccgccgtacccgccgatgatgccgccgccgatgccggagttcatgtacggtccgccgggcatccggtcgtccccgccgca

SEQ ID NO: 6624 - DNA, 394 bp, Setaria italica
  Peptide Sequence Number=SeqID_72598
gaatgaagcatgatatcatcggaactcctctcaaaagggcagcagtagttcaaaaaacagggcagaagtgatagagtagaggtgcttgttcaaaagaacagcagctagatagcatcacattcactcgggctgaataagtataaatgcttgatctgactgtttgagagagttccagtgattatgcttaatcagcagcattctaattgttgcatcgccgtctcaaaggatacttgagtatttttattttagtttgcctatcgggatgcaacgatagcttcgtgctgctgtttattatattagccaagtgagtttttgtactcgatagctgcaacatttcacccatttttttgaaaacatatcggttgatttgtactcaaagcatgttttttttttt

SEQ ID NO: 6625 - DNA, 262 bp, Setaria italica
  Peptide Sequence Number=SeqID_72599
atcaagtgctgctgtaaaggatgttgaaatgaaaagcaaggatgatgaggacagtgaggaggaggaggaagaaactccaacgcccaagaagccagagggaggcaagaagagagcagccgagaatgctctgaaaacacccgtttctgataagaaagcgaaggtcgccacaccgtctggccaaaagacaggtggcaagaagggtgttacccatgtggcaactccacacccagcaaaaaaagacccctgcgaacaatgacaagtc

SEQ ID NO: 6626 - DNA, 449 bp, Setaria italica
  Peptide Sequence Number=SeqID_72600
aaacctttgtcttctacttctttttctttcttctattttctttttctatttgcggaaacaacttgggaacggtaaacatggggaaccaacacctaatagaacggtaacacgggacactaaactcgggatctcgaacggtaacacgatgctaatagatagctaggataacttggctgctgcctgcacgggagggcccactccgtcagttcctccagttgccaccagattcgccgcggctgccgccgtagccgccaccgccgccgccgccgcgggactgggcctggttgacggtgatgttgcggccgtcgagctccttgccgttcatgttctcgatggcttcgagcatcgactgctcagtggagaaggtgacgaagccgaacccgcgggacctcccagtctcccggtcggtgatgaccttggagtcgacaacgtcgccgtaggaggcgtaa

SEQ ID NO: 6627 - DNA, 245 bp, Setaria italica
  Peptide Sequence Number=SeqID_72601
tcactcttttcttctcatttcttttcattgcggaaacaacttgggaacggtagacatggggaaccaacacctaatagaacggtaacacgggacactaaactcgggatctcgaacggtaacacgatgctaatagatagctaggataacttggctgctgcctgcacgggagggcccactccgtcagttcctccagtgcaggcagcagccaagttatcctagctacctaatagaacggtaacacggga

SEQ ID NO: 6628 - DNA, 754 bp, Setaria italica
  Peptide Sequence Number=SeqID_72602
ggttcccgtactacgcggcgcagccggtgatgagctacaacgtggcgcacccgagctccagcgtgtcgtactacgcgcccacgccggttgggcacatgcagccaatgccgacgcctccgccgccgccgacgacgatggcgccgtacgggtacccgccgtacccgccgatgatgccgccgccgatgccggagttcatgtacggtccgccgggcatccggtcgtccccgccgcaggagtcgtacaacaacatgttcaacgaggagaacgccagcggtggcggcggctggggcggcgagtcgggggtaccacgagcgggtggtggaccactacaacaacccgcgcaacgtggggtccttcgacaaggacgacgccgacgtcggcacggggatcgtcggcgccccgtcgtgcggggacgtcatgaagctgcagatccgcgtcgacgaggggtccggccggatcgtcgacgcgcgcttcaagaccttcgggtgcggctccgccatcgcgtcctcctccgtcgctagtgagtgggtgaagggcaagcaaatggaagaagtagtagcaattaagaacactgagattgcaaagcacttgtctcttcccccggtgaagctccactgcagcatgcttgctgaggatgcgatcaaagccgccgtgaaggattatgaagcaaagaaggggaagctggccaaggcagatgagtaggataacctatagagagcgcagctacatgaagctaccagagtagtatgcaagg

SEQ ID NO: 6629 - DNA, 754 bp, Setaria italica
  Peptide Sequence Number=SeqID_72603
gtcgtgaggcgtgggtctcggttatggaccgcggccgtggactacggtgggtgggtggaggtggacgtgcaccgcgtggtggtggcggcggcggcggcggcggcggcggtggggactgcttcaagtgtggaaaacctggccattttgctagggagtgcccatctggggatggcgggagaaggggacaagaataatggtggcagagatgacaagtatggtggtggcagcggcggcagccgttatggatctgaccgtggtggtgaccgatactctagccgtagccgagatggtggcagctatgggggcgaccgctacaaccgtgaccgatctggtccctactgatggcctagatcttgagcagtatgtgccatccaggcatatgacttggtcatagtgcttggcgcttggatcctgcatgtttgcttgatatgctatttggctggaatctagcttgttaagagatggattttgtcactgtgttgatgatcttgatcctagttatgctcatggggattaacataaatgcctgggatatgggggactggatggcaagttagacgcgtctgtgttcttttcggggaatcaagggatcgactatattctgcttgaacaaacctacaagaaaaacaaccacctatgaaagcaagcgatgaattatccgtaagggaaaaattaactggtaaatcatttcaatcatttatcttcaatattgtgttacaacgtcattctcaaatgactcttgtttttggcaggc

SEQ ID NO: 6630 - DNA, 1132 bp, Setaria italica
  Peptide Sequence Number=SeqID_72604
atgggtgattggatggcaagttggtgttcacgtttgtgtctttttggaatcaagggatcaactatattctgcttgaacacacctacaagaaaaatcaacttctgaaagcaaacgatgaatcgtccgtaagggaaaaattaactggcttctttttggttatttgtttccttgttctggattggttactagtgtcctaagagatcatttcacttgttccattattgtctggcaagtggttccccatgttcaaagagttctttgattccatcctatgtgccattagcattggaggaccactgcaaagagtctcctccttggttccaatctatgtaccattagcattggaggaccattgcagcatatagcatactgtttctgcctcttctctctgttcggtggcttgactacctggtggttcctttggcgtgctgaggtggcttcctgtcggtgtcctgttctttgtgactcgtgcagtcagagatcatgcattcatgcttattcagcctgagtgaatgttatgctatctagctgctgctgttttgacaccacaccactggtctatcacttcttctaccctgtcaatgaactatcactgcccttttgagaggagttcttcatccgcagaattttaattgttggatcatgctgggatggctgcctctgggtgtgcggtcagagatcaagcatttatacttattcagcccgagtgaatgtgatgctatctagctgctgttcttttgaaacaagcacctctactctatcacttctgccctgtttttgaactactgctgcccttttgagaggagttccgatgatatcatgcttcatctgcagaattttaattgttggatcatcgtctcgatggaatgtgggatgcattagtcttgatttgactgtttgagagagttccagtgattatgcttaatcagcagcattctaattgttgcatcgccgtctcaaaggatacttgagtatttttattttagtttgcctatcgggatgcaacgatagcttcgtgctgctgtttattatattagccaagtgagtttttgtactcgatagctgcaacatttcacccattttttgaaaacatatcggttgatttgtactcaaagcatgttttttttcaagt

SEQ ID NO: 6631 - DNA, 1132 bp, Setaria italica
  misc_feature (1110)..(1110): n is a, c, g, or t
  Peptide Sequence Number=SeqID_72605
ccgcgctgtggccggcgccggcgcccgccgcggtcgtcgaggcggccaagaagcccgaggaggtcgacccggcgccgccagcggccgtggagggcgataaggtcaaggaaggcgcgggcaaggcggacgcgaaggccgaaggaggcggccaaggacaagaagcagcctgaagccgagggcaaggagaagaagccggagaaggacaagggctccgacaagaagcccgagaaagccgaggccgcgaaacccaaggacgaggccaagaaggacgtcgaggtgaccccgccgaaggagaagggctcccctgagccgacaaaagaatccgcagccgccggcgaggaggcgggcgcggaggagcccagcagcggcaagaagggcaagaaaaagaagaacaagcagcagaaggagggcggcgagtccgagactgcaccggcggagaagacgccgcagccgtcgatgccagcgccggtcccggcgcccgcgccacctcccggtccggagcgccccctcggcgggttcccgtactacgcggcgcagccggtgatgagctacaacgtggcgcacccgagctccagcgtgtcgtactacgcgcccacgccggttgggcacatgcagccaatgccgacgcctccgccgccgccgacgacgatggcgccgtacgggtacccgccgtacccgccgatgatgccgccgccgatgccggagttcatgtacggtccgccgggcatccggtcgtccccgccgcaggagtcgtacaacaacatgttcaacgaggagaacgccaactcgtgcagcgtcatgtgacgcccccgccgccgccgccgccgcctcgccggacgccgcacggtgtcgagttgtagttagagggaggctttcgtaatagaggcctctcctgtcgtggttactataggtggtagagtactggagtactgtcaattaggtggtcaaagctccccttgaccagaatttttttcttctctccttataaattgctctttagtgcaccatgtaatcaggtgatgatattccagcaccaccactgcttgcgatgtgtctttttgctactactttctgttagttatgaactccattttgatatgaaacaaaacntgtagagtatgaattctcaacc

SEQ ID NO: 6632 - DNA, 808 bp, Setaria italica
  Peptide Sequence Number=SeqID_72606
cggcgaggcgggaccggccgcggcggcggcggccggggttagggcgtaccacgagcgggtggtggaccactacaacaacccgcgcaacgtgggttcgttcgacaaggacgaccccaacgtcggcacggggttggtcggcgcgccggcctgcggcgacgtcatgaagctgcagatccgcgtcgacgaggactccggcaagatcgtcgacgcctgcttcaagaccttcggctgcggctccgccatagcgtcttcatccgttgctaccgaatgggtgaagggaaaaccaatggatgaagttttgactatcaagaatactgagattgcaaagcacttgtcgcttccacctgtaaagctccattgcagcatgcttgcggaggatgcgattaaggctgctgtgaaagactatgaagccaagaaggcgaagacaggacaaaagggtgaagacagcccttcggagaagactgctgaagcatgaacgcgaagtttctgccacgaagatatggagttgatatatttcgacttctgaatcccctgtcgcgcatctgcaaagatatatgctactgttcttaaggtgggggattgtgtgtaatgttcacaaactctggtactgcagcatgtatcataactcaaggatggagacgaacaatttcaaataaatctgctgccatcttagaaatgagtatgctcatgtacaagagccgtgtctgaaagttgtttggcttggctgtatgttatttatgtacaagtagtcaattttgttgggtgcagaatgttactacgtattgcataataaaaaaaaaaaaaaaaa

SEQ ID NO: 6633 - DNA, 2299 bp, Setaria italica
  Peptide Sequence Number=SeqID_72607
agcgccgacgcacccggcccttgctaaccagtcgcctttcctcgatccagacccttttgctaaaaataaacaaggcaggggcacctccgattcgacgtgggcttcctcttccttgctcgcagatggctgatgttgaggagtaccgttgcttcattgggaacctgtcctggtccacaactgatgatagcctcaaggatgcattcggcaaatttggcaacctcactgaggcaaaggtggttcatgacaaattttctggccgatctcgcggtttcggctttgtaacttttgatgagaagaaagctatggaggatgctattgaagggatgaatggacttgacttggatgggaggaacatcactgttgataaagctcagccacaaggtcctggtagagaccgtaatggtgaccgtgattatgatcgtgagcgtgggtctcgttatgaccgcggccgtgactacggtggtggtggaggtggacgtgcaccgcgtggtggtggcggcggcggcggcggcggcggcggtggggactgcttcaagtgtggaaaacctggccattttgctagggagtgcccatctggggatggcgggagaggggacagatatggtggcagagatgacaagtatggtggtggcagcggcggcagccgttatggatctgaccgtggtggtgaccgatactctagccgtagccgagatggtggcagctatgggggcgaccgctacaaccgtgaccgatctggtccctactgatggcctagatcttgagcagtatgtgccatccaggtatgaaagtctatctgctattataaggtttgttatcgtgtgtctggaactatgtgatcctgtagttggagaattataatgtacggtgagaaatcagttgctttgttatggaccatgttactgaccggtttattatcatttcctgcttgccaggcatatgacttggtcatagtgcttggcgcttggatcctgcatgtttgcttgatatgctatttggctggaatctagcttgttaagagatggattttgtcactgtgttgatgatcttgatcctagttatgctcatggggattaacataaatgcctgggatatgggggactggatggcaagttagacgcgtctgtgttcttttcggggaatcaacggatcgactatattctgcttgaacaaacctacaagaaaaacaaccacctatgaaagcaagcgatgaattatccgtaagggaaaaattaactggtaaatcatttcaatcatttatcttcaatattgtgttacaacgtcattctcaaatgactcttgttttggcaggcatctttttggttatttgttctcttgttctggattggttgctaccgtcgttctggacgggttactagtgtcctaagatcatttcagttgtcccatttagtctggcaagtggctccatgaatgcaaagagttctttggttccattgtatttgacattagcattggaggaccaatgcaagcaaagagactgctctttggttagcactggaggaccactgcagcgtagcttcctgtttctgcctctccctcttcggttggcttacctggttatggttccttggacgtgcctggggtcctcttcggtggttatggtcctttgacgtgcgggtggctgcctatgggtgctccattagctgttccgttccctgtgacttgtgagatcagagatcatgatcgttccctctgacttgtgagatcagagaccgtgctctcttttgactctgcacagctggtctatagctgcttctgccctgttatgaacaaccactgcccttgagaggacttccgattttctgcttcatccacaaaattataattgctggataatcaactcatgggatacatcagccttgatttgccccttttgagaggagttttgcttattatgttatcagcagcgtttcaattattgcatcgtcgcatgggatacatttgcctggagtaagcttagtattttttaagattccctatcggaatgctcgtcttgctgttggttattagccaattgagtttctgtaagtctagtacgtacaatagctgcagcatttcacccattttgagcatatcgggttgatttgtactatgtatacgttgtgtatgcagcagatccagcttctttttttccccgtgctgtctgctgtatgttttcgaagcgtagttatttgagtcatttcctttgaactcgttggagcctgatgcggcaaaacatccagaaattcatcttttggttgcacaatacagcagaatgatcctctgaccttgccaaact

SEQ ID NO: 6634 - DNA, 625 bp, Setaria italica
  Peptide Sequence Number=SeqID_72608
gtgctccctgcgcgccgccgtccccgcccttcgcttcgcgtgctcgtgagctcgtcggcctccgcgttctcgcgagaacgagagcatggacacccaggtgaagcttgctgttgtggtgaaggtgatgggcaggactggctccaggggtcaggtgacccaggttagagtgaagttcttggatgaccagaaccgtctcatcatgaggaacgtcaagggcccggttcgtgagggtgacatcctcaccctgctcgagtctgagagggaggccaggaggctgcgctgaggcagttggtgccatggtggttcttgtatggagttgggtgtcatcgaattcgtgctgtgtttgtcaaactttgtgtgacccttatgattagtaagcctggtgataagattgcagttttgttttttgatccaggttcaaagtgcacttgttgtgctgagatccatagacatctgaccatggtcatccttcgctatattagctcaatcgatgcatgaattgaatactagctgaatctctgaggttttattctacctggttgaatataatagtcgttgaggtgtctggtcgtgtgcctgtcgatgcatgaataacgaagctgttcagtgcttaaccaaaaaaaaa

SEQ ID NO: 6635 - DNA, 382 bp, Setaria italica
  Peptide Sequence Number=SeqID_72609
cacatccatctgatgtggtgatgttgtcccttattgttccagcaagagatcggagtgtatcttgttgatcaggatcatcagcatactgcacagtagatttctgaaacattgaaggacgtcctcgcaagccgttcgatgttaatccatttatcagatcctcctccacatctgttgagtgcacatccatctgatgccattctagatgggccattagacacttcaaggagaaacctgtccaggtcgccacctcttgatgtgttccctaggaatgcgtcccccaagagagtgctagagaggctaccaccatctcgttctatattgggacctgatcccagaagattgcctgatcggaatggcaggtcgagatggatgtgcactcaac

SEQ ID NO: 6636 - DNA, 3239 bp, Setaria italica
  Peptide Sequence Number=SeqID_72610
ccatctttgtatctgctagatagtattgtgaagaacatagggcgcgaatatgtagaccgttttgccgcaaggttgcagaaggtatttgttgatgcatactgtagagttcatcccagccagtatgcttcaatgcggcgcctctttcgtacctggtggccagtgtttccttcttctgtgcttcgtggcatcgaggacgaccttcaattttctccctcacaggaaaagcgtcctgccatagcgacaaatccacatcaatcagagtctctatctcctaggccctctcatggcatacatgtaaatcccaagtatctggaagcacaacaaaaattgaagcaggccaatgtgatgcatcagcctgccgttcgtggcactaggcaaatggctgatgtggaggaggatctgataaatggattaacatcgaacggcttgcgaggacgtccttcaatgtttcagaaatctactgtgcagtatgctgatgatcctgatcaacaagatacactccgatctcttgctggaacaataagggcaacatcaccacatctgttgagtgcacatccatctgatgccattctagatgggccattagacacttcaaggagaaacctgtccaggtcgccacctcttgatgtgttccctaggaatgcgtcccccaagagagtgctagagaggctaccaccatctcgttctatattgggacctgatcccagaagattgcctgatcggaatggcaggtcgagatggaccttcgacgatggtgcacggcggcctacaatcagcatgcttgatgaagagtacaggaagcaaagtgcaagagaacttattgacgcttatgggaattctcaaggccgagatgctgatgaaagagtttctaaaatgcagcgcctggattcaaatgggatggctagtgcacgaaattggctcacttcagaggaagaagagtattcttgggaggacatgagtccaactttgactgatcgaatcagaagcagcgtgccatcatttcctcctggaaccatgagagctggatttcctggggcaaaagcagggttactggaatctgatattgggaggcacaattttccaagccaagctcctcgatcatcggttgatggcccaccattaaatcttgaagataggattactgctgcaagtcatgctaacatgcctactagtaggagacatcctagcaattttggtgttcagaatggagctcttttggagtaccagagttctgagcataccctcaatcatgggagaactgctaccatgcaagctccaccttggcagcagcctactggtctgccattacgagtacaagcacctgaacatccatcagtacttgatagaataccactgcctgctgacggtgaaatgccagtcaagagactagagatcggtggtatatacaatgctttgagtgcagatatacctttggtggagaagcacaggccgttaactgctgctgccccaatagaatggcctcctcttcatcatactcagtcgcaaactttagtaccaattccacctgatacaaaacatgttagaaatgcagcagatagtctagaaattaggccatttgttagtcaaggagccagttcatctgtatttgttccacggcatcaatatgatgccttggatcgaaaaacactaagtaccggtagcttagctcaaccaccatatcagcaccaagatttgttgccatcaagtcaacagaatcaaggtgcagttttgggaaaccaagcacagcctcatcatcctcaacagtttcatccccattcccatccccaccatcaggaggcttttagaggctttggcccaggcatgtctatatccccgttcccaggacaagggggtagtgcagcattgccaccagtttcacttctgcccagctctttttctggtccacctgctgtgccaccatatggcatgccgtctgcgtccagttttcctaggccaccactacctcccggaccgccacctggttcgctgcagattggttcatcatcatcacaagttggtggccctcaaccatttgtgtctggactattgagtaaccttatgcggcaaggtgtaattacattgggaccacatagccaacctcaggactcaattggagttgacttcaatatagacctcaaggtacggaatgattctgtcatcaatgctttgtatcaggatctttcaagacagtgcaaaacttgtggccttcggttcaaatgccaagaggagcatcgtgctcacatggactggcatgttacaaaaaacagaaattcaaagaaccgtaagcaatcttcacgtaaatattttgtcactgcggaggaatggttaagagcagcagaaacagttggaaacgatggggttcccgcttttgtgccctcagacccagtcccagacagcaaggaagagaaagaaatggctgttcctgcggatgaggagcagacagcttgtgcattatgtcatgaaccatttgaagatttctacagtgatgagactgaagagtggatgtacaaaggtgcagtttacatgaatgcaccagatggtaatattgatggtttggaaaggtcacagttgggacctattgtccatgctaaatgtcgatctgggcccagcagtacttcttaggatgggcatagctggtttgacttaatagttctttttggatgcggctgtagacatgacctgtaaactaccgtgagactcagattttggtatgattacttctttcctatctggctcacttgacagccagtgcatagaatgttaacgcgacaatagtgtaaaactgtaaaatctttctgtaattcagtgattgagcatcagtaatctaccgtacaatcactattgtcaaattgtgcttgtgccctatcattttgtccttctgtagttgcagagtgcttcatatctagggtcaggcagcacaattggtgacaggcatatatgtaaccattgtttcactagacgtgaaaaacaatatctttgtattgttctgctttctttccccttgttaatatcttatgcaggataatattgaaggtagcttacaatttacaaaacatcgaagggatcatgcaagatgaccaagagttgtggcatctgtctacggctgtcctgaacggctgaagggactagatgctatcattgctttttattttcttttagtactttctttgtaaattgagaacattgtataaagtgttgtgaagattattcttggtcacttgtatacttccatcttgctg

SEQ ID NO: 6637 - DNA, 835 bp, Setaria italica
  misc_feature (693)..(693): n is a, c, g, or t
  Peptide Sequence Number=SeqID_72611
acacaacacacacacacacacacacacacacacacacacacacacacacacacacgtgtgtgtgtatacatacaagtactgtatatatgacactagacgtatatgctttatcgactcacatgaccttattcacctcaatctgcacgtacgtcttcatgaacccctctagactgggtggcttgcttattcttccgttcttccacagcttcgtgcttcgccggctggacatccccccatgtcaatccacttgccctgcggccggcacggcgtgccccggctcgtggcgctgctccctgcgggcgaagcgcaccatgaggccgtgcttcatgtagagcgtggtgttgagcttgggcttgacagcctcctgccccggcagcacctccacccggaacctcgccagcacggccgccgccaccgccttcatctgcgtgtaggcgaagcgcttcccgacgcagagcctgggcccggcgttgaacaccacgtacttgtaggggctctcggcgccgccggcgaaggcgccgcgcttgtcgagccaccgctccggccggaactccaggcagtcggggccccacaggaccttgtcccgccccatggcgtatgtgaagtagatcacccgctgcgccgcgcgcaccgccgtgccgtccgggagcacgtcgtcctccaggggcctccttgaagtcggcggggacgggngggtacagccgcatggactccgtcagggccgcgtggaggtagtccatgcttttgccgctcttgtcgtcggcgtcggcggcgcggacgacgtcggcgaggacgcggggactccacgtccgggtgggacgcgaggagccagaag

SEQ ID NO: 6638 - DNA, 558 bp, Setaria italica
  Peptide Sequence Number=SeqID_72612
aggatatattgttaaacatcttgcactgtgcaaagcaaaaggatgtgcatgaatctgatactgaagtatcagatgagatcatttgccttgctgcagtacttagagtaatgagttcctcacttctacacatcctgcattgtgtcagccaaatggcatctgccggtgacaaagaaaatgtagattatgcaacactctgcacggggtacaattttatatatgaaagtatctgtttgcttgggcaacatgaagctaatgggcttcttagatatgacttacttgatattattgggatgcctgtggatagggaaagagcctcaatggcaatgttggctcattttgccaccatgtcactttgttgtgtaagaaaaaggcttggctttctgtggaaaggttgcgttgtcatgatgataatgtccatgaatcttattgccgaagaggaaggtctgagtacatttgagctttcttcaaaagaatctgcagttgtctgctctaccgaggagggaatcttaaaggtttctgcacggactaaggcgatggcattacggtatgaagccatac

SEQ ID NO: 6639 - DNA, 489 bp, Setaria italica
  Peptide Sequence Number=SeqID_72613
tggccgccggttcttgttggacggagaggcgtcgacgccagaaccgccacgcacgcacaaaccccatgcacgtgcgcgcgcggagaggcgagccctgcacgcacacgcaggcgactacgcgcctacaacctgggaggctgggagcatcaggttccctcctcctacgcgcggcgacacggccacgtcgccgggaacacgatcgtcctcgatctctccccgcaggcttctttttccagctcgatcgtgcatgcgtttctgtgccacagaaacgtcgccgccggaatcccttgtcctttcgtgcagcgtcaccttctgctttggcggccggccggccggcagcgtcgccatggctggccggatcgagtgcgccgtcgctttcgggctgctccaggggaacttgaactctgacgccgccgtagtccgtgccaactcgcgcacgtgcaggtgcagcttgtcgttgttgtcgtcccaggaaaaaagacaacttag

SEQ ID NO: 6640 - DNA, 893 bp, Setaria italica
  Peptide Sequence Number=SeqID_72614
tattatggccagctaggccaggtagaaatgaaccgccaacgacagcaactggtgtgaccctaatgtatcaaccatgtataccctagtgcttgaacacaccacttcctttgtcgacctcagcacaaaattggccttttgttcttcagtactaaggaaaaatccttgcagtcatgaggatgtctgggcacaagaattagtagtagagtgggatacatcttgattaactcatcatgaacccggagaatgacttcctcttcacctctgtgaatagaagcagccatccagaggggtctattgctaaactgctgctgaagatcttttattttgatgacctcattctccccagcattaacatcaccaacagcatattttaaatctccagcaaaatggataatccctggaggggtgtgtagcagctgaaaacgaacagcctgaatagtactctgcaacgataagatatgaatgatggcagcagtaatagatgtacattcaaaataaggtcagcactacaatgtgtacttaccaatggggccacaagtgatagtttagagagcatcagagtgactaatggcaaccctagaggcacggaccagcggttgaatgacttcaatgacatgcgggcatttaaaagagcgactgcaatcccatttgctgctgcagacataatgaggtttggccagagttcactttccataagaaggaccaaacttggcttccagtatccaataaaactgtctattgcatcaggacagtccagaggagcaaactgatatataacaccctcggggagcaaatccttgataacttcaaatgaggagagagtggtggtggtgaggagcacgggggaggccgggatggaggcgggcgcagtggcggacgacgggggagcgcgg

SEQ ID NO: 6641 - DNA, 937 bp, Setaria italica
  Peptide Sequence Number=SeqID_72615
agtcatcgtccttgaaatacccgcaaccttgaaagtggaagttttacaaaggaacaaggactgcaagtgcaaaacatatctgctggctggcgctaaagaattgcaaaatatatcacccacgccacaaggaaacaaaaggatggcaggaagcccagaggaatttgtcgaaatatattttaatttctgagaggagcaagtcgagtagacgacaaggagatactgttcttttatagtttcatgtgagtgcagtgtgcaggggcctttaatttgagattcgtgtcctttgtcaccactcaccaggtcactggcatgtggcatgtcgcattcaacgctgcagttcttcctctgcatttccgctcctcaaagagtcccgcgtagaattacaagagggccccgctgaatcaactgttccacttatctgtttccaagtcaatggcgaacctacagactaaatcccatacacggttcacaactccatgtgacataatggaaaatgcatctttggaggctctttgacatgctcccagagttttggcatcgccaaacagttcttttagtgtgtgaagaagttcgaattctcccccaacctgcttgacagctaaaggatttatttgccacatttcaagcagcatgtggtagaaatgtccaacatggggtccagtcataacagcacaaccagcagcagcagcctcagaaatattatggccagctaggccaggtagaaatgaaccgccaacgacagcaactggtgtgaccctgtaaagcattcttaattcccctaatgtatcaaccatgtataccctagtgcttgaacacaccacttcctttgtcgacctcagcacaaaattggccttttgtttcttcagtactaaggaaaaatccttgcagtcatgaggatgtctgggcacaagaattagtagtagagtgggatacatct

SEQ ID NO: 6642 - DNA, 239 bp, Setaria italica
  Peptide Sequence Number=SeqID_72616
cggaaacttttagtttctccaagctttacctaaagttatgcatgttgagatgcaagcggttgctgctggtgccacggcacaggccaaggaaaataacgatgatgatgttccagagcttgttccaggagagacttttgaggaagtagctcaggaggcaaaagcctgatcataggactccaaatagtgaaatgtgaggtcatggtttccttgtgatggcactcttttgcaacccccactta

SEQ ID NO: 6643 - DNA, 852 bp, Setaria italica
  misc_feature (827)..(852): n is a, c, g, or t
  Peptide Sequence Number=SeqID_72617
ctcttccaatcccctcccctgcccctccctgctcacgcgtcctcaccgccctccgccgccaagatgaacaaggagaggcttatgaagatggccggcgccgtccgcaccggcggcaagggcaccgtgcgcaggaagaagaaggctgtccacaagacggccaccacggacgacaagaggctccagagcacgctcaagagagtaggggtcaacaccatccctgcaatcgaggaggtcaacatcttcaaggacgatctcgtcatccagttcttgaatcccaaagtgcaagcttccatcgccgcaaacacatgggtggtcagtggatctccacagacgaaaaagctacaagatgttctgcctgggatcattaaccaattgggtcctgacaacatggagcacctgaggaggattgctgaagagattgagaagcaagcggttgctgctggtgccacggcacaggccaaggaaaataacgatgatgatgttccagagcttgttccaggagagacttttgaggaagtagctcaggaggcaaaagcctgatcataggactccaaatagtgaaatgtgaggtcatggtttccttgtgatggcactcttttgcaacccccacttaggccagccactctttgtatttgcagtcggaaacttttagtttctccaagctttacctaaagttatgcatgttgagatgccatggaatccattttgctggtttttgatgattacgtttgtggttggttgactatatacatgagcaccactgcaccagattttgcgtggtcactttataatgtttctgttgtctatctgaaggaaaaaaaaaaaannnnnnnnnnnnnnnnnnnnnnnnnn

SEQ ID NO: 6644 - DNA, 662 bp, Setaria italica
  Peptide Sequence Number=SeqID_72618
aaaaatagaccttactaggaggcagagaacgatgtgagtgagcatcgatttcacgtgcaaataaataaagtcaacgagaacttgaataatagtagatgtaagggcatgtcaggtggtggttaatttgatcttccttgttctacttctatgttgactttgggagatgtgtgattggctcggttgtcttcagattctactccctctgtaccaaattactatttttttggattttttgatacaaaacttttgagatatggatctagatgtatgtatatcttgatatgtagaaaaagctatgtatctagaaaatcaaagcgaatagtaatttgggacggaaggaatataagtgtaagttcttcaaaaaactgaagtaaaagcagagagcatattgtcaaaaccaaggctatcatactgcaaaaggatcagagacatgtagtgagtagttttaattccttagctcgggggaaaacacggacgaatgaattcatgataatttgcaggaagattgctccatgaagctgcaagtatttgcagcgtcatatttctaggaaactgaacctccaaaaaaagcagtggaaaatgaagttttgacggataaagagggaaagaactgccagctgaagcttcaggccgtgcaaactgaaactgaactgaatatctgg

SEQ ID NO: 6645 - DNA, 314 bp, Setaria italica
  Peptide Sequence Number=SeqID_72619
cgacatcctcgtcgaggccctcgagcgctgcggcgtcagcgacgtcttcgcctaccccggcggcgcgtccatggagatccaccaggcgctcacccgttcccccgtcatcgcgaaccacctattccgccacgagcaaggggaggccttcgccgcctccgggtacgcgcgctcgtccggccgcgtcggcgtctgcgtcgccacctcgggccccggcgccaccaacctcgtctccgcgctcgccgacgcgctgctcgactccgtccccatggtcgccataacaggccaggtgccccgacgcatgatcggcaccgacg

SEQ ID NO: 6646 - DNA, 623 bp, Setaria italica
  Peptide Sequence Number=SeqID_72620
aacggcattcttccatgtgattccacagaggaagcggggagaagctgaagctggagatgatgagaccaaagtaagcttggacgataatgatgatgatgctgaagaagctgcaaatggaaatctttctgaggaggacctgaaaaaggttatcgatgaagacgtggccgacgatggggatgaagagctggaagacgaccgaaaccgatgtttccaacaagaggcagtgtgttagacgtgaagacgtggaggctggggatcaggatcactccggtgctgtagcagaggcgacaccagctgggctagacgctactacaccgcaggctgagcaggccaaggaatcaaacaacggtggcaaggacgactgaagaacagtgaaccccacgtttgtcactgttttgcagacagctttgttttggtggttttgggcgttctgaaatccatgtatttcaaatcaattatttctctttgtgtatttggacctgaccattttgtagtaatcgtcgtatattagtacaacgggctcgcaacctggcgaccggcataggtagcctaatgctccggtcttttcaacgtgaaagctggaatgaaatgatgaagtggaaataaaaaaaaaaaaaaaaaac

SEQ ID NO: 6647 - DNA, 383 bp, Setaria italica
  Peptide Sequence Number=SeqID_72621
ggcccaacgagatccatagcctcacgcagcagattatgtactgctatgcagtgaatgggagatctgcaaacccagctcacctgtggttgacaggttgcagtggagaaatggcgacccatcttcagagaattcctgggtatgataagtggatcattgaaaaagcagccaagccttatcttgaagcatttgaagatcgtaaagaaaaccttgtgtatcttacagcagatgctgagactgtgcttgatgatctagacatgtcaaaaatatacatcatcgataacctttttcaggtcctcctcagaaagatttccatttgcagcttcttcagcatcatcatcattatcgtccaagcttactttggtctcatcatctccagcttcagc

SEQ ID NO: 6648 - DNA, 966 bp, Setaria italica
  Peptide Sequence Number=SeqID_72622
cgggtgggccggcgggcggaggagcgcggggctcgcgcggagcggctccggcgcgcggccgagggcgcgggacagaaggtggtgctggacctcgagttcgcggaccttatgcggcccaacgagatccatagcctcacgcagcagattatgtactgctatgcagtgaatgggagatctgcaaacccagctcacctgtggttgacaggttgcagtggagaaatggcgacccatcttcagagaattcctgggtatgataagtggatcattgaaaaagcagccaagccttatcttgaagcatttgaagatcgtaaagaaaaccttgtgtatcttacagcagatgctgagactgtgcttgatgatctagacatgtcaaaaatatacatcattggtggcctggtggatcgaaacagatggaaaggcataacattgaaaaaggctgctgagcagggcattcaatctgcgaagcttcctattggaaactatttaaagttgtcaagttcccaggttcttacagttaaccaagtgtttgagataatgctaaagtttgtggaaacaagggactggaagacggcattcttccatgtgattccacagaggaagcggggagaagctgaagctggagatgatgagaccaaagtaagcttggacgataatgatgatgatgctgaagaagctgcaaatggaaatctttctgaggaggacctgaaaaaggttatcgatgaagacgtggccgacgatggggatgaagagctggaagacgacgaaaccgatgtttccaacaagaggcagtgtgttagacgtgaagacgtggaggctggggatcaggatcactccggtgctgtagcagaggcgacacaaccgcgctacaccaagaactaagggaaactaaaagaaaaacgaaaaacttaaaaaacttaaaaaactaaaaaaaccgtaaaaaactaaaaaaggtaaaaaacttaaaaa

SEQ ID NO: 6649 - DNA, 701 bp, Setaria italica
  Peptide Sequence Number=SeqID_72623
acaaaggcctgaacttatctgtgccacattggccacacttcatgctttcctgtcatggatccccattggcttcatatttgagtcacagctgctggagtacactttttgaagttttttccccattgctgcttaccggaatcttactcttcaatgcctaactgaggttgctgctcttcactttggtgatttctatgacacgcagtatgttcagatgtacacagtctttatgttgcagttgaaggtaatacttccttctggaacaatttcagatggatatggcaatggttctaatgaagaacaggcatttatccagaatcttgcgcttttcttgacatccttcttcaagaatcacatacgtatactggaatcgactcttgatgcattgcttctgggccttgactacctcattgagatttcatttgttgatgacacagagatgtttaaggtctgcttggactattggaatctgtttgttttagaactattcgaaacttacaaccaagtggagcgattgctgggacttcaggctcagcggattcctggaactgatgatggtactctcatagctgttcagcgaaggaggcaactttatgcaggtccactttcaaagttacgaacattaatgatctgtcggatggcgaagccagaggaggttttgattgttgaagatgagaatgggaatactgaacaaggacatcatt

SEQ ID NO: 6650 - DNA, 1226 bp, Setaria italica
  Peptide Sequence Number=SeqID_72624
tcttctagttcgtctacttagttgttacttgtattaaattaattaatttttgtattttatttaccaagtatattattttcttatactttataccagatgatcaccaaaaactttgaagactatcctgaacatcgccttaaattcttctccttgcttcgtgcaattggtacacattgtttccaagcgtttattcagctctcaagtcagcaactgaagcttgtaatggattccataagctgggcatttcgacatacagagagaaatattgctgagactggcctaagcctgttattggaaattttaaagaactttgaggcttcagggttccaaaatcagttctacaaaacatacttcttaaatatcgagacaagagatatttgcagttctcacagataccttccacaaacctggtttcaagcttcacgtttctgtcctacaacatttgttctacgtggtcgatggtctaacggagcctctctgggatgccacaatggttccttctcaatacacaaataatgcaatgtttgtccgtgactatactatcaaactcctcagctcatcatttcctaacatgacgcctgttgaggttgctaagtttgttgatggactttttaattcaaaaactgatgctccaaacttcaagaaccatataagggatttccttgttcaatcgaaggagttctctgctcaggataacaaagacctatatgctgaagaggctgctgtacagagggaaaaggaacgccaacgtatgctttccattcctggactcatcgccccaaatgaattgcaggatgagatgtcggatttgtagtgcatctcagttagccgcataatgtcttgcttcgacattaaacttctggagcccttgtgtcgaaggcccaattctttgctagggcgatgagagaagtgctggctttagttttaacattcttcatagttacactgctggttcggaggtttctgaagtagatagttgaaggatttagttgtctgagctgtttcagactgccatcggtatattgggttgtattggttgatttattagcagtagctgttgcgttcaatgcatttagcagagtgtgtgctgcaccatattgtactatgatgatggccagatcttgcctagttttcatttctttatagaatgaatttctactgttgcttctcagtaaccaagttaaaagcatgctacattatgtgtattactctgggagaaccatttg

SEQ ID NO: 6651 - DNA, 3735 bp, Setaria italica
  Peptide Sequence Number=SeqID_72625
ttctgcagaattctctgaatttgaacaccaagttctttgccctgcaagtacttgaaagtgttatcaagtacagatggaacgcactgcctgttgaacaacgtgatggcataaagaattacatatccgatgttattgtgcagctttccagcaatgaagttaccttccgacaggagaggctttatgttaataaactcaatattatattggtgcaggtcctaaaacacgagtggcctgccaggtgggcatccttcatccctgatcttgttgcagctgcaaagagtagtgaaacgatatgtgaaaattgtatggctatattaaagcttctaagcgaagaaatttttgacttctcaagaggtgaaatgacacaacaaaagattaaagaactgaagtcttcgcttaatagtgagttccggctcattcatgagctatgcttgtatgtcctatctgcaacacaaagatcagagctcatccgtgctacattggcgacactccatgctttcttatcatggatccctgttggattcatctttgagtcgccattgctggaaacattgctgaagttcttccctgtggctgcttatcggaaccttacacttcaatgcctaacagaggttgctgctcttcagtttggtgatttttataacatgcagtatgtgaagatgtatacaattttcatgatgcagttgcaggctattcttcctcctgaaacaataccagatgcctatgctaatggttccagcgaagaacaggcgtttatacaaaatctcgcactcttcttcacatctttttttaagaatcacatgcgcatactggaaataactgcagataataaaactgctttacatctgggtctcgagtaccttattggaatttcatatgttgatgatacagaggttttcaaggtctgcttggattactggaatgtgtttgtcttagagttatttgaagctcataatcaaatggaacctgcagcagctgtaagcatgatgggacttcaggcacagatggttcctgggatagtagatgggacgggcacagcagttcagcagaggagacaactttactctggtccactctcaaaactacggatgctgatgatttgccggatggcaaagcctgaggaagtattgattgttgaagatgaaaatggcaatattgtacgtgagacaatgaaagacaatgatgttcttgttcagtataagatcatgagggaaacactgatctatttgtctcatcttgaccatgaggatacagagcagcagatgttaaagaaattgagcaagcaattaaatggtgaagattggagttggaataaccttaatactctatgttgggctattggatcaatatcaggctctatggtagaggagcaggagaatagatttctggttatggttattcgcgatttgctaaacctctgtgaaatcaccaaggggaaagacaataaagctgtgattgcaagtaacatcatgtatgttgtcggtcagtatccaagatttctcagggctcattggaagtttttgaaaactgtggtcaacaaattgtttgagttcatgcacgagatgcaccctggagttcaggatatggcatgtgataccttcctgaaaattgtccaaaaatgcaagcgcaaatttgtcacacaacaggtgggcgagaatgaaccatttgtttctgaacttctgtccaaccttgctacaacaattgccgatcttgagccgcatcagattcatacgttttacgaatcagttggccatatgattcaagctgaatctgataatgctaagagggatgagtacctcaagagattgatgagcctccctaatcagaaatgggcagaaataattggacaggcaagccaaagtattgatatcctgaagaaccaagatgttatcagatcagttctcaacatcttacagacaaacacaagtgttgccagctccctcgggccacactttttcccacagatttcactaatattcttggacatgctaacagtctacagaatgtacagcgagcttgtgtcaagcacaattgccgaaggagggccctttgcctcaaggacatcatttgtaaaactcttgcgatctgtcaagagggaaaccctgaaattgatcgagacttttgtggacaaggcagaagacttaccacacatagggaaacagtttgttcctccgatgatggatcctgtcctaggtgattatgctagaaatgtacctgatgcaagggagtctgaagttctgtcattgttcgcgacaatcattaacaagtacaaaggtgagatgcttgaggatgtgcctcgtatatttgaggctgtttttcagtgcactcttgagatgattaccaagaattttgaagactatcctgagcaccgcctcaaattttttcattgcttcgtgcaattggcacccattgcttccaagcattgatccagctttcaagtcagcaattgaagcttgtgattgactcgattaattgggcgttcagacatacagagagaaatattgcagagactggccttagtctattgttggaaatattgaagaattttcaggcttcaggattccataatcaattctacaaaacctattttttgacaatcgagcaagagatttttgctgttctcacggacacattccacaaacctggtttcaagcttcatgttttggtgctacaacacttgttttgtgtggtggatggtctaactgagcctctatgggatgccacctcagtaccatatcaatatacggataatgctatgtttgttagagattacaccataaaactcttggggacatcatttcctaacatgacggcaaccgaggtgaccaagtttgttgatggtcttcttagttcgaaacatgatcttccaagcttcaaaaatcatattagagacttcctggtgcagtcaaaggagttctcagctcaggataacaaggatctatatgccgaagaggctgcagcccaaagagagagggagcgccaacggatgcttgccattccggggctcattgcccctagtgaattgcaagatgacatggtagattcgtagtgttccttgttgttgattcaggtttctctaatctagcttgttcctggtttgttggtccggcctgtggaatacctctggagccctcgactgccaagtgccgagtattcttccagggtggtgaaagaaggtgcctgctgtaattttaatttttggttacctctgcttgatgctgattccaagatttgtggtagtagcaagagccggaaaaggacaagtcagttttgccactagagcagtctgggactggtactggttctgtagttgcgttgggtggctgatgtgttaccagcagctcttgtgcccggtgtatttgctaacattggtgcgtgtgatctgtccatgatatagtatgattgtggcacaacattgtatttcttatctttagttgaagtttatagatatcaggacattgatcaggctggtaggaaaaccgccatgtttgtagtgtactatcctgtgagatatcgcatacccattctccagctcccccacccttttttgtgtggtgcacttccaagtgtatgattcggctgcccttatgtaccatgcaagagttggttaggccgttgtacccagaaactaacattatttcaaaagttgcctccttgccagttggctgaagcggctggttattcgagtaccagtggatggtattattattcatgtgcggtactccctccgtttac

SEQ ID NO: 6652 - DNA, 386 bp, Setaria italica
  Peptide Sequence Number=SeqID_72626
gttgtaaggtaggccacggagcggctggggggcggagtacagcgggagcctgcaccccaagtgcacgcacctcgtggtgcagaactttgctgggcgcaagttcgagcatgccctgaagcatggtccgaggaacggactattccttgtaactctgggttggtttgttgattgcgtgcggagaagcatgaggttggatgaatccttgtacgctatcaagaacattggggagaatggtttgccacttggggagttcaaccgctttattgcagttactgttgacgagaagtcttgccttccgccgatgatttttcaagacaaggcgtgctcagatgcgacccggaagcatccccctcagactcctatgaaagaaagtggcaatgatgagc

SEQ ID NO: 6653 - DNA, 393 bp, Setaria italica
  Peptide Sequence Number=SeqID_72627
tagttaacgtcccgtctaattggtcgcccggggcgtcgtcccggacgccaagtcccgtaccgatttgctcgtcgtcacggcgcggggcgcgtcggccgcggacgcgctcgcgctgttcgacgagatgcgaggcaaggggtaccacgcggacgtgatgatgtacgatgccgtcatgcgggcctgcttcaagggagggatgcacggggacgccgtcagactgttcgatgaaatggccagggccggggtcaagcccgacgagcgcgtgtattccctcacaatcgcggcctcgtgcaagctgcgcgatgcagacagagcggtccaggtgctgggggagatgagggaggccggcttcaggccatgggacttgacgtacagttctgtggtggatgtgct

SEQ ID NO: 6654 - DNA, 306 bp, Setaria italica
  Peptide Sequence Number=SeqID_72628
ggtaggtaggtagcggagagggaggaggaaccgaggaaccgtcgccaccgccgccgccgccgccctccaacgccgctggtgagaagttcgagggcggcggcggtacctaggtttgtgaggggtcggctcaaggctccagaccagtagtccgattttcagtaaacggggagggagggacgctgctgcggctgctgctaccgtgcttctcctaaacggaggcgctccatttttagacatcggagatcgatttctgatagggagagcgattgcgagggttgcgggggaggagggatttgggatggccgg

SEQ ID NO: 6655 - DNA, 278 bp, Setaria italica
  Peptide Sequence Number=SeqID_72629
tattaaggatacatgtaggaactctaaaaaattaaggatatatgtaactatccattactatatattttgcaaccgataaattcaactgtacagtttccaatggtaacatccatgaatattttaatggaattgttacattcctgaaagttttcatgtcttgtcaaaatgttcaaaaatagtaaaaatagcattattgttctgtaggattttcatttaacaaaaatcacatatgaaagatcaagtgaaaagagaaataatcaatggaaaatgtaaaataa

SEQ ID NO: 6656 - DNA, 930 bp, Setaria italica
  Peptide Sequence Number=SeqID_72630
gtaccaatatgacataagatgtttattcatgaacactcatgtggggcacttattgttcaaatggacaacaatatgcttatgtcgacaatgtacaaatgaaccttaatttagggggggctactttgacaagcaatagacgatctgagagcaagctgtgcacatatacgacgtggccggatgtatccgaaaacaataagggaaaccaaggctggacgaaggtgaccgtgtggcttgtactgcacaaggatgaatggctcaggcatgatgagcaagcttcttcactattgaggccatgtacttgccctggtgctctgcgagggcaagctctgtgtcgctgggttgtctgctgccgtcgcctgcaaagacaccagcaccataggggctgcctcctctgatgtcgtccatgttgaacatgcctgcaccaaaggtgtagccaatggggacgaaaagcattccatggtgcactagctgggtgatcgccgtccaagcagtggtctcctggccgccaccctgcgttccggtgctgacgaagaacccggcgggcttcccggcgagcttctgctcctcccagagagagccggtggagtcgaagaacgccttcatctgcgcggccatggcgccgtacctcgtcgggaagccgaacagcacgccgtcggcctcctgcagctccgctgccgacgcgatgacggggaccgcggggtccttggccggtgcctgcatcttctccagcacctccggcgggagtgtctcggggacccgccgcagcacggcctccacgccgtccacagcgccggcacccgccgccgcgcgctgcgccagggactccacatgcccgtacatcgagtagaagacgatgtacagccgcaccttccgcccggctcccgccgccgccgccgaagccaccgctgccgcggtcacctcctcctctgg

SEQ ID NO: 6657 - DNA, 652 bp, Setaria italica
  Peptide Sequence Number=SeqID_72631
cagtctcctcaaatttctcaaagttctgagtgtctaactcgccattaacttctggtatgaaagcagctttcatctgatacaacatatcccattgaacacctctaaaccatggatgcgcctaaagtggaaaataaaatgaaattagttgggtaattgagagtaatgcgagcgtacgcataaaacatgacacacttttatttcatgggctccttttgtgcctagtctctgctcgacattgcacaaaagcttgctgatgagatccttagcttcaggagaagctttgcctcttcagggaatttcaagtgacttctccagttcacaatctttctgcaagttgacattggatcctctgaataaaatggagggtaaccaacaagcatttcatacatgatagcaccaagggaccaccagtcacactccattccatatcctttctttagtagaacttctggagcaatataatcaggtgtaccaactgttgaatatgcctgtgccataagtgcgattaaacatgttaactgcgctcaactgctcaagtgtagagtcagcatgacaacacagaaaccagaattatggaaaaaggaacaaaaatctagctaaagacatagaaggacccaggttttacctattctaaacttggttgttctattct

SEQ ID NO: 6658 - DNA, 2290 bp, Setaria italica
  Peptide Sequence Number=SeqID_72632
agatgccatgccatacgcatgctcgcccacggcctgagaacgagtatacagatgcagccagcatgcctgagaggcaggggacagttggaaccgtaacacaacatacagcgaacacagctgctcacatcgaatgccatactatttggtgggagagatttttttttccaagcattttgactaaagaaagcatcggttaggatttacagacggggagcgggatcaaaaggcagcagaattttttttccttgttttactttcctatgctttactttttgaacctccatatcctatttacgtcgaggttggtattgttctggtggaatgctggagtgagacgaaggttgcccctccttcgggggcaacatgcttaagaaacttccttgaacaggctcctcttcatccatgctctcaaacaatgtcttgatggtcggccgttttggtttcgagctctttttcttcaactctgcaattcctgccacttcatcgtcatttacaatttcaaagttcttgtaagtatatccaacaaagtttgcatccttcgatggaagcatctttctccatgggccagacttagatgaactttgcatttgagctccagtctcctcaaatttctcaaagttctgagtgtctaactcgccattaacttctggtatgaaagcagctttcatctgatacaacatatcccattgaacacctctaaaccatggatgcgcttttatttcatgggctccttttgtgcctagtctctgctcgacattgcacaaaagcttgctgatgagatccttagcttcaggagaaagctttgcctcttcagggaatttcaagtgacttctccagttcacaatctttctgcaagttgacattggatcctctgaataaaatggagggtaaccaacaagcatttcatacatgatagcaccaagggaccaccagtcacactccattccatatcctttctttagtagaacttctggagcaatataatcaggtgtaccaactgttgaatatgccaacattcggcggttcttttgccagtgtgatagttgctcctgctgtgtacgcctcggtgccgaaggattgcttaacctggtactatcaggcaaaggtttggtgccttttccaggcgtataatccggttcattcaaatttggaaaattactgctgtccaaaggtttacacaaaccaaagtcagaaagcttcaggtgaccactccgatctaacaacagattgtctggcttgatatcccgatgaatgtagttgtgcttgtgaatagattcaatagcaagcacagtctctgcaatataaaatctagcttcgtcctctgttagtgtgtccttgcgcataagtaaagtcatcatgtccccaccaggaaggtattccatgatgagatataagaactcttcatcttggaaagaataatagagcttaactatgtaagcactatcaacttctgcaagaagattccgttcagctttgacatgttctacctggcccctacgaagcatttcagatttcttgagctttttcattgcgtacacattcttagaggtcttctctctacaaagacgcacctctccaaatgcacctctcccaataattgtcaaaagttcaaaatcttcaactcccatcttgtgtctctgcaaacgcatgtattcagtctcctttttctccaaatgcttcaaaatattattttgctcttccacaggaacttcagcatcttgtaattttctctccaacatccaacgcctctctttcctatcttgcagggacttcatctgggtcttgtagtggttctcaatgtactgctttgcggcggcaaccttctgttttgtcgcactagaaggggcgtcatccatcgggggctttcctggatcctttccatggctggaagcaactgcaggactcttggatttgtccctcggctggaacttctggaaccaacttctcgcagaatccatccccactcacaatggcatcatctctggaaccagccaagcctcttatcctgaccaaaggcagcaggcacgggggatgttgaaacggtcaagtcactcaatccgccccaattggatcaggtatccaaatcaacaactctccgtggaacccgatgctggggacgacacctctatctcggcggcggcgcggcggcggggcacgcggagcggatctcgcgcggggcggcgccgcgattggagcaaaagctggaggggggcactcgcgcgacccgcttttccctttcctctctcccctcccctctcctctcgctcccccgggttggttgtcttttcgt

SEQ ID NO: 6659 - DNA, 374 bp, Setaria italica
  Peptide Sequence Number=SeqID_72633
acccagctgctaactgaagtggcggccggtggagtggtagcttctggccccgcggcgtgcacgccatggctcaggaggacgtccacctggacgacgccggcctggccctgggcctgtccctcggcggcggaggcggagcgtctgatgcggcgcgtcagggcacctgcagccggctgagcagggagccgcgcgcgctggagccgtcgctgacgctgagcatgccagacgaggcgaccgcgacggggtccggcggctgcgggggcgggccctcgcacagcgtgtcgtcgctgtcggtggcgggcgtgaagagggagcgcgtggaggaggcgaaatccacaatgtgtcttctgatctcatccacccttcccccacca

SEQ ID NO: 6660 - DNA, 2443 bp, Setaria italica
  misc_feature (1)..(72): n is a, c, g, or t
  Peptide Sequence Number=SeqID_72634
nnnnnnnnnnnnnnnnnnnnnnnnnnnnnnnnnnnnnnnnnnnnnnnnnnnnnnnnnnnnnnnnnnnnnnnntttttttttttttttttttttttgggtccaaaaaatgatcatatgaatttttttaatttcactataataattgtgaaattaacaatgaacatttgtataggtacatgtcttgtggacctcacatgccccaacaatttgcctaaaagctgcaaacttttggatagatcaacagtgaggtcctcctatgtacaccattttacaaaaatgaaaaattagccaaacgataactgaataggcttcaagaaaactgccaggaggtcctgcataggatcaggcacatgcctcagcctcatttggatgctgaagcaggctatcaccattctggacttctaccgacttgtgattgctatgaccaatggatttgcactgcttagaaggaatatcaggactccaagtgtctggaactgtgaggaagtactttgccatgaacttcctaaaccttttcttgtactccctgggggaaattacggttggtgaaacattcttgggtactaccagagaagtcttcacccatgtctccagttgtttgtcccaagtatattgtctcagataatcaatgatgccaaatacaagttcgtgcttttgtttatccactccaacaagaagagaatagtccatgacgttgaccgaagtgagaaaagccgtgtcattccagatagcacgctgcaaaagatgctttgttcttccaccaatatagattggagaaacacccatgtcctcaacatagttttggtccaggtaaacagtgtcatgatcatttgagtcagcaacgcgacgtgaaaaagtagcgcctttgaggtcataaatccgtgaaatattgtggccaaagagaagattctccatcaccatcaggtcgatctttacctctttgccatgcctaatatgcttaacctgatagattcctaatattttagcaagacaagtttggcttccagtgtccagggaatggaaaacatgctggaagtaatgaggagcaaattcaataaatgattcaaactctgttttcttgatttgcttaatgataaacctgtcatccattgtctttgcaaaaaatgccttgctctttccaccttgagcatcccactttttacagcggctcaaagaagtaatatatgcaagctcagatgggcagcacttctttcttaattcatagaattcattagcatatatactagtgaccgagtatttgcctctgaaagttactttcccgttgacggttatttctggatgtgctggagacaataaggatgagctatcataaccagagaaatcgtcagatgcaattgacgagatagatgacaagctagcttcagattcttgagatccagtagatgaccattgtgatgagctgtacgaacttgcagacataaaactaaaagatttctccatcgttctagcatgctctcccctgtagttctccatctcattctcgaaagaggaatcttttaaatggtgacgttcatcagacatggcaagagcacgagctattatgcttgatatctcatcctcctgtacacacagaatattactacctggaccaactgtgaactgcggagggtatgcatcgtcttgctgttcaaacaagggaggcaggtaagatggtttataatggttaacgatttcaaattcgtccaaatatccatcttgaatgtcattcctataagccaattgagattcatcaattggattccaaatccacctttctgtgctatcccaatattgatatttgaattgttggggactgctagatggctcctgttccacaggtattgtgtctgccactgtaacatttctctggacccccttctcattggatatctcaaaacaaggaactttgggggcttctgttgtgctatctacatctatttgactaggaccaatggaagattcttcatctttactgcctccattgcaagaaagttcagagttcccagcttccagatttccatcaagcgagggtgctccagtgtcaccaatttcaaagttgccatcagaaatctcgttcacaatatcagcagggttcttgcaattagcagcagtttctagcccaacagatttacagtagaaaagctgatgtagacgacggtcccatatgtaaagtctgagtagaaggtcctgataggaccaatttatattcaaaagttcatccacagatgaggatggtctcccattttggtcaatggccttgtccagagaaccctcaaagctagccttttctttgatcaacaactcttcgagttcagcaaagtccttaatagggagtgagaggccacaattgattgcaactcttatcacatcagaatgttcattcttcaacttttgtagcaaggttgcaaccttagaataaagtgtcacacctctagcatgaaca

SEQ ID NO: 6661 - DNA, 483 bp, Setaria italica
  Peptide Sequence Number=SeqID_72635
ctcagtgtgagtagtttttttgttgatgcaaactccatcgagtttatttgaccatacaaatcatatacagagatagaggcagacctggcacaccaagtctgtcaggctacatcaccgtaagggccaagctagtcagcaataccagcttaagggactacctggagactttgagggccaagctagtcatcgccccccacgcctgattgcagtctcagcagggccggcttgtcggagcagctggaagtaggattccagcttctgcctgaggacaccatgctccctcttcaacttttggaaagacctcatgcagccttcagcattctcgtctccacagctattcctgaatgatgtgcactcattcttcatcctagaagcaccaatgctagaacagcttcctttcaattgctgcatgtgtgaatcccatctattgaaatctctggggttcttctccatagcttgctcaatatttgtcattagtctggc

SEQ ID NO: 6662 - DNA, 3245 bp, Setaria italica
  Peptide Sequence Number=SeqID_72636
tcgcgatccctccgggttctggccctgttggcccaaattccaagacctcgaggattcaacattgtagcttttaggctcggagctccactgccttgacggctcagcagaggtgtagctctgacgcgctgaactccattgccttgagggttcagcagaggtgtagccttgttgtgcagaacgccattgccttgaaggctcaggattgtagctctgctgtccttgcccagcactccagcgtgttaagggctgttgattataaccttgtgtaccaccatagtcccggccagcaccaggatcaggtgaccttgagtgtcgctggtggctgtcccgcgccattgcttggtactcaaccacaggacggctgtaaccatttctgtccagtccgtgccctgtcagaacagtacgcgacgaggctgccgcagaaccataagcattgtatgcactgtgcgtactttgatcaccgtaagcattctggttagcatatggcactgtgcttgcagatgcagtattacatgaattagttgtgcgggcagcccatggatcagctgttgcatttcgtccagtgttggtgacatgagcagcgttagattgccaagggagtgttgtataagatgcattaggctcaggcaatgacgaatgtgctacagcagggtttgggacactctgtagtccatggggttgatttgttcaccgctgcttgctgatgcaaggacatagcaacaggatcagatgccaaagcatattgctgggcatgctgatgtactgaagctctactcagatggttattcacaggagaaacatgttgaactggcggatttacggagaccgccaactgtggtagagatgggacgttagcttgaatctgtgccggtaaaaccgaaactgaagcataaggttgtgagggtaacgaactcataacatttgagaagctttgctgcacggtatttgcaataggaggtgtattcccccggtttgacaaaggtggctgctgcaagtttggagccctcgcctgtgttgggtgttctggtccccagacagcccttgctgtctggtccgatggagttggtgatggaagtgaagcaggaattggttctggctctggctcttttggagccccagcaccattccccagagtgttaaccagctccgagagtccaaggccagtccgcttcaatgtatccagaagagcaacagtctgctcgctggacacatcctccccattgttagatgttaaagcaaagacaagctgcggattcttgagtagcaccgtaagcaactcaagatctggctcaggatcttccccgttagcaccatcagcaactgcaacagatgttgcggtagatccaatttgcttgtccttgacaggagcggctgcattaggagctgcacccacactatccatttccatggtgtcagcatctggcgcctggtcaattggaatttctggggtcaagctgtcgtcaaagtccatttccagatcccatggatcctttggattcaatgggatgtccttctgacttgcataaaaggtttccttttcacgccggtttctctgtgtttgaacctccagctccttgctgttgtcaccagcactcacactccacgaagggtctatccaaaccgctggtggtatccgccaaggaactctcttggaatccaacttctctacaacattttttggggaacctatatttaacttcaatccatttgagatttctggcttatcaggctgaggaaccgtactttgtttagaagttgatgtgcttgggtcaacaggttgtgcagttgatgatgtgcttgcgtcaaaaggttgtgcagttgatctaatggggtctctgggcacaggcaatacatttgaattgactaatccagaagtttttggtgtttccattgcttgtgatttatcactcgctttacttgagtcaaccttgccatacttctcctgcatgaacatggcacgcatctttgctttttgaatatcatctgcagatagcggtctgctattgtttgtagagttcctggcagaattaacattcttcaccgcagctttcttatttggatgttctacaagtagaactttccttttttgttttggattttgtttgcatagcactccttttattcgtctcatcagcagaagcagtgagaagcatttgtgtctttctgggctcaggcttactgctctcatttgcaccatcagtcaaggcaagtacctcctcggtaatatcaacttcggatttccaagactcgtcacgtaaaatttcacttatcctttgtttgcatattaagtccttctgaggtttcttcaatgcctggctccttacaagcactttgctcaatctggagaggaggttcctggccttgcttgatatgtctggtgtcctataaaaccgaagcctgttaatagtttgcagcacaactgacatgtgggctggcaaagccttgtgtaaggggaggtggagaagcaccttgaagatgaccagaataactgatgtttgctcttcgtttgctgctagactcaaccaggttgacataatggttaaaccacccattgtaacgaaccaactcagaacagtaacattatttatttggagaatccattccatcaatttgacctgtccagagaatgtttcctccttccgcattagagcaaagatactctccaagaacttcttatcttctgactcaacaccaggatggacttcctcttgcttaatttcctttcgaacagagtctggactaatcttagcatcagttggttgcacaaccattgtcccagatggcattacaggggctgcaaagtactgctgagccgttgcctgttgcaaagagttttggaaggcctccataggctgcaaacagctttgtgagagctccattggttgcgaagagacttgagggacatccattggttgggaagagcttcgtgggaccactggttctaaggttctcagaggttcgacaacctctgcatgtgcctctatgtcaagaggtatctgctcagtgctcatggagaatgcattgtcaagctcctttggtgcttctactctcagtgccttttcttgagacagtcgaacaaattttcttactcgtgatttttgacatgtaaagaactccctaacctgagtaacagtaaccccacagagtaaactaatttcccgggtttctttttgccaatagtatccttcaaagcgaaaagtgactgcatgcacttcactgcttttggattcaacaaatcccttcgg

SEQ ID NO: 6663 - DNA, 708 bp, Setaria italica
  Peptide Sequence Number=SeqID_72637
cgattccccaccttccttcctcacgttgctcttagcaagatcgtgagtacaggtgcggcggcgatgaggtcggccgtggcccgcttgatccgctcctcctccgcctccgcctcgacctcccgtctcagctcatcgccagtcttgctgaaaactggcaatgtattcttcagcagtgccacgccgagcgatccgaagcacgtcgaggagccttttaaggtggaggaggcagaaactgtgaaggtgacaccaccttctccagacaagctgctagtgctaggaggaagtggttttgttggatcacacgtttgcaaagaggctttggacagaggatttgttgtctctagtcttaatcggcaacctcctggaaccggcttcatttaaggatgctatggataatgtttctgcagtgatatcctgtgttggaggttttgggtcaaattctttcatgtacaagattaatgggactgcaaacatcaatgccattaaggctgcagctgagaaaggtatagtactactgatgtcattattgtgaagcattttttttctcagttatgattgcagtttctgacatcaaaactcctgcttttcccttgcttggcttattgaattactgtgcgtaatcattttagtgaattcatgttttttgtatgattataatgttgttttctggcttatttctgtcatattaaaagttcaagtggtcccgca

SEQ ID NO: 6664 - DNA, 1449 bp, Setaria italica
  Peptide Sequence Number=SeqID_72638
ttcgtggcgccccctcgctgcggcacttgctcgcttccgcttccaccaaaagcgccacgccgccaccagatcctggaggcttgaatccctccctcccctcccctcccctcgcgccacctgcacgcgattccccaccttccttccccacgttgctcttagcaagatcgtgagtacaggtgcggcggcgatgaggtcggccgtggcccgcttgatccgctcctcctccgcctccgcctcgacctcccgtctcagctcatcgccagtcttgctgaaaactggcaatgtattcttcagcagtgccacgcccagcgatccgaagcacgtcgaggagccttttaaggtggaggaggcagaaactgtgaaggtgacaccaccttctccagacaagctgctagtgctaggaggaagtggttttgttggatcacacgtttgcaaagaggctttggacagaggatttgttgtctctagtcttaatcgatctggaaagccatccttaagtgaatcttgggctgacaaagttatatggaatcaaggcaacctcctggaaccggcttcatttaaggatgctatggataatgtttctgcagtgatatcctgtgttggaggttttgggtcaaattctttcatgtacaagattaatgggactgcaaacatcaatgccattaaggctgcagctgagaaaggtgtaaagagatttgtatatgtgtcggctgcagacttcggtttagtgaattacttattgcagggttattatgagggcaagagagctgctgaagctgaattgctgtcaaagttcacctatggaggagtgatactgaggcctggttttattcatggaactcgtcgagtgggcagtgtaaagatacctcttggtcttgttggtgcccctatgcaaatggtgctccagaacgcaaagccgctggccagattaccacttgtcggcccactgttgacacccccagtgagtgttacctccgtggcgaaggttgcggtgagagcagcgacagatccagtgtttccccctggcatcgttgatgtccatgggatcatgcgatacagcgagcaaaagtaaacagtcatgtacaggacggtatacacatgtgcctgtacctaccagatctacctgctgttcgtatttgctagaaatgaataattagaaaagccaacatgtgacctttttacagccatgtcttggttggttctacacgtcggtggtatccttgttgaactgattgtctcaagacgaaaagctttggcatcgtatcttgactgcactgtgtacaaaaacgacgtttgtttgactgcctgatcacatggtgctcctaaatggatcatgcatatgtgctccgaagggaggaatgaagacaattaaaattgcctctcagacgaaaaacattggaattgtatcttgactgcactgaacaaaaaagtaattggctcgaagataaa

SEQ ID NO: 6665 - DNA, 343 bp, Setaria italica
  Peptide Sequence Number=SeqID_72639
gatgtgcatgcaatccatgatggagaacatgattccatgaactcagtagcttctctgaagcgacattcctgctgaaaaacgtggcacaactgcacgaagaaaactaaaatgtttgttttagtggaactttttgtttattggaaatgtgcacatatcagctaagtgaaacagtacattgttaagatacaatttttctaactggaaagaagccacagagtgcctgcataactcagcaagagctatcccatatagcaatgaaacaatgatcatgctctattcacaaaggataaatagtatccggcttctgaagcaacggacgaatcaaatgaagaagcaggcgggg

SEQ ID NO: 6666 - DNA, 379 bp, Setaria italica
  Peptide Sequence Number=SeqID_72640
cgactacagtagcgggggtggcggctacaacaagtccagcactgacgactacagtgttggaggtgttcttaccgctgccatagtcgtcggttctcgacttgttgtagccgcttccactgtagccatcagtgctggagttcttgtagctaccatcatagtcgtcggagcttggcttcttgtattcatcgctggtggtggatttagtgtatccaccactgccactgtaatcctcggtgccagattttgtgtagtcgctgcttagatcattggacttgtagctaccattgtttccgtagttgccggtgctggacttgctgtagccaccttcgtcaacactggtgcttctgtagctgctgcgatcatactcatcagccatttt

SEQ ID NO: 6667 - DNA, 682 bp, Setaria italica
  Peptide Sequence Number=SeqID_72641
ccagatttgttgtagtcgctgcttaggtcattggacttgtagccaccatcaccatcatagtcgtcggagcttggcttcttgtattcgtcgctggtggtggacttgctgtatccaccactgccactgtagtcatcggtgccagatttgttgtagtcgctgcttaggtcattggacttgtagccaccatcgtttctgtagtcgtcggtactggacttgttgtagccacccccgctactgtagtcgtcagtgctggacttgttgtagccgccacccccgctactgtagtcgtcggtgctggacttgtggtagccacagctgccatagtcgtcagtgttggaggtgttcttaccgctgccatagtcgtcggttctcgacttgttgtagccgcttccactgtagccatcagtgctggagttcttgtagctaccatcatagtcgtcggagcttggcttcttgtattcgtcgctggtggtggacttgctgtatccaccactgccactgtagtcatcggtgccagatttgttgtagtcgctgcttaggtcattggacttgtagccaccatcgtttctgtagtcgtcggtactggacttgttgtagccacccccgctactgtagtcgtcagtgctaggaacttagttagtaagaccgacccaacccccgactaactagtaagtacgtacga

SEQ ID NO: 6668 - DNA, 573 bp, Setaria italica
  Peptide Sequence Number=SeqID_72642
taattattctactaaaaaattaaatttgttattgcttcagttctgtgcatccatggagcatggggtagtaggtatttatagcagagaactagatatgcaggaggtttgaaagcatcaatagcaatctgaaatacgggtggctaatatgatggacattaaacggtgaaagcagctcatttgttgtctaggtggagatctttctgtgctcctcgagaaaagacaactggacctggagcaatgccatatgaccgcaaagagaaaaaggattttgatccatcaatacgtttcaaccctgaaagatagccaatgcaccacataagtgttttttatgtaagccaaaccacgtataaatgttgtctgacggaaacacacatggaaaatcacatcttttcttaaacaccaactgaacttactctgtttccacatctatatgagtatcaaatctatgttagttgatcagtaaataagaatatcccgaatagaccaatggatactcacatcatgcaaaagtggatacagctgtaaagtaaatttacttaattacaaaattaaagaaaaaaaaactagttttaa

SEQ ID NO: 6669 - DNA, 348 bp, Setaria italica
  Peptide Sequence Number=SeqID_72643
ggactagcactagaagaggtaggtgtggatggacgtgaagacgagcctgccaccgagggagggtaccaggattgggtagggatatcctggaaatttggatccgtttgctgctgctgagagccgaagagaggaattctccagctcattgtatagagaaatcaaatcaatccacgtccggatggatctccagtcaagtccactagacagagggagaagggcgggcggcggcggcagtcggcgggggatccggcagagggagcaagggaggggtcgggtgggcggggttgggattctaggtttagaagggctcgattgatgcgtgcgccccggcaagggagagaaggcgtg

SEQ ID NO: 6670 - DNA, 433 bp, Setaria italica
  Peptide Sequence Number=SeqID_72644
gactgaggatgatctgaagctctttgatgcgggctagcactagaagaggtaggtgtggatggacgcgaagacgagccgaccaccgagggagggtaccaagattgcgtaggtatgtcctggaaatttggatctgtttgctgctgctgagagccgaaacgaggaaatctccagctcatcgcagagaaatctcgtcgccggccgtcaaccactacccaccagagctgggcgagcacgaatcggaggagtggaagagagctcggacggagaagaaggcgcggctgcggcgcgcagcgaggagtcttcgccttgcgctcgcggtggttgctttcgcccttcgacggaggaacgaggaagtgtggaggcgattttggggcagctgccggaccagacgacggagagaaccggaggagagagaagagtcgaagcgacgcgg

SEQ ID NO: 6671 - DNA, 553 bp, Setaria italica
  misc_feature (536)..(536): n is a, c, g, or t
  Peptide Sequence Number=SeqID_72645
ttttttttttttttcgatgactttggtcagacccaaactgacgtacccacgaacactttatattaaaaaaaatggcaatgggtttgattaccgcatataaatccaacctggtcactcggcaggtaaccgcgcgacaacgtagggaacgtttcagacataactatacatgcaatcttcgtgttatgtttctcaagccctacaacacgctgcactcaaaaacagggccaagcagagtgcagaacaagaatgagtgagcaggtgtacaacgaagtcgccacgatcgtctatgcaacaagacagcctacggacggatgtcagcgcagtgaggtctggccggcgagatgaagcagcgcctgcttgtggtaggcggtgcggagcttcttgtacttctgcacaaaggtaggcaggtcgatgtccttctccaacaacttctgatgcagctcctcagactcctcgtccagctttgccattgatgtttggagcttgtcgagcagtgcagcaggcgaataggacatcataatatcatcctttgcctntccaaatcagttaacct

SEQ ID NO: 6672 - DNA, 1108 bp, Setaria italica
  Peptide Sequence Number=SeqID_72646
tttttttttttttttttttttgaaccttgagagggctttatatagaagaaatttttgtttgaaaagctatataggagagatttaggcaatgggtttgattaccgcatgtcaatccaacttggtcactcggcaggacagcgaacgtaaggcgtaacacaacataactatacacgccatatacgtttgatgtttggcaagccctacaataagctgcactcaaaaacatgccccagcagagtgtagaacacgaatgtgtgagcaggcatacaacaaagttgctacgatcgactgcgcagcccgcagcacgacagcctacggaccgatatcagcgcagtgatgtctggcctgcgagatggagcaacgcctgcttgtggtaggcggtgcggatcttcttgtacttctgcacaaaggtaggcaggtcgatgtccttctcgaggaacttttggtgcagctcctcagactcctcgtccaactttgccatcgatgtttggagcttgtcgagcagtgcagcaggggaataggacctcataatatcgtccttttgcctctccaaatcagtcagcctgtcttgtgcagcagccagttctgtggttcttattattgtgcactgattccggagctccaaaattcgctgctccttttctaaattttcccttgcaagttgcaatgtctcctttctaagctcatcacgcacgttgttctgggttttcacttgatcaagtgaattaaagaatgcattgtatgcctctttgtctttcaatagccgctgtaactcctcgatactcttatccttcaaacgagcaattattcctgcagcctcagcaggagatggttgcccacgggatgaaggctgaggatgatctgaagctctttgatgtggactagcactagaagaggtaggtgtggatggacgtgaagacgagcctgccaccgagggagggtaccaggattgggtagggatatcctggaaatttggatccgtttgctgctgctgagagccgaagagaggaattctccagctcattgtatagagaaatctcgccgcagcgcgtagaggaggtcctttgccttgcgcccgcggtggttgcttcgcgacggaggaactgcg

SEQ ID NO: 6673 - DNA, 348 bp, Setaria italica
  Peptide Sequence Number=SeqID_72647
ctccattaagacaaggccatccccatcctccccttgttcctccaatccccatccccatctcccccctccccctcctgctgtgactgtgctgtgcattcgcatttccaaattgcaattcaggttaatttgctacgccaccagcagcatgtaaccaagccaagccaagcaaagcaaaagcttcaccatcaccgccgaggtcgagcaatggtagcagtaattcatccccactgccactggaggtgagtggtagcagctacctaggaataggatagtagtagggagctccccccccgccggccggaggacttcgccatgcagtccggctatggcggcgtctccgagttccag

SEQ ID NO: 6674 - DNA, 432 bp, Setaria italica
  Peptide Sequence Number=SeqID_72648
gggtgtaaaatatatgacaacctaagtatcaacaaggaaagcagattttttctactgcttctctgcaacatgggtggaaaaactcctgctgcgtgctttcagtttcttcttcgcacctcacatgttaaccgggcgaacggtaggtaggtcagactctgtaacccaccatggttttcttctcctccttgatcattgccttcttggcaagctcatagcctgcaaagttcattgctcccagaggagcaatccagaagaagcgggggatcgcacccttgaagagcccaagggggccctcatttccaaggatggacaacactatcgtctgcatggacactggcgtgcctggaggggcggtcatcatccgtgtttcataacgtcaaagggagtggtcacaactgctgcaagtcctccggacaatgctccaactgacta

SEQ ID NO: 6675 - DNA, 813 bp, Setaria italica
  Peptide Sequence Number=SeqID_72649
ccacgccggcttcggcgccaacatgatcacgtacctgacgcagcagctgcacctgccgctggtggacgcgtccaacctgctcaccaacttcggcggcacgtccagcctcacgcccatcctcggcgcgctcgccgccgactccttcgccggccgcttctggaccatcatcgccggctccgtcttctaccagctcggcatgctaggcctcgtcgtgtccgcgctcctcccttcgctgcgccccgcgccgtgctcctcccccgctcccggcgccaacgcgccgtgccgccgcgcctccgggtggcagctcggcgtgctgtacctctccctgctgtgcacgtccatcggctccggcgggctccggcccagcgtcgtggcattcggcaccgaccagttcgaccatgagcctgaggtccaagagcagcagcacaagcagggcagcagcgccgaggccgccagggcagtggcggagcggaagcggcgctacttcaacctctacttcttcaccatggggatcgctgcgctgctggcggtcacggtggtggtgtacatccaggacaacgtggggtgggggtgggggttcgggatcccggccgtcgcaatgttcgtctccatcgtagtgttcgtggtcgggtacccgctgtacgtccggctcaagcccgggggcagcccgttcacgcggctcgcgcaggtcgccgccgccgcgttcaagaagcgcaagatcgccatgccggaggacgccggcatactgtaccaggataaggagctcgacgcgctcatctccaccaacggcaggctactgcataccaaccagcc

SEQ ID NO: 6676 - DNA, 1552 bp, Setaria italica
  misc_feature (1493)..(1552): n is a, c, g, or t
  Peptide Sequence Number=SeqID_72650
cggcgtcgagtctgtggacgttaacgggctgcgccgcccgcccgtgcctgtctccggcctcaccgtccccggcgcccgcgatccccactggctgcgtcggccgctcacaagtgcggacgtcatggaagtgaatggaaaggggctcaaggttgcttaccagggctgccctggggcgtacagtgaggcggcagcaaggaaggcatacccgaattgtgagactgtgccctgcgagcacttcgatactgcatttcaggctgttcaaaactgggtggctgatagggctgtactgccacttgagaattcattgggaggtagtatacatcggaactatgaccttttgcttcggcatagtttgcacattgttggagaagttcgccttgcagttcgtcattgcttgttagccaatcctggtgtggagattgaaaaccttaaaagtgctatgagtcatccccaggctcttgcacaatgtgagcacacattgacagggttaggaattgagcacagagaagctgttgatgacacagctggtgcagcaaagtttgttgcagaacaaatgctccaggacactggtgctattgctagttcattggctgctaaattgtatggactggacgttcttgctgagaatattcaggacgacaaagataatgtcacccgttttatgatgctagctcgagaacccatcatacctcgcaccgataaacccttcaagactagcatagtcttttcactagaagaaggacctgggcagctcttcaaagcacttgctgtattcgcactgagggaaatcaacctcacaaagattgaaagtcgtccacacaaggaaaggcctcttcgtgtatctgatgattgtctcataaacaggaacttcgactatctcttttatgttgatcttgaggcttcaatggctgatccaaaaactcagaatgctcttggaaatttgaaggagtttgcaacctttttaagagtcctgggaagctatcctacagatgtgaacgaaccttagatagcaagtacttcggcacatcacatgctggaattgtagaaactaggggaaatgggcagccagctgaaaagacaggagcagttatcagggtgatgctaattttgatggagcaaataagcatatctacattagaactgtaggaaaggtgcatatgaggcatgcgtttggttatgatactgggaagaaaatcgcatcttttgctggtgatcttctatgcgaggaggataccttaaagagctgtcatccttctatctgcagttatgaaggagcctgctagaacgcatatagagatcaaagggttggatatttggttggtgaaaaaacagttatagtagaattgttttgtctgttactagagtttggttccttagacggccctgctgcattaaaagtttctttgtgtaattgtgttatttgaatggtcgtcatagtagcaaacaatctgtctccttcatgtgcaatatagtatcgtggcataaattacctnnnnnnnnnnnnnnnnnnnnnnnnnnnnnnnnnnnnnnnnnnnnnnnnnnnnnnnnnnnn

SEQ ID NO: 6677 - DNA, 297 bp, Setaria italica
  misc_feature (285)..(285): n is a, c, g, or t
  Peptide Sequence Number=SeqID_72651
tttttttattgtgaaggaagctttatttgcgataaaagtaccggagtagaaattagaatcaactcttcctcatcgttgagatgtgcacgaagccacgaacaatgttgtggaaagcaaaatctacaggtaggcgtccgcggtgctgaggtcatcgaggatcttgttcttgacatcctgtggaagcggtgctgaaggtcctgctttggagtagaactccgccagtgatctgatcgccttctccaacgcaacgtacgactcctcggcggcgacggcctgctggcctcnccacccgccagg

SEQ ID NO: 6678 - DNA, 269 bp, Setaria italica
  Peptide Sequence Number=SeqID_72652
caggctctgcgctacgagcacgctgtagagcacgacggcgagggagaggaggaagggcccggggtgcgggtcgagcccgcccatccagtagaggatgagcacgaacgccgtgggcaggccgagctccatgggcaggtcggcggcggcgcgcgacgcgaagtaggaggagagccggtacatccccgacgagcgctccttgagcagcatcggccgctccagcgggaaggtgaacacggcgttgtagagcgggaagaagccccagaagacgg

SEQ ID NO: 6679 - DNA, 2312 bp, Setaria italica
  Peptide Sequence Number=SeqID_72653
ttcttacctctatgagcattgtaaggttccatgcatttgccttattttttgccagaataaaggacttaaagacacttcacttttcatgctactcatataatttggcggtgaaggtggaggagcccgaggggaggcacggggaactggtggaatctggcggcgtcgagcccgtcgccgtcggtatcggaggccggaagctatggaggcggtgcgctgatgtcgcaggatgtactccaaccccgcggactcagtctctggtcgcaggcgaacaagtggccctgtgaggagagctaagggtggctggactctagacgaggatgaaaaattgcggaaggcagtgggtgcttgtaatggaaaaaattggaagaagatagctgaatctttccctgatagaacatcagtacaatgcctgcataggtggcaaaaagttcttaatcctgaacttataaaaggtccttggacccaagaggaagatgatatcattatcaatatggtaaagaagtatggccccaaaaagtggtccctgatagcaaggtcactagatggtcgcattggtaaacaatgccgagagaggtggcataatcatttggatcctcaaataattaaagaggcctggtctgttgaggaggagcgtgtggttgctgatgctcatcgtttgcatgggaacaaatgggcagaaattgcaaaacttcttcctggaaggactgacaactcgataaagaaccattggaatagttcattgagaaaaaggctaggtgactacaatgccagcagggctctgccagtttctgtgcatatggttcacaatagttttaaacatgaaaaggcaaagctaagtggtgggaaccatattgacttgaacaaggagcccaatatcaatttggaacgccccccagaaatagttgaccattctgaacatgcaactcatctgcacgcttgcagtttaaaaaatattaagagctgttcagattttctttctcttgctatgccaactgctcagccaaaaaaattgtgtgagatgttaggaggtggttattctgctgttgctttagcaggaatacaagggctaaaaatggattttgttcatgacaagggcacagaaataaatgttgtttgtaaggaacgtttgaaaaatgacttgctcaatgtggaggtgcgaaaacttgatcatgcaacggatacaatagggtattcaggatcagcaaaggtagaaggcaaaacagtcaacaatatgtgcaaattattcttgccgaatgagtctaactcctttggttctctttgttatgagatacctaagctagaagatgttgtcccttgtcactcccctgttttttctacacctcatatacaacaatgctgtgaggatggattcctaccacctgtgggctatactacctcttctagggatggagacatatcagatcaactgagtgttgaatcaatattgaagagtgcagctgaaaacttcccaggtactccttcaattttaaggagaagaaaaagggagacaccagcacatgatgaagatagtaatttgaagattgctatattacacagtaatagttttcatactcccttgggaaagtgcactacagaaagtccgcattcattcaagactgcaacatttttgtccctgggccctccagataacgaagggttatctgctactttagggagttttgatgtttcccctccatatcgactaaggtcaaaaaggatggctatcttgaaaaccgttgagaagaagcatctaaatttttcatcagatgaaatggataattatgatagtcctgatactatgaagaagtattcttcctggaagactgaatgcaccaatacctacacagatgtttcaagcaagcaagaaatgaaaatgacggagcatatggttgacttggaaactttagccaaggactttacacacacaaccaagttagatctgatttaattctacagcatccaggaacaactgacagcatactgaagtcggcaagaaaatctgacgcgtctaaaatgaataaatgttcctatacaaatagaaagcattaccggagaaacagcatagtttctggttggattgatctacccagccttctttccttggtgtggggtgtacaaagccttctcttatcctagaaatatatcttttttcttatatacataatataggatgcatttggctagttacatcatgtgggttcacagattgtactccaatattagatgattgaaggtgcacaactgtgtaccaagtagtacatgctaaacttactaattacttagtactaacgtactttagtactaagttttaa

SEQ ID NO: 6680 - DNA, 206 bp, Setaria italica
  Peptide Sequence Number=SeqID_72654
tccatctggcacctcacgacgtcgtaggaggcgagcagccgcagcatgcggtccaccatcacctcctgccacccgcagatcaagggcgtcaacttcgacctcccccatgtgatctccgaggcgccgccgttccccggcgtgcagcacgtcggcggcgacatgttcaagtcggtccccgccggcagcgcgtcgtagcagttcttgag

SEQ ID NO: 6681 - DNA, 1195 bp, Setaria italica
  Peptide Sequence Number=SeqID_72655
ttttttttttttctatcatattaagtgtatatatatataaccttgactgttattaatggtacatggcagagacacttcaacacatacaaccattagaattctgaatccagaacaagatgccggccatggaggtaggcaggccagcagcatgatgaagaaagcaaatcaagcaaaagtacatgcaccaagaagacgacgacgacggcgacgaccatctcatctctcatcaaccgcaactggcacagagctatacattcacttggtgaactcgatggcccatgcgttggcgtagatgtaggtggccttgaacccggtgaaccccgcgcccttggcgagctccctgaactccctctcgtacctctccttgccgccggggttgtgcgcgagcatgatcatgtcgacgtggaacacgccctgcgccttgggggtagccctccggggttcaccggggaggacgcactcgacgatgatgaccttgccgttcgccggcagcgcgtcgtagcagttcttgaggatcgtcgcgcagtgggcgtcgctccagtcgtggaggatccacttcatgaggatggcgtcgccggcggggaccgacttgaacatgtcgccgccgacgtgctgcacgccggggaacggcggcgcctcggagatcacatgggggaggtcgaagttgacgcccttgatctgcgggtggcaggaggtgatggcgtggagggtggcgccaatgccgccgccgacgtcgaccagggtgcccacgccctcgaagcccgtgtagaactacgaaggaagacttacttaggtagaatgatcaccgagtggttcttcatgccctcgttgaacacgcggttgaagcgaggatccgtgccgtggtactcgaacgccgtcatgccgtacgccttgttgaacgggatgccgccctccagaacagcgtccttcaggtagtaccagctctccatgaggaccttgtcctggttcatgagcgcgagcgcggccatggagacgccgtcctcgtggagagctggtactacctgaaggacgctgttctggagggcggcatcccgttcaacaaggcgtacggcatgacggcgttcgagtaccacggcacggatcctcgcttcaaccgcgtgttcaacgagggcatgaagaaccactcggtgatcatcaccaagaagctcctcgagttctacacgggcttcgaggg

SEQ ID NO: 6682 - DNA, 1321 bp, Setaria italica
  Peptide Sequence Number=SeqID_72656
ggtaaggcaaggccagcagcatgatgaagaaagcaaatcaagcaaaagtacatgcaccaagaagacgacgacgacggcgacgaccatctcatctctcatcaaccgcaactggcacagagctatacattcacttggtgaactcgatggcccatgcgttggcgtagatgtaggtggccttgaacccggtgaaccccgcgcccttggcgagctccctgaactccctctcgtacctctccttgccgccggggttgtgcgcgagcatgatcatgtcgacgtggaacacgccctgcgccttgggggtagcctccggggttcaccggggaggacgcactcgacgatgatgaccttgccgttcgccggcagcgcgtcgtagcagttcttgaggatcgtcgcgcagtgggcgtcgctccagtcgtggaggatccacttcatgaggatggcgtcgccggcggggaccgacttgaacatgtcgccgccgacgtgctgcacgccggggaacggcggcgcctcggagatcacatgggggaggtcgaagttgacgcccttgatctggcgggtggcaggaggtgatggcgtggagggtggcgccaatgccgccgccgacgtcgaccagggtgccccacgcccctcgaagcccgtgtagaactcgaggagcttcttggtgatgatcaccgagtggttcttcatgccctcgttgaacacgcggttgaagcgaggatccgtgccgtggtactcgaacgccgtcatgccgtacgccttgttgaacgggatgccgccctccagaacagcgtccttcaggtagtaccagctctccatgaggaccttgtcctggttcatgagcgcgagcgcggccatggagacgccgtcctcgttgggggtgagccacttgcccaccggcgcggcggcgtaccggcgggagtacttgccgtccttgtcctccatctggcacctcacgacgtcgtaggaggcgagcagccgcagcatgcggtccaccatcaccggcgcgtcggggttggccggcgccacggggagccgcgccaccacctcctccggcgacagcgccgccgcggggtccttctggagcacctccagcaggcccagctcgatggcgttcttgagcgtcatcggcaggatggacgacgacaccagctgcagcgcgtacatgcacgcctcctcgtcggcgaccgcggccacgtcggcggcggtggagcccatggctggctggctggcttctggagctgctgcagcaggtggcgaggggagagaggagaggagggggtgcgcttctcgccggcggtgagctgagaccgtgagaggcaag

SEQ ID NO: 6683 - DNA, 403 bp, Setaria italica
  Peptide Sequence Number=SeqID_72657
agtcagcggcggcaggggcggtagaggaacagaggaagcaagatgggagcccggccccgcgcggccgccgcggtgcggtcaagtcgtccgagcccatcagaccggatgactgtgagaaggaggagaaggagctcatgcgggaggctggaacggatggtgcgccggcccttggcgtcggacgtcgtggtgccagccggcgcgctcgccccgcgccagcgttggctgagccggcgggcaaggtaacagaggaggagaaggcgccaccgattcctcgcgatcgccatgtcaagctgaacgacgacgaggaggatacaagagcagctacgaagccagaggaggaggaggaagacgcgccagcactgggcttggtcatcgcggtgcctgccggcgtgttcggcgcgcg

SEQ ID NO: 6684 - DNA, 313 bp, Setaria italica
  Peptide Sequence Number=SeqID_72658
catatcatggactcggcatgaagccactcgaccatcaccaattgattttcattggttgaatcatgcttctgttgataagatcgttaaaatttttctctcctatttcctccaaatcttgttcaccctccatattaatgaatccttcagcgatccatctttttacaagttgatccctttcaatctcataatcttccggaaatatacttaaatagagtaagcacgtcttcaaatggtggggtagatcatcatagctaagtgataatatccttctcatttcttccacatcaggatcattttccagtgttgaaccaat

SEQ ID NO: 6685 - DNA, 300 bp, Setaria italica
  misc_feature (190)..(190): n is a, c, g, or t
  Peptide Sequence Number=SeqID_72659
gagcgtgtcagtgccatgatcgaggaccaggagcccttcgagggtgaggccctgctggccacggaagagccagagccccttcaacttgaagggggctcagaacagaccacgagcatcttgccaaaggcgtacttgcggcacaggtccatccgctgcaggaacccacaaccttgttcatggtcacaaaggngacggtgttctcatcattgtacttgtagtcacagaaccacagagagtagccctctgggtcatacatgtcccagaaacctttgatggcaacctcacggaagttggtctttg

SEQ ID NO: 6686 - DNA, 219 bp, Setaria italica
  Peptide Sequence Number=SeqID_72660
ttagactagaccaaccaagcaagatgatcctcgatgactggaagaggctgtactcaaacacaaagaccaacttccgtgaggttaggctggttaaccatagtccagaaatacctctcaacatgagggaattcagatgtgaagctcttggtcaagatccgtgcaaatccatggtagaggttgcatgtcaatacaatgtcggctagagtgacagaatgccaa

SEQ ID NO: 6687 - DNA, 1688 bp, Setaria italica
  Peptide Sequence Number=SeqID_72661
tgcatgacagggtgaatgaatacgtatatcaagtttaccggaagggtatatgatgcacatgaatgcattgcaatgttgcacttgatgcaggcaaacctcccgttatcatggccaaactctttcaacatagcacagaaaataaccagtacacccagtatcaaaactaacattgatgagttccagaagtattgactagttagaactggacccaaaaagtagacatctccttccacagttctataacaaataaatgggctcacttgaagcatttcgcatccagcaaggcctcaccttcgaagggctcctggtcctcaatcatggcattgacacgctccttctgggcctcgtcagagaggtcaaccttggtccactcatagagctccatgtcatagacctcatccatgacgaacttggggatctctgagccacggaagagccagagccccttgaccttaaaaggtggctcagagccgaccacaagcatcttgccaaaggcgtatttgcggcacaggtccatccgctgcaggaacccaccaaccttgttcatggttacaaaggacacggtgttctcatcattgtacttgtagtcacagaaccacagggagtagccctctgggtcatacatatcccagaaacctttaatagcaacctcgcggaagttggttttcgtgttggagtacagcctcttccaatcatcaaggatcatcttgcttggaggaagcaaatcaagatgattcttcggcttaggctttggtgcctcttcctccgctggtttctcatctgccttaggctttggggcctcttttggggcctcctttttggtttccttaggcttctgctccttggctggtgccaccttcttttgaacaggtggcacagcttctgcctgcttcacatcacctatgactttcttgaagtttggctggttaaccatggtccagaagtacctctcaacatgagggaactccgaggtgaaactcttggtcatgatccgaataaagcccaagtagaggttgcatgtcagcacgatatccgcaagagtcactgaatgcccaacaaggaatgtgtttgatgcaaggtgggtgttgagggaacccaatgctcttttcaaagccgcaatggctgtttcctcactcacagcagcatagggataaaaccccatacgtgggaacaaccacttcccaatgttagcatcaacctctgttgcagcgaagtccatccattgttcaatgtgggcataatcaatcagtgaaaatccataaagcgggttgtcagccttcaaacgagcaacatatcgtgcaattgcattgctctcaaaaacagcaccatcaggagtctcgaggacaggaaccttcccaatagggttcatcttgagaaactcaggagttttgttggagacacccatttgaaagtccttcaccaactcaaccttgatgccactgtattctgcggcaataagtgccttgaatgcatttttgttaccactgccagcatgcagtacaagcgccatctccaccggccgctagcttcgctgttcgctcgatctcagatcgctgcggcaagcgcgagatcgggcgagcggcagtgcggcacagcagcggagagcggaggccaagccagaggcggagtagcagcccgcaacccttgggttggagttgggaagtttgggatctcgtgcctagggttgc

SEQ ID NO: 6688 - DNA, 1508 bp, Setaria italica
  Peptide Sequence Number=SeqID_72662
tacttctgtctatgttgacctgttatactcatgagttgtggttggttaacatagacagaagtaacaagcaaactcttccataaacatccgacccaaagcctaaacagttctctctaggtaagtgcaacctcacttgaagcatttggcatcaagcagggcctcaccctcgaagggctcctggtcctcgatcatggcactgacacgctccctctgtgcctcgtccgagatgtccaccttggtccactcgtagagctccatgtcatagacctcatccatgacaaacttggggacctcctggccacggaagagccagagccccttcaacttgaaggggggctcagaaccgaccacgagcatcttgccaaaggcgtacttgcggcacaggtccatccgctgcaggaacccaccaaccttgttcatggtcacaaaggagacggtgttctcatcattgtacttgtagtcacagaaccacagagagtagccctctgggtcatacatgtcccagaaacctttgatggcaacctcacggaagttggtctttgtgtttgagtacagcctcttccagtcatcgaggatcatcttgcttggtggcagcaagtcaagaggattcttcggcttcggctttggtgcctcctcttctgctggtgcctccacctttggcttcggggcctcctttggggcttctttcttgacatcctttgcctttggctgaggagcggcctttttctgaacaggaggcactgactctgcctgcttgacatcgccgatgaccttcttgaagttaggctggttaaccatggtccagaaatacctctcaacatgagggaattcagatgtgaagctcttggtcaggatatacataaatccagtgtagaggttgcatgtcaatacaatgtcagctaaagtaacagaatgcccaacaaggaacgtctttgaggcaaggtgtgtgttcagagaaccaagcgctctcttcaatgaggcaatagctgtttcctcggccgtctgaacataaggcatgaaaccaagccttgggaacaagtaccgtgcaataccaggatcaacttctgtggcagcaaagtctatccattgctcaacatgggcttgctcaatacgagaagatccaaaaagagggttgtcatccttcaagcgagcaacatagcgtgcaatagcgttgctctcaaaaacagcaccatcaggagtctccaaaaccggcaccttcccaagggggttcatcttaagaaactcaggggtcttgttggagacacccatctcaaaattcttgttcaactcaaccttgaccccactgtattctgcagccaataagcgccttgtaggcattcttgtttcctggaaaagaatgcaatacgagcgccatgtcaactggtcccgctggtctgcgcccgatcgcggagcctctgcagatccgcagcacagatcgcagaagcaggccgccggaggaagagagagagaggagggtttaaggagggaggagggcggcggtatttatt

SEQ ID NO: 6689 - DNA, 1588 bp, Setaria italica
  Peptide Sequence Number=SeqID_72663
cactagtagtccgattgattcacattttcagccaaatacgcaaacagaaccagattacgaaagatacaaatgcaaggaacacaggatagcccaaaattctcaacatagcacaaacttcaaccagttcacgagggtatatcatgtcaacatagacataagaaacaagcaaactctttccataaacatccaatccaaagcctaaacagttcaatctccaggtaaatgcaacctcacttgaagcatttcgcgtcaagcagggcctcaccctcaaaaggctcctggtcctcaatcatggcactaacacgctccctttgggcctcgtcggagatgtccaccttggtccactcgtagagctccatgtcatagacctcatccatgacaaacttggggacctcctggccacggaagagccagagccccttcaacttgaaggggggctcagagccgaccacaagcatcttgccaaaggcgtacttgcggcacagatccatcctctgcaggaacccaccaaccttgttcatggtcacaaaggagacggtgttctcatcattgtacttgtagtcacagaaccacagagagtagccctcagggtcatacatgtcccaaaaacctttgatggcaacctcacggaagttggtctttgtgtttgagtacagcctcttccagtcatcgaggatcatcttgcttggtggcagcaagtcaagaggattcttcggcttcggctttggtgcctcctcttctgctggtgcctccacctttggcttcggggcctcctttggggcttctttcttgacatcctttgcctttggctgagcagcggcctttttctgaacagaaggcactgactctgcctgcttgacatcacccatgaccttcttgaagttaggctggttaaccatagtccagaaatacctctcaacatgagggaattcagatgtgaagctcttggtcaagatccgtgcaaatccatggtagaggttgcatgtcaatacaatgtcggctagagtgacagaatgcccaacaaggaatgtctttgaggcaaggtgtgtgttcagagaaccaagcgctctcttcaatgaggcaatagctgtttcctcggtcgtctgagcataaggaatgtaaccaagccttgggtacaagtaccatgcaacaccagaatcaacttcggttgcagcaaagtccatccattgctcaacatgggcttgttcaatacgagaagacccaaaaagagggttgtcatccttcaagcgagcaacatagcgtgcaatagcattgctctcgaaaatagcaccatccggagtctccagaacaggaaccttcccaagggggttcatcttaagaaactcaggggtcttgttggagacacccatctcaaaattcttggtcagctcaaccttgaccccactgtattctgcagcaataagtgccttgaaggcattcttgtttccaggtccagaatgcaatacgagcgccatgtcgactggtcccgctgcagcctcagcagatccgcagcacagatcgcaggagcaggccgccggaggaagagggaggggtttacggtgggagagggaggcgaatttatgcgatg

SEQ ID NO: 6690 - DNA, 712 bp, Setaria italica
  misc_feature (622)..(712): n is a, c, g, or t
  Peptide Sequence Number=SeqID_72664
tcgtcggtattagatatggcagcagccgcgacgacgaggacgaggggtgcagctcgccggcgaagcgggcgcgggtggcggccggcgaggagaagccaattccggcggaacccatcatgcagagcgaaacacttgcatccagcggcaaggtctttgccatcgacctcaaccttccgccgccgtcggacgacgacgacagctttccggacgcctactgatcagggctgggagaaatttgctgacgaagagtttgcactcggggaaataaacccaaccttactctggttgtacataaagggcaggccagtcggaggagagctgctacgggggagcagccttcatagattattacgaggtgcaaagctgatgaggagtatttagcggtggtttcattgggttattcaggttaattctagtcagctttgttggctgctcggtgctggcgtgttgcgagcagtaggctcgctcattgccctgtttaattatgcacttcttttttgtgaatctgaattaaattcactaagtgtggattcaaactgatacggtgcaggaacaataatacatacattatattagtttatagagtatttcaaatctcgcggttgatagcttgaaaaaaaannnnnnnnnnnnnnnnnnnnnnnnnnnnnnnnnnnnnnnnnnnnnnnnnnnnnnnnnnnnnnnnnnnnnnnnnnnnnnnnnnnnnnnnnnn

SEQ ID NO: 6691 - DNA, 315 bp, Setaria italica
  Peptide Sequence Number=SeqID_72665
aagagcagcaccactgacttgcgtcggtgcatagcgggaaggcgaggcaggcagggaggaggctcagcaggagcgcgcagatggcggcgctaggccgcatctccatcgcttgccggctgggctgccggcgaagaagagatgggatcgatctgccttgcctctcgctggctccagggtgcagtgcagagtgcagacagactgaacagtctactctgtggcctgcgccgccctcctcaagtccatcctctgcgctaaatgcagtccatattctgctgacttgttcgacgccgggccaaagattcggacgattccctt

SEQ ID NO: 6692 - DNA, 1778 bp, Setaria italica
  Peptide Sequence Number=SeqID_72666
ggcaggcagggaggaggctcagccggcaagcgatggagatgcggcctagcgccgccatctgcgcgctcctgctgagcctcctccctgcctgcctcgccttcccgctatgctaccgtacgtcaagtcagttcttttacttcttctcctttttcttcttcgcctgctcaacagttatggattgcagaggcgccggtgctgctcaacaccacgctcaaattctgcgcctccgcccccgccaacagcagcagctgctgcgacgccgctgctgacgccgcgctcagcgcccagttcgacgccatgaaagtctccgacgccgcctgcgccgccctcctcaagtccatcctctgcgctaaatgcagtccatattctgctgacttgttcgacgccgggccaaagattcggacgattcccttcctctgcaactccacctcctcagcaacttctgctcagtccaaggaaaccactcaggactactgcaagcttgtctgggaaacttgcaaggatgtcaagataacgaactctccctttcaacctcccctgcaaggcagtgcaccgcctccaagctcatcgtcgaagcttactgatgcctggcagtctgaaaatgacttctgtacctcttttggtggtgcgcccagtgatcagtccgtatgctttagtggcaacacggtttcattcaacgccacacagccttcgcccgctcctaaagggatatgcctggagaggattggtgacggatcctaccttaacatggctcctcaccctgatggatcaaatagggttttcttgggcagccaagctggcaagatatggctggcaactgtacctgagcagggatcggggggttccctgcaattcgaagaagcaagcccattcgctgatctgactgatcaggtgcactttgattcagcctttggactcatgggtatggcgttccatccggactttgcaaccaatggccgtttctttgcctcttacaactgtgataggacaaagtcgcccagctgtacgggaagatgctcttgcaattctgatgtgggctgtgatcccacaaagctcggtaccgacaatggtgctcaaccatgccagtatcaagtggttgtatcagaatattcagccaaagggtcctcggcaaatgtttctgaggcaacgtctgctgatccatctgaagttagaaggatttttaccatggggctaccttatacatctcaacatggaggccaggtactctttggacctgatggatacctctacctcatgatgggggatggtggaggaaagggagatccttttaatttcgctcagaacaagaagtcacttttgggcaaaattatgaggcttgacatcgacaatacaccgagagcgagtgaaatcagtaacacaagtttatgggggaattattctattccaaaagataacccatatgctgatgatagcgagttacaaccagaaatttgggcattgggtcttagaaatccgtggagatgcagctttgattctgagaggccttcttacttctactgtggagatgttgggcaggatcaatatgaagaggtagatttgatctcgaaaggtggaaactacggatggcgtgcgctcgagggtccacttgtttaccatccagcatgggcacctggagggaacacgtcactcgactccataaacgccatccctcctatcatgggttacagccattctgatgtgaataagaacattggatccgcatcaatcatgggaggttatgtctatagagggtccgctgatccctgcttgtctttgtt

SEQ ID NO: 6693 - DNA, 1464 bp, Setaria italica
  Peptide Sequence Number=SeqID_72667
tgttttccttgcaaacaactgaacaccctagagcaacctgcaggttttaccatagtcgatcaggctgacactcatatgctatacatgtatatcacagaggatccctagctgaaacattattatttcgatttcttcctaacgtatggaacgtaccatccatccataatccttgcacatgactgactcagcaggattctatctcatcaaaacccaaaacattataatagacagcaagagcactcccatctggttgcccagtgctgtggctggtgccttcgatgaaggaccagcaggcgtcgtcccatttttcgtcgcgggtttctccgttgggcaagtataactgcagaggctgggcctgacgactcggtagacgcctttgctcgccagcacatagatgtccttgctgttgtcctcaccaaaggagtatacgtagccaagcgacgggagagggctcccagcagctgtgtcacagggtattggagaatccttggagcagctgaagggaatcagattggaggtgtagttcccgctgctctccggggtctctgtgccggtccacatggcggaagcatacaggtcgccgtacaagtaccttccatacaagcagggatcagcggaccctctatagacataacctcccatgattgatgcggatccaatgttcttattcacatcagaatggctgattaattaataagaacagcaagagcactcccatctggttgcccagtgctgtggctggtgccttcgatgaaggaccagcaggcgtcgtcccatttttcgtcgcgggtttctccgttgggcaagtataactgcagaggctgggcctgacgactcggtagacgcctttgctcgccagcacatagatgtccttgctgttgtcctcaccaaaggagtatacgtagccaagcgacgggagagggctcccagcagctgtgtcacagggtattggagaatccttggagcagctgaagggaatcagattggaggtgtagttcccgctgctctccggggtctctgtgccggtccacatggcggaagcatacaggtcgccgtacaagtaccttccatacaagcagggatcagcggaccctctatagacataacctcccatgattgatgcggatccaatgttcttattcacatcagaatggctgtaacccatgataggagggatggcgtttatggagtcgagtgacgtgttccctccaggtgcccatgctggatggtaaacaagtggaccctcgagcgcacgccatccgtagtttccacctttcgagatcaaatctacctcttcatattgatcctgcccaacatctccacagtagaagtaagaaggcctctcagaatcaaagctgcatctccacggatttctaagacccaatgcccaaatttctggttgtaactcgctatcatcagcatatgggttatcttttggaatagaataattccccataacttgtg

SEQ ID NO: 6694 - DNA, 1787 bp, Setaria italica
  misc_feature (1)..(32): n is a, c, g, or t
  Peptide Sequence Number=SeqID_72668
nnnnnnnnnnnnnnnnnnnnnnnnnnnnnnnnagtagacaagaacaaaaataggaacttccttcacagataccaacacggtttatgtagaatacatcacacacgtgatcagagccggcgtaccctaaccggaacgctgtgctgcgggtgaagtgtcagaatgctgtagggcgcgtgcgcgtactccggcgagagctcaaacgcgaagcgctgcaggaccatgctaatggcgagcttggcctccagcagcgcaaagttctggccgatgcatatgcgcggcccccagctgaaggggatgaaggcgcccgggtcgccgcacgccttggacacgccctcggcgaacctccccgggttgaactcgccggcgtcctgcccccagagcgcagggtcgcggtggacaaacatgatggggatcacaaacatgacatccggtgggtacacgacgcctccgagctcagtctgcttgtgcgtccgtcggttgatgaacaatgccggagggtacaggcgtagcacctcgtacaacaccattgtcacaacttttagacgactgaaaccgctgaaatctggcttgttttgcccaaagacttgcagaacttcatccctggctcgatctagccactccggatgcatgctcaagagtaccattgtgtaagtcagcaggatagcgctactctcagttcctgcaaagtagaacaacttgcattcttcaatcacttcttctacgttgagccccccgctggactttccatcggagttgctgtaattcatgtttgattccaacagcatgccgagcaagtcatgtttggtgggttcaccgttcttcatggcctcacgtctcttctctattattccccttaggatcgtcttggtctccctgttaatagcctttatccttcggttcccttttgttggtaaaagaaagtatcctgggatatgacttgtcccgaaagcttgagtaacgcggacaacttgttcagcttgaagtaggaaaattcttctgccttcttcgtagctaacaccgaaaacagttcttgaaaggacatccccggataaattttggaactcagcccaaacgtctagctcaatggttccaacagaatcagcaagtaagttctcccatctgcaaattagatcgctgcaagctgcagagaacgcaggcaacatccccttcagtttctctgcatggaaggctggattcataatcctcctatgcttgacccattcctcgccgtcaaggatcgcgaccccaccaatcagaaacttgaccatgcgagtggccagctttgttttcacgaagtagccatctttgtttgatgcaacttcccgggccagctcggggtcaatgactgtaattctggggatcgtcccgaaccatgtaaacgagagcttaccatgctcctcgacggcacggtgaaggagaggggagacgcgcgggaggatgtcgtggggccggtccatgggcacgggcctggccagggccgccgccgtcagccggcgctcctccttgaggtcgccccagaggaagcggtagcggttgcccctcaggccctgcgccctgagggcccgctccatgcgccggggagccagccaggcccactccaggacctgcgccgcccaccacagcagcagcacggccgccgcgccgccgagcaggctccacggcgaggactcacggagcagcgccgtgccaccgtcgtcgtccatggcttggcttgctcgaccgtttcggcggcacaggggcacggtggagatggggcggcggcaatggcagagcagcaactgcagcag

SEQ ID NO: 6695 - DNA, 932 bp, Setaria italica
  misc_feature (9)..(9): n is a, c, g, or t
  Peptide Sequence Number=SeqID_72669
tgtatcagnatgattggattttcttgacagcacctgacatgtcgataggtcattgctgcaagcaaaccgaaagctcatcctctggtccaacaaattcttcacaaaatatgcccaaatcaatctctcaaatgccctcttctcaagacatcaaaccgctgctatctgctatctactcgctgcagagtgcagagcatccttgttcagtttctccctgagagccttgatctccatgaacgctttgcacagcacttccttcgcaactctgaaggttccggctgatacagctcccttctccgcacacttcattgcgtcacgaacgagatcattatacctcgaagccacagaatctgcactgccgctttcattgcccacattaagcccgatcagttctggccccatcttggctttctttgtccatcgcttcgtgatgcaaggctccggaagcatgataacaccagccatgacaaacactccaagcacatgcctgcaaagtattgctgagaaggcaaaccggcagcaatcacaccaggccttcttctcagtgacgttgtagaaaacagtatgcctggtaggaggattgccacctctttcgacatagtacttcatgtatggtccgtcctgaactttgacagcaaaatgctgcaatgcttcaatcaattccacctggaatgtttcaaatgcagctctggtgtagatgcttgccgcttgtttttccaagactgtgttagttttcagaagctgttcaggaggaagtgaaatgatgtctttccgggcttcactcacatacaaactgtccatgtactgatcaaatctagtgataaaattactcagagaaactcttgcactgaagttgttcctatgaaacctgctgactgtttctactctatgtgttaatgacaactcagcgaagaaggagctggttaggtacgcag

SEQ ID NO: 6696 - DNA, 363 bp, Setaria italica
  Peptide Sequence Number=SeqID_72670
ctcactgctgctgatgcgatgatagacaagctcactattgcgatattcatgttccaaattgttgttgtacttttgatgggttattttgggaatatttggaaggacactcagggtctcaagcaatggtatcttatgtatcctgtggaggtaccatggtatgatttcttggttattccattgcgcttcgagctgttgtgctccataatgattccgatctccataaaggttactcttgatttggctaaaggtgtgtatgcaaaatttattgactgggatgagcaaatgttcgattgggaaacaaatacacctgctcattcagctaactattagcgaggacctttgggcaggttgaattattatttt

SEQ ID NO: 6697 - DNA, 1011 bp, Setaria italica
  Peptide Sequence Number=SeqID_72671
atctccggaaaggtctgcagaatttcacatggagtcaggctcgaggcctaaattctcatcagcagaagtttggcaatggtatcttagttgtgacacgtgaggctgcacatcgcagcaatggatctactcctgtcactggagtaagcccatttcagcttcagaagccagagcagatcttgacccaaccaccacctcagccccggggaccaatgcaaatagattttcgtgtagggtccagttccaagtttggtgttttgatttcacaaaaagcaatgttggatggggaaaatggtggtattgacggcctttttaaggaggaaagagaggaccgacagccaaggaaaagggaaaggaagccaacgaacaggagggaggagcaaccacttagccatgttgaggctgagcgccaaaggagggaaaagctcaacaagcggttctgtgcactgagagccattgtgcccaacatctcaaaaatggacaaagcatccattctggaagatgctgtaacacatataactgatctcaagaagaagctggagaagatggaagcagagcgtgagaagctcttggagtgtggcaaggtagatgccagtgagcaaacaactaggcctgaagtagacatccaggtggtgcatggtgagattcttgttcaagtagtgtcaccgattgataaccatccaataaagaaggtccttcaagcatttgaagaggcagaagtcaaagtaggtgaatcaaaggtcacagccaacaatggtacagttgtgcattcctttgttatcaagtcccctggctctgaacagcatacacgaaacaaattggtggcctctatttctaatgtaactagatccgtgtagaattaaatgacaacttgatattttagacagatcatttttgctggctgtgaattggtaactactatgacacctattggtatctgatgatcggtataggtggtatatcaacatatagagctcagatccttacatataaagacaaatctgtaagtacaac

SEQ ID NO: 6698 - DNA, 670 bp, Setaria italica
  Peptide Sequence Number=SeqID_72672
cgagctgttcaagtgaaatttctgtgttgtgaacactgaacactctaacatttacagcgtcctcatttgttaataatttcagaccacagaagcctgcagctcaaccatgcttgctttccaccacctcgcacacggcgtggaacattgccctcaccggccgatgatcggagaggcggtaaccgccgcaacgctcataccgaatctgcctaatccccttcccgcgccaaaggatccgatcgcaccatgccggcgcgcggtgctgcctctgacgacgatggccggtgtcggcgcaccagtacaacttgtcggagttgcggtggtacttgtaggtcggggcgaaggtgacgacgccctcgcgccagccgtagaactgccggccttcggagagctcgagcagcagctcgtcgttctccagcagcatgctccacttcctggcccgcaccagctgccgcgcctcgccgtcgtccatggcgatccggtagttgaggtcgccgagcaacaccacgcggtcatggtcaagaatcttcttgggcaggtccaccggcgccggcacgccgccggagctgttgaggaagctcgtcctcgataggatgtccgccgcgtcggcgttccggcgaagcgcgtcgccgacctcgccgccggaggccaggtggcagcagacgaagcagaa

SEQ ID NO: 6699 - DNA, 419 bp, Setaria italica
  Peptide Sequence Number=SeqID_72673
cctggtcttgccctgcaactgtccttgtaactggaaatgacaaagcggtcgctggaggtatgatcttatcatatagtacaactaaaacacacttcataatgtttataattttggtgaatgtgtttgtaattcttgagtgttctccaatctgcagcaatttcaagagggctgtttcctgccctttccccgtctttgaattcaacggatttccttgacattctctccaagatagttgctatatacagtgtcaatgaaggtgtcccgttatggcgtgaaagtgcatcgattatcaactatgaattcttaaagggttatagacaaagaggaggagaactaaatgaatttattgcaggttatgacttcttgggcacaacacagtacggacttggtgtaaatgtttggtacaactctacttataa

SEQ ID NO: 6700 - DNA, 1492 bp, Setaria italica
  misc_feature (981)..(981): n is a, c, g, or t
  Peptide Sequence Number=SeqID_72674
ctgcggcgctcgtcgccgccgcgatcagcgctggtttccgggaatcaggtatcacaagcttgcagaaacgtgcaatggtggcaataagatgctcgattcgtatggaagtgccattggggcagattgatgaacttgttgtttctccggagtacatccgttaccttgtcagaattgccaactgtaaaatggaggcaaacaaaaaacgaatggatggatttctagatcttttgcagactgagggtttgtcaggttcgccagggttgttaaataattgtaacggaagtaatagtcagactgttgatcacagggcttccctgggttgtgaagttaagatatcattggataaaggtgccaagaaaaataatgacttagttacaaaaaggagaaatggtggtaaaaactgtgatgctgatgacagaggtgatagtgaaatcggggaaggttcactagaagcacagtattttgaaaatcaagaccctacatggagcaagggcgccgagcatggttttggtaatgctaaacgagtagtgctggaggagaagttgcccggaaacaaaaagtatcatctatctactgctgcattgaagattagtggagaaccaatcgagaagctcttattatggggccaatcatcttgtgtgtttcctgttggaggagagcaacgggtcctaacttttggtggttttggaggaccaggaaggcattcaaggagaaactattcccttctgcttgatcacaaatctggtttgttgacagagatgatctttaaagagtctccttcaccacggatgggccatacggttacttctgttgataatagcacctttgttattggaggtaggggtggtccttcagaaattcttgatgatgtctgggtcttacaaagcactgagaatacctggttaagactggagtgcagtggaaatatcttccgcccaaggcaccggcaggtgcgtgcagctgcagtagcttcaaaaaatntatgtctttggtggacttagtaatgaaggcttatattcctgcatgaatatacttgacacgaaaagtatggaatggagcatggttgctgctgctggcgaatggccgtgtgctcgacattcacattctctggtgtcttatggttcaaagttattcatgtttggaggtcatgatggtcaacatgcactgaaggacttctacagttttgatacaacaacacttgagtggaacaaggaaagcacatacgagggaactccatcacctaggttttcacattgcatgttcatctacaaaaattatcttgggatacttgggggttgccctattacaggaaacaatcaagaagttgcattgctaaacttaaagcatggagtctggttgtctgtttccattcccttgttgagccagtgcctctgtgtccgtagttcatcgattgtcattgaagatcatcttgttattttaggtggtggtgcatcttgctatgcatttgggaccaaatttaatcaaccaataa

SEQ ID NO: 6701 - DNA, 262 bp, Setaria italica
  Peptide Sequence Number=SeqID_72675
ggcagctctgccttcgtggagaaaaagtaaaggcagctctgccttcgtggagaagtagctcagcagctaaggtaataccagaggtgagaggttatggaggtgtgcggcgtcggcggcggcgagaagagcgcgctggcctccgagctggcgcagatgcaggccatggtgagggagctgggcgcgcacatggaccagcaggacctgccggcggccgtgagggagctctgcggcgagctctggcggggagctggcgtcgtccgtc

SEQ ID NO: 6702 - DNA, 890 bp, Setaria italica
  Peptide Sequence Number=SeqID_72676
ccgatggcgtccctgggcgtggccgtggctgccttggcgccgtcggcgggcgctggcccggagccgccggcggaggccatcatcgcccgccgcgccttccgctgcctgataccacatgcgttgcagagcgacttgggaccgcaaggaccactcctccataagggcgtcttggtggtgttgcagtcggagcacaccctattaacacccaaattaggctggccgctggtgcccatcatgtcttcgtacccttgtaccttcctcctgggcttcttcgccgcaccgggatcggtcgacgccttcctcgtgatcctcatcttggccggtggcgtcgtccagctccccgcagtctccagtgatccgccgacctggagcctccccatatcgtatggatcgtatgaggacggctcgatcatgtcgtcccggatgctctccacagtcgggaacggtgtcgcgaagacactcgctgctgatgataccccaatcatatgttggggctctagcatagcttgattctgctgcctgaacaagtgatgatggtctccggatccgtagctcagactgctgtcgctggcgctgctgttgctgatcacaaaggggaacaggattgggggatccttgggcaggttgaatgcctggaaatgaccttggtggtggtggtgatcctggtggtgatctccctccatgagagggagggcagtggagagctggctcatgtagatggcagacatgggaccgagaggagcttgtgctcgagatccggatggaggtatatatggcttgctaggttgcaggtagaagctaggcagtgacgagtgaacgagatcaggatgggatgtagagagggagaacggcggcagtgtgatgggcaggtcggaagaaaggcaattttg

SEQ ID NO: 6703 - DNA, 367 bp, Setaria italica
  Peptide Sequence Number=SeqID_72677
actacgagaggtggaggaaggagtacggcccggtcttcacctactcgatcgggaacatggtgttcctgcacgcgagccgggcggacgtggtccgggacctcggcctctgcgtgtcgctggacctcggcaagagctcctacatgaaggtgacgcaccggccgctcttcggcgacggcatcctcaagtccagcggcgaggcctgggcctaccagcggcggctcatcgcgcccgagttcttccccgacaaggtcaggggcatggtggacctcatggtcggctcggcaacggcgctggtggagtcctgggaggacaggattattagtagggataacaatggaggcggcggcggcttggagctcaagatacc

SEQ ID NO: 6704 - DNA, 535 bp, Setaria italica
  Peptide Sequence Number=SeqID_72678
gggcagatgtgtggaccttacccacctgaacagctgtatgaggggctgtccactggtttcttgcctcaagaccttgctatctatgctgtttttggtgggaagacggccgatcctgtgcccttaagctttttgaatcagttcctttcacaacggaattttggtgccacggtttccactccaaatgcatacatggagacaaagaaaatcccttcccatgctaaaatggtccttccagatgatctttcaagtgaagaatcatgctggatgtttgaggatgcggaaggctgccgacaagggccacattctcttgctgaactttcctattggcatcacaatagctatatccaggatctttcaatgaacgttcggaagctactgctaatgattcatcattaaatggcttagtgggtgacatagttggtgatgtcagccatcagctgcatgcggggataatgaaatcagctcgcagggttttaattgatgaaatattcagctgtgtacttccagatttaattgcttccaagaagactgagaa

SEQ ID NO: 6705 - DNA, 438 bp, Setaria italica
  Peptide Sequence Number=SeqID_72679
gattaatttcaaggtatcccgaggatggtgtaagggccgatacattgtcatgtcgccgctgccttctggaggtggtgggcatgagggatcagttgaggatgagctgagctagtaaatggttgctttctgacaaggtataaagctgcgcagacctgtcgattcatccatgaggtgatgcatgtacgcgtccacgaattttccaaatgcgtgtgccacagaattaggctcggcagcttgcttgctcggacgtatacatgccaatggatccacaagcctaagtgtgtcattcgctgatcgagcccgtgcacgcttccttggtgacttggtaatgtgcatgaactagccatgtaccatatggccaagattttggttgcctagacaacatggccaaaggattgaccccccaaaaatgcatgtgatatgatggaggcacctctt

SEQ ID NO: 6706 - DNA, 1060 bp, Setaria italica
  Peptide Sequence Number=SeqID_72680
tagtacttaacctttttacggtttaggtaattagtaattagtaatttaattgttggttcgatgctactaagcgtggtgggttagcaaggttcataaatcattcctgtgaaccaaattgctatacaaaagtgatcactgtagacggccagaagaagatttacatttatgcaaagaggcgtatatatgctggggaggaacttacatataattacaagtttcctctggaggaaaaaaaagatcccgtgctattgtggttcccagaggtgccgtggatcaatgaattaagtaaggccatcctttgagggattagactggaattggtatataggtgtgatgagtggatgtggattaaactgcattgtattggacttttggcatacaagtgtcgttctcagatttatttggaaggatttatataattgtcgaagtgcggggttgtggaacatgctgtactgcaagaagaaactgcacattctacttatctgaggtagatgagattaatttcaaggtatcccgaggatggtgtaaggggccgatacattgtcatgtcgccgctgccttctggaggtggtgggcatgagggatcagttgaggatgagctgagctagtaaatggttgctttctgacaaggttaatactattgttctttctcacacccgggtagagttgcaaactcttgtacaggcgcagacttagtacattgtcagtttacatggtggtaattaaatggttaaagttaaagttaaactggtttaaaaaactcaaaaaaaaataaagctgcgcagacctgtcgattcatccatgaggtgatgcatgtacgcgtccacgaattttccaaatgcgtgtgccacagaattaggctcggcagcttgcttgctcggacgtatacatgccaatggatccacaagcctaagtgtgtcattcgctgatcgagcccgtgcacgcttccttggtgacttggtaatgtgcatgaactagccatgtaccatatggccaagattttggttgcctagacaacatggccaaaggattgaccccccaaaaatgcatgtgatatgat

SEQ ID NO: 6707 - DNA, 1598 bp, Setaria italica
  Peptide Sequence Number=SeqID_72681
tttataatatataatttattaggttttatggatacatcataatagaaaagtttggatttgtcttaaaaaagaatactttgtaatctcacagacttattagattatgtgatacattacaatggaaacaatacatagaaatatatgtttgtacgtatatgcacctagaaaagctaaaacgaactacaatttggggtggaagcagtggtcaaaagcatacactatactgtagagcatgtcatgtcatgtcatgtcacgtgtgtttttaaccggatgcagtaacattttctgtaccatgaaagcaccaacagtacccctctgatttacactgtttatttggaaaattcgtgtgccacagaattaggctcggcagcttgcttgctcggacgtatacatgccaatggatccacaagcctaagtgtgtcattcgctgatcgagcccgtgcacgcttccttggtgacttggtaatgtgcatgaactagccatgtaccatatggccaagattttggttgcctagacaacatggccaaaggattgaccccccaaaaatgcatgtgatatgatggaggcacctcttcgagagattttacaatctgaataagtgagaaacccttaaggttagccaaatcttagcaagcctgcacgggctgatgaaggcgagagtaagaagagcatgaacacaggaggcaagcaaaagagggatctgaaaacgtggcatgctctaaggagcaaacgaatgggagatattgattggctttcacttattcgctatcacccttgaaagatggacgcgttgcttagatcacttaagctcttcaaacgtggtgtaggttgctggacttgctgctgctggagctgaagtccactctgtagagaacccaggcccattttcggtgacatgtgaagcacactctttcagtacatcggtagagtagttatctctttcttttcgtcttcttttctttttcttttttttggagaggagataaagtagttgtacctgcatagagtaggccttcgttacttaagttgtagtttaacttttgggcctgggtgtggaccagggattatgaatttcttcctgggcctagttcttggacactagaaagaacactactgaacccggtggtgtacagtaacaaaacaaaagtgagcgcggttgcacatgaagcttaaaaacttgtcatctcctagatatttccctctaggtcaaaatacgtcatctgttccgaaatgcatgttatagttttgttttatgtcaaagtcctctaaatttagtcaagtgtacagaaaaatgtatcgaaatatataacatcaaattagtttataaattcaccatgaaatatgttttcatagtataattacttggtatataagtggtaatatatttttatgtaaattttgtcaaagtttgagaagtttgacttggacaaattaaaacgactagtgttttggaacagatggagtacttgattaggattccacgctcgtaagctaaacgtcttaaaagttaatgatagtcaattttcacatgtttaactagctcttgtcccatcaattattcatgaccagacaaactactactgttactgctgctcgg

SEQ ID NO: 6708 - DNA, 3393 bp, Setaria italica
  Peptide Sequence Number=SeqID_72682
taaaacttaaaacccaaaaataaagaaactaaaaaaataaggtaaccttaccaacaatgatctttcaagtgaagaatcatgctggatgtttgaggatgcggaaggctgccgacaagggccacattctcttgctgaactttcctattggcatcacaatagctatatccaggatctttcaatgatttaccatgttgatggcaaatttggcccattcacacttgtgtcactaattggttcgtggagtggggaacacgcagaacgttcggaagctactgctaatgattcatcattaaatggcttagtgggtgacatagttggtgatgtcagccatcagctgcatgcggggataatgaaatcagctcgcagggttttaattgatgaaatattcagctgtgtacttccagatttaattgcttccaagaagactgagaagcaattggctgcaaaactgaagaaccaagctactaagcctgacagtgtgagcaacatgaagatttccaaacttaaggtcaaaattaacaaaccttctaccattccagaaaatggcaactcgaatagagccccagtggattcttcagtggccattcaatctacagcagtacatgatacatttgctgatatactatcagcagtttggcaaacaatttattatgaagccatgaagaatatatgggacggaatactgtctgaccctgttatggactacagtgatgtatggtttcagagaaattgtcagttgaatctgccctctacgattatttctgtcacccctgataacataaaagcccaagacagtcatgaaatgtcatcaaaggattcagacgctactgaatgtgaaacggaatttccaccaggatttgaaccaaaatctgctgggctctccctctctcgatcctcactagaagccaatattgataggaagtctgaatcaagcaccgctttattttctgaccccttagcagtagcccagaggatgctggcaaatgaactatatatctcatcaaagcaatctttatttcactattttgaggaggtcattgcagaggagataacaaattgtttatgctatggactcgaaagcagtattgatcaggaacaaattggtacgcctattcatgcaccggaatcaccgatttcagccgaagtgtctgtgcatgaaacactcagtcctgttgaggtggttgtggatgaagaactgaatactgttgaaatggctacggccatagaaaccagtccaattgaaatgggtgtagatgaagagctgaataccgttgaagtggctgcagatgaagagctgaatattgttcaaatggctgtggctacaagagccaattcaattgaaacgacttcagatgaaccattgggtgctgctgaaatgacaacagataaaatgctcagttctcagggagaagagcgcctaccccttgtgtcttatgcaaggatatttgaaaagatggatatatgtatgacagcagagttggatgagagttttgatgaagtgcctcctggagtggagactggcttagttcccttaccacttaaggagaaaatcgtatatcagcctttgagatcaatgaactctattcctgtgatttctagatatatgtccttggctctcttccggcaaagactacatgagaatgttgtgagagagtggacatctctcttctcagatacaattagggagtgcttggactcatggtacaataggcaaaatgctgtacctaaaattgcagatggatcatcaaaactcaaagaatatacatactacaggaagaggaaatccaagaaaacctgtcaagcaacatcatcaaaaaaacctgtagaactttcaatggacgagcagctttcaaaacctctctgtcagcttgttgaccacaagattaatgtgaaaaatatccaggaatcgaacaaagcttcaacatcaaagagagtttcatttgtggacaagccctctaaaaaaagaaccaagactctggctattgctaacaacgctcataatttgaatatccagcaagatctgaaacttgtttccagcgaggtgccaaaaagaaccaggtcatctcatccaaccaagaagcaggtggttgctaacaaaacacctatggtgaacgataatgccatgaatactagtatgctcacgaagcctgtcaagaaaagaaagggcaggaacatttccagcgaggccagtctgaaggtagacctgatgatttcatgtcctgaatcagatggttgtgctagagcttcgattaatggatgggagtggcgtaactgggcgcggaatgctactccatcagaaagagctcgtgtgagagggtatcgtgtccgttctattctttctgcctcaaataagaagttgtggaataattctcaagacaagatggtttcatctgcaagaacaaatcgggttaagctgcggcggctgttaagagcctatacaggtgctgagctgctgaaaattactcaaatgaaggcaaggaaaaagcgtttacgttttcagaggagcaagatccatgattggggtctggtcgcccttgagttgatcgaagcagaagattttgttatagaatatgttggtgacctgattcgcaagcgggtttcggacatacgtgaggctcaatatgagaagagtgggattggaagcagctacctttttcggttggatgatgattatgtggtcgatgctactaagcgtggtgggttagcaaggttcataaatcattcctgtgaaccaaattgctatacaaaagtgatcactgtagacggccagaagaagatttacatttatgcaaagaggcgtatatatgctggggaggaacttacatataattacaagtttcctctggaggaaaaaaagatcccgtgctattgtggttcccagaggtgccgtggatcaatgaattaagtaaggccatcctttgagggattagactggaattggtatataggtgtgatgagtggatgtggattaaactgcattgtattggacttttggcatacaagtgtcgttctcagatttatttggaaggatttatataattgtcgaagtgcggggttgtggaacatgctgtactgcaagaagaaactgcacattctacttatctgaggtagatgagattaatttcaaggtatcccgaggatggtgtaaggggccgatacattgtcatgtcgccgctgccttctggaggtggtgggcatgagggatcagttgaggatgagctgagctagtaaatggttgctttctgacaaggtataaagctgcgcagacctgtcgattcatccatgaggtgatgcatgtacgcgtccacgaattttccaaatgcgtgtggttgctgttcttgctcctgctgggttttccattatactttcccgtgcagatcacagaattaggct

SEQ ID NO: 6709 - DNA, 1006 bp, Setaria italica
  Peptide Sequence Number=SeqID_72683
agctggagtgcgtccagggattcaagagatacggcgcatcgtgcgtagaggatggactcctcagccaaacagctaccaagattgtactgcactgaagcacctgcctctctctttcttccttgcctgcgcttgccatgccacaccgctacttatgcccacgctctacctgtgttgttctctacaaatttagtcagagttgctgcacctgaggatctgcgatcagcatgctcgtgctttgtgcggccagcccaccaaaatcttggtctatttcacaacgcgattctcttcaatttactactgctacatgcatatttcttctctgctacataaccctatatttcctcaattccagtttcacaagcatgacgtctcagatataattgatgagctcttctcaaagaatccttctggcttaaccgaggatggcattcaacttgtgaaagctagggtgctggagagtgctcagggatttttcgagacaacatttacttccaacaagtatgctatcttgtcacttttgtccctgcgaagacttcctactccaattgtgaaccttgggtggttgcctcttggctgagagatcatctgctggttcctcgagagagaaagaatgctttcttgtggaagaaggttgaagaactgatactagaagattctcgcatcgatcaatatccaaaggtgattaagggggagtcaaaagttgtttatgagtggcaagctactggatcacttagtggaaagattaaaaagaaggtgcaaggcgcaagagtggaagccataaaacttgcggacgaaatgagtgcctgcgtgggtgaggtgagggagcagggcctaattacctaggttgattcaattcatatgcgcatgctgttattgcaagcacaacacgaatagatagctcaactaacaagtaagattgggaagattgcacctgtggattattaattatgcatactaaaatttatgcatctagaaaagctaaaatgaacctaacaaaaaaaaaaaa

SEQ ID NO: 6710 - DNA, 1078 bp, Setaria italica
  Peptide Sequence Number=SeqID_72684
ccttgcgactccctcggcccgcccgatgagtatgactacgccgacgattcgtgtcaaccttgcccccagaacggccggtgtgtgggcggtcagctggagtgcgtccagggattcaagagatacggcgcatcgtgcgtagaggatggactcctcagccaaacagctaccaagatttcagagttgctgcacctgaggatctgcgatcagcatgctcgtgctttgtgcggccagcccaccaaaatcttgtttcacaagcatgacgtctcagatataattgatgagctcttctcaaagaatccttctggcttaaccgaggatggcattcaacttgtgaaagctagggtgctggagagtgctcagggatttttcgagacaacatttacttccaacaaagctgaagcatttaaatgccctgagctggtcgctgagcgtcatatgcccctgacttgtcaaattcgtcaatggatctctagaaatgtgatctttgtgacaaccatttgtatcctgtttgcagcactgctctggatactgtggatcatttactggagacgtgcattatctaatagagctgagcaaatatatgagcaggtgtgtgaaatccttgaagataatgccataaatgcgaagacttcctactccaattgtgaaccttgggtggttgcctcttggctgagagatcatctgctggttcctcgagagagaaagaatgctttcttgtggaagaaggttgaagaactgatactagaagattctcgcatcgatcaatatccaaaggtgattaagggggagtcaaaagttgtttatgagtggcaagctactggatcacttagtggaaagattaaaaagaaggtgcaaggcgcaagagtggaagccataaaacttgcggacgaaatgagtgcctgcgtgggtgaggtgctgcaggtttcatcggcggagcaggtctgtacctcctggcaaacaccacgtacgcaagcagatcaatggcgttgagcgccgctatgacaaagaagaacaagtccacacggccatggttgaggtcttgaggtatccacccaggtcgcccgcctttggaggtgac

SEQ ID NO: 6711 - DNA, 1634 bp, Setaria italica
  misc_feature (1477)..(1634): n is a, c, g, or t
  Peptide Sequence Number=SeqID_72685
cgccgccgccaacgcccaggcggctgcggggccgtccacgtcgtcctctttcctcgtccccgcagctgatgacgacgaggacgacgacgtcgacgagttcgacgggtttgacgcgctcagcgagtacgacggcggcgaggtggagatcaacgaggaggacgagagggcccttgctgccttcatgtcaaaggacaaagctgccgagctcacacttggcgatatcattctccagaagatcagagagaaagacgccgaggtcttaacggaaggacggcctcgtgtaaaattggacaacagcatcattgatctttataaagaggttgggaagttcttaagtcgatacacaagtgggaagattccaaaagcattcaagcgcataccatcattggaatgctgggcagaggtgctgcaactaactgagccggagaattggtctcctaatgcagtatatcaagcaacacgactcttctcttcaaacatgaatacgaagaatgctgaacggttctatgaagccattttgctccctcgcgttcgtaatgacataaggcagaaccagaggctgcattttgcgctctaccagtcgctcaaaaagtctctttacaagcctgcagcatttaacaagggtattctgctgccactctgtcgggaaaggaattgcaccctccgtgaagcagtaattattggaagtattatccagaaagtttccattccatttctccatgcaagtgtagctctagtgaaactagcagagatggagtactgtggcactacaagttacttcatcaagctatttctagacaagaaatatgctttgccataccgggcgcttgatgcagtgcttgctcatttcatgcggtttcttgatgatgagaggatcatgcctgttatatggcatcaatcactgctcgcatttgtggaaagatacaagaatgagttggagaaaaaggataaggagaaacttgcacgtttgttggatcaccagaagcactatttggttactccagaaattcgtagggaacttcggggcagctgcaacaggggtgaaaaggattccaatttgcagacttcctcgcctatctccgtcatcacaaaacctatcgaggaagataagtgggacgtaccacaagtgccaatggaggaggactagactgttcgaaattttatccactgctgagtgtggcattccccattgtcgaattttgcactagttcattgagcaatgtgccaatgttttactatagagaagtgctgtaatgggcatttacatgtttgaaatgaatttgccatgtacgctgtcttaaactcttaacctctatatgtcgtggtgtgaccgacctggaacatgtacacatggagttagttgacggcattcgtttgttcttgagatgctgcttagcgaattgttaagtacctccttgtatgcaatggaatggaatcattcttaaagttataaaaagattatatggtttgtggccannnnnnnnnnnnnnnnnnnnnnnnnnnnnnnnnnnnnnnnnnnnnnnnnnnnnnnnnnnnnnnnnnnnnnnnnnnnnnnnnnnnnnnnnnnnnnnnnnnnnnnnnnnnnnnnnnnnnnnnnnnnnnnnnnnnnnnnnnnnnnnnnnnnnnnnnnnnnn

SEQ ID NO: 6712 - DNA, 1160 bp, Setaria italica
  Peptide Sequence Number=SeqID_72686
aaaacaaaaacgaaacggaaactaaggtaaactaaaggaacaaagaagactacaagacgaggagtgagagggcacggtgctccggcattcgctggtacaacaataatcgagcgcgagacaggagaggaggaggacagagcccggcacacaggacaaccccggtagagagaactagtgccaaactgacacacaacacgcttccggtagatctacaccgacgctttggccatgagcacggacgccgacgccgtcccggccgccgtggcgccggcgaagcgcgcgcccatcaacaagtacgccttcgcctccgccctgctcgcctccatgaactccgtcctcctcggctatgatgcctgggttctagcccagtacgaacagagagcgtgcatttcccacctcgcacgttcatgcacagcacgtatcttgtttacaccagctgttagatgatgcatgctaacaacgttctctaacggtctcacccaacagacatctcggtgatgagcggcgcgcagctgttcatgaaggaggacctcaagatcacggacacgcagatagagatcctcgccggcgtcatcaacatctactcgctcttcggctcgctcgccgccggcttcacctccgactggctcggccggcgctacaccatggtgctggcggccgcaatcttcttcacgggcgcgcttctcatgggcctggccccggactacgcgctcctcatggtcggccgcttcgtggccggcatcggcgtcggcttcgcgctcatgatcgcccccgtctacaccgccgaggtcgcgcccacctccgcccgcggcttcctcacatccttcccggaggtgttcaacaacttcggcatcctcctcggctacgtctccaacttcgccttcgcgcgccttcctgtccacctcagctggcgcgccatgttcctcgtcggcgccgtgccgccggtcttcctcggcgtcgccgtcctcgccatgccggagtcgcccggtggctcgtcatgcggggccgtatcgacgacgctcgccgcgtcctgcagaagacctccgactcgcccgccgaggccgaggagcggctgactacgaacaatacaaagaaaggtaggtacgggaaataaccccgaaagggaacgtaagtaaccgaaacgaaccgaaacgaaacaa

SEQ ID NO: 6713 - DNA, 877 bp, Setaria italica
  Peptide Sequence Number=SeqID_72687
aaggaaaaggaaccactcccgcacccccctcctgtcctgcacctcacgcggctggtactaggcaagagctcagcgaggagtgagagggcacggtgctccggcattcgctggtacaacaataatcgagcgcgagacaggagaggaggaggacagagcccggcacacaggacaaccccggtagagagaactagtgccaaactgacacacaacacgcttccggtagatctacaccgacgctttggccatgagcacggacgccgacgccgtcccggccgccgtggcgccggcgaagcgcgcgcccatcaacaagtacgccttcgcctccgccctgctcgcctccatgaactccgtcctcctcggctatgacatctcggtgatgagcggcgcgcagctgttcatgaaggaggacctcaagatcacggacacgcagatagagatcctcgccggcgtcatcaacatctactcgctcttcggctcgctcgccgccggcttcacctccgactggctcggccggcgctacaccatggtgctggcggccgcaatcttcttcacgggcgcgcttctcatgggcctggccccggactacgcgctcctcatggtcggccgcttcgtggccggcatcggcgtcggcttcgcgctcatgatcgcccccgtctacaccgccgaggtcgcgcccacctccgcccgcggcttcctcacatccttcccggaggtgttcaacaacttcggcatcctcctcggctacgtctccaacttcgccttcgcgcgccttcctgtccacctcagctggcgcgccatgttcctcgtcggcgctgggcgcggtgagcatcgcggcgatgctgtcattcgtggcgtcgttcgcgtccgggctgggccc

SEQ ID NO: 6714 - DNA, 2044 bp, Setaria italica
  misc_feature (2028)..(2044): n is a, c, g, or t
  Peptide Sequence Number=SeqID_72688
tgttggtccgtccggtccgtcctacgtagtagtctaagtaagttctattcctacttgagcttcagtcacaggaaaccccggtagagagaactagtgccaaactgacacacaacttccggtagatctacaccgacgctttggccatgagcacggacgccgacgccgtcccggccgccgtggcgccggcgaagcgcgcgcccatcaacaaaacgttctctaacggtctcacccaacagacatctcggtgatgagcggcgcgcagctgttcatgaaggaggacctcaagatcacggacacgcagatagagatcctcgccggcgtcatcaacatctactcgctcttcggctcgctcgccgccggcttcacctccgactggctcggccggcgctacaccatggtgctggcggccgcaatcttcttcacgggcgcgcttctcatgggcctggccccggactacgcgctcctcatggtcggccgcttcgtggccggcatcggcgtcggcttcgcgctcatgatcgcccccgtctacaccgccgaggtcgcgcccacctccgcccgcggcttcctcacatccttcccggaggtgttcaacaacttcggcatcctcctcggctacgtctccaacttcgccttcgcgcgccttcctgtccacctcagctggcgcgccatgttcctcgtcggcgccgtgccgccggtcttcctcggcgtcgccgtcctcgccatgccggagtcgccccggtggctcgtcatgcggggccgtatcgacgacgctcgccgcgtcctgcagaagacctccgactcgcccgccgaggccgaggagcggctgctcgacatcaagaaggtggtcgggatccccgagggcgtgtccgacgccgacgacgtcgccgccatcgtccgcgccaacaacaagggctcccgcggcgacggggtgtggaaggagctcctcatcaacccgtcacgccccgtgcggcgcatgctcatggccgggctcgggctcatgttcatccagcaggccaccggcgtggactgcgtggtgttgtacagcccgcgggtgttcgagcgggcgggcatcaagtccaagaccaactcgctgggcgcgtccatggcggtcggcgcgtgcaagaccttcttcatcccgatctcgacgctgctcctcgaccgcatcggccggcggccgctcctcctcgccagcggcggcgggatggccatcttcctgttcacgctggccacgtccctgcacatgatggaccggcggccggagggggaggcggcggcgctgggcgcggtgagcatcgcggcgatgctgtcattcgtggcgtcgttcgcgtccgggctgggccccgtcgcgtgggtgtactgctccgagatctacccgctgcggctgcgcgcgcaggccgccgccatcggcacggggctcaaccggatcatgagcggggccaccaccatgtccttcctctccctctccaacgccatcaccatcgcggggagcttctacctctacgcctgcatcatggcggcggggtgggtgttcatgtacttcttcctgccggagacgatgggcaagagcctggaggacactgcgaagctcttcggcaaggacgccgacgacgatgacggtgttgtcgtggccgccggccgccacgagagcaagaagtcatccactgagctcagtgctcagcagcactgagtaaagtgccatccatgcacaacgtgtccgtacacacatgtcatccagagtgtggacgaagctgttccgtaaagcttcgatgatactgtactactgtatatttttttctttggtgtggtgaatcttttagaatccctgcgcgcttgtttaattagatctgtagatttttgttgacctcgtgccgtcgtgcgcgcgcacgtagggtcagttgcatctggcgggcagagaaaaatatcacctgatattccacgtgtaaaaacagctgctttgtgcggaatttgacgaccagcgtacctactctgctgaaggaaaaaaaccaaaaaaaccaaaaaacaaaaaannnnnnnnnnnnnnnnn

SEQ ID NO: 6715 - DNA, 212 bp, Setaria italica
  misc_feature (187)..(187): n is a, c, g, or t
  Peptide Sequence Number=SeqID_72689
cgaatatcaaagacaaagagggtgaatctcatggagagcaacagactacagggaaacatcaaactgcaaatactgatgaggttgtgtctggctcagagcatgcattgatgagtgatgagcaatccgaaaatgcaatgatgtcatgtacagtctggaagatcactcaacacaggcagctgacaaaagngcctatgtaccaaaacagaaaacct

SEQ ID NO: 6716 - DNA, 275 bp, Setaria italica
  Peptide Sequence Number=SeqID_72690
ccgcagcgccgtccctgcattctcggaacctcgccgccaccgccagcccgcgcccctcgctacgagcccgcccatggccacgggctcctcctccccggccaccccgcagcccttcaagctgatcctggggtcgtcgtcggtggcgcggaagcacatcctcgaggagatggggcttgagttccaagtcatgactgcggatatcgacgagaagagcatcaggcgggaggatcctgacgacctggtgatggttctcgcggaggccaaggctgatgcta

SEQ ID NO: 6717 - DNA, 705 bp, Setaria italica
  Peptide Sequence Number=SeqID_72691
tccttcgtttctttaacttatttacttgtacatccgcttccgagcactgttgaactcaaggacattcaagatcctatatgatctgtcaacttgttttccggacacaggatccaactcgtgtagaaaaacatctgtctgagtccgtcggtaaaatgtgaaaccaagttcccgtgctgcaacaacaaaagctgcctcatcgggggactctgcttcgtatgagattttccctgattcttcgtcaacttcaggtatgcatgtgtgacaaactgccagcagccggaagaacatctcgatgacatgagagtggggttggctaacccagttaccgtccatgacgcgctcatccgtgaaattaaatcctttgactgcaaccttcccctcgggctgaaaatgctggttgccattgtccatgtcggcgatcattggggtgcctttcctcttggccattgctctctcgacctctgtgatgccacgaccatacgccctccccgcaatcgaacatttgatgaactccatggagttgcaagtcaaagtcccggttttatctgtgaggatcgtgtcgacttggcccagctcctcattcaagttggacgttctagcatgagctggcgtgtcggtctcttcatggtacatgtggatgtcctggttgatgaagagcgcctgcaggagcttgacgatctcgatggagatgtagagggagattgg

SEQ ID NO: 6718 - DNA, 1202 bp, Setaria italica
  Peptide Sequence Number=SeqID_72692
ggaggatgaggaagagggtgggagcgagccgaagaggaggaaggagaagggtggcgccgatccaatcgttaagaaggctgctgctgcaatgtgtgttggaattggaagtttcgctgaccccccgaaggcacagggcttagcacattttctagagcacatgctttttatggggagttccgaatttccagatgaaaatgagtatgacagctacctgtccaaacatggtggtgcgtccaatgctttcactgaaactgagtacacatgctaccattttgaggtcaaacgggagtatctaaagggagccttggacagattttctcagttctttgtatcacctcttgttaaggcggaagcaatggaccgtgagatattagcagtggactcagaatttaatcaagttctgcaaagtgatagctgccgcctttcccaacttcagtcccatacctgttctcaagggcaccctttgaacagatttacctggggcaacaagaaaagcttagttgacgcgatgggcagtggaatcaatctaagagaagagattttacagatgtacatgagaaactaccacggaggagcgatgaagctggttataattggaggagaaccccttgacattctagaaggctggaccatggaactatttagcaaggttaaagctggtcctctgttggatatgactccaaagactgacatgccattttggaagtcagggaagctatacaagttagaggctgttagagatgtgcatagccttttcttgtcatggacacttccttgcttgcacaaggagtacatgaaaaagccagaagattatttagcacatctccttggtcatgagggcaagggaagcttgctttatttcttgaaagctaaaggttgggcaagttcattgagtgctggtgtcggaagtggaggatcagaacggtcctcgtatgcctacatctttgaaatgtctatccaccttactgattcagggctgaaaaatgtatttgaggtcattggttctgtgtaccaatacataaagttgcttaagcagtctgagccacaagaatggatatttaaggaacttcaggacattggaaacatggagttcagattcgcagaagagcaacctccagatgattatgcagttgatcttgcagaaaatatgcttttttactctgagaagcacattgtttgtggagagtatatacattgtagga

SEQ ID NO: 6719 - DNA, 288 bp, Setaria italica
  Peptide Sequence Number=SeqID_72693
gcccatcacatgccatcgccacttcgcccttgttctctcccttcgcctgccacatcttcttcttcctcacgtacactcactgccgcggcgtcgtttaacctttcacctgagcctacctacctgtacctgcctcctggacctccattgctcgctcactgctccggttcctcggggaagcaagcacacatggtgcgcacgcacggctcggcggcatcgcattcacttccctgcccggccccggggggtctgcgtcctccctgccaacgcattcactaactagctgctgct

SEQ ID NO: 6720 - DNA, 375 bp, Setaria italica
  Peptide Sequence Number=SeqID_72694
cggttagtttccttcgccgtgccggcttccgccgttccgcggcgatcgccgccgccgcgtagggaggccatgggcgccgccgtcgcacggtggaccgtggcggcggtgcttcttcaggtcgccggcctctcactgttcctctacgggttcttcccagtgaagcccacgctgcgcggcttcagtggaacggagagctaccgaatgccgtcgtgcggtctcgtcagtgctggggagcaggagccggcgcttcctcccgatcagctcagatctctgtacggggaactctttgggatgcctcctgtatacgatcgcttagtattgatggtaatagatgggctacctgctgaatttgtacttgggagaggcggaaaacct

SEQ ID NO: 6721 - DNA, 2120 bp, Setaria italica
  Peptide Sequence Number=SeqID_72695
tttttttttgtgaaataaataagatacattcgctgtatgacatcctcaaacttgctgatatacaagagctgccatataaataccaaattataggcagcctgattgaccggtatatattgatcattccctgtatgctatctactagactggcgagtggcgccctttacagaacagggataaatgaaatcaaaaccactctcccatacaaacaggagcaaaccaagcgccataatgcaatacaacaccagatcacggcatccagcatataatttacctcgtaacattatgctcagtcccaaacctcaatgtttcttcttgacatgattgtacatgcatcatcaatggagctgctgttggctccgtggatgcctgaacgacccgcttgcgtagagcatctgatagactggctttatcctcgctatgaagagcacgctcaacagggttccacagcagcacacgatgccacagacatggaaggtgactctgaagcaatcaggcccatagcagttcgaaggctccaacacacctgggtgctgccttgccgcctccttgtcatagatgtagccagcaagaagagccgagaaaaagaatgcaccaagcggattcaccaacagcatgaagttgtacatcaggccaaagtccttcagcccgaaaagctccgagacggttggtatcatgacggcgaattggaccccgtagcatatccccaggagtgtaaccgaaacatagatcaagctatgaagaccagttgcaaagagcaggaaggttatcaccattataatttgtgtgcacatcatccaaaatggacgaggaagcatccttgaccttacaaaatattcagagacagatccaccaaggatacgcccaatgaagttgcagaagccaaagaggcacaacaaaatagtggtgtcattagcaccaacagacattccaatctgagccaggttgttgagaacagtgactcctgtgccaactccacaaaagtatacaataaacagtagccagaagtctgctttcactaaggcttcaaggaatgtgaaatcatcccccctccttggccctcttttctttttcaaattcactgctccctcacccactgccaatagaacatccaaatcagtactgtcatcggattcattggtacctgttacaagtattgttgaggcgctgcccagaagtggttctgagttctctggatccgcaccagataaactgtcagttgaataagatggagcaagggtgctgggcttttcctttgtttgtttgtttggataaaatgtcatctttatgggtatggcaagtggagcaaggagcaaaagtatcattataccaaacaaaaggtaggtgacagcctgacttagtttcaaagtatcaccaagtattgtagctaccataaggtatatgccgagaaccacacttgagatttgtgtgtacatgaaatggctgtgttctgttgagttgtcctcgtccagtgatggagtgcaaggcctaacaaaatacatcaccacaatacaagccgtagggatccccaaggcaagcaacagcaagagatttgtgggtgaattccctagcattccattaaatgtttctgtgtagacagcagcactaacagcaacataacccttgatgagaccagcaacagtgcctcggctgagaggaaaattcctcatgttggtcacaagagcagcagtgcccaaccatgcactgctgttcgtaccaacacctaaagctatccacaacacccagtacggcatggcgacggtcttggtgacggcgagccagagcgtgccgaagccgaagaaggcgcaggcggagccgatgacgaggatgagccatggcgggaggcggttggcgagcacccccgggaggagccccacgttctcgccgacgtcgttgccgacgccgagcatggtgagcgccttctggtcgtacccgagcgcctccttgacggcgtgcgagtagagagggaacacgtaggcgctccccgcagccacctgcacccacaccgccgccgccagccccacccacggcggccgtctccccgccttcacctttccccggcccttggcccttccttccccccgtcctaatggtccgttcgtctagtcttctattcttta

SEQ ID NO: 6722 - DNA, 322 bp, Setaria italica
  Peptide Sequence Number=SeqID_72696
gtacttcagagatcatagtgtttcttgtatatgtaataacgagtaatgtaactgtgataattatggagcacaatgatatgcaacttaaatatacagctgctcaattgctcatgatcaatgtacaatatacgtggcacaactatcacgcggaggtttgtatctttccatagcagattcattttccttttacatgtacataaccaattctgtacagtcttcgttgcccaggatgtacactgcatgaacttctgtttacaattttacatgtacaccgatatctgctgcgcgagccaatactgttcagaaaaattttcagaacttc

SEQ ID NO: 6723 - DNA, 395 bp, Setaria italica
  Peptide Sequence Number=SeqID_72697
tagaagagggcttctgaggcaaactcctcgcaaagttggcataattgtggattttcgttcattgctggagatactgtgccggcattaggagtctttataccagcagcatcgtccaaagccaagcttgtagcgcaccaaagcacaagactgattagaaaagtaacttgaactctagtgatcattttgtcagcaatcagcagagacgtaccaaaagaacaccaatcttttttcccaaaaagaacctcgttctgaaactgtccggacaagcaagctgctatactctcgcgcgtttagaacagagtcttcggatggccggccgatggcagccgagagctgggagggggccgacgcagagcggcgaccgacgaccgtgggtagggagaggggagtggcga

SEQ ID NO: 6724 - DNA, 487 bp, Setaria italica
  Peptide Sequence Number=SeqID_72698
tctgggtctcattttctttaagatagaagagggcttctgaggcaaactcctcgcaaagttggcataattgtggattttcgttcattgctggagatactgtgccggcattaggagtctttataccagcagcatcgtccaaagccaagcttgtagcgcaccaaagcacaagactgattagaaaagtaacttgaactctagtgatcattttgtctcgcgcgtttagaacagagtcttcggatggccggccgatggcagccgagagctgggagggggccgacgcagagcggcgaccgacgaccgtgggtagggagaggggagtggcagggaggagagcagaagagacgtggatttgagatgattattaacggagacagagcgcggcgttgacaagctggatgtgtcgcctgatgtgctctccgccagctctcgcttcgctcgttaggattggttctgacttctgagccgcggagcacgcacggagtctagt

SEQ ID NO: 6725 - DNA, 842 bp, Setaria italica
  misc_feature (1)..(47): n is a, c, g, or t
  Peptide Sequence Number=SeqID_72699
nnnnnnnnnnnnnnnnnnnnnnnnnnnnnnnnnnnnnnnnnnnnnnnataattttgcgttacatcatgaaaatgtcaagctgcacttggtatcggatttataattgtgctccataattatcacagttacattactcgttattacatatacaagaaacactatgatctctgaagtacaatgatatgcaacttaaatatacagctgctcaattgctcatgatcaatgtacaatatacgtggcacaactatcacgcggaggtttgtatctttccatagcagattcatttccttttacatgtacataaccaattctgtacagtcttcgttgcccaggatgtacactgcatgaacttctgtttacaattttacatgtacaccgatatctgctgcgcgagccaatactgttcagaaaaattttcagaacttcaggctgaagaaaggcttccgaggacttgtgctccagcatgaacagttttacctccacatacatggatagaattgcagaaatccctcttctcaaggaacttcttgatatattccattacgattggtgcattttggatgattaacctcttgcacttttgcacaaaattctctgcattgttgcatcctttcagaagtatctcaattatcttaagctccatgtctggatcttcaagattagtatctttgttttttttaaaaaatattggaaaaattactaatcagtaaaagcgataaaagtagtattacgtagggacccaccagcccaaattgacaaatgtccatatgaataagcaaatttttttaaggcaacatatgaaatatgcaattgttgctgaaatatcaaaatcctttctatgt

SEQ ID NO: 6726 - DNA, 1068 bp, Setaria italica
  Peptide Sequence Number=SeqID_72700
tttacttagtttctttttcgtttttgtttcccttaggttatttgtttacttactttgtctattgtaaccttctgtttacaattttacatgtacaccgatatctgctgcgcgagccaatactgttcagaaaaattttcagaacttcaggctgaagaaaggcttccgaggacttgtgctccagcatgaacagttttacctccacatacatggatagaattgcagaaatccctcttctcaaggaacttcttgatatattccattacgattggtgcattttggatgattaacctcttgcacttttgcacaaaattctctgcattgttgcatcctttcagaagtatctcaattatcttaagctccatgtctggatcttcaagattagtaacaatttcatcaacaacctcatggcaaagggtgcaagtatcttcatgtcttggcagacgaatgaatgttgcttccgcacaaaaacttactgatacgcagaagtcttcagggcttaaagaagcaatttttgtgaagaaaagcggggcataataatctaccaaccttgtgcactccagcttaaaagaaggaaactttgaacaagcttggtgcagtgtagcaatgatttcagtctgggtctcattttctttaagatagaagagggcttctgaggcaaactcctcgcaaagttggcataattgtggattttcgttcattgctggagatactcaccgtacatagcatcgtccaaagccaagcttgtagcgcaccaaagcacaagactgattagaaaagtaacttgaactctagtgatcattttgtctcgcgcgtttagaacagagtcttcggatggccggccgatggcagccgagagctggagggggccgacgcagagcggcgaccgacgaccgtgggtagggagaggggagtggcagggaggagagcagaagagacgtggatttgagatgattattaacggagacagagcgcggcgttgacaagctggatgtgtcgcctgatgtgctctccgccagctctcgcttcgctcgttaggattggttctgacttctgagccgcggagcacgc

SEQ ID NO: 6727 - DNA, 565 bp, Setaria italica
  Peptide Sequence Number=SeqID_72701
agttagactaggaagggaaggtaggaacggaaggaaagacgaccgaccggtaggacaattagaccaatagggtaggggaaggaccaactaggaagaccggacgtacgtacggggctggcgcggccacggtaggcggtgtggccgcaggtggcgatgccagcggaggtgacgtggctggaggtgttgcggagacgggaggagcggccgctactggcggagaggcaacgggcggtgacgtggcagccagctgcggggcagcggccgtggtcggcggtgcggcggaggatagtggcggagaggtggcggtggtagggggttccggcagagacctgtggcggcgaggcagcggtggtcggcggtgaggcagagacctgcggcggctgtggttgcccgacgcggacactgttgtcggcggctgcgcagaggcctgcggcgccgatgcggatactgttgttggtggctgtgcagtggcctgcggcgctgaggcagccgttgtcggtggcgccgcagaggcctgcggcgccgaggctgccgttgtcggtgccgcggcaggagggaggtcccg

SEQ ID NO: 6728 - DNA, 321 bp, Setaria italica
  Peptide Sequence Number=SeqID_72702
ggtggacggaggaagcgccgccggtggcattgccatgggtggggaggccactggagccggcgtcgtcggggctggcgcggccacggtaggcggtgtggccgcaggtggcgatgccagcggaggtgacgtggctggaggtgttgcggagacgggaggagcggccgctactggcggagaggcaacgggcggtgacgtggcagccagctgcggggcagcggccgtggtcggcggtgcggcggaggatagtggcggagaggtggcggtggtagggggtgcggcagagacctgtggcgccaccgacaacggctgcctcagcgccgc

SEQ ID NO: 6729 - DNA, 1173 bp, Setaria italica
  Peptide Sequence Number=SeqID_72703
gactcgtctgcctgggcgagagcgggccccggcgacagtgacgggctcaccgacaccgagctgaacggcgccaacgaaggcgctagcggggtcgccagctccggcgccagcatgggcgacggggtcggggcctctgtcggcgacggcgttggggcgacgctcggagccggggacacgggggctggagcgggagccgtgacgggcgtggcgacgggcgccatgatcggagcagcgagaagcggcgtcggagccgttgctggagggagggtggacggaggaagcgccgccggtggcattgccatgggtggggaggccactggagccggcgtcgtcggggctggcgcggccacggtaggcggtgtggccgcaggtggcgatgccagcggaggtgacgtggctggaggtgttgcggagacgggaggagcggccgctactggcggagaggcaacgggcggtgacgtggcagccagctgcggggcagcggccgtggtcggcggtgcggcggaggatagtggcggagaggtggcggtggtagggggtgcggcagagacctgtggcggcgaggcagcggtggtcggcggtgaggcagagacctgcggcggggaggctgctgtggttggcgccgtggcagagacctgcggcgcggaggccgctgtggttggcggcgcggcagaggcctgcggcgccgacgcggacactgttgtcggcggctgcgcagaggcctgcggcgccgatgcggatactgttgttggtggctgtgcagtggcctgcggcgctgaggcagccgttgtcggtggcgccgcagaggcctgcggcgccgaggctgccgttgtcggtgccgcggcagaggaggccttcggcgccggggctgccgttttcggtggcacgaccttcggcaccgagccgccgaccggaggcgccttcaacgcgggcggcgacgaggcgctgaccggaggagcgttcgacgcggacggcgacgaggccggcgactgcgccgcgcaggacacgaggaggagcgagaggaagagcgggagcagagccattgtcacccgcctccctcccaaaccacaactcgttctcctcccggtttcctctgtcttctcgctgggcacagaagctctttgctctcctctctgctgcctcgcctgtgtgtgttctgacctgagcagtgcg

SEQ ID NO: 6730 - DNA, 766 bp, Setaria italica
  misc_feature (78)..(78): n is a, c, g, or t
  Peptide Sequence Number=SeqID_72704
aaaaaaaactagactgtatgttatgccagtgaagttgaatgctggtgatacaaagaaatgaattctttatgaatgaanacttttttacctagtaacagaggacataatggatttttgttgagctagcaacttggactgatggtcctccttacttcaagctatttgagtgctgaagcgctgatattttttactgctcttcagtcaattatgataattgatgctgtcacttgtcttaaagcaacaggagatgctctctcctcctcattctgctgaagttctaagatattttggcacccctgttatcaagtttgggcttctacaacagctaactggttaatagtggcatgtctgcaaaggtgccaaggtactgtttcacatacctaagggcccaccattaatgagtacacagactttttaagttacatttttttctgtcattggacgtaattctctgtcattcatgatttgtttcagtcttgagcccgctcttgtttgattgaaacaagatattaaaatgtacttagcgcatgcttcttattgctttgttctaatagaaaggagtaaaaaaacaagttttggtttcaaaagcatgcattaaactggcatgctcatgcctgtccacaaggttatattatctgaagattcatatatagatatattaagcttcatgattgattgtcaatttttgtttgccaatttgactttaagattaacagtttgcagattttttaagtcgtgtacttttctatttctgcaataacagccc

SEQ ID NO: 6731 - DNA, 1538 bp, Setaria italica
  Peptide Sequence Number=SeqID_72705
cgtgccgcgggttcccccgagaaatcgcccggaaaacccccaccccacctcgtcgcctgctcttccccggagatccccaccgcatcctctgctcgtccccgcggctcccgcaatcgctgttgatcgcggcggtgagcaacaggagatgctctctcctcctcattctgctgaagttctaagatattttggcacccctgttatcaagtttgggcttctacaacagctaactggttaatagtggcatgtctgcaaaggtgccaaggcgcctagaaattacgtctagtggcatggcagattgggccactcttcaaactgatattgttggtctaatagtaaagaagcttgctgtccctgattacatcagatttcgtgccgtgtgcacatcttggaaccatgtctgcaaggatgtgtcatactgtcctagggtggacccatggctgatgctgcccccaaatcctaccccgcttggtgctcagtttttctgcattcccgagagaaagaatcaaaacatccgtctccctagcactgcgtcgttttttgaatctgtttgggcaccagttggttctttgaatggatggcttatctacttcagtcaaacttatggaaccatgcagctggttaaccccatcagtggcaggcagatccaactccctccaataggacgcaggatcttctctaaggccaagttgcttgaaatgaacgagaggaactttatcgttgctgtcctctacggtgaccagaaaggttataaaataacacgaaagggatctaataactggtcgtcggtcgaatcaacacacattttggatgacatcatcaagcatagaggtcggttgtacacgtgtgatatgtatggtacggttgaggtgtgggctgagccgccccgtgcatggccagatgaggagatgacacatcagtggaggtttcgctgtctcgtggagaccccagctggtgatctgataagggttaagcgccagagtcagaataagtttgctgtttggatattggacaaggggtccttttcctgggttgaaaccgataacattggggattttgcactgtttgtgagccactacaactcgttctgtttcctggccaaggaccaccccaacctgaaagcaaactgcatctacttcatcgacatccacaacaacctgtgcgcgttcaaccttgagcatggtacaaaggagcttgtcgaaacccttgcaattggcctggaccgcaatgactactaccgtcgcccccagcgagaccagctcttatggttcatcccttcactgaaataaatagccaatagtgaaaagttccgtggccgtttatcccaaagtggagctcatatggtatagtaggctccagtggcttggaattccaaagtattggacgttctggtatgcatagtactagtgttatacggagtatgtctctgaactcctaagtgttggacataatcatggtagtttgttgctaaaaattgtgtgaacatttgaacttttcaaagctgtgcgtatcgtgtgtatgaacttggaactttatttcag

SEQ ID NO: 6732 - DNA, 1238 bp, Setaria italica
  Peptide Sequence Number=SeqID_72706
ctcatgtgaacagcaacatatggtacaggcagattcgttgagccatctctcctctgcttactatgagaaaaaccaagcttcatgtcttgctctttggccagcctctctaatcttggatatgaccttaaccacttcagtttctatctcaggaactaagacaagacaatcaaagattttggcatagtctttgactggccaatggtcaggccacagaaacggatgtttcccaacgatttcaatgacttcaaagtcgtctgccctgccccctatgaattgctgcagttgatccaagtctctctccactgtccactttctaccactccccttttggagtttgaaaggttcagttcgattagaaacttctgaataccgagctaactttacaaaaccatgacaacgcgcattgaacttattaaagtcaaacaccttgtcaaaattgataggctgcagcaagtcaacctctttgtagaagagtgaagcactcaggcttggcatgagaagagatctgttcaggaatcttgcagtcaagcacgctctggcgaatgctatcttctgattgttcaatccccatataatctgtgggacctcaacaaacttgtctcgtctaattccaggaagcaagtcaggggatgttgactcataaaattcttccttctcagatgagtttatggcaaaaaatggagataaaattgctctcaatataataagagcaatcactatcagaaggcctttgcagatgacaggccttgcaggcaagcttaagagcttgagatgcttcagctcaagtaggatgttcattggaacgcttgttcaaatccttgtcatcacaacgagtcctattatgtcactaccaacgcccgtgctgaactgatatcagcagacttgatggtgtttttccatgatcaatttagcacatgatcgatccaagtggcaacagtacaaattagcacggatggatcccaagggggctcggcgaggaggaagagcaggactcccctgccgttgcgcgcacccaacgcgggtcctgtcgctggcgacaacctctccgccccacggcgagctcgcccggccccagcggggagaggcggagtgagtgaccaacgggtggcggaggaggcgcccgatctaggtggggtggaggcgggtccggtgctccgcggcgcgacggcggcgggggagagccggcagctgtggaggaggcggagatcgcaggcggtgggggtggggccttgacgtcg

SEQ ID NO: 6733 - DNA, 267 bp, Setaria italica
  Peptide Sequence Number=SeqID_72707
ggtggattggctgtggagttggtatgggccatggttttggaataggaattgcactgaagccacgagtacttcatggaattcagtcatcttttggggaaataatgtctaaattgacgtcaaggctaaaggatagccctgagatgccgtctgcatcgaatcctatggctcgttctttgtctagcaatcaacaaactcacgatggtatgcccatggatctagaggctaagactgcagaaagtaatttgaagaacactacaagttatgaaa

SEQ ID NO: 6734 - DNA, 497 bp, Setaria italica
  Peptide Sequence Number=SeqID_72708
cctaatctggttgattccgtactaatggaaaaatacaaaggtgcaaatcttggtgacctggatcctcacgtatttgcaatgtctcttacaggttacaggcaaatgataaatgaaggaaagagtaactccattttggtcagtggtgaaagtggtgctggtaagactgaaactacaaaattgctgatgagatatcttgcattcctgggtgggcgatctggaacaggagagaggacagttgaacaacaagttttagaatctaatccagtccttgaagcttttgggaatgcgaaaaccgttcggaacaacaactcaagtcgatttggtaaatttgttgaaatccagtttgacaagagcggaaagatatctggtgctgccattaggacttacttgcttgagagatctcgagtctgccaaattaatagcccagagagaaactaccattgcttttacttcctgtgtgccgcaccatctgaggatcttaagaagtataagcttgg

SEQ ID NO: 6735 - DNA, 239 bp, Setaria italica
  Peptide Sequence Number=SeqID_72709
gagaggaggacgcgtgccgaatctgccacctccccgggccgaggcggacgcgccccctgcgcacccctgcgcctgccgcggaagcatcaggttcgtccatgacgattgcctgctccgatggctcgccacgcgacgcggcagcagcacggcgtcggcatcatccatatgcgaggtgtgcaagcgcgccatctccatcgcccccgtctacgccgcaaacgctcccgccaggctgcccctcc

SEQ ID NO: 6736 - DNA, 304 bp, Setaria italica
  Peptide Sequence Number=SeqID_72710
aaaaataaaataacacaccccccgcccggaagcttcctctctttccttcgaggccaactatggccgacgcggcggcggccgctcgtctcccgcccggcgaagaggaggacgcgtgccgaatctgccacctcccgggcgaggcggaccgccccctgcgccacccctgcgcctgccgcggaagcatcaggttcgtccatgacgattgcctgctccgatggctcgccacgcgacgcggcagcagcacggcgtcggcatcatccatatgcgaggtgaggtttccggctgtattgcaagcgcgccatct

SEQ ID NO: 6737 - DNA, 559 bp, Setaria italica
  Peptide Sequence Number=SeqID_72711
cttgagccaaccaacaagacactcgcctgttattcaaagatctacccgtgctccagccaaacactcgcagcgagcggcaagatgaagcttgttggaggccagaggaggcagagggggttcggcaaggccctcaaggagcagagggccaggctctacatcatccagcgctgcgtcgtcatgctcctgcgctggcacgactgatcccaccagatccattggagaagcttcgtctatccgagtccgacgacatggatcgatcggtgggatcgtctttgccctgcccctgatgcttcatcgggtgccaaagttttggggggtgttctgggtttgtctctgtgctggtgccagaatggtcgccggctgctgtacatagagggacagggacaatatagcgtagtagtacaaattagaggtggtagcagtaggattcactgtggtgttcgtcagtgtctctccccccctgataactagtgtgacaatgtacaatcacatcagtgtggaatgccaaatcaatgaacagagaacaagcaacggatcgatcacaaataaaaaaaaaaaa

SEQ ID NO: 6738 - DNA, 449 bp, Setaria italica
  Peptide Sequence Number=SeqID_72712
actaatactttagaagaaaagttttagaacaaaagaaaggttagacttgttgcttgcacaaccccttcctggctttcgacaaatgaaaggagggaaaactccagatgtaccgaaagaagtagctctacacttgattggtccatcaaaagtgaagaaagaaaccatcaagaaaattataaattgcaccgttgctgagtatgttcaaaaggagggcctgactgcatcgaagaatctgaaagttgagcaaagctatgaagagcttgaagcagcatttgaaccgggaaaagaattttgctttgacgccatggttcaaattacaataagctgatgcatcaagggtatgctacctagggatgacctctgccactgcaaggcgacacctgaacctccgctgatcaccagccgctttcaccattacaaccttatagatagttgttaagaatgctttc

SEQ ID NO: 6739 - DNA, 761 bp, Setaria italica
  Peptide Sequence Number=SeqID_72713
tttaactaaagttaagttaagttaaacttaagtaaagtaagggttaggttacttagaataaaagataaaagtaaatgtatccggtacaatgacagattctatctttgagaaagttttgacaaagaaggttgctgctgcacaaccccttcctggctttcgacaaatgaaaggaggccataggaacctaacactgcctacctttgttggcattgtcttccacatggtgctaccttaatcattcagggaaaactccagatgtaccgaaagaagtagctctacacttgattggtccatcaaaagtgaagaaagaaaccatcaagaaaattataaattgcaccgttgctgagtatgttcaaaaggagggcctgactgcatcgaagaatctgaaagttgagcaaagctatgaagagcttgaagcagcatttgaaccgggaaaagaattttgctttgacgccatggttcaaattacaataagctgatgcatcaagggtagtgctacctagggatgacctctgccactgcaaggcgacacctgaacctccgctgatcaccagccgctttcaccattacaaccttatagatagttgttaagaaatgctttcaggtgaagcaaaagtaggcaagatatcattttttgtctggtagatatcttgtcatttatatgcatggcaggaggacatgttctcatatttcttatgtaataatgttctcatttataccatgaatcaatacaactaattgagaagaaaaagatttataac

SEQ ID NO: 6740 - DNA, 266 bp, Setaria italica
  misc_feature (3)..(3): n is a, c, g, or t
  Peptide Sequence Number=SeqID_72714
cgngcccgatgctgcacgcctccctcccgcacggcggcgccgggttctacggcaactgctactacatcatgcgcgtgtcggcgccggcggggaaggtggcgggctcctccgtcacggaggtggtcaagatcatcaaggacgggaagcggcgcatgccggccgagttcacgcggtgggcggcgggggagatgggcgccggcggcgtcgacccctaccagatcacctccgactaccggacgctgcttgtgtccgactggacgcggctc

SEQ ID NO: 6741 - DNA, 1939 bp, Setaria italica
  Peptide Sequence Number=SeqID_72715
gagagagagagagagagacgcccgccctcctctctctcctcccacctcccctcccccgccccacttccggcgagccagccatggagccggcggcggcgaagacggtggaccgcctctcgcagcgcctggtgccgccggcggagcccacccccaccgcgccccaccgcctgtcctggctcgaccgctacccgacccagatggcgctcatcgagtcgctgcacgtcttcaagcccgacccggcgcgccacggggtcagcccggcggagaccatcgagcgggccctcgcgcgggcgctcgtcgagtactacccgctcgcgggtcgcctcgccgtgtccgaggacgccggcgggctccacgtcgactgcagcggcgagggcgtctggttcatcgaggcctccgtgcggtgccggctcgaggacgtcgactacctcgagtacccgctccagatccccaaggacgagctcctcccgcacccgctgccacggcccagccacgaggaggagaacaagctcatcctgctcgtccaggtgacgacgttcgcgtgcggtggcttcgtggtggggttccgcttcagccacgctgtggcggacgggctgggcgcagccaagttcatgggcgcggtgggggagctggcgcgcggggcggaccagatctcgccgcccccgacctggggccgcgacgccatcccggacccggccggtgcgcacgtcggcagcctccccgagctggacggcgccaagcgcctcgagtacctggccatcgacatctccgccgactacatcgaccacttcaagtcccagttcgccgcggcctcgggcgggggccgctgctccgcgttcgaggtgctcatcgccaaggcatggcagagccgcacccgcgccgccgcgttcgacccggacacccccgtccacctctgcttcgccatgaacgcgcgaccgctcctcgccgcccgcctcccgcgcgccggcgtcggcttctacggcaactgctactacatcatgcgcgtctcctccacggcggggaaggtgtcctcgtcgtccgtcaccgacgtggtgaagatcatcagggaggggaagaagcggttcccgtcggagttcgcgcgctgggcggccggggaggaggccggcgacccgtaccagatcacctccgactaccggacgctgctggtgtcggactggacgcggctgggcttcgccgaggtggactacgggtggggcccgccggcccacgtggtgccgctgacgaacctggactgcatcgccacgtgcatcctcgtcaagccctgggcccacaagccaggggcacggctcatcacgcagtgcgtgacgcccgaccgcgtcgccgccttccacgacgccatggtggacatgaactgctaaggccgcacacctccacttgttcatggtttttttttcctcttcgattaccgcggtaattagcagggggtaagtgacattaaacagccttctgctcccggtgatgaagagcaacagcaagaataaagtaagaaagtgacaacaaaataatgataaaagtacatagagccaggtatgggggactggtagacagctagatggtagttggcaatagtgggattggtattggattcctttatttcctttggatgtcttcttcttttgttggtggtggtggtgggaggaagtgtgtgtatacatgtcctttttttcttcttctttcctttgttcagttcttggggggctttgattgaaggaatgatcaaagctggacttggtgggaagccaccaactaatctcccccataaatcttaatataaagatgttaattagatgtcatgtattatagtatccaattttttcttcttcttttgtcgtattaataacaacaaaagtaacaaaacaaaagtaaagaaaaagtaaaaacaaaaagaaaacttttaaaactaaaaaaaaaaaaaaaa

SEQ ID NO: 6742 - DNA, 405 bp, Setaria italica
  Peptide Sequence Number=SeqID_72716
tttttttgaaagcaaaagcttgaacatgttttcgaggaactatcctattgctacaacaataggttgtttctagggacaaaaggaaacatatgcagcaaagacacagactaaacatcttgtaacggcaaacagaggaataacatctcccgatcaagttcagctcagttagctttactggttcatcatatcaaccttcgccactatatagtctgatatcaacctaatagtttctgtagtagacgcccccagtcaagatagtgaatttaattacatgggtccatagcagacctgcatttctgaaggacagcatgtcctatatcgtttcgatatctcttctaacagcatcgttggtctgccaatcaaagtaatcttgtctgccaacttcatttgtccctaccctttttt

SEQ ID NO: 6743 - DNA, 641 bp, Setaria italica
  Peptide Sequence Number=SeqID_72717
ttgtaattttaatttactattgggttcctattagtctagtaccttgtctattttcttgaaggaacagcatgtcctatatcgtttcgatatcgcctctgtgtgagtagttggtctgccaatcaaagtaatcttggtctgccaacttcatttgcccacctttttcccttcaagtccggacagagaagaccgtaaacatgcctctgtcattgaaattcctctatcaacagtaaccaattcatatagaaggcagcgatagtgatggggggaaaccacaatataggtaggcttcggtgacagtgagaagagtagtccgacagaaactcccaagctgcatggtcttgacatcaagcgaatggtattcaatatgttgctcactgtggtcattcaggttctccttagggtgatctagttttataaataagtatccctcagctgcacctatgatgcctctaaatcgatatccccattcctcaggcaaggtgactctgttcagaagctgccaccggtcgctaaaatacatgaatgcataaaagtacagcacacatcttttatctggccggaacacatcagagaccacaacagtagtcctgccatcaacttagaaactaaccaaagaaagtaaaataaaatactagaattaa

SEQ ID NO: 6744 - DNA, 661 bp, Setaria italica
  Peptide Sequence Number=SeqID_72718
gtggggactcatgcactagcaccactaccgtaccactgctaagatttcaggtgagctcatcagtcgtagctcacaccgagccccttcttctacggcagttagctctccaccggtgagaccgccatggccaagctcgccgcgcagctcaaggacaagttgttcggcctcttcggccgcatcaccagctgcggccgcgcccacaaggacgccgctggtgcggcggagccaaaatcggtggcatctcagcatgttgagatcaggtcgaggggaggtgctccaggcggcgtgaatggagggtccaagagcatcaacgatgttgacatctagaggaggaagatgagaagctagctagtatagtagcagctagcccatggatggtgattcctcctcattcccaagcgtcgagcatcctgtaacaaatcatcgatcagttgctcggtcgtgttggtccttcgtgtcactaatagctatcattttcagtttctagtagttgtacgtgtttgatctgctctcgatctgttccaggctatgttgcgtcgtggtggtatggtactactgtaactctgagtccttcatgtaatcatgtcaatggtgtgtggtcttttgcaaattaagcagtggatggtgcgttgtgatatgcattattagtagattgatatct

SEQ ID NO: 6745 - DNA, 609 bp, Setaria italica
  Peptide Sequence Number=SeqID_72719
caggtttctaaagaaacaatcagaacttctgttgaatgctgatgatcttgatgcaatgtgggcatgtcacgcaattgtgccaaattggggatgagtcctcttatatatgcttccatttcatgaggctgaaggaaaccatcagaatcttcatccagttcactcatatcaattcttgcttgagtaagagaaaccgtccgcataacataaagataaaacggtaggatggcaatcctcccagaatcatccttctcaaacttcatgaagtttgaagggctgaagaacgtttgctatttctgaccaatctgctccgtgcagactgtggcaatatggcagaaatcttcgtaattcatcttttcagcaccagtggcatcatcaataacacaattttctcttagacaaacccacattgcatcaagatcatcagcattcaacagaagttctgattgtttctgtaattggttttgaatggctcccataaggtataagtcgtgagaaggaaaatgccaacgaaataaagcttccaaacaaacacatgacatgtctccaaatcaaaagaatggtcgaatgtcacctttagaaacctgtacttggccaacctctgaactctag

SEQ ID NO: 6746 - DNA, 1765 bp, Setaria italica
  misc_feature (12)..(12): n is a, c, g, or t
  Peptide Sequence Number=SeqID_72720
tttttttttttntttttttttttttattttttttttttttttttgcacgaacataatacagcgtattacttatatagttatataggcttacatgcgcaacgcgaaataaaaattgtccgcttggatgtacatacaatcaggccctccaggtacatgtccatacggccaaacagactagcctcaacacgttccaaaaaccactacagaacacttacaagttacggggaactggtagcatattgatccagtacactatcaaggttacagacttacagtaactgatacagcgcagttgtgagaacttcgggactgcgaggcagcagataggattacttggcatctggtgagaaactcatgcctcttccacttgctcttcctcttcctggagaagattctccctgttgtcatgggcccagaagccgcgcacatctataagcatgctggcgatagtaccaccttgtttgcaagaaagcagatctgatagcgagatcctgagaggatctgccggcttcaccatgtcccagatttcatccctcacgtcctcaatgcaaagttcatagttcccgccctcgatccatttctggtgtacatctctaaacagagtgtggatatctgcagttgtaaggaacccccttccattaagatcaaggcatctaaataaatatgtcaagccttcagcagtatctttgttttctagagccaaaacaaaatcaagaaagctttcgaagtccatctcccgactgtttccacctccaactttgctccggcggacatgctcatcaaaaactctttcaatgaaaatctcagtcaatgtgccatctgcatattccttgagctcttgtttgctcagtgtaccattttgatccttatccagagcaagaaacatatcacatatgcgctgggctgaagttaaggaaaaccaattttctgcctgttcagtgtcagttacctcttcctcgctctcctgatgtagttccattagctcctgcagacaattactcagcaatactttctttatacatgctttccctcgtctgtgtggatcacagaagaaaaagaacttgcgtgcagctatgcggcagtacatttgaacaaattgggtgggcatgtcacgcaattgtgccaaattggggatgagtcctcttatatatgcttccatttcatgaggctgaaggaaaccatcagaatcttcatccagttcactcatatcaattcttgcttgagtaagagaaaccgtccgcataacataaagataaaacggtaggatggcaatcctcccagaatcatccttctcaaacttcatgaagtttgaagggctgaagaaacgtttgcatttctgaccaatctgctccgtgcagactgtggcaatatggcagaaatcttcgtaattcatcttttcagcaccagtggcatcatcaataacacaattttctcttagacaaacccacattgcatcaagatcatcagcattcaacagaagttctgattgtttctttagaaacctgtacttggccaacctctgaactctagagctaatggatccttcttcaggtttcttcttgtaaaaacttgggatggaaccagcttcagcactctttcgctgccgctccttgaagatctccagcaatatcctttttgtttccagttccatgagggcctcggatccgaggccggcgcccgagccgacgaagcggcgtagattgcggacccacggcatggacgagggcggcgggatccgcgtcctaccgaagacgggagttcctta

SEQ ID NO: 6747 - DNA, 326 bp, Setaria italica
  Peptide Sequence Number=SeqID_72721
aggttttttcccctgtggactcaatagcgttctccggttgttgtttgatttgattgacgagatgcctgcactcgccgtcgacgccgcgacacctgtggcgcacgccttcgcgtcctgcgacgcggcgcgcttcccggccccgctcatggcggtgcccacctccgccaccgcagcggccgacaaacccgaggcggccgccgggtcggccgacctctccgcggcgctctacaacgtggacggctggggcgccccctacttcttcgtcaacgacgacggcgacgtcgccgtgcgcccgcacggcgccgccacgctgccggggcgaggag

SEQ ID NO: 6748 - DNA, 1602 bp, Setaria italica
  misc_feature (252)..(252): n is a, c, g, or t
  misc_feature (1577)..(1577): n is a, c, g, or t
  Peptide Sequence Number=SeqID_72722
gggcgccgccacggaggtgaagctctccccggctctgcccctggccacactgatcggccgcgagctccgcggcgacggctccgagcgcccgctcgtgcggtacggccactccggcttcgccaagcgcggcgaggactacttcctcgtcaagcccgactgcctccgcgtcccaggcgacccttcctccgcgttctccgtcttcgctgtgttcgacggccacaatggcgtgtcggcggcggtgttcagcaaggngaaattgctggagcacgtgatgagcgccgtgcctcagggcatcagccgcgaggactggctacaggcgctgccgcgcgcgctcgtcgctggattcgtcaagacagacattgacttccagcgcaagggggagacttcagggacaacggcgaccctggttgtggttgatgggttcacggtcaccgtggcttcagtgggagattccaggtgcattctggatacacaaggtggcgaggtctcgttgctgactgtggatcaccggctagaagagaatgcagaggagagggagcgggtcacagcaagtggaggggaggtcagccggcttaatctctgtggaggacaagaggttggtcctctccgatgctggcctggtggattgtgcctttcaaggtcaattggggatactgatgtcggcgagttcattgtaccgattccacatgtcaagcaagtgaagctcccaaatactggtggaagactaataattgcttcagatggaatatgggatgctctgtcctcagagactgctgctcaggcatgtcggggattgcctgcagaactggctgcgaagcttgttgttaagcaagctctgaagactagcgggttgaaagacgacaccacatgcgtggttgttgacatcattccatctgatcattgttcaacaccaccagcattgtctccaaagagaaatcagaacatgttgaagtctcttatttttggtaggaggtcacatagttctgtcggaaagctcagcaaatctgcttcattgagctctgtggaagaaatatttgaggagggatctgcaatgttggaagaaaggttgggtagaaatttcccatcaaaagctaatctgcctcccttccgctgcgctatctgccaagtggaccaagagccgttcgaaggtttaatgacggacaatgtaggtggctgctgctcagccccatcaacaccatggggtggtccttatctttgttcagactgtaggaaaaagaaggatgcgatggaaggtaaaagatcaagccgctcaacaacgtgcaggtgaaggtactgataggaaaccaccgggtcctgtccatgccaactagtcttcgatttcggttttctgctgcttgtaaaaagagaagaataaaccgtttgttgtttgatccaagtattgtgtggtgaaactaactgcactccagcctgaactgaaaaaattgggggtaactaacaagcctggtttctatcaacagtgcggatggcatttttcgttgctcagagaagatagctaacaaacttgaagcctttagtattgtgaaccctaacatgtaaagagaaatgagtagcctaanaatgtgtttgataacgatggcacgg

SEQ ID NO: 6749 - DNA, 577 bp, Setaria italica
  Peptide Sequence Number=SeqID_72723
ttctagactagaaactttgcgcctgtaagaagagatctcagaatgtaaaccttcaacttccttttcaagttttaactcacttgacctcagtttcagagccttatcttctagtagaattacttcagctgcaagtacttttgccctctcatctgcagcactgcattctagttgggcattagcatattcagtcctgacagactccagagccagctggtgtacaaatagggttattacagggattaacagtataagaagatggcaaaaatgacaaaaactaaatagtaaatagaaatactaatatataacagcactaatcacagaaagtacgcttaaactaacagagacaccactgaaaatttaaacataaaacaactgacctagtgaactgtttcaaagcaaccagttgtggtgagtttaaaatcagtacagtttatcagcatgcttcagttcatgaccatgtcaagcaccaaaaaacaacatttttgcatggcatttacaaacatttgaaagtaaatcattcaataggtcctaacttgacagtagggcagtttttttgttttggtggtggagtagggga

SEQ ID NO: 6750 - DNA, 301 bp, Setaria italica
  Peptide Sequence Number=SeqID_72724
ctgaccagcactgtcgacacattggaagatgctggaacatcaattttgaggtccaacaatatgtctgattttccctctttagaagaggtctcattagccatcctttgagaagtcaatagctcaagcttctgtgtctgcatctccagcttttgtgttaggtccttattcaactccttcagcttggagcagttggatgactcgattctcagtgcccgcagcagctcttctctctccaccgctaactctgacatcaaggaattgatgttgtcaatcattctaagctgatcatccggaatgctgg

SEQ ID NO: 6751 - DNA, 503 bp, Setaria italica
  Peptide Sequence Number=SeqID_72725
agaaggtcgcgcttgagctcctgcttgtacccgagctcccggaggcgcgcgaggccggtgtcgtcgccgccgacgttgacggccttctcggcggcggcggcgccgtcggccggggccttgttccacgtcatggcgcgcgcctgcacgttctagcaatcacacacaccgtgtcaccgtcgccgtgcagtgtgccgcggcaggctcgcgcagggagatgatgagcgcgggggccaagcacccgttcgacaacctcatctccttcatcagcatacattgtcgcatcattgatggagcgagtatcgattgggccaggacattctcagccatcctttgagaagtcaatagctcaagcttctgtgtctgcatctccagcttttgacggggagagccgggaggagggggtacttgaagaaggaacgggatgggcgggaggatggagatggagtccactcactccagggcagggcagggaggggaagaaaagaaagagaggcgcggcgggg

SEQ ID NO: 6752 - DNA, 2161 bp, Setaria italica
  Peptide Sequence Number=SeqID_72726
tgtgtcgacagtgctggtcagcgtttctgaagaactgatttccccagtatctaaatccactgtcgcagttgatgcatctcttttatcagctgaaggtttctctgtagcagctgttgccttttcattcacaggaatgttcctcaatttagagtacaagagcttcttttcttcttgaagagcttcaacagtagattgaagatgctggcgctccttttctagactagaaactttgcgcctgtaagaagagatctcagaatgtaaaccttcaacttccttttcaagttttaactcacttgacctcagtttcagagccttatcttctagtagaattacttcagctgcaagtacttttgccctctcatctgcagcactgcattctagttgggcattagcatattcagtcctgacagactccagagccagcagttgagcttgaatttcttcctgcaatctctccatgtcagatgtcaactggctgattacatgtgcctgttgattgaacttatcagttagtgcagagttatctgtggccaaattctccgctaattcttgagatttctgaagagtacgttgcaaggaaaacttctcttttgtcaaatcttcgatgagctgctctagtgctgcaaaatcatcatctttccagtgagttgtgaagttttgggatgtttgattgcaatgctgtatacttctttcttctttgaaaagcgagaaatcaggaggggtggggctgccatatgaccctttttcgtgtctatattcctgatttcctgatgtaagagagttatctgcaacattacttccagtggattgttgatttgattgctgcaaaaatgaactctgataatttgaattgccggatagttgattagcttttgcaggctccccatacgaggcttgagttgttggaggggtcctttgtactccgatcgaatcaagaaatgatggccttgatcgagtgtatgcagttggataaccagatgacagaaaaggatcctgtttttcaaaattaacaggtgtggaatccgctgcattccaagttccaacatttgtatcatgatctacactatcagtaatcctagaactactgaaggtattgccataatccatactgctggcatacacagattgttccactttggaagagtctttggaggtagctctcaaccgaccaaagaggtcattgcttgtggagtaatcctgagtgtaagcactttcagactttccaaaaatggtgctggatgagtatgaactagattgctcggtatcacgtacttgatctgataaagaatttcttccccaactcggcaaggtgttggtagaagaaggtaaactcaaactgtttgtgttcccaaagacacttaatttagatgttgattgcacatccttgtcgggactgtgctcgtcccttttaagggcagcgtcacctctccaattctcatgatgaccattaacaaggtcggagaagctcaagttcccatagaacttacttcctacatcactaacaccatcttgctggggtgtaacattactaaccccagctgaagcatttacactgacaggaccatttgacagggattctgcacctctggaagaacttgctgagccactctcatatacagcagatggcacagaagatgtgctttcttggtttggctctacatcagacaccagcccgtctcccgagctagctgtactggcaattggaggggggttctccactacatcaggagcaggcggttttgctggctctgcactagctgctatggcagtggccttctttgctgctttcttcttgcggaactgctcgagccgcttcttcccggcctcgagatgctccttgcgcgacggggcggaggaggaggagggcgcctgcgccgacgccatggctccccggctcccaccaacgcagcccggcccaaatctcggcgagatctccccgtccccgaatcgccggtcgcccccggccgccgctgattcgatcgagccccggggaggggggcgcgagatctggcgacgggatcggggtcggggtcggggtcgggattgggggatttgggatgcgcgctgcgcagcttccaaatcccgctccggcccccgaacgtttgggccttcgcctcctcctctgttggctgttgctattcttttttggtgcgtcgccgtg

SEQ ID NO: 6753 - DNA, 1157 bp, Setaria italica
  Peptide Sequence Number=SeqID_72727
acaaatggatttattctttgcggctgttcttttcattgccagtacaaggttgcagctccgtactgcaagtcagcgtacatttcattttctgtagaaaaaagaatggttacatcgaatggctctaatatacagcttctcacatctcaccatgctatcagcaaaaccgggcaaacaaaaaaattatataagggcatgtttggatagaggggatttggattcaaatccaaaggatttagttcaaatttgaactaaatactaaagctcctagagcaatccctttcttctaaacaggccctaatcaaagaaacatctggcatactaggacctctatttccattatagaagtttgctggtacgccgcttgggccctcctgggaagagcttcattatccagccaagcacccgttcgacaacctcatctccttcatcagcatacattgtcgcatcattgatggagcgagtatcgattggttttgccaggacattctcattagccatcctttgagaagtcaatagctcaagcttctgtgtctgcatctccagcttttgtgttaggtccttattcaactccttcagcttggagcagttggatgactcgattctcagtgcccgcagcagctcttctctctccaccgctaactctgacatcaaggaattgatgttgtcaatcattctaagctgatcatccggaatgctggatgagacctcttctaaagagggaaaatcagacatattgttggacctcaaaattgatgttccagcatcttccaatgtgtcgacagtgctggtcagcgtttctgaagaactgatttccccagtatctaaatccactgtcgcagttgatgcatctcttttatcagctgaaggtttctctgtagcagctgttgccttttcattcacaggaatgttcctcaatttagagtacaagagcttcttttcttcttgaagagcttcaaaagaaatacagataggtgtatcagtgcatgaggctaaaaaggggccattaaagtgcatgcaagatgtaaacacaccgaataacagaaaaggaaaattccagacgttaactagggaaagaagagaacaagaacaatatatgtgttagattgcaatgaaaatacgtaactagggaaagaagagaacaagaacaatatatgttg

SEQ ID NO: 6754 - DNA, 449 bp, Setaria italica
  Peptide Sequence Number=SeqID_72728
aacatcatcccgcccatcccctctcctcttcctcgtcccctcctcatcgctgccatcgtccgcgaccttattgtttggcttgaccgccatctgctgctgcttgggcgtgaccgccatttgctgcttcttgggcgtaagcagcttcggggacggtggaggtgtggggtgcgcgcggttgaggacgcggagcacgcggctcgggttgggcgccacggagaggccgctgagggagacggcgggcgagaggcggagggcgtggcaggcggcaggggacggcgggaccgcgacgagactcgcggccaagttgagaagaccgtggaccctgcctgaggggcggcgcacaccgaccgcgaacatggagggggagccaacggggcggcgcagaaggcggtggtcgccgaggaggaatcgcgcggagcccacgagcgagtccccacgaggtgccagga

SEQ ID NO: 6755 - DNA, 308 bp, Setaria italica
  Peptide Sequence Number=SeqID_72729
gttttccccttttatttttccgttttcaagccccatccgccgtcgcgacgagcgaaggagaagcacgggggagccagccccagccgccagccatgagccaacccgacttctccccgtcgcagttcacctcctcccagaatgccgccgccgactccaccacaccgtccaagatgcggggcgcatccggcaccatgccgctcaccgtgaagcagatcgccgacgcgcagcaatctggcaccggcgacaagggcgccccattcgtcgtcgacggcgtcgagacggctaatattagacttgtggggatggtg

SEQ ID NO: 6756 - DNA, 542 bp, Setaria italica
  Peptide Sequence Number=SeqID_72730
tattcttcctagccttttgtatttctagtggatgatgagttcccttattctgggatcttctccctaactgatactgaccaactattggatgcggttatctccaatgtcaatcctggtggtaagcagatctctggtgacagtgcctcttgcaagacttcagtgacagatattcctagcagttcctattgtcgctcaaaagagccaaagcgttgtgaatcatctgttgctccttcttcgctaatcaagaatgaattggctgtttcaaatttggttaaacagccatctttcctagaaaaggcagatgacggctgtctttcccaaaataatggaatacacaaatctcagatacgcctgtggattgagagtggacagaacatgaaatgtgaaagtgcttcagcctcaaacagcaagggcgttgatacatcaagcaaggcaagtcgaaagagatctcgaccaggagagaatcctaagctgacggtcctttggtcgtggcttaggatggatcgtataaaggagctccgagaactcgtactatggggcaa

SEQ ID NO: 6757 - DNA, 2362 bp, Setaria italica
  Peptide Sequence Number=SeqID_72731
tagaatagttaaggtttaataacaaacaaagcaatcctaccgtgacagtcgacttggaactaacacacagagtgttgctatgagctcaggtttgatctcccctagcttgacctcggtgaaaaagcagtcacttttgatgaatggcattggagagttagagttcagtaacaatgcacattcatcagcagatttggctagaaatgttattttgagatcccttgtgcaccaggacccttctgcctgtgagaatacaaatatcaatatacatcgtggaaggtatgtggtatccaatgatagaaatggtcatggggattttgattttctaactgtaggtgctagatcaagtggggctaacttatgtaccagtgttccgagtcaagtattggaccacacttcaggaacattgcagcagaaacaatctcaagttctgtccaaggttccccaatcttctgaaatatctaagaaaatggcaaatcctgaaagagggtcatttcgagttccttcagctccagcttctgaatctgatggccaggtttctagcagcctgaatgtgggccaagagaatcaattaagtaggtcaaaccatttacgacctgaccaaaatattaatagagttaatgatccaagcgctaatgtcagcacacagggaatgaagaacctggatgtatgcgagctcccaggaatgcccagcgagagagcttcctcattgcttgtggagcctgctgcagataatgacttgtttggtatgtttggtgctgaatttaatcagttcacccacagtgtgggtgctgatttggtcagctggagtggtgcagagtctcagaattcagatagaaatgtgcctgaaccatcaacatatctagataactcacccctcttcagttcactagacactgagcttcactgttctgggatgttttcactaactgaaactgatcaactattggatgctgtcatctcaaacatcaatccaagtggcaaacagtgtcctgatgatagtgcttcttgcaagactgcattgacagatgctcctagcacatctcatcttggtccaaaagacttgaagcaatgtgagtcctccggcgtcccttcagtgctaattaagcatgagtcagtgcagtttgttaaacaaccatgtttctttgagaaacctgaggatggctgtctttcccaaaataatggaatgcacaaatctcagatacgtctttggattgagagtggtcagaatatgaaatgtgaaagtacatcagcttctaacagcaagggtgttgatacatcaagcaaggcaagtcgaaagagatctcgaccaggagagaatcctaagccacgaccaaaggaccgtcagcttattcaggatcgtataaaggagctccgagaactcgtacctaatggggcaaagtgtagcatcgatgcattattggagaagaccattaagcacatgcttttcttgcaaagtgtgacaaagcatgcggacaacctcaaggactctaatgaatctaagatacttggtggtgagaacggtccgcttaaagactacttcgaaggtggtgcaacttgggcctttgatgttggtagtcaatctatgacatgtccgatcattgttgaggatcttgaccggcctcgtcagatgcttgtggagatgctttgtgaggataggggtatcttcttggagatagctgactttattaaaggattaggattaaccatcttgaggggtgtgatggaagcgcggaaaaataaaatctgggcacggttcactgttgaggccaacagggacgtgactaggatggaaatcttcctctccctaatgcgcttgctggaacctagctgtgacggcggcggagctggagagaaccctaacaacgtgaaagtgcctcttggagttgtgcaatatcctgttatccctgcgacagggcatcttaggtgagcaagggagcgagtgcaaatgtcaccggaggcatctttgaaatgctaagagcacgaggttaacccacttctgccatgactagcattgtcaacccacgacgagctggaatctcatgacatgcagcgcatcgtccctgcagtgtgcattcggaaagcctaacagtagacgacgtacgagacaaggatagtttggttcggcagatgatcattaggcgatcgatgttttggttgtacaatcttagttctgtttctcgctaatgcttttgttttttcttctgcatattagtgaattttgtgatgttcttctagtgaatggaaattctgagttgatttgtaggccttgttctggtaaccgactcagaggtcggagctcgtagtttcatgagagactagttttacttccttaccaaattataaggctctattacattgccct

SEQ ID NO: 6758 - DNA, 396 bp, Setaria italica
  Peptide Sequence Number=SeqID_72732
cgtgcctgcgttccacgacctaggaacttcatcctgatttgtggatcgacgagggtcgacgccccatttcatacaggtttgccacactgttgctgcaggattgacttgtgagatagaatgaaaagtgcaatacgaatctccctttacaaactaggtgaagttttcgcaggtcgagagagttcccttgagcttccattttcgatgagaagccatgaactccggctaaggctcgaccattctccagcgaagggatgagaagagtaagttggaggggatattgcaaccaaggtcgaacggtgacctgtggtcgcatatttgggagtgactgaagtagtattctggaggtggagggaaggaatggaaagggagggtggtggttccattgtgccgggaggc

SEQ ID NO: 6759 - DNA, 311 bp, Setaria italica
  Peptide Sequence Number=SeqID_72733
gtacgtgcaggtccatgcagtacgtgcagaccaaagtccaaaacgactcactgcatgcaaatactacggccctagctacagtgctacacaccagcgcgtccgcaccgcgtccatcgcgcgtcccaacgcgtccgctcgtgcccctgcagcctttcttttatttccacgaataagcgctagggcagtgccggaatttcattaggggattagtaaggaaatttacagagatgcccttggtcctactcctaccctccctcggcttgtctctctggaggggcagctgcatgcagtagccatcatcgtcttcatcc

SEQ ID NO: 6760 - DNA, 867 bp, Setaria italica
  Peptide Sequence Number=SeqID_72734
ttcctcattgcagtcttgttaaggtgctccagtatccaaaccttgtcatttcctgcacttggtcttcttgtgttgtctgaaactactgctccttcattcagggtggagtcactgaacatgaggaacaaggcaggagctgcaaagataattggaacgctaatgtcctttgccggtgtcatgctccttaccctctacaagggtgtggccttgacacaccaagttgagccttcagagagcccagaccaccatgcaggcaagaagagctggaccctgggcacgttagcattactggccaactgcctgtgcttctccttctggcttctacttcagtccaagctcaccaagaagtatccggcactgtactccagcaccgcttacatgttcctgatcagctcccttcaaggcgggagcctgacggcggcgatccaaaggcgagcttcggtgtggattctgacaaggccaatggagatcgttacagtcttatatacaggaattatggggtctggagtgggctacgtagtgatgacatggtgcgtcgagaagagagggccggtgttcacttcagccttcattcctatcattcagatcatggttgccatgatcgacttcttctttctccatgagaatctctatcttggaagtgtgctgggatccatactcatgattctgggcctctatattctgctgtggggaaagaagagggatgcctcggaagcatcatcatctgccaaggaagcggaggaggacaaggagaagcaagtccaatcatgatgaggacgaaccacaaaatatattctttctaaaacaatccatgaggaccaaaatacacaattcttggattgtgatacacgacatacggaatttccc

SEQ ID NO: 6761 - DNA, 1760 bp, Setaria italica
  Peptide Sequence Number=SeqID_72735
ttagtagtttctatttctatttaacttctaatttctaggagtgtaagacataacttatgccaacaaataaacataacatcattctcctaacacctcacattacaacatatccatcccatgatcacaacccaaactgccgctgtcacccgattctacaaaaagaacactttagattcagacccagcaggatccagaacgaacaaacaaaataacaagtggaattgtactctaattatcatgtggaagtcttcacagccttgaatgctgggtggagcaacccaagctcatccttcatctcgagtgggttactagtctcattcctgatcctcttcactctcctgcttgcaagtgacttgtgcgtgaacccatacatctgcaagatctggttatccccaaaattgaatgcacggtccatctgcttgaggcaacgctcaacagggtagtccccaaatttgccacaaggcttgcaaccgacaaagtgagtgacgagcggccaccggtgatcgccaagccctggcttgtaattctcaagcatctcctcatacctatcgaccaagatgccccagtagccgtggaggtagtacccattctcaaggtaaaccttatcaccccatttctcgcgttgcgtggcgaggatgtacaccatggccgactgatcatcggcctcgaatactggccgatccttcaaggacttggtcagcaccttgccagcctcaatgcggacagggccctttggccccattggcgcccaggtatccagcatgtcaagcgaccactggcagttgcgcagcaagaagctgccagtgttgagcccaatccagttcttgtcgtcgtagatcatctcgtcccagccgtgcatgatgaggttgtacggcccgtagcgttcccatgggagctcgaatgccatgtcggtgaacatggcgtcagagtccatccaccagatgaactcgacctccgggtgcgccaggagcagtgcccgcatgagcgggagcttggcccagaagccggccatctcggcgtcgagcagcgccatgttgtagaagatctcgaggccgtggacgcggcagtagtcgatcttgttcttgatggacttgaggaggtagtggtcaccgacggggttctcgcagggcttgggggaggaacccgagacgagcagcacccgcggcttgacgtcgttgaggaagggcggcgtctccgggtggcggcggtgccagttggcgcgctgctcgtcccagtcggagatcttggggcccagcgtgtagggcgggtcccggagcgtcctcggcggcgggtcgggctcgtcgtcgccgcgcccggatgaggatgaggaggacgacgacgtggtggttgtggtggtggaggccctggacctggcgtcgtggtgctcggcgagcgcccggtgcgggtgggagacgaagtgctgtcggagctcgatgaggtcctgctgcggcgtgccgaagcggccggcgccgacggtgccgcggagcacgacgacggtgaggaggaggcagacgacggtgagcttggcgttccgcgcaaagcgctggatctgccgcatccggcgctccccgaccacccgctccgcccacattttcccctccctccgatcaaactccaccccctcctcctcgcaaccaaacccagaccaaaaccaaccccaagaaccaaataaggaaggggacgcaagaggaaccggggaggcggcggcgagcaatgcgaccgccgcggggctggggagtggcggaggaagaggacgagac

SEQ ID NO: 6762 - DNA, 936 bp, Setaria italica
  Peptide Sequence Number=SeqID_72736
ttcgcgctcgcgctcctgctctatctcggcctcgacctccccgaggccgcgccggcgcagtcctacgccgccgacccggatacggtcgttgagattacctacggttcagtgatcaagttgatgcatgagaggaccaagtttcggctacattctcacgacgttccctatggatctggcagcggccagcagtcggtcaccagctttcccaacgtcgacgacgccaatagctattggatagtgagacctcaaccaggttcttcggggaaacaaggtgatccaattgcacatggaactataataaggcttcaacatatgagaactcgaaagtggttgcacagccatctgcatgcttcccccataacaggaaatctggaggtcagctgctttggtggagagaatgaatctgatactggagactactggaggctcgagattgagggcagcgggaaaacatggcggcaagaccagagaattcggttacgacatgttgatactggtggttatctgcacagccacgacaggaagtacacacgaattgccggtgggcagcaagaggtatgcggtgttggcgacaagcgcccagacaacctctggctggcagctgagggtgtctacctcccggtaatccagcgcaaatagctctactgctagatgagaaatgccattgttaaaagaagtttctatggtgcttaggctgattcactgcacagtgttgtaaccgttagaacattttactgtaatctacttgtgctgtctgtaacattgctgtgtattcagagatcaaaacacagtgcatctgatttgctcctcagtataaagatgattcggtttcggtcacagtatagaagttctaacctaggactaatagttaggactaggtaggactagactagaatacggtttaaggtagtgcttgaatttactagtcgtaagtta

SEQ ID NO: 6763 - DNA, 448 bp, Setaria italica
  Peptide Sequence Number=SeqID_72737
atctctctgaaggtcttggagcacgacatactcaccgtgtcaccgatcaaggttcgtgctcaattcctccagccaactgtgttgtgcacaacgtggcatgcatttttggcacaaatgtttggcaattgtaaactgaacgatgaagttgtggcttatgtcattgcaggacttggcacctggcttcaggttcgcccccatcgggctggttgacatgttcaacagcggtggcgccgtggaaggcctgacctaccacctcctcgacggcgcaaagcttgtcgacggacaaacggctccacttctggctccgaggctgtcggattggtgtgcatggaagtgaggggatggtggaaggttcggtgcctactcctcagtgaggccaagaaagtgcatgatgggttcatctgaactggagttctcctatgattcttcctccggtctactgacgctg

SEQ ID NO: 6764 - DNA, 229 bp, Setaria italica
  Peptide Sequence Number=SeqID_72738
ccgccgccgccgcgcacgcgcagccgccggccccaccacccaccagcgacggcacatcaattgaccaggggatcgcgtacgtgctgatgctgattgcccttgtgctcacatacctcattcatccactcgatgcggcctctccatacaagctcttctgatcctaatcgtggatgtaccagactatcgatcagtagacccatctattgttcgcatgtaatttaggcggagg

SEQ ID NO: 6765 - DNA, 379 bp, Setaria italica
  Peptide Sequence Number=SeqID_72739
agacgacttcttctatttttcaactttctttttctcacgtcaatctagcagatacaaaacacaggaatacatttactggacagtacgtacaagtgcttcaactttgtaacagatcctgagctactctgacgaatagaaaatacatctagtcatggtcgtgcgtggtcactgaagctacattgtcagactaggaaatcttattctaattcagaatgcggacgagttacttccccctttgttgctgtttaatttgtacttgatcaactgctctgcagcctgctgttcccaccgaatatcttgttgagtattgcagcgagcctgacgcctccttgagcaatcctcttctgaaccaccggtagtgcagcaaagaaatagtcat

SEQ ID NO: 6766 - DNA, 445 bp, Setaria italica
  Peptide Sequence Number=SeqID_72740
cacgcccctctccccgtcccccctcctccgctccctcgcctcggcgttcccaacgcctacatcaacccacgcctggcagccgccggcggcggtggcggggacgacgcgcgcaaggtgctcgacgtcatgctcaagccggcgcgccggaacccagtgctcgtgggcgacgccgggccggacgcggtgctgaaggaggcggtcaggaggatcccgacggcagggtcccctgtcctcgccggagccaaggtcctgccgctcgagggggagctcgccaagctcgccgacgacaaggcagccttggcggcgaggatcggaaacctggccgcggttgttgagaggctcgtcgcggaccacggcgccgtggttcttgatcttggagaccttaagtggctggtggacgggccggcagctgcggcgtcggatgggggcaaggcggtggtgtcag

SEQ ID NO: 6767 - DNA, 230 bp, Setaria italica
  Peptide Sequence Number=SeqID_72741
agtgatgaactccaccgtgccatcagaagaaggtgcttggctgatcacttgttcgaggtctagcacagtgcacttgatgtgcggaaaggccctagcgatagccatggcggctacgccaaggcccccgccgacatcgaccagcgacgtgagcccgcggaagatatctgtgccgccgacctcctttagcatgatatccatgaggacgctgctgtccatcaccatcgacttcg

SEQ ID NO: 6768 - DNA, 355 bp, Setaria italica
  Peptide Sequence Number=SeqID_72742
ggaggcggggacggggagaggggtcacggcgctgccggcgaggtcaacggcgagcacggaggcctcgccgcggaaccggacgaccgccacggcgtggcggggaggcagcgggtcgcccttccgccagcccaggacgacggccttctccggctcgtcaagcgccagcgagtgcacgaacagggatgacggcgacgacgcgaaaggcgggtgcgcgcggaggagctcgcgcgcgcggttgatctcaccgatcgtcagcgggtccagcgggtgccgcggcacgtcgtcctcgtgtgacggcggcttcggcttcgtcatccggttggcctggcggcacccccacggcgcgaaccgggtg

SEQ ID NO: 6769 - DNA, 490 bp, Setaria italica
  Peptide Sequence Number=SeqID_72743
ggcggtgatgatcatatatggaagggcagcactaacaatcaaaatggaacatgcggtaggcggcaatggacctccgggagtttggctgcttgaggatccatcagaatacgagctttttctccactaatattgttcagaaagcatgagtggtcgggacatgaaattgcttgataacttcacattatgctcgtattcaggagaactgtctccttcaattcccatcagagctccgaaatgcattttttcctcattaaatgtttgattacatgattgatgattcattaaagttgtgcatctctctcaagttgcctgatggaggaaccttgctggaattagcaccaacagcagcagcatgcagaaaccgttagacctttctctgtaccttttttttataatttcaattatgccattatttcatttccaggggtttctcataaacaattggtgatcacaggaaaagtctactcctatggcaggtctgtttcaaaag

SEQ ID NO: 6770 - DNA, 329 bp, Setaria italica
  Peptide Sequence Number=SeqID_72744
cttccactgaacaactgctttttttccttagatgcaccgagcaagtgctctgtaaaaatatttgccacctcctaacatactgataactaaacagccattgcgagttaagacatatacatccctgctctgttagatcaaaatcccagtgactgagcaaccctagcgctagaaatcctaacagtaacaggtagtacagtgcaacagttatataatctgcacgatttgaacccacactttgagaatcgcataccccgattcgttacgtattcacattaatcatttctctcgactagcgacacggaaacaacgaaaagggggggaaaccccaa

SEQ ID NO: 6771 - DNA, 691 bp, Setaria italica
  misc_feature (631)..(691): n is a, c, g, or t
  Peptide Sequence Number=SeqID_72745
atttgccaacgaattagcaggtagcaaaaatttcattatagttttttaatgattactattgagttaatgcgttccctcacatcttgcagagatgcagttcaccttcttcttatgtttttggatatatcggagtatccctccttagccctgtcatgcacaatctgtggatctggaggggcactggtaatgcaaatttctattttgccaccggtttggcttatacttgcctgcagactgtgttggttgtagagagtgtaggttcaatgataaagcacgacagaaagctaagactacttgtagaccgagttaacttggtccctaagctgcaaaaatcttactggtgctctcgatcgcaaacggctcgtcatcctggagtttgtagatgtagttcacattttgcgtatcatgttgtattgtacacacccacttttgtacattataaggatttcaactctttaacgaagggtcaaaagactagaggaacacgaaaggcctctccctcggactaattgtaggcagcgccgaccttcgatctggattctgagatgtcaatcgtccggcatggttgaattgaccactgtacaatttgaactgtcactttgccagatgaaaatgaaaaattaaacccgtnnnnnnnnnnnnnnnnnnnnnnnnnnnnnnnnnnnnnnnnnnnnnnnnnnnnnnnnnnnnn

SEQ ID NO: 6772 - DNA, 232 bp, Setaria italica
  Peptide Sequence Number=SeqID_72746
atggatgacagtagttcacttcatattttggctattcatctggtcttgctatgtgttgttgttgagcagcataattctgaagaaagttggtggcctgaatgagatgtttggaaagacctatggatttattcttactgtgaaggacctatcgcctaatattggtgttttgtggtgagtgttgataacaagatggtgtgtgattatcagtaagcatatttcgattcatctcatg

SEQ ID NO: 6773 - DNA, 443 bp, Setaria italica
  misc_feature (42)..(42): n is a, c, g, or t
  Peptide Sequence Number=SeqID_72747
ggttctatctcagatattagcatactgttgcatcctggtacngttactttgccaaattaggagttatcaagatactatgtcaacttcggttatgagcttcatcttgtaaaaggtttcttttgtttcctattgaccggttttcatttgttactaaattacctactgtgctgtggttatgcaggacctatggatttattcttactgtgaaggacctatcgcctaatattggtgttttgtggtacttctttgctgaagtttttgacttcttcagaagtttctttcttatagtcttcaatatgaacattattttcatggtcttgccattggccattcgtttgaagcaccgtccgtgctttcttgcgtttgtttacacagcaattatcgctatgttgaaatcctatccctctgtgagtatgctttttgttattttatatgattatttt

SEQ ID NO: 6774 - DNA, 673 bp, Setaria italica
  Peptide Sequence Number=SeqID_72748
ctgctatactgctacttactgttcttatttatacgtttcttgcagctaatgtaagtgcaggagatattgcttctctcatatatttgtggaacccttgggcaatagtcacttgtgtgggttcatgtacatcaccaattgagaatttaatggttgttataatgatctatggagcctgttcacgtctggctcctcttgctgcctttggatatgttatggccacacatctctccctttatcccgcaattctaattgtaccggtcattcttttgttagggtatggtccagatgctccaacaacaaaagtatttcttctaaaaagctcaagttccagtaaaagtgacatgcgaactagcctgaaaattcaacgattctcatggatgacagtacttcacttcatattttggctattcatctggtctggctacgtgttgttattgagcagcataattctgaagaaagttgacggccttaatgagatgtttgaaaagacctatggttttattcttactgtgaaggacctatcgcctaatattggtgttttatggtacttctttgctgaagtctttgacttcttcagaagtttctttcttacagtcttcaatatgaacattattttcatggtcttgccattggccatccaatttagtaaagtaactaaaccggtaaccgttaa

SEQ ID NO: 6775 - DNA, 1622 bp, Setaria italica
  misc_feature (1545)..(1622): n is a, c, g, or t
  Peptide Sequence Number=SeqID_72749
aagcgtcaatgtcgccctactctggttctatgtatcacggttcccctttgctgctgtctgttcttggcccattaactaggaccagatctggtggcaagcatgctcatgtttattgcagtttgatttttgtggctgtagattttctagctgccatgcttattcgagctactgggcgtagactccaaatgtcgcggaacataagtttgaagtcacttgacctcacaaaagcagtaaataattcagctaatgtatgtgcaggaggtatcgcctctctcatatatttgtggaacccttgggcaatagtcacttgtgtgggttcatgtacatcaccaattgagaatttaatggtcgtgataatgatctatggagcctgttcacgtctggctcctcttgctgcctttggatatgttttagccacacacctctcactttatcctgcaattctaattgtaccggtcattcttttgttggggtatggtccagatgctcccccatcaaaagtatttcttctaaaaagctcaagtgccagtaaaagtgacatgtcagaatatgataaacgaactagcctggaagttcaacatttctcatggatgacagtagttcacttcatattttggctattcatctggtcttgctatgtgttgttgttgagcagcataattctgaagaaagttggtggcctgaatgagatgtttggaaagacctatggatttattcttactgtgaaggacctatcgcctaatattggtgttttgtggtacttctttgctgaagtttttgacttcttcagaagtttctttcttatagtcttcaatatgaacattattttcatggtcttgccattggccattcgtttgaagcaccgtccgtgctttcttgcgtttgtttacacagcaattatcgctatgttgaaatcctatccctctgctggagattcagctctgtatctaggtcttctgggcctatttgccaatgaattagcagagatgcagttcaccttcttcttgtttttcggatatattggagtatctctccttagccctgtcatgcacaatctgtggatctggaggggcactggtaatgcaaatttctactttgccaccggtttggcttatacttgccttcagactgtgttggttgtagagagtgtaggttcaatgataaagcacgacagaaagctaagactacttgtgacgagttaacttggcccctcagctgcaattttccttgtggtgctcctgaacacagacggctcgtcatcctgaagtttgtagtaggttcgcattctgtgtatcatattgtattgtacaccaccacttttgtacaatataaggaccacaagagtcaaagactaaggaacacgaaagggttctccctcagtccctcagactaattgtagtcagtgccaagctccgatgtggatcctgtgatgtcaatcatccagcatggttgaattgagcacatgtacaatatgtactgtctgtttgccagattaagatgaaaattacccgtagcatgctcttgcctttggattaaaaaaaaaannnnnnnnnnnnnnnnnnnnnnnnnnnnnnnnnnnnnnnnnnnnnnnnnnnnnnnnnnnnnnnnnnnnnnnnnnnnnn

SEQ ID NO: 6776 - DNA, 1026 bp, Setaria italica
  Peptide Sequence Number=SeqID_72750
agaggctagaaggggttgcgccaaccaggttctctctgtattatacgaccttaatacagagagaacctggttggcgcaaccccttctagcctctagcccttgctaaacatctgctgactcactgatatcactatcctagtactgctgtgttgagctgtcaacttgggtatacgtatacgcagtcgcacagcaagagaacccacacggagtagcaaagaaaagtccacaccttagctcgaccgttgatatctcagatcggacggttatagcaggacatctgcgtagccggacgtaccagcttcgaaacagaaagcacttgattaaactcaaaagctccttctgttagtccttgtcgacatcttctaaaataagcttccgtggcaagatagaatactcgtcacttcttcatggcatttcaaagccgacagagcagcaggcgccgggatatctgaaacgtaagcaacattacaccagccagcagccgcccatgaagaccactggttgctggcagctggaaaatgatttcttgatctgatgattgtcagcacaccgaactcaaacaccctgaacctggacaggcatcagcactcgccacaaaaccactcgtccgactgcttctgcagctggagatgatccaccatgctcgcacacgcagcctgcaaaacccgccaaatgccccctttttgggaccctgcccactgcaccatttataactgacaaatcttttaggcgttatgcccacatgaaaaccccctgggcagcagcaacatcagcaaaacaactctcctacaaacaatattatccacgtaaccttgggtcataagaaaacaccagttgcatgcccccgccgcacgggatgttaacacactatggagaactgaagaagagcggctgagagtgagatgcctggagctctatccagcagcctatgatgcttgcaattttttagttgcatggtgcacagtccaacaggcacgtccatgcagtttgagctcaggaccttctcctggaccattccttggacca

SEQ ID NO: 6777 - DNA, 790 bp, Setaria italica
  Peptide Sequence Number=SeqID_72751
gatatagcaataaagagactaaaggagcagggtattacaactaagaaatcctctcaaaatctgaaggttttggctaaagatgatagatagtgacttctagcccatccaacgaccttctccgctttttgttttgttaaaacaacaccatcagacttcacatgcaaaagctccacgcaagaaagatcatgctcttcaagcaccttgtgtaatttaacgaggttatgacttgaaatgataatttttcatcctcttcgatctgattattaaaaactcgtagttgttcatcttcctctggaagaggaacagtaagactattggtgaagagctttgatatgtcactggatctggaatatttttgtcccttgaggccccctaccagccgcttcaatggtgatggatgttccttatccttggatgctgctgccagtatgttctgcccacatatcaatacaactggtccagtaagtcggtcaaacatttcctcaactctttgcacaaactctctgcgatctgattttgagactgctcttgacaaccactgggaactgtctggaaagtagacaattattggctgtagagatggcagaacctcacaaagtgcttcaagtgcgatatgccaatcgtctgactcagtatcatgatcatgagcaatatcctgagaatcaacccagtaaatcgttggtttagcattttcctccttgctagttatatcttcatctccatcatgtgatttctctggaggaggatcaaatattacagcaacctgatccccattgatctcatatacctc

SEQ ID NO: 6778 - DNA, 412 bp, Setaria italica
  Peptide Sequence Number=SeqID_72752
taatgtgactgagggttactctgggagtgatttgaaggtactatgcttaagtcctccattaatcttctgatcttccctctagcatcacaaaaatgttactggctgttgttttctgtgttgtgtggattcattttatgccttttctgcagaatctatgcatagctgcggcatataggccagtccatgaacttctagaacaagaaaacaagggagacatgggtagcacgaaaacttcattaagggcactgaagttggatgacttggtgcaagcaaaggccaaggtaagcccatctgttgctttcgacgcaacaagcatgaacgagctaagaaaatggaacgagcagtacggggaaggtggcagtagaagcaaatcaccattcgggtttggcagctaacatactcctgtagtaag

SEQ ID NO: 6779 - DNA, 2146 bp, Setaria italica
  Peptide Sequence Number=SeqID_72753
tcaccggctgcaagcagcagcagccgcgagcaggagcacgcgcggctcgggagaggaaccgctcgccgctcagccactcctgctggtccctctttggtaagttggcagcagcagcagcagccgcgagcaggagcacccgcggctcggggagagggaccagcaggagtggctgagcggcgagcggttcctcaccggctgcaagcggcgggagtcgccgttcctcaccaagcgggaccgcttccgcaaggagttcccgcgccgcgccgtgccgtgggacaagaccggcgtctcgtggaacagcttcccgtactacgtcgatcagcatgcgaagcagctgctgagcgagtgcgtggcgtcgcacctgcggcataaggatttagctctggagtatggttccgggctgcagtcttccagtgggaggatattgctccagagcttgccagggactgaactttaccgggagagatttgtgagagcacttgccaatgagttgcgtgtgccaatattggttctggacagcagtgttctagctccatatgactgtggtgaagattgttcagagagtgaggaagaggataatcatgcagagtcagaggatgaaggttcagaatctgaggtggatggcgaaggtgatgaggaatctggtgaaagcgatgatgacgattctattaaatctgtggcggacctaaagaagctagttccatgcactcttgaggaatttgccaagagagttgttggtatacaggaaagttcttcagcagcagaatcctccggcactgctgagtcatccgaagaagagaagaggtctcttcaaaagggagatagggtcaagtacattggagcgtcagtggttgttgaagcagatactaggatcattttggggcaagtacctactcaagatggctcaaagaatgcctatacctttattagtggcagaactttatcaaatggacagcgtggagaggtgtatgagatcaatggcgatcaagtggctgttatatttgaccctcctgaggagaaggcggctgatggtaacaaagatgaagcaaacaaagagcaaaatgctaaaccagcagtttactgggttgacactcaggatatcgagcatgaccatgagactcgcgcgccagattggcgtacagcagtgtcttaggtttgtgaggtactgccatctctagaaccagccatcgtttactttccagacagttcccagtggctgtctagggcagttccaagatcaaatcgtagagaatttgttgaaaaggtagaggaaatgcttgaccagctcactggacctctagttttgatatgcgggcagaacatagcggaggcatcaacagaagcatctaaggataaagaacctaagactctgctgttccataatatggctcgcctgtctcatctgacatcatccttgaagcggctggtagggggcctaaaaggacggaagccttcaaggtccagtgacataacgaagcttttcaaaaatagattatttattcctcttccaaaggatgatgagcaaatgagagttttaaataaccagattgaggaggacaaaaaaataatcatttcaaggcataaccttgtagagctgcacaaggtgcttgaagaacatgggctatcatgtgaggatctattgcatatcaagtcagagggtattgctttgacgaaacaaagagcagagatggttgttggatgggctaggagtcactatttatcatcagcagttaatccttccataaagggcgacaggctgaccattccccgtgaaagtctggacctagcaattgggaggttgaaggagcaggaggcttccaataagaagccgtctgaaagcatgaagatgttggcgaaagatgagtatgagcgcaatttcatttcagcagttgtgcctcccaatgaaattggagttaagtttgatgatattggtgctcttgaggatgtcaagaagacactggatgaacttgtaactcttccaatgaggaggccagagtcttttttctcatgggaacttgttaaggccctgcaaaggtatattactttttgggcctcctggaacaggaaaaacgcttttagcaaaggcacttgcaacagaagctggagcaaatttataagcataactggttctactctcacatcaaag

SEQ ID NO: 6780 - DNA, 1328 bp, Setaria italica
  Peptide Sequence Number=SeqID_72754
tcgatgatagatagtgacttctagcccatccaacgaccttctccgctttttgttttgttaaaacaacaccatcagacttcacatgcaaaagctccacgcaagaaagatcatgctcttcaagcaccttgtgtaatttaacgaggttatgccttgaaatgataatttttctatcctcttcgatctgattattaaaaactcgtagttgttcatcttcctctggaagaggaacagtaagactattggtgaagagctttgatatgtcactggatctggaatatttttgtcccttgaggccccctaccagccgcttcaatggtgatggcagtgacgataggcgagagagattgtggaacatcagtgccggatgttccttatccttggatgctgctgccagtatgttctgcccacatatcaatacaactggtccagtaagtcggtcaaacatttcctcaactctttgcacaaactctctgcgatctgattttgagactgctcttgacaaccactgggaactgtctggaaagtagacaattattggctgtagagatggcagaacctcacaaagtgcttcaagtgcgatatgccaatcgtctgactcagtatcatgatcatgagcaatatcctgagaatcaacccagtaaatcgttggtttagcattttcctccttgctagttatatcttcatctccatcatgtgatttctctggaggaggatcaaatattacagcaacctgatccccattgatctcatatacctctccacgctgcccatttgataaagtcctgccgctaataaaagtataggcatttcttgagccatcttgagtaggtactttccccaaaatgatcctctgatctgcttcagaaactgcaggatccccaacatacttgacccgatctcctctttggaaaggccttttctcgtcctctggtgactcaggagtttcagaagattctgacgctgtactttcttcagaaccaacaattctcttggcgaattcctcgatagtacaagggaccaacttttttaggtcatccacagacttcttcaggtcttccacagatttgagagcatcctcatcgtcactttcaccagacttttcattgttacttgtccaatcttcgtcgccctcatcttccatttcagattctgagccttcatcctcagactcagcattctcatcatccgcctcgctttctgagtaatcttccccataatcatatggagcaagaacggtgctgtccagaaccagtagcggtacccgcaactcatgtgcaagagctctaacaaatctctccctgtaaagcttctagttccttggtcgtagt

SEQ ID NO: 6781 - DNA, 735 bp, Setaria italica
  Peptide Sequence Number=SeqID_72755
caacaaatcgtccctttgatctagatgatgcagtgatacgacgtttacctaggaggatattagttgaccttccggatgccaagaatcggatgaaaattctaaaaattttacttgccaaagaaaacctggaatctgattttagatttgacaagcttgctaatgtgactgagggttactctgggagtgatttgaagaatctatgcatagctgcggcatataggccagtccatgaacttctagaacaagaaaacaagggagacatgggtagcacgaaaacttcattaagggcactgaagttggatgacttggtgcaagcaaaggccaaggtaagcccatctgttgctttcgacgcaacaagcatgaacgagctaagaaaatggaacgagcagtacggggaaggtggcagtagaagcaaatcaccattcgggttttggcagctaacatactcctgtagtaaggtttcccacattgtattgggacttgggagcgtgtgagcccaaatttagtcatacgaaaccagcagtagtggctcatcgtaggcagtaaacctgtgctgttcagttacttcatccaggccactcccttgccccccgttttgatctgtgagtcattacagcagtgctgttgtcatgtatcgatagcaaaacggcttatcagatgccaagttttcatgacataccccatattgtagtgtcacgggctcccatccgagaggcctgatcgaactgtaaatag

SEQ ID NO: 6782 - DNA, 1629 bp, Setaria italica
  misc_feature (1589)..(1589): n is a, c, g, or t
  Peptide Sequence Number=SeqID_72756
ttaactttacctaaaaggtaattagtaattgtaagtctaaattgagtagtttttaaataaccagattgaggaggacaaaaaaataatcatttcaaggcataaccttgtagagctgcacaaggtgcttgaagaacatgggctatcatgtgaggatctattgcatatcaagtcagagggtattgctttgacgaaacaaagagcagagatggttgttggatgggctaggagtcactatctatcatcagcaacccatccttccatcaagggtgacaggttgacaattcccgtgagaggtacatctgcttcacattgaatatttcttttagggaaacattggatattgttttagttggtcattttacttaggttaatctcttactgctaatgttttaacgtttatttgaagtctggatatagcaataaagagactaaaggagcagggtattacaactaagaaatcctctcaaaatctgaaggttttggctaaagatgagtatgaacgcaatttcatttcagctgttgtacctccgaatgaaattggagtgaaatttgatgatattggcgcacttgaggatgtcaagaggacgttggatgagcttgttactcttccgatgaggagacctgagcttttctcgcatggaaatttattaaggccctgtaaaggtgttttgctttttgggccccctgggacaggaaaaacgctcttggcaaaagcccttgcaacagaagctggagcaaattttatcagcataactggttctacactcacatcaaagtggtttggagatgctgagaagctcacgaaggcccttttttcctttgcgagtcgattagcccccgtcatcatatttgtggacgaggttgacagcttacttggtgcaagaggaggtgcatttgagcacgaagcaacaagaaggatgcggaacgaatttatggcagcttgggatggtctcaggtccaaagagagccaacggatccttattcttggtgctacaaatcgtccatttgatctagacgatgctgtgatacggcgtttacctagacggatatatgttgaccttccagatgcacagaaccgaatgaagattctgaagattttacttgctaaagaaaagttagaatctgattttaagttcgatgagcttgcaaatgccacagaaggttattcagggagcgacctaaagaacctgtgtgtggctgcagcatatcggcctgttcacgaacttttagaagaagaaaagaagggaggtgtgagtaacgagagcagttatttgagaccgcttaaattggatgattttatacaagcaaaagctaaggttagcccgtctgtttcttatgatgcaacaagtatgaatgaattgaggaaatggaatgaacagtacggggaaggtggcagcaggacaaaatcaccctttgggtttggcaactgacattgcagtagagattttccaaccctgtatcatctgtaccattcatagatgcctgttctaaaataggaaatcagtctattttgtttcacctagagccatgtacaaacaacaaaatatctaatcaaatgccaattttccctgaaaactaaaaaaaaaaanaaaaaaactaaaaaaaaagagaactagaccaaaggacaac

SEQ ID NO: 6783 - DNA, 448 bp, Setaria italica
  Peptide Sequence Number=SeqID_72757
atgatagaaaccctgcaaaacaatcaacagctccttttcatggaggtgttcatcattgctgcctggaacatttggaaacaaagaaacaaccttatctttgaaaataagcagccaagcctctcttcttggaagcatcaacttgtagaagatgctactctgcaggctcacagattcaagagtgataaaagagctccttttctagcttggatagactccttacgctaactaactcacttgctctttttttttccttagatgtcattttttccctgcttcttgtagatctgttctaacctcttttctttctttctgtacagttttttttaacactattttaatatatttaacacagtaggggcctcccctactgtatttacctaaaaaaaacagagttgggtagccatttttaaaagtcattatgcacatgaggaagggtactttaattgtc

SEQ ID NO: 6784 - DNA, 1086 bp, Setaria italica
  Peptide Sequence Number=SeqID_72758
taaatagggaacaaaattagcgagaatagttccagttcctgttattttccctatggctgtgctcggacccaacaccagttccagcgcaactactatactccaaccaactccatgcaacataatgcccgacgctctcaaatgaactttcacatattatgcactaaaaattatcagcacatgaccttaaaagaaagaaaactattccttctgggtaaaccaaataaagctgtacaaatcaaaattactacaatttcacctttgctaaatacttacaacttacaatgatacgacgaccctgactgcagagcagaatacaaaaaaatttataaccaagcgcaaaattggggaactgaattatacagcggggagtagaaggggcatatcatcattgttggttatcatctgtttgcaacctttcatcttttttcgacaatgcaatgatctgctgctcaagctgattgtttcggagctttaatctttgcacttcgtcagaaagttcggtgatgctttgctgcaattggacaacatacgactgcaattccttttctctaacaggccctccagaagactgatatgaaccacttgtacttgcttcagaatcatcagatgtttcctcaattgaagaaatcagcctacttaatacttccttttgcatagtattttgctgcatcaagaattgcaatgttggaagaattgcagatgacttgagatttgagcgtgttgctccaattggtagatttgtcctgctgctgctgcagcctgatgtagctaccttttgagaaatactatctgatgtaacctggaaacgcccccttcgacggataatttttccttctgacggctcctcaggtgcaacagatagatgtgtgcgtgaatccttcatttggcggaacaataaaggtccactacggttcctgatgcttggatttctctgacaatattcatccctttccaaatcagcagtcatgtaaggagaaagaacttgctcgggtataagagaaccacttgaatgcttgtggcatccactagtgcccagattcatgggtacagaaacacttctttccaaactttcaccattgcagttga

SEQ ID NO: 6785 - DNA, 2027 bp, Setaria italica
  Peptide Sequence Number=SeqID_72759
agaatagtaagactaaccttttagaagaaaataactaatactagatagtaacctggaaacgcccccttcgacggataattttccttctgacggctcctcaggtgcaacagatagatgtgtgcgtgaatccttcatttggcggaacaataaaggtccactacggttcctgatgcttggatttctctgacaatattcatccctttccaaatcagcagtcatgtaaggagaaagaacttgctcgggtataagagaaccacttgaatgcttgtggcatccactagtgcccagattcatgggtacagaaacacttctttccaaactttcaccattgcagttggcacttttgcaatgctcaatttttgggaactgcaggacaggtacaggtccgacatttggttgcactctcgaatgagcagcagtacggtcgggatcatcagcaccacaaacatcaaagcaagattttagtgcctcaagggggcggcttggaaaagaagaggagagagcatcattcaaatcttcaacttcttgtatctcatcctcttcaggccttccagaagcaccatggttgaccctttcctggtaaataagttctgggtcattgtaagcatcatgtgagtcatccctaactttgttatccctgacttctaagtgacaagtgccattcgaactgtctataagggcagctgcattcttcaaatcctctagattgaagttccaaccactgatgcctcgtatgtactctttctgtgatagctgctccttgctctcttgaccaagcttgttattgagaagcaactcagcctctttgctcttcagttccctaaagcgttcacccagtggagggaggccatcaagaatactccgtgatagatattcagctgatcgagcatgcttaaagaaagaatgcttcaagagcttttctgaaggaggacgcttgcgtggatccttgactaagcatgtcgcaaccaaatctttgaaagactttgaaaaccgcttgtccctctcatagtctagacctggtggtgcattttgcaaggtcataagcaacaccttcattggaggatactttgaaaatggagcatgaccatgtgctagttctaacgccgttatcccaaaggaccatatgtcagctttgtaatcataaccatgcaattgttgcatgacttcaggagccatccagcaaggcgtccctacgaatgtatttcttgctctttgcctatttccagtatcgaacatgcaggctgacactccgaagtctgctagcttcacagctccatttgaatctattaagatgtttccagcctttacatctctgtgaatatgtccttgagaatgtaggtagacgagagctttgagcacttcccgcagcagagtagcaatgaccggctcatcaaacccttctggaaaagaagttttcataatgtgcagagcagatccagcagccatgtaaggcatgacaacccaaagctgatgcccatttgtaaatgagcaatatgcacgaagaaggtttgggtggtcaatcaaactcatcgtttgcacttcccgtcttatcccatccaggtcattgttgcatttctcaaggtcaagaactttgatggcaaccataatgtcaagtgggacacaaagagctcggtatacactggcactaacaccctctccaatttcctcatatagcttatactcatctggattagttggaaaccttctactaagcaatgtatgctccatggtccaaatttagagagcactacaagtaacatcagcgctcttaaaattcccattgcaaagaagcacagcagtaaatgacaagaacaccatataggtgtgcctgagaatagcctccagcattgtgaaatttgataggtgaatgtttggaccaatatgggagcatttatttcattgggttttcaggcatcctttgctccagtgtcttatattgacagacacaagaatgacgtagacaccagaaagctacccaaccttccttcaccaatagtactgtagcagaatattatatgctgcggatt

SEQ ID NO: 6786 - DNA, 817 bp, Setaria italica
  Peptide Sequence Number=SeqID_72760
atcttcgtaggatgatgaaccggggatgcatgccagatgatttcacctacaacaccatcatcgatggctactgcaagaggggcttgctgcaggaagctaccgagcttctgaaagatgctgtcttcaaaggttttgtgcctgaccggatcacatattgctcactgatcaatggactgtgcgccgagggtgatgtcgagagggccctggagctctttaacgaggcacgggcaaaagacctgaagcctgaccttgtcgtctacaactctcttgtcaaggggctttgtcgtcaaggcctgatcttgcatgccttgcagatcatgaatgagatggtcgaggatggctgccatcccgacatttggacgtacaacattgtcatcaatggactatgcaaaatgggaaatatttcagatgcgacagttgtaatgaatgatgccattgtgaaaggataccttccagatgtctttaccactaacacgtcgattgatggctactgcaagaggttgaagctggacagagcacttcagcttgttgaaagaatgtggacatatggcatcgcccctgatgctattacatacaactcggttctgaatggcctctgcaaagctgggaagtccaaggaagtcaacgaaacattcgaagagatgattcttaaaggatgccgaccaaatgctattacgtacaacatactgatagagaatttttgcaagatcaaccaactagaagcggcttctggggtgatactcaggatgagtcaggaagggttagttcctgatgcagttagtttcaacacgctgattcatgggttctgcaggaatgg

SEQ ID NO: 6787 - DNA, 394 bp, Setaria italica
  Peptide Sequence Number=SeqID_72761
aacggcacatggcggctgccatggccatttcctagcatagtagagagcatcacaaattcacaattcacagcaccagtatggcagcatagcacagcaagttgcagaccaggccaaggtgaaggccagtcaccagtaaccagagggcccttgcagcagtcttcaaatctcaccgcgcccagatctgctgatcaattattccaaaacaaaaaaaaaggatctgctgatccacgcccctggacacttgtccgaatccagctaggttattttattctacggctaaaaatggtctagcaattgggaattgccaaaaaagaaatccgcgcaccggtgaggcaagccatcatgtggtcccggaattcggtgccacactgccacccctgccggcggtgacccc

SEQ ID NO: 6788 - DNA, 713 bp, Setaria italica
  misc_feature (690)..(713): n is a, c, g, or t
  Peptide Sequence Number=SeqID_72762
gaaaatcgcgaaatggccatggggatggggatggggatgggaatgggaatgaaccaacaacagatgggaatggggatggggatgaaccaacaaccgatgggaatggggatggggatgaaccaacaaccgatgggaggaatgaacatggggatggggatgaaccaggggatgccgatgcggcctcctatgggaatgggtcctggtggaatgcccggtgctggctacaatcaaatgggtgctgcatacggtggtcagcaaccatacggaggatacaggtgaggaggctacagcttgccacaccctaaaaaccacagattatgcggtgggggtttgagaaacagtttaggaggcatatgtattttggtcgcctggttttgctttgtgtatgatttcttgtttcttttggggtgggtgggtataattttcgtcactattctttttacaatccatgttggatactgtacctactaaatagcaaatactagcaaacaagtgaacgagggcgacgctacaactaccgtgttgtgttggatgcaaagccttgatactacaagcgcccatgtagttgtaactgtataatttgctatatataggttgcttttgctgtgaaacatattatttgtttcagcattcttgctggatggacaataaaaggctgtaccatttggttagaaaaaaaaaaaaaaaacnnnnnnnnnnnnnnnnnnnnnnnn

SEQ ID NO: 6789 - DNA, 302 bp, Setaria italica
  Peptide Sequence Number=SeqID_72763
cgcgccgaacaccgcgaacggcaccctctccccgagcaccaccaccagcggcgccacgatggcccccatctgcgccgcctgcgccgtgcaccccagcgccgcgttccgcaccaccgtcgggaacagctccgccgtgtagatgaacagcaggttgtacgtcgccgccatgccgaagatgcccaccacgccgcaagccatccgcacaaccctcaagatgcctgcgccggcgatgaggctcccgggcggtgcagaagatgccgctgagcagcatggtgccgatggcgagcggcttccgaccccgg

SEQ ID NO: 6790 - DNA, 229 bp, Setaria italica
  Peptide Sequence Number=SeqID_72764
cgagcttgctgctttggagacatgggacaatgggaagccatacgagcaagctcgtcattgtgcttctcgatcaaatcagcaaatcgcagcaggatacgggacctctcatatgctgtcatctttggccatggccccacatcaaaagccttgcgggctgcagcaacagcacggttaacgtcctctgcgtcaccttcagccacatgagcaatcacctcccccgtacgacggg

SEQ ID NO: 6791 - DNA, 315 bp, Setaria italica
  Peptide Sequence Number=SeqID_72765
tagtacgaacgcccttctccctcccgatgccactctgcttgtacccaccgaaggggatcccggcgtcgaagacgtaacgaaaagacaagttacaacccaagaacggtaaccgaaccctgaagtgcccgtgtcagggtgttggccgtgtccaagctcttggtgaacacaccagcggccaatccgtattggcttgcatttgccctctcgataacctcattcagatctttgaacttgaggatcgattggacaggcccaaatatctcttcttgagcaatcttcatgccatcctgcacatctgagaaaaatcgttgggtt

SEQ ID NO: 6792 - DNA, 317 bp, Setaria italica
  Peptide Sequence Number=SeqID_72766
atgaggagctttgtgtagttcacttggactgggggcgagatgggctcctctgctacagctgccgtgctgaacctctgaaggacccctggcaacagcccgcgcgtcccaacttgcgtgcggagcgtggcggcgacagcgggccgcccggcgacggaggacctggagaggaggcagcaggacgcgagcgacgacgcggcagccctcgcggcggaagccattgccaatttgctgcgcctctcggacggtgcttgccagcgtcgacgctagcggtgctggagcttctacccgactgtcactgcctcctcccggatttggcc

SEQ ID NO: 6793 - DNA, 302 bp, Setaria italica
  Peptide Sequence Number=SeqID_72767
ccgtcctccccggcctgccggctgctaagcgcaggtacggacgggattcatctgtcatgtctcgtgcgtgcggcgtgccagcacacacagagagagaatttgcatctgtgcgcccctgatccctgctgccgccgtgccgtgctatgggaatctaatagaaatcaggctgcaagattgctaacaagctcgtctcttccgtgcgcgcagccggagatcggtggagaagcggcgcgtgccggtgccgctcgccgagtgcggggaccggcccagggcgggcaggcggggaggggccgccgccgtcg

SEQ ID NO: 6794 - DNA, 1301 bp, Setaria italica
  Peptide Sequence Number=SeqID_72768
cgttggggggagagtagagtagaggcgaggcggggttccgtgtgctgctccggccgagcgggcgtgggcaccgaggaggcggcggcgggcgagagaggggatctgcccatgtcgtcggcggaggacgggtactgcagctcggattcgccgcgggcggaatcccccgaggagtcgcaggcggcggcggcggcggacgcggagtcgccgcgggcgaacaagcgcgagcgcgacctccgggacctccacgacctccctgcctcgccgtcctccccgctgccggctgctaagcgcagccggagatcggtggagaagcgggtcgtgtcggtgccgctcgccgagtgcggggaccggcccagggcgggcaggcggggaggggccgccgccgtcggactcgtggacgtggcgcaagtatgggcagaagcccatcaagggctccccctaccctcgggggtactaccgctgcagcagctccaaggggtgcccggcgaggaagcaggtcgagcgcagccgcgcggaccccaccgtgctgctcgtcacctacaccttcgagcacaaccacgagtcgccgcagcccaagagcagcagctgccaccagcagggcaagccgtccccacggccgccggcgcccaagcctgagccggtggtcgagcaggctgagctcggtccggagcatgagctgccagagccagaagcgccagaacaggagcaggagcaggagctggagccggaagcggagcaggaggagcagaaggtcgtcgtgagtctggtcgcgccggaaacggcatcaaccgcaacggtgtcgccggtggcggaggaggacgaaagcttcgactttgggtggttcgaccagtacccgacgtggcaccggtcggcggcgtacgcgccgctgctgccgccggaggagtgggagcgggagctgcagggggaggacgccctgttcgcggggctcggcgagctgcccgagtgcgccgtcgtgttcgggcgccggcgcgagctcagcctggaggccaccgcgccgtgctcctgatggtcatttgatcccttctacctttcacccttccctttgggtcttttagttttactcggagcaatttggaggtactagtacatagctaagatcgatcgatgcgcggggattatctctgttcaaggccggctcctgccttgctttctctccccgtgttgattgggtgcgcgcgtgcgtgcgttcgccatccaagattgtccccgtttcaggagtggtttgcgatgtgattccaaccaaaaagcagcgaaaggtctggcatttttaggcaaaaaaa

SEQ ID NO: 6795 - DNA, 1101 bp, Setaria italica
  Peptide Sequence Number=SeqID_72769
tcattcatcatcgtcttaaggaccttgcgccagttaaggttcagcttggactcgtaatacttcaagccgcaatcattgagccaatctttgatcttatccagatcagtcattggaatgacttctatgcggacgacatcctttgtgtaatcctgaaacacaaataccatgtcaaaggatttctgcccaagcaccaccctttccaggcatacaatgtcaacctccctcaaggatgttacgaggaacggtgtctcaataagctgaaccagacaacttggagaaggggcaataaaacaagatgttctgccatggactccattgaacccaagcttttgcagtggagattcaaactgtaaggcaagttggttaaatctgggcttggaccaaatggaatcaacccttctcacaaaaagctcaaactgtcgattcatctccctcctccgtgcccgttcacgttgctcttcttcaatctcatcgggatcccatgccgatcggcgcttcagactaatcgagtcgacagcatccatcacttcaatgtagaactgaacatctctagtcttcttgttgcccaccattatttcattgtataaatggaagtgaaggagtgtgatcatgtcccgctcagctggctgaaagaaggcgtgctttatattgccaaacataatatcaaccttttcagatttagaaacagtatactgaaaaccattgacatgggctaccaatgctccaaagaccttcctcccacggccagaaagtgctggtcgtatccacaaatcaagcaactgaattctatcccttgtcagtccatcatgtagttgaagcttttcttggctgaccaaacttgccctctttgctctttctaagactccttcttggagaatcttcattgattgaaccacctcttcagcatgccttctgtctcttgaaaggagggtgactgatttcaagtaaagcaaggcttatatttgcctgcaagcctgaatcttggagactggaaacagtgtttgggacattaaatgtaatgaagacaaacacttctcttactgtccccacgaatttctgtcttttttcacagtacacacatggaaggggaccataaatcca

SEQ ID NO: 6796 - DNA, 501 bp, Setaria italica
  Peptide Sequence Number=SeqID_72770
ttttttttttttttaaaaccaatcactttataatttgaatacaaatatttcgtgacagacatgttattaaatacaacctagctattgctatttgaatacaatgattttgtgattgccagctcatattgaaattattgtgacatgacatgtccaacatataagaaccttcactgggaaaatttgagtattcaacagttgaaggttgcaaaatcaaagtgcccacgagcatgacagaacaagattgcattgtactgggaaggactccaggagggtgctccacagtccacacgccgaagaggaggatggcataggacctggtagcgaagcctcggcaggtcgacatattacccaagatggatgtagataaagataaggacgagcttttcttgacttgctggcatgcttgctcatatcctccatcaggcacgagtacttacatctaagatgcagcagcacatgtgcacccaaataaatttatattatccattgtccattgagatc

SEQ ID NO: 6797 - DNA, 826 bp, Setaria italica
  Peptide Sequence Number=SeqID_72771
gggtggtgcgggagctcctgcgctcgatggggctcggcgagggcgagtacgagccccgcgtcgtgcaccagttcctggacctggcctaccgctacgtcggcgacgtgctcggggacgcccaggtctacgcagaccacgccggtaaggcccagatcgacgccgacgacgtccgcctcgccatccaggccaaggtcaatttctccttctcgcagccgccgccgcgcgaggttcttcttgagctggcacgcaaccggaacagaatcccgctgcctaagtcgatcgcccctcctggctcaattccgctgccaccagaacaggacacactgttggctcaaaactaccaactcctgccacctttgaagccactgcctcaagttgaggagacagaggatgacaatgaagaagccaaccctagcatgaccccaaaccctgcgaatcctaatccgaactactcccaggatcagaggggcagtgagcaacagcacactcctcagcatggtcaaagggtttccttccaactcaatgccgtggcagctgctgctgcaaagcgtcctcggatgaccatggaccagttgaacatgacctaaccgtttagtgctggttggaatttcatatctcttttctcatcctactagtcttattaattgtgttttgaacaagaaattagtgttttagtggttgttcttattgactaaccacgagatgtgcagtacagcagcagcataagtttctgcctggaagcatgttgccctgggaaagcaaatatgctatattatggtatgttgtacttggtttacaataggttaattttctgatgcaattgtta

SEQ ID NO: 6798 - DNA, 461 bp, Setaria italica
  Peptide Sequence Number=SeqID_72772
ctgtttggcagttatgatggagacgaggaaggactatggttgcattgtgtgcgatacactggtcctgattggagctacgaatgcccttatcctgactgggcggtccttgatagtgtgtcaacgaagaagatgaagtcatgatgtagcaaattagtttatggcgaatagtaagcccagcaatctgaacaaccaaaattgttttggcgtgccctatgattgaggttctgaggttttgactcagtcaatcaaacaagccaggtccagttttcctcccccgcttcagatttagccaatgcacggttcagtccttaattaacaacttgaaattgaacatacattagtgcacccagcctttgattggtcccatgcccatgccatttctgtgttgtgttattcctgtatcaccagaaagaaagaaggaaaagtaaaattctaaaatttgtagtattacctaaaaaaaa

SEQ ID NO: 6799 - DNA, 1962 bp, Setaria italica
  Peptide Sequence Number=SeqID_72773
aaatctatacacaaaatttccgtacaaaattattttcaatttcaaaagtttgtgaccgaaactttttgtagaaaaaaatttgtgaaaaaaatcggaacaaaactataggaaaaatttgggaaaaaagtttttaaggaaatttaggaaagatatgttccggaaaattctaaaaaatttgaaacaaaaatttgtgagcaaaattgtcacaaagatttcatggaaaaaatctagaaacaaaattagagaatttttttggaaaaaagaaacggaaaaggcaaaaaaaccaactggcctggcgccgccaccgccgccaggggagcgcacctcagtgtcagtttttacaacaagatccctttagctagttaactgaaataataactgcagtaacagcgatgcaaaaatagccagacggctggacaaaccaaaccttcacttatgctataacacaactcattagcatcggcctcccagaaagtcaaactctgactaagattccaccttgcaccatctccgaatcccaatcataagtgaaccaagacttcaagaggcattcagattgctaagggaaaatttagttaacatcttaaattgtcttaaactgggaatactgctgctgtagtataactcactgtcaaccaacatgaataggaattaaacatccaggataatgattttttgctataaaaagcaaaaagagagacaagctactaaactgttggtatgctgatgatagagccttgctactgagatcacccatgcatgctttctgtgcagccgacaagctacagtattatgctagagttacgctgtggcaaattaagctacagtctgtcacccacagcaaccaagtcctaattgaccaagcaaagggattaacatgcaaggaagaatttataatgtataactgagaaaacatatgagctagctttgctaggagctggcaagaacactaattgattaagctaatcattcatcagaagatcactcaaggaattacttaaacaaaataataggcaatcaaagactactgcactgttacatcaaatgacacccactgttacctgtgcaagcttgatgtccttgccgtggtgggcttgcctgtgtaatcagggagagaaagccaagttgttgcaatcaaaatgttacagaacctgaaagccaatatcaagaagaaaaatgcaaaccagatgagacgttgttggaatttggtaaatttttagacggaaaaataaaataggtccaagagctgctgccgctgctgagcagttagaacagagcagttcattgaggtgcttaggctgacgatggaacgaaattcatgttaggacaataaatattagagaatcataattaaataagtaataagttgcatgtcaaaaaacataatagtgagcacaaggaaccttgttttcccttcttgaagaccaccaccagtaataataaacctattattgtagacctaggagtgaagctactttgacaaataaaaattgcatctgctccatcaaaatattctagtcattcctgtcgatcctattcatgaagataacaaaacttaccatgattgcgtgtatgatggcccttgcgagcatttcatcaagcatatggtgagcatgcatggagcaggagcaatgattttgtaacaaaaatgtggtttcttgagatcagtagcaaaatgcagttgaaggccaaggaaagagagatactgaatatacccaagtagaggtatttcttaccattagaatagccaattctggcctcccaccagccattgtggtggtgcctgcaaatccacaattctcatcagtatgtagtatgctcccctgatcaccaaaaaaaaacattcagatttgcagcatggtttcacattgcaggcaagctgaaagaaatctcatcctagaatttgtggccttccggattcaagaacgctgatctagtgggtggtgcatcaagcggagtcct

SEQ ID NO: 6800 - DNA, 339 bp, Setaria italica
  Peptide Sequence Number=SeqID_72774
ctgcggtgcttcgtcgtcccagtccgggcgatggcctgcttggaggcgccccctcccctcgatctccgcccggccacgggcctccgcggccggaagcttcagccatggcggctcagcctgctgagctcctcctcatgcaaggcttggactctagtgtgtcgacagcttccaatttgcaatgcacagtcatatactgatgaactatgggtagctgctcctcaaagccctgcatcggttcggtcaaggttgcttgctgcagaaagagaggaggacaaaagctgttctgtcattgttcttgagacagaagggtttgagaagtacgttagctgcacggatcgt

SEQ ID NO: 6801 - DNA, 464 bp, Setaria italica
  Peptide Sequence Number=SeqID_72775
aagcacgactccaggttggtcgccatgagccgcgagtactcctccgccgtgtactccgccgccggcttgaacaacagcatccccgcgttgttcaccaggatgtcgagcttgccgtcgaaggtctgcttgaccgtgtccatgagcttctctctgtcggcgcgcaccgcgacgtcgcagacggagacggtgacggcgagccccttctccgcccaccgccggcggcagtcctcgaggtctgctgcgctgcgggagcacgtgagaacccgcgcgccgaacgccgccagctcctccacgacggcatgcccgatccccttgctgccgccggtgaccagcgccgtcgcgcctgccaggctccacctctcgcccatgcttctcccgccggccgccgccgccatggccctcgatctccctccgtgcgcgcgcgcgtatttctcgcgttgtggataattgttgcacacactcac

SEQ ID NO: 6802 - DNA, 1066 bp, Setaria italica
  Peptide Sequence Number=SeqID_72776
atacttttgggatggtttaagaaagggcctggaagccttgtgaggataaacattttgtgttaaggctattgattttgggaactgatttggtaatcagtgcaatggagtgcaacagagaagaggccttgaaggccagggaaattgctattaagaagctggaaagcaaagattttgctggtgctaaaaggattgcccttaaagcacagagaatttttccagagatcgagaacataccccagctgttaactgtctgtgaagtacagtgtgcagcagaagcaaatataaatggaatgttggacttttatggaattctccaagtggaagtaacagcggatgagatgaccataaagaagcaatatcgtaagcttgtcctctcacttcaccctgataaaaacagttatgctggtgcagaatctgcctttaagtttgttgcagaagcatacacaacattgtctgatcgagcaaaacgatatgcatatgacatcaaatggagggttgcttctaaagctgccccaaagcaggctacacaacggacacaagctgcagaaccaacacgggctacgcgaccgaatcagtctacacaaacaaaacaggctgcaaaacccaagcaggctgcaagaccaaagcagactgcgaaaccaaagcaggctacacaacctaatacggctaaggaaccagaacaggctacacggccaatgcaggctacagaactaaagcaaaccaatcagccgaagcaggctacagaaccagtgaagactacagagcgaagtaacaaaaatgatgccaatagaagtagcacagcaggatatggaccatcaggttcaccacccacagatgggtggacattctggacagtgtgcatccactgtgaaacaaaatataagtactatggtgacgtactgaatcgtcagactcgctgtcagaactgcaagcaaaatttctttgcatacaagataggcgaagaagatgtgccttctgtgttctcgtcaaaagcagccaatggtgctgggcaacagggctgtgttcccactcaacaaggctgttcaacaaatttctcttcgaaaga

SEQ ID NO: 6803 - DNA, 816 bp, Setaria italica
  Peptide Sequence Number=SeqID_72777
cgccgccctccggcctccccgcaccagggcgacggcgtcctccgcgcctcgcgccaaggggcatggtggagattttggccccacaaaggggatgaagccgcggggagccagtttttttgggcttctcctccctcaactggctcctttcagcgggaattgcggggcttctccggtgaagccgttttgtgttccccgttcggtacggcttcgcgagaagctggtggagaagcggctcaagaagccctgccaaagtcatcacgttaggtcctgcccgagtgacccatcatcaatcaaactagctggttgagcgcgagcaatggagttggggacgggggcgatagggagccttctccccaagctggttgagctgctcaaggaggagtacggcttccacgagggcgtaaggaagaagatcaagtctctctcacgggagctggagagcatccatgccgtcctccgcaaggtcggtgaggtgcatccggaccagctcgaggagctggtcaagctctgggcgcacgatgtcagggagctgtcctacgacatggaggacattgtcgacactttcttggtgcgcatcgacgacggtcctgagcatgttgatgcacgcatgctcaggcgtctccggaagaagatggcaaagatcttcaagaagtgcaagcatcaacgcaagattgctggagctatccgggacatgaacaagagagtcgaggaggtggctgcaaggcgtgacaggtacacggtcgacaacgttatcgccaagcttgcaagtcctgctaccattgatcctcgcatgcaggcgctatacaagaagacggc

SEQ ID NO: 6804 - DNA, 597 bp, Setaria italica
  Peptide Sequence Number=SeqID_72778
cccgctccagccatcgcggtggggtccaggggcgtgtcgccggtgccgtggtactaccacccctccacgacgccgcctccgcctccgccgccgccggccgcccactacgcccacggcgcgcaccagcagtaccacggcgtgctccccttctaccccgccgccaccacctacgggtactcgccgaactacgtcgctgacctgagctacaacgcgaagctaggccaggctgcggctgcggctgccggcacggccgggtcctacatgcaggggcacttcacgtacccggcggcgcagggcggcatggtggcgcccaacggcatgatgccggtgtacccgttctaccactaccagtaccacggctcgcagggtctgggcgtccccgccgcgcacttcttcccgccggcctccgcggccgccgtcgccaccgtcccggccatcatgtccaagcccaccgtcatggcccctcctcccaaagtggagcaggtgacgggttgcagctgaaggcaagggcgcatgatgatggctggctggctggcgacggtgagcggcggcaatgaaaggggaaaggaggccaaagggtgctctgggtttttaaca

SEQ ID NO: 6805 - DNA, 715 bp, Setaria italica
  Peptide Sequence Number=SeqID_72779
caccggtagaacttcattgagccctgccaaacttaatacagatccatctggagttttgttggttgggttggggcgtataagcacacaatgattctatccaatcgtcggtgcagatgtaagagtaatggccagagcagaacttctattctatatggtcgcaatggctcctcctccttgcattgctcctctgctcaacagatcatgctcctttagctcaccatcagtataatattggtcaattttcatccctgtctcatttggtcacgggaactctagctcttcgcctcttccttctgtattggcgtatccagtcctgacagtgcctcaaacaaacagtgatcaaatcctgcatgatgatcttgacagggtcctgctcacattctgatgcattcttctgacgtcattttgttatccttgtgaacctgatgtgctttcctctgtggcctagccatcccatgcctggacggctgaaccatattcctgaagtacttggtccaagaatgtctgtcaggccacttttgactacaaaatttcagtggctgagagaaaactctatattctgtagtcatgtgaaagtggatcactcagacttgcaagtgattttttcctatccgtgcaattaactcattgctttggtcgccagaagtcaaaatgacagaagcatagcatagcatgaccccccacctccacagctcccaccccattgatgtcaaca

SEQ ID NO: 6806 - DNA, 953 bp, Setaria italica
  Peptide Sequence Number=SeqID_72780
ggtgggcatatccaaagatagcatagtgaagaatccatctcaagcagcataaggaaatgttttccagagcaaaaatttgtcaacaaacattgccctcataacagttaaacgcttgaagctctggttgaagagggtccacagaatccaataagcctcttcatcacttatatgttgtgatgcaagctgacgcaacaactcttctgtcaacctttcaatagaatgttgatctttcaatgtttcaacaatattgaaccaaaattgagactgggaaacatgctggatcatctcgggacttatggacttatgatctgatggtacacatctatgtaggtgattgcagatcctaggaatcaattcagcaactaaaatgccagtagatccacgacgactaacacgagatagcacttcacccacaaagaggaacacagaactcagggcacaatgttcattagcatctttgtcagcagccaactgaacagttgctgcttctgctccagcaagaagttggctgacaacatccttgaagaatgaggttgaagtagagtgcagctgaagttcccaatcttgctttatctggaacagatgcaagtagttgtgcaactcttgaaacaactattgttttatctgggttgagaacatcattaccatgcttattagagcgagtaaactccgcaacgatttgcgaaacccccttattatcaagcaagcatagaaccagtagcctttcaaggttcaagcaaaaagttcgatggtcctccttagaatcttctttttcagataacgctggtacaagagcttgaatcacttcagttggaggtcctttgacaaaaaatgaatcataaatttcatttcttgcagaggcttggatcttccataaccacttcaaggcaacattgctgagcaatattttagacatagtaggaaatgctggaccatgataaaaggcacgcctc

SEQ ID NO: 6807 - DNA, 1196 bp, Setaria italica
  misc_feature (1193)..(1196): n is a, c, g, or t
  Peptide Sequence Number=SeqID_72781
ctcgccgcccccatcaaaatcgtcacacgagcccgaagagatccccaaaccctaccacacgcaggcacgctctcgcgcgcacccgggatcctcgaatcgaggaggaggaggttgaagaaggagattcgaggatgttccgcaaccagtacgacaccgacgtgacgacatggagcccccaggggcggctcttccaggtggagtacgccatggaggccgtcaagcagggctccgcctgcgtggggctccgatcccgcacccacgccgtcctcgccgccgccaacaagcccgcctccgagctctcctcctaccagcgcaaggtcttccgcgtcgccgagcacgccggggtcgcgctggcggggctcaccgccgacggccgcgtcctctcgcggttcctgcgtaacgagtgcatcaaccactccttcgtctacgaggcgccgctccccgtctccaggctcgcgctcaggctcgccgacaaggcgcaggtttgcacacagcggtcatggaagaggccttatggtgtaggccttcttgttgccggactggatgagtctggagctcatctctattacaactgccccagcgggaactactttgagtaccaggcatttgccatcggttctcgctcccaagccgccaagactttcctcgagcgcaggttcgagggctacaacgactacacacctgagcagctcatcaaggatgccctctccgccatcaaggagaccctacaaggcgagaagctgaccagcgccaactgcaccgtggccatcgtcggccggaaggacgacggcaccatcgagccgtttgagatgattgacgcgaagaggatccaggagatcatcgactccatggaggctgtcgaggaggcacctgcgcctgcggcggcggaggcggaggcagagtccagctccatgcaggaggaggaaaggggctctgatgctgcgcccatggacatctagaccggaacactccgcatatgaaccctttacaacaccgcgttcccgagttcccaaagactagactgttttagaaagttgtgttgtgactcttgtgtacgatttgcttccatgcttcagcgtcgcgacggtgtctcttcgacgaggaagttacttgggtttggactgattatttatcatgtgatgcaaacgaatcttttggtttcggaggccatcctgactttgcatatcaaaaannnn

SEQ ID NO: 6808 - DNA, 961 bp, Setaria italica
  Peptide Sequence Number=SeqID_72782
agggttaagctgcagaagcggcaggagggtgcgatcaagcgcgagcgagctattgcgtattcatattcacagcagctagatggcgctgcgaaatgcaatcctccaaagcttaactgtaatggccggttaaaccactctggtatgctgctcaagcatcagaattttgacaagaccaatggcaactggagttggctggagaggtggatggcagcacggccatgggagaatagattgatggaggagcacaaccagaccaactccagctcaccagatctccggccaaccaaaaactgcgaggattcattcggagttcttggggatttctccgagccgaattcagtgaaggtgcgcaagaacaatgtcagcaagcgggtctgcgcgaagccaccaggagcatcacactcacagacccaccatcaacgcttcaaagcacagtcgatctcatctttgagcactgaattactcaatgatgagagttccgcatcgtcatcttcttgtttcgcatcgacccctatatcattatccacatttgtaacttcggagaagaccgaggacactgtcaggacaagacccaactacatgagcatgacagagtcaatcaaggcaaagcagaaggcgtgcaatgcccagagaatgacgacgctgaagcaatcggaggataggaaaggcatgagcgctgagttgaaggccgttcaagtgtagtagtgttcatggaactccatgcagagatgaagccggctcctacatcttgctagggtgtttgtcagttgccttgccacattcttgagtggcgctgtgctgcattgttgagttgtgtgtgtgttgctggtctgattgttcaacgtcagtcagattgccccatcttggagcagtcattgtcactttgtcattggtagagtctctgtaagatagttctttgagtagaaaacattgtgggttgtttcctaagtgttgattgctg

SEQ ID NO: 6809 - DNA, 246 bp, Setaria italica
  Peptide Sequence Number=SeqID_72783
cgtttcattcataatatagaatcaaagtaaaaaagaccatgcaattttgatctcaaaagcaaggataagataacagcatttggtcatgtgcatgtggaaaggatggatgaaggtacagttctaacttctaaattgaattgatgcaaacttaggcctctttaacatcatcaaaatgccgcaattgttctcagaataatgtcatgcaccaactcaccattacacaattagcaagacacaactattaga

SEQ ID NO: 6810 - DNA, 601 bp, Setaria italica
  Peptide Sequence Number=SeqID_72784
gcatttatgatcccttttgggcttagtgcagccataagcactcgtgtttcaaatgagcttggtgctggacgacctcaagctgcccgtctggctacccgtgttgtcatggtgctggctatcgtggtcggcatattgattggactagttatgattttggttcgcaatttatggggatatgcttacagtaacgaggaggaagtggtgaaatacatctccaaaatgatgccgatcctggctgtatcattcttgtttgattgcgtgcagtgtgttctctcaggtgttgctaggggctgtgggtggcaaaagattggtgcttgtgtaaatcttggtgcatattacctggtcggaatcccagctgccttctgtttcgcgtttctttttcatctaggtggaatggggctttggctgggaataatctgcgcactcgtcgtacagatgctattgcttctcacaattactttatgcagcaactgggaaaaagaagctttgaaggcaacggacagaattttcagttcatccctaccggtagacatgacgacatgatatgctcaagagacacaattttgttggaggcaatggccaagaagaaaacatttaagaa

SEQ ID NO: 6811 - DNA, 464 bp, Setaria italica
  Peptide Sequence Number=SeqID_72785
cgcgacgctgctggtgtgtttgcaggcgccgcggcggcgggctggttccggcctgctcctgcgtgacggggacggcagatccgccgatgtgggggcccgcccgtgacgcgctgccgacaggtgaaaactgaaaggagaagggtgacggtgacggagagcgtggtgcgaacgagatcgaaatcgaacagctttgcccgcctcagctctgactctgaatcctgatccgaaccccatcgatcacgctagctgtggtcccgggcgggtggtcgcctggtcggctccactcgctccatgtgccgcgtcccggcaatgagccgtcgccagctgcaccatgttatcgcccccgtgtgccgtagttgctgctcgtgtcagctcgcaagcgaacgcgcccggggttgtgtggccaaagattagccaacacacggtcaaaacaaagaaatagatggcgaggtcactcgcgatta

SEQ ID NO: 6812 - DNA, 486 bp, Setaria italica
  Peptide Sequence Number=SeqID_72786
cccaaggcgaaaacgaagcccaagacggccgccgttccaacggtgtccaaggcgccagtggccgtgacctcgacggcgccggtgtaccagggggtgttctgccgcgacatggctgtggtgggaaccctgctgtcccgcggcgccggcggcgggttcgaccgtgccctcccggtgaagtgcgaggcgatgagctgctgatgctgatggcgctctgctggacacaacacatgacatgtgcgacgtggcgtgcaccgagacggagacggatgggaacgtgagatccagcgaggtaggaggaaaagggagatgggtttgaattgttggtcgtccaactcacttgctgtacagtttgggggaatggaattggaatggttggggaggaaaaaaacggcgagtgcaaaaatgttgggatgcaggatggggtgatctagtggacagtaaattttggctgcatcttcatgaatgtgagttgttacagtgctagtt

SEQ ID NO: 6813 - DNA, 400 bp, Setaria italica
  Peptide Sequence Number=SeqID_72787
aaccctaaccaggaagaagccgactcgacgctggccgaatctggaggaagagggagggagcacgacggggagagacgagaagaagctgaaggcgagcgagtgtgggaaggaaggagatgaaggtccgcgcgtcggtgaagcgcctgtgcgggttctgcaaggtggtgaagcgccggggcatcgtcttcatccactgcaccgccaaccaaaagcacaagcagcgccagggcttctccaccatcgccgaagccgccgcctcatgcctccacgtgccgccgccaccgccaccgccaccgcctgtcagcggctccgcctccgccgcagcgtttgcggaggcttcgaaagtggctagacaagagatgcttacaaatttaattggcctttggtttagctgcctgct

SEQ ID NO: 6814 - DNA, 682 bp, Setaria italica
  misc_feature (681)..(682): n is a, c, g, or t
  Peptide Sequence Number=SeqID_72788
gtgagatcgccggcgctcaccgcaagctgaccgcccggatccagggactccgcagccgcgtcgccgccggcgaggcgtgcaacatcgactactacctgctactgggcgttcggcgcgggtgcacgcgctccgagctggaacgcgcgcacctgctgctctcgctgaagctcaagcctgaccgcgccgtggtgttcggcgaacgcctggagctcgtggacgagcaccgcgacctcgaggcggtgcgcgaccaggctcgcatgtccgccaccgccaccgccaccgcctgtcagcggctccgcctccgccgcagcgtttgcggaggcttcgaaagtggctagacaagagatgcttacaaaatttaattggcctttgggtttagctgccctgctgaagaatggcgaaaaatgatgcatctgctctactatagctggcatttcagaagcagatgatccatagagctagttggcattttttatatcaaacaaaagcttgtagcaaaaactcagagatgtatcatcatgatgtattttgcagtaactactcgtcagttcaaatggtcctgtggtggaataatatcagcacatattgttacgcttcttaatatgtcttcttttgttcaaacaaacacatttgaagagatcaatacatgactctgctatttaccttgaacaaaaaaaaaann

SEQ ID NO: 6815 - DNA, 926 bp, Setaria italica
  Peptide Sequence Number=SeqID_72789
aggtgttccggttcgggggtgagaggcagagatggcggcgtcggatgttgagtaccgctgcttcgtcggcggcctcgcctgggccaccgacgacaactcgctccacaacgcctcagccccttcggcgaggtcctggagtccaagatcatcctcgatcgcgacacccagaggtcccgcggcttcggcttcgtcacgttcgcgagcgagcaggcgatgcgcgacgccatcgaggggatgaacggcaaggagctcgacggccgcagcatcaccgtcaacgaggcccagtcccgcggccgccgcgttggctgccaagcaggaagctgcgaagcaagaaccaccgcagccggtgcctgagaaatccaagaccacggagactgtccgtccaaggagcccgccaggccgtgcgcccaaggcgaaaacgaagcccaagacggccgccgttccaacggtgtccaaggcgccagtggccgtgacctcgacggcgccggtgtaccagggggtgttctgccgcgacatggctgtggtgggaaccctgctgtcccgcggcgccggcggcgggttcgaccgtgccctcccggtgaagtgcgaggcgatgagctgctgatggctgatggcgctctgctggacacaacacatgacatgtgcgacgtggcgtgcctcgtcggtcgtgccgccgcgttccaggccggtggccgcccggccgacgccattgcggactgcaaccgcgccctcgccctggaccccgcctacatcccagcgcttcgtgcccgcgccgacctcctgcagtccgtgggcgcgctcgccgattgcctccgtgacccttgaccacctcaaactcctttacgatgccgcgcttcgggacggcaagctcccaggcccgcggtggcggccacagggtggcgtgcggtaccgtgagatcgccggcg

SEQ ID NO: 6816 - DNA, 681 bp, Setaria italica
  Peptide Sequence Number=SeqID_72790
ggacacccaatggaggtacttggtcctgggccaagcttgcttccacctcggcctcatagaggacgccatggtgctgctccagaccggccgccgcctcgcttcagcggcgttccgccgcgagagcgtctgctggtccgacgatagcttcacgtcgtccgccgccgccgccgcggtcgccaccgttccatcggggaaaacgtcaaagtccggttcggcgttcattatcccggccatggaatcggaggccgtgtcccagctcctggcgcatgtcaagctcctgcttcgccgccgcgcggccgccatggccgcgctagacgcagggctgccggccgaggctgtccgccatttctccaagatcctcgaggcacgccgcggtgtgctgccgcaccccttcgccgcggcgtgcctcgtcggtcgtgccgccgcgttccaggccggtggccgcccggccgacgccattgcggactgcaaccgcgccctcgccctggaccccgcctacatcccagcgcttcgtgcccgcgccgacctcctgcagtccgtgggcgcgctcgccgattgcctccgtgaccttgaccacctcaaactcctttacgatgccgcgcttcgggacggcaagctcccaggcccgcggtggcggccacagggtggcgtgcggtaccgtgagatcgccggcgctcaccg

SEQ ID NO: 6817 - DNA, 804 bp, Setaria italica
  Peptide Sequence Number=SeqID_72791
ccagggactccgcagccgcgtcgccgccggcgaaggcgtgcaacatcgactactacctgctactgggcgttcggcgcgggtgcacgcgctccgagctggaacgcgcgcacctgctgctctcgctgaagctcaagcctgaccgcgccgtggtgttcggcgaacgcctggagctcgtggacgagcaccgcgacctcgaggcggtgcgcgaccaggctcgcatgtccgcgctgctgctgtaccggatgctgcagaaggggtactcgttcgtcatgtccgccgtgctggacgaggaggctgccgagaggcagagggcgaaggacgccgctgcggccgctgctgcagccgcggccgccgcgttggctgccaagcaggaagctgcgaagcaagaaccaccgcagccggtgcctgagaaatccaagaccacggagactgtccgtccaaggagcccgccaggccgtgcgcccaaggcgaaaacgaagcccaagacggccgccgttccaacggtgtccaaggcgccagtggccgtgacctcgacggcgccggtgtaccagggggtgttctgccgcgacatggctgtggtgggaaccctgctgtcccgcggcgccggcggcgggttcgaccgtgccctcccggtgaagtgcgaggcgatgagctgctgatgctgatggcgctctgctggacacaacacatgacatgtgcgacgtggcgtgcaccgagacggagacggatgggaacgtgagatccagcgaggtggcgggaaaggggagatgggtttgaattgttggtcgtccaactcacttgctg

SEQ ID NO: 6818 - DNA, 934 bp, Setaria italica
  Peptide Sequence Number=SeqID_72792
taggaccgacgaaacgtaggtacgacgaagatgatgcttgacacccggcgccacgccttgatggtcttgatcttcttgtcgagccggtgcttgcgctgctgcagcttctccagcatggtcagctgctgccggtacacggcctggaaggcggcgaagaactcctccgtgaaggggtcgccggctgccttgaactggcgcagctcgtgcagcgtgcgcgcgtaccgggcggagggggcggcggcggcggcgtcctcctcgtcgtcgaatcgctggagcgcgacgtggaggaggagctgtgagtcgcgggcgcgcttgaggcacttgtcgagcgcggtgcagaagtcgagggtgtggaggctgctctcgaagtagtcctcgacgaggtcgaacagctcggggctcttccagatgtccttcttgcagtcgaggatgacgcgcaccacctcctggttcatgtcgaggagacagccggtgacctcgcggagggagtccagcgacagcgaacgcacctcgacgcccaccgccagcgtcgagatggcgcggctcgtgcgccgctgcagcgtcgtgtcgaacgtgcgcagctccgggtccgactggcacgccgcctcgtacgagctcagctcctccgccggcgccgcctcaggcggcagcgccggctccgacgtctccggacgcctgctgctgccgctgctgtggccgttccccattgccggaagcagagacgctaggtgacacactcaaatcagaaaccccaaaaagggaaaaaaaactccccttggacgaatggaatctaggaccaaataatcaagaaacgtttcaggaactaaaatggatcaaaccagcgagcattggcagaacccaaggattctggcaacctaaggggttcccaagaaaccaaaccaatagagaaattccgagagctcgggaaaaatca

SEQ ID NO: 6819 - DNA, 409 bp, Setaria italica
  Peptide Sequence Number=SeqID_72793
gagaactcaaaacctagcctagtcatcaacccaaacgcaacgaacagcactcctaatcccgtagattaactacacgctacgcgtgcattacatgcgcaaccgatcgaatctgcacaaagatgacgagaacgaataagatcagatgaagctggtcattagcgcacacactgcagggagcagctagctagcttgcagcaccgatatgatatcacatctgcatcaggctgttgtagttgtagttgtagtgctcgtccaatcctaggtccatcagcaccccgctgccgcattgatcgccggcggcgccgccgtctctcgaccccgccgccgccgcaaggacgttgctgccgccgtcgtggggctggccgtgcaagtcgaatatgctgctgtgctgatgatgcagcagggccag

SEQ ID NO: 6820 - DNA, 545 bp, Setaria italica
  Peptide Sequence Number=SeqID_72794
cgccactgccattgtccggccttgcaagccacacaatcgccactcaaagacgcgagcgcgagagcgaggcgaagccgcccacgcaccaacctcgccgccgcccccccctcggtctggccggattgccgcgtccagccgtccaggcaaggaacggagcgcgaggaacccagccggagccggaggaggagatgatggccggggacagggtggcgcctgtgccggcggtgattgtccgcctcgccgcggtgggcttcctgttgattttgattctgtgctcctcccccgccgccgtggtggtggtgtcggcccggacgatcgggcagacgtgcgcgctggaccggaactgcgccgccggcttgcactgcgagacgtgcgtggccaacggcaacgtgcggccgcgctgcacccgcgtcacccccgtcgacccgcagaccaaggcgcgggacctgccgttcaaccggtacgcgttggctgacgacgcacaactcgttcgcgcggctggggcagaagtcgcagacaggggtcgccatcgccacgccgtggaa

SEQ ID NO: 6821 - DNA, 907 bp, Setaria italica
  Peptide Sequence Number=SeqID_72795
acgctaccgcggccgacccctgcaccttcaccggcgtcgcgtgcggcaccggccgcgtcgtcaccggcgtctccctgagagccctgaacgtctccgccgcgtccgtgcccttcgccgacctctgcgccgcgctgccgtccctgaccacgctgtccctgccggagaactcgctcggcggcgccatcgacggcgtcgtcgggtgcgcggcgctccaggagctcaacctcgcgttcaacggcttcagcagcacggtcccggacctctcgccgctcaccaggctccgcaggctcaacgtctcctccaacctcttcgctggcgcgttcccgtgggcctcgctcgccaagatgccggacctctccgtgctcgcgctcggggacaacccattcctcgcggccacccacgcgttccccgccgaggtcaccaggctcaccaacctcaccgtgctctacttgtccgccgccaagatcggcggcgccatcccgccggagatcggcaacctggtcaacctcgtcgacctcgagctctccgataacgacctcgccggcgagatacccaaggagatcgccaggctcaccaacctcaaccagctcgagctctacaacaattccctccatggagagctccccaccgggttcggcgagctcaccaagctgcagtacttcgatgcgtccatgaacaacctcaccggcagcctcgccgagctccggtccctcaaggagctcatctcgctgcagctcttcagcaacaacttctccggtgaggttcccccggagttcggcgacttcaaggagctcgtgaacctgtccctttacaacaacagcctcaccggcgagctgccggcgagccttcgggtagcgtgggggctcggcaacttcaccgacctcatcacgttacgctttcccttacc

SEQ ID NO: 6822 - DNA, 950 bp, Setaria italica
  Peptide Sequence Number=SeqID_72796
ctcttttagttttttttttttttttggtttaaaacaaacgtgttaagccagggttctccgctggtgagcaagcgtctgcagctctacgacctgaacagaatgagatcctcgtgcgcttatcttctctgacgcccaggattaaccaccctcttgcagtgactactcggcgacagtagataccaataggatgaaattcgaaaggaaaaatgccgaccaaaaaaagcttctctatttccacactgaatcgctcaggaaccggagtgcagggacgcctttcacctccacatcaaggagcggtgcctggatcagcttcaggccgccaagttcacggtcctcccttatagcactgaaggcgcgtgcttgttccctccgttttgcagcgcagaatctgcagtcggatgcagatggttgtagcacttgatttacgacgagccttcttgtgtgcgccctaaccttctttaaggacgcgtggaatcttgatgactcgtcaactgccatcatcgttggaattgtgacaatgatgaattctgttgctcgtggatcaaacaaaagctcacgcactctggcagtctgctgccttagttcctctagcctggaagaaattaattgcccgttctcaggagacaactttaaggctggcacgaatgaagcggcatttacacccttaatgagcatatcttgcaacttttcaatccaattattagctgacagaagcttaagtgtatgtccagtggacggagcatccagcactatacgcctaaatttatcggtaccttgcagttcaattgattttatcagctctgatagtgcatatgcttcttcaagtccaggggggattctattcagcatctcattgagcgtaaacggattagcagatgcaagccccatccttccaagtacattgttgatgaaagatccaaaacttgttccccctctatcttcacacagcc

SEQ ID NO: 6823 - DNA, 752 bp, Setaria italica
  Peptide Sequence Number=SeqID_72797
gtactgcagtatacagttatgccacattgaggcaagtcaattatattgtgatttttgactttgtgattgcatgctgcgttgaatttaccgtcttctatttcacaacagcatgtctaaatagggattggtgaaatggaactaaacacatttactccgtaatccaacagagtacaaacgactcaaaacagggaaacccagaaaaacagtttggtataacagtttacagacaaacagacatatatgagtttcatggaggtagcattcagttgtaacagataaaatcactagttacattaaacctcaccttaatgagcatatcttgcaacttttcaatccaattattagctgacagaagcttaagtgtatgtccagtggacggagcatccagcactcttgcagttcaattgattttatcagctctgatagtgcatatgcttcttcaagtccagggggattctattcagcatctcattgagcgtaaacggattagcagatgcaagccccatccttccaagtacattgttgatgaaagatccaaaacttgtttccccctctatcttcacacagccaatctcagttgcataaagagagtcaaatccatcaatacgtacagatttgccatcactcacgtcccagtcttgttcaaatgaagcacacagtgatcgtgttaggtctgtagacacgatgagtgtcggttcgccatgcttggcaaacttcacagcaagtgacgcggccatgctagttctcccaac

SEQ ID NO: 6824 - DNA, 271 bp, Setaria italica
  Peptide Sequence Number=SeqID_72798
aagtggtcgggggaagtgacgattcggtatgagcgcaagcggaaagtgtcggatgtgagctgcttcagcacgaagaggcaccgactactagcgccggactcagatttgatggaacacagcgagcaggagtcgaatcagctggttgcacaaacctgtgccccagctgctactggagaggtacatttggaggttatgcaagagttgcaggataggcttcccactatcagcacatttatcggtgaaccttccttaggacttccaactggggcta

SEQ ID NO: 6825 - DNA, 380 bp, Setaria italica
  Peptide Sequence Number=SeqID_72799
gaattggttatggccaaattcactaaaaggaaaatcctctcaagagattagtgcaaacaattagtctaagtaaagtaagaacaataatcttgatgaggggactagaatcatgttgtgatcatgcagttagatcatctcgtgtcgagaacaagagccgtgtctgaaaatacgcccaagaaagagagcatcaaacggaggttgggtctcggacgatttatttgttgtttgcaaatgatgtccagaagattttatagtatctgtttggccctgtaatcagagagttttcaccttgccgtggaattggttatggccaaatttttgcttctagagaactaaggaagtttgttgttttgtgtgcaagcgaaaattaaaaaaaaaaa

SEQ ID NO: 6826 - DNA, 438 bp, Setaria italica
  Peptide Sequence Number=SeqID_72800
tggaaccaatgtattcagtcgagtttgaagctatccaaggtggccatggctgcaaagttcccccaggaaagagagacttcctcataccagtggacgagaagcatgactatgactggttgatgacacctccagctgcaccactgtttccttcccttgagattgaagccaactcctcccaaatggtgttccaaaggctcttagccaagcctgaggcaactaaagcatcggcacgaccagcatcacccacctccaactcttcgtcgagaaaaaccttcatcaaaggcgctccagccatctccaaagagaagaagcaacctcacactgcaggccagagatcagaccacaaggttccagtgaatggacatcagaaggccgctgctgcagctgttccagcaggtaccagaaccagtggcgcgccgaagaaacactcggagaggt

SEQ ID NO: 6827 - DNA, 257 bp, Setaria italica
  Peptide Sequence Number=SeqID_72801
ttggacagatgggcagaaaatagtgctggagagattcttagttcggtgatgtttccccagcttaaaaaactagtaattgataagtgcgataagcttgcaagtctcccaaggttaccggttctcacatatctcaatctatctggtcgcaaagggaataattctataggagctcttatttcgatgcctttgggctctttgccttctcttatccacttaagaatatcatttttgctggtagacgtggtgatgcctccaga

SEQ ID NO: 6828 - DNA, 245 bp, Setaria italica
  Peptide Sequence Number=SeqID_72802
tctgtaattgagttggctacaaatagcacatgtgatctgcctgacacgatcgagctgctgcgaggaaaactgcaggaagctattggccgcaaaaggttcctactcattctcgacgatgtgtggaacgaagaccaaaacaagtgggaggatgacttgaggccgctactttgttcttcaattggtggatcaggaagcaagatagttgttacaagtagaagccgacaagtggcgtcaataatgggcac

SEQ ID NO: 6829 - DNA, 249 bp, Setaria italica
  Peptide Sequence Number=SeqID_72803
aaataaatctaaatgaactattgttgtattgggatcattttcgtgatgaatatgacaagtctacaattgatgaggccactgatcatgaacaagtattggaatctcttgtaccgcatgataagctaaaaattttggaggtgcatagttatggtggcctcacaatctcggaatggatgggaaaccctcaaatgttccggtgcttgagagaacttattatggtcttctgcctatggtgtaaggacctgccaa

SEQ ID NO: 6830 - DNA, 216 bp, Setaria italica
  Peptide Sequence Number=SeqID_72804
ggcaactgagtatgtcatcagattgactgcacttggagttcagttgggtttggactgatcactggatgcacttggagttcagtcggcaaaggacaatacaaaaaattagaagcctgttccattctgtgccacggaagcttcttcttgtctcgctgatcaaggcacgcaaaatgcacagtgcaggatgatcgagcacataacaataagtcacaagga

SEQ ID NO: 6831 - DNA, 448 bp, Setaria italica
  Peptide Sequence Number=SeqID_72805
ggataaggatgtgaacctcttggaaccaatgtattcagtcgagtttgaagctatccaaggtgagctgtttggttgtggcaatcctttttcctggtcatgttatcaggaattttcatgaacacgtccattaccggtgcaaatcttgtgcaattgtttcctcgaaagtggattcactcactctggtgtttgcatacctattgttgtgctaggtggccatggctgcaaagttcccccaggaaagagagacttcctcataccagtggacgagaagcatgactatgactggtacgataggattaaactcgaggacgagaagcatgactatgactggtacgataggattaaactcgagagtctgtaccctcaaccgtattctgcataggatggaattgcttctaaaaggacagtttattgtcaggttgatgacacctccagctgagtcaacgtt

SEQ ID NO: 6832 - DNA, 467 bp, Setaria italica
  Peptide Sequence Number=SeqID_72806
gcaaagagatcctcccttcccggccttacaaaacatctgatgctgcattgtgagtatgattttatccacaagtttctgtgtgtatctatcaactcctaattgcattagaatttttataattttgcttttaaaaaagtaacatgcatgttaggaaaaagaaaaaggacctagatgaaaacaaaggcattgttccattagaggacaaggagaaagcaacactatgcttactaaaccattgaatcagtcaatcattttccatttggttgcattgatccatccgtgcgttcaccagtaatcaactatatttctgtaacctgtctgcagttaattccagcaagccttggaattgccggcaaatttggaatcttttgggtagtattcatgtgtaacctttgtcgcagtctccaaacccctgatcctctcaattgttgaagcaaaggtatgcctgtttcttgaagatgaaccgc

SEQ ID NO: 6833 - DNA, 478 bp, Setaria italica
  Peptide Sequence Number=SeqID_72807
cttgacacaaaaaggggaaacgtaatacttacaacgagttggtttggaggtcctttttccaacatgtgatattagagagggagatcgatcctcctaatgattttgattatccctcaaaacaagagataaatggatgtaaaatgcacgacttgatgcatgaccttgcaaaagatgttgcaaatgaatgtgcaaacgcggaagagttaattcaggaaaacctgcctgtaaatgacgtccgtcacttgcatatttcgggaaaattgaagtatcaattgaacaaaatcagccagttactgggaggcactatgtatcttcgcactttgttgacgccagaatcatcatacaaggatttgttgaagtcaaaactgatatcatcaagagcattgtgtttttattgtggagatacttcaatcgtccatatggagctcacacgcacagcacatttgcggtatcttgatctctctggctcaaagatttg

SEQ ID NO: 6834 - DNA, 624 bp, Setaria italica
  Peptide Sequence Number=SeqID_72808
gaagtcaaaactgatgtcatcaagagcattgcgtgttcattgtggagatatttcaatcatccatatggagctcacatgcacaacacatttgcggtatcttgatctctctgactcgatgatgattgttagcttgccaaactcaatctgtatgttgtataacttactgtctttgaggcttaatggctgctcccgactacaatatttacctgagggtatgagaactatgaggaagctctgccatatttatctcttggggtgtgatagattggaacgaatgccccccaaaacttagtgtactacacaaccttcgcacactaacaacatttgttgtgggcacaaaagatggatgtggaatcgaggagctcgaagacctacaacagattggcaataggttggaactgtataatttgcgggaagtaaagtgtgggtcgaaggccaatctccatgagaaacataatctaaatgaactattgttgtattgggatcattttcatgatgaatatgacaagtctacaatcggtgaggccactaatcatgaacaagtattggaatctctggtaccacatggtgagctcaaaactttggaggtacatgggtatcgtggcctcacaatctcgcaatgga

SEQ ID NO: 6835 - DNA, 378 bp, Setaria italica
  Peptide Sequence Number=SeqID_72809
ccataatacaccaatatgatgcagagtggttgttctcaagtatgccatcagattgatcactggacgcggtgctccacattaaccaatccgtgtctcctcgctggtttgtgctgcataagcattatcgtttccgtatgaggagcctctaccttttctcggcaaaggacaatataaaaattagaagcctgttccattctgtgccacggaagcttcttcttgtctcgctgatcaaggcacgcgaaaggtgcgacaggtgaacatctagtccaacacctaatgctttgatccaacacctggcgatctgtgaactgcagtgcaggatgatcgagcacatgacaataagtcacaataagtcacaaggaagaagtaaataaagaa

SEQ ID NO: 6836 - DNA, 633 bp, Setaria italica
  Peptide Sequence Number=SeqID_72810
gtagcctgtgaggaagagcaaggaagccctgcgagcaaggaaacatggcagagtcgctgctgctccccgtggtgcgcggcgtcgtcggcaaggcggctgacgctctcgtgcagagcatcactcgcatgtggggtgtcgacaaggaccgcctcaagctcgagcgccacctggagtacgtgcagtccttgctggccgacgccgaggcgaagagcgagaccaaccacgccgtccggacgtgggtgaaggagctcaaggccgccgcgtaccaggccgacgacgtcctcgacgacttccagtacgaggcgctgcgccgtgaggccctgagcgaccagcccaggagaaggcaggtactgagcaacttcacctcagagaatcgtcttgtattctgtgataaagcgagcagaaacctgaagaacgtgctcgaaaagattgaccagctcgtgaccgagatgacaaagtttggcctggtggcgcttgcggaggcgccgccggaagctcttcctcggcagacgcactcagcactggatgaatccatggagatatttggcagagaagatgacaaagatagggtggtggaactgttgctggaccagcaagatcggcaggatgtacaagtgctgcccatctttggaa

SEQ ID NO: 6837 - DNA, 843 bp, Setaria italica
  Peptide Sequence Number=SeqID_72811
agaggcgttgcagagaaggtgggagtactttgacttgatcgcttctattcccataatacaccaaatatgatgcagagtggttgttctcaagtatgccatcagattgatcactggacgcggtgctccacattaaccaatccgtgtctcctcgctggttttgtgctgcataagcattatcgtttccgtatgaggagcctctacctttttctcggcaaaggacaatataaaaaattagaagcctgttccattctgtgccacggaagcttcttcttgtctcgctgatcaaggcacgcgaaatgcacagcagtgcaggatgatcgagcacatgacaataagtcacaataagtcacaaggaagaagtaaataaagactaaaaggatgaagaaagcacggaacatcctgatacctcaaattctgatcaacgtgtcgaaaggaaagtaggaagtatatatggaacgcactgctgagtggtggcatgcgggcctgtgtgcatatcttgatgaggggactagaatcatgttgtgatcatgcagttagatcatctcgtgtcaagaacaagagccgtgtctgaaaatacgcccaagaaagggagcatccaccggaggttgggtctcaggcaaatagctgaagatatcggacgatttatttgttgtttgcaaatgatgtccgatccagaactctgagattttatagtatctgtttgaccatgtaatcagagagttttgaccttgctgtggaatgtttgacagcgccggccggaattggttatggccaaattttgctactagagaactaagtttgttgttttgtgtgcaagcgattactgaaactgtttagaaaacc

SEQ ID NO: 6838 - DNA, 1281 bp, Setaria italica
  Peptide Sequence Number=SeqID_72812
gttcattttccccaaggactatgagatggagaaggacatgttgattcaactatggatggcaaacggttatcttcatgaagaggggacgatggacttgacacaaaaaggggaatatgtcttcaacgagttggcttggaggtcctttttccaacatgtgatattagtgagggtgccctattggcctttacatttctcaaaccaagagagatgtaaaatgcacgacttgatgcatgaccttgcaaaagatgttgcaaatgaatgtgcaaatgcggaagtgttaattaagcaaaacctgcctgtaaatgacgtccgtcacttgcatatttcggaagattatcggttgaacaaaatcagccagttactcgaaggcactatgtatcttcgcacactgttgatgccacaatcatcgtacaaggatctggtgaagtcaaaactgatgtcatcaagagcattgcgtttttattgtgaagatacttcaatcgtccatatggagctcacacgcacagcacatttgcggtatcttgatctctctggctcgatgattgttagcttgccaaactcaatctgtatgttgtataacttactgtctttgaggcttaatggctgctcccgactacaatatttacctgagggtatgagaactatgaggaagctctgccatatttatctcttggggtgtcatagattggaacgaatgcccccaaaacttagtgtactacacaaccttcgcacactaacaacatttgttgtgggcacaaaagatggatgtggaatcgaggagctcgaagacctacgacatattggcaacaggttggaactgtataatctacggaaagtaaagtgtgggtcgaaggccaatctccatgagaaacataatctaaatgcactgttgttttattgggatcattttcgtggtgaatatgacaagtctacagttggtgaggccactaatcatgaacaagtattggaatctcttgtacctcatgataagctaaaaattttggaggtgtatagttatggtggcctcactatatcgaagtggatgagaaaccctcaaatgttccggtgcttgagagaacttcttatgtccggatgcccatggtgtaaggacctgccaatagtatggttgtcatcctctcttgagtatttatgtttacggcacatggatagcttgaccacgttgtgtaagaacatcgatgtggaagctgaagcagacaatacctctctgcaaatattccccaagctaaagaggatggaattacggtctttgcctaagttgga

SEQ ID NO: 6839 - DNA, 1298 bp, Setaria italica
  Peptide Sequence Number=SeqID_72813
gagtcaaagacctttggacacactacgatatttgaagcttgagggtgacgacgccttcataacgatatttaataaatccaaattgcaacttgggcttagggactgcttggtctctgtggaagaattggatatcaggtcattggatattgtccgctggcccgtggaggaactccgttgttttcctcgccttcgatctctgcgcatttcgtgttgctacaaacttgaggggaagggctcgtcatctgaggaagacggaatccttcctctgctccccgagtttcccgcatccctcgaggaaatctggattgacaacaacagaagtttggtggcgctgccttcaaacctcggagatctgaccaagctgaggagactctctgtgtggagttgcaatgcactgaaagcgttgccagatgggatggatggtctcacttcccttgaggcgttgacgatttttttgtgcccagggatagagaaatttccgcagggtctcctgcagcggctcccagccctcgaattcctatccatatatgactgccctgacctggagaggcgttgcagagaaggtggggagtactttgacttgatcgcttctattcccgataaatacattgaagcacccgaggtaacatccgcacagccacgaaactgaggtatgtatgctggtgcttcgcctctcccgtcaactaattctgctattgatctagctcacatcattgttctgaatgcatattgactccattcttttcggttgtactgtcagtatgtcatcagattgactgcacttgggtttgatcactggatgcggtgctccataagcattatcgtttctcggcaaaggacaatacaaaaaattacaagcctgttccattctgtgccacggaagcttcttcttgtctcgctgatcaaggcacgtgaaatgcacaggtgaacatctagtccaacacctaatgctttgatccaacacctggcgatctgtgaactgcaggttacaatagagaaacttaattgtggtgaaaatatttgatctgcggtcatattgtgacccatgtatgaatactgggactaattgtttgcttgccctttgtgcagcagtgcaggatgatcgagcacatgacaataagtcacaataagtcacaaggaagaagtaaataaagactaaaaggatgaagaaagcacggaacatcctgatacctcaaattctgatcaacgtgtcgaaaggaaagtaggaagtatatatggaacgcactgctgagtggtggcatgcgggcctgtgtcgcatatcttgatgaggggactta

SEQ ID NO: 6840 - DNA, 839 bp, Setaria italica
  Peptide Sequence Number=SeqID_72814
gtcttgtattccgtcataaagcgagcagagacctgaagaacgtgctcgaaaagattgacgagctcgtgaccgagatgacaaagtttagtctggtggcgcttgcggaggcgccgccacaagctcttcctcggcagacgcactcagcgctggatgaatccatggaggtatttggcagagaagatgacaaagatgaggtggtgaaactgttgctggaccagcaagatcggcagcatgtacaagtgctgcccatccttggaatggggggtgtgggcaagaccacgctagtcaagatggtgtacaacaacgacaaaattcagaagcactttgaattgaggatgtggcactgcgtgtcagaaaattttgaagttattcctcttgttaggtctgtaattgagttggctacaaatagcagatgtgatctgcctgacacgatcgagctgctgcgaggaaaattgcaggaagctattggccgcagaaggttcctactcattctcgatgatgtgtggaacgaagaccgaaagaagtgggaggatgacttgaggccgctactctgttcttcaattggtggatcaggaagcacgatagttgtcacaagtagaagcccaaagtggcgttaataatgggcacgatagttccaccttatgattagtgtgtttgagtgaagatgattcatgggaattgttctcaaagaaagcattttagtaaaggagtgcaagagcaagcagagtttgtcaaaattggcagatgtatcagcgagaagtgcaagggactgcctcttgtattgaagacaatgggtggattgatgagttcaaaacaacaaatccaggaattgggaggcc

SEQ ID NO: 6841 - DNA, 1234 bp, Setaria italica
  Peptide Sequence Number=SeqID_72815
tcacatatctaaatctatttggtcgcaaagggaataattcttcaggagctcttatttcgatgcgcatgcctttgggctctttgtcatctcttatccggttaagaatatcatttttgctggtagacgtggtgatgcctccagatggcaaggaaagccagagtcaaagacctttggacacactacgatatttggagcttgagggtgacgaagccttcataacgatatttaataaatccaaattgcaacttgggcttagggactgcttggtctttgtggaagaattgtgtatcatttcatgccccaatattgtccgctggcctatggaggaactccattattttcctcgccttcgatctctgggcatttgttattgctccaaacttgaggggaagggctcgtcatctgaggaagacggaatccttcctctgctccccaagtttcccgcatccctcgaggaaatcatgattaaaaacaacataagtttggtggcactgccttcaaacctcggagatctggtcaagctgaggagactcattgtgctgcgttgtgatgcactgaaagcgttgccagatgggatggatggtctcacttcccttgagctgttgactattcgagattgtccagggatagagaaatttccgcagggtctcctgcagcggctcccagccctcaaagacctagacatacatggctgccctgacctggagaggcgttgcagagaaggtgggagtactttgacttgatcgcttctattcccgataaagacatcatataagcacccgccgcatccttccctcctgcagtggtggttctcaaggctaatcttcacctctcccgtcaactaattctgctattgatctagctcgcatcattgttctgattgactgcacttggagttcagttgggtttggacgcggtgctccacattaaccaatccgtgtcgcctcgctggttttgtgctgcataagcattatcgtttctcggcaaaggacaatacaaaaatttagaagcctgttccattctgtgccacggaagcttcttcttgtctcgctgatcaaggcacgcaaaatgcacaggtgaacatctagtccaacacctaatgctttgacccagctgtgctgttcatcagaaatgtgcaagtgcgcttcgtggagcacccctcaccagtagatcggtaggagtaccatggctttgcttcctgatcaatccgttttacattcgtttagtagtccgt

SEQ ID NO: 6842 - DNA, 1666 bp, Setaria italica
  Peptide Sequence Number=SeqID_72816
gcacctaccagcaagtctcttccttctttccagcacctgttgcctcttctcagatctccctgtggttgagcctgtgaggaagagcaaggaagccctgcgagcaaggaaacatggcagagtcgctgctgctccccgtggtgcgcggcgtcgtcggcaaggacggctgacgctctcgtgcagagcatcactcgcatgtggggcgtcgacaacgaccgcctcaagctcgagcgccacctgaagtacgtgcagtacttgctggccgacgccgaggcgaagagcgagaccaaccacgccgtccggacgtggatgaaggagctcaaggccgccgcgtaccaggccgacgacgtcctcgacgacttccagtacgaggcgctgcgccgtgaggccctgagcggccagtccatggcaagcaaggtactgagcaacttcacctcaaagaatcgtcttgtattccgtcataaagcgagcagagacctgaagaacgtgctcgaaaagattgacgagctcgtgaccgagatgacaaagtttggcctggtggcgcttccggaggcgccgccgcaagctcttcctcggcagacgcactcagcgctggatgaatccatggagataattggcagaaaagatgacaaagatggggtggtggaactgttgctggaccagcaagatcggcagcatgtacaagtgctgcccatccttggaatggggggtgtgggcaagaccacgctagccaagatggtgtacaacaacgacaaaattcagaagcactttgaattgaggatgtggcactgcgtgtcagaaaattttgaagctattcctcttgttaggtctgtaattgagttggctacaaatagcagatgtgatctgcctgacacgatcgagctgctgcgaggaaaattgcaggaagctattggccgcaaaaggttcctactcattctcgacgatgtgtggaacgaagacaaaaagaagtgggaggatgacttgaggccgctactctgttcttcaattggtggatcaggaagcaagattgttgtcacaagtagaagcccacaagtggcgtcaataatgggcacccttccacctcatgaattagtgtgtttgagtgaagatgattcatgggaattgttctcaaagaaagcatttagtaaaggagtgcaagagcaagcagagtttgtcaaatttggcagatgtatcagcaagaagtgcaagggactgcctcttgcactgaagacaatgggtggattgatgagttcaaaacaacaaattcaggaatgggaggccattgcagcttgcaatattagtgataccaatagaggtaaagatgaggtattgcccatactaaaactgagctacaagcacttgtcccctgagatgaagcaatgctttgccttctgttcagttttccccaaagactatttgatggagaaggacatgttgattcaactatggatggcaaacggttatgttcatgaagaggggacgatggacttgacacaaaaaggggaatatgtcttcaacgagttggcttggaggtcctttttccaagatgtgataccagtgaggaagccctcttggccttcttttgaatatgcctcaaaacagagataaatggatgtaaaatgcacgacttgatgcatgatcttgcaaaatatgttgcaaatgaatgtgc

SEQ ID NO: 6843 - DNA, 1134 bp, Setaria italica
  Peptide Sequence Number=SeqID_72817
acatgtgcctcaagttcagggcggagagcctgaaccagcagcagctcatggaccagctgcccaagtccatctacaagagcatctgcgagcggctcttcctcccggtcgtcaaggacgtctacctcttcaggggtgtctcaagggaagggctcctgtgcctcgtcaccaagatgaaacccgagtacatcccgccgagggaggacgtgatcgtgcaggacgaggcgcccgatgacgtctacgtcgtcgtctccggcgaggtcgaggtcatacggttcgacggcgccgaggagcgggtggaggccacgcttgtgtcgcgggacatcttcggcgaggtgagcgcgctgagcaaccgcgctcaggggttcacgttccggacgaggacgctgagccagctgctgaggctgaagcaggccacgctcaaggaggccatgcagagcaggcccgaggacagcgtcgtcatcatcaagaacttcctcaaggtcgagatgcatggcatgaaggtcgaggacttgctggcagagaacgccggcgagcaggacgatgctaataatgtgctgacggtcgccgcgatgggcaacgccggcttgctcgaggacctcctcagggcagggaaggacgccgacgtcggcgacgccaagggcaggaccgcactgcacatcgcggcgtcgaaggggtacgaggactgcgtgctggtgctgctcaagcacgcctgcaacgtgaacatcaaggacgcgcaggggaacacggcgctgtggcacgccgtcgccgcggggcaccacaagatcttcaacatcctgtaccacttcgcgcgcgtgtcgagcccgcgcgccggcggtgacgtcctgtgcctcgccgcgcgccgcaacgacgtcggcgcgctccgggagctcctcaagctcggcctcgacgtggactcggaggaccacgatggagccaccgcgttgcgcgtcgcgatggccgagggccatgccgacgcggccaggttcctcatcatgaacggggccagcgtcgacaaggccggcctcgacgacgacgacggctccggctccagctctggctccggcgccgcgcggctggcgatgtcgcctggcgagctacgggagctccttaagaagcgggagctcggccaccaga

SEQ ID NO: 6844 - DNA, 2011 bp, Setaria italica
  Peptide Sequence Number=SeqID_72818
attgttagcttgccaaactcaatctgtatgttgtataacttactgtctttgaggcttaatgactgctaccgactacaatatttacctgagggtatgagaactatgaggaagctctgccatatttatctcttggggtgtgatagcttgaaacgaatgcccccaaaacttagtgtactacacaaccttcgcacactaacaacatttgttgtgggcacaaaagatggatgtggaatcgaggagctcgaagacctacgacatattggcaacaggttggaactgtataatttgcgggaagtaaagtgtggatcgaaggccaatcttcatgagaaacataatctaaatgaactgttgttgtattgggatcattttcgtggtaaatatgacaagtctacaattagtattggtgaggccagtgatcatgaacaagtattggaatctcttgtacctcatgataagctaaaaatttttgagttgcatggttatggtggccacacaatctcaaaatggatgagaaaccctcaaatgttccggtgcttgagagaactcattatgatgggatgccgaggatgtaaggacctgccaatagtatgtttgtcatcctctcttgagcatttgtgtttagggagcatggaaagcttgaccacgttgtgtaagaacatcgatgtggaagctgaagcagacaatacctctctgcaaatattccccaagctaaagaggatggaattacggtctttgcctgagttggatagatgggcagaaaatagtgctggagagattcttagctcggtgacgtttccccggcttgaagaactagatattgagaattgcgataagcttgcaggtctcccaaggttaccggttctcacatatctagatctatctggccgcgaagggaataattctacaggagctgttatttcgatgcacatgcctttgggctctttgccatctcttatccgcttaataatatcatttttgttggtagacgtggtgatgccttcagacggtgaggaaagccatagtcaaagacctttggacacactacgatgtttgaagcttgagggtgacgacgccttcacgatgatatttaataaatccaaattgcaacttgggcttagggactggttggtctctgtggaagaattggatatcaggtcattggatattgtccgctggcccgtggaggaactccgttgttttcctcgccttcgatctctgcgcattcaggattgctccaaacttgaggggaagggctcatcatctgaggaagacggaatccttcctctgctccccaagtttcccgcatccctcgaggaaatcggtattaacaacaacagaagtttggtggcgctgccttcaaacctcggagatctgaccaagctgagggaactgaaattgcggtgttgccatgcactgaaagcgttgccagatgggatggatggtctcacttcccttgagctgttgactattggagagtgtccagggatagagaaatttccgcagggtctcctgcaccggctcccagccctcaaacgcctatgcatagatggctgccctgacctgcagaggcgttgcagagaaggtggggagtactttgacttgatcgcttctattccccataaatacaccaaatatgatgcagagtggttgttctcaagtatgccatcagattgatcactggacgcggtgctccacattaaccaatccgtgtctcctcgctggtttgtgctgcataagcattatcgtttccgtatgaggagcctctacctttttctcggcaaaggacaatataaaaattagaagcctgttccattctgtgccacggaagcttcttcttgtctcgctgatcaaggcacgcgaaaggtgcgacaggtgaacatctagtccaacacctaatgctttgatccaacacctggcgatctgtgaactgcagtgcaggatgatcgagcacatgacaataagtcacaataagtcacaaggaagaagtaaataaagactaaaaaggatgaag

SEQ ID NO: 6845 - DNA, 2104 bp, Setaria italica
  Peptide Sequence Number=SeqID_72819
atttagatgcacatgcctttgggctctttgccatctcttatccgcttaataatatcattttgttggtagacatggtgatgccttcagacggtgaggaaagccagagtcaaagacctttggacacactacgatatttggagcttgagggtgacgacatcttcataacgatatttaataaatccaaattacaacttgggcttagggactggttggtctctgtggaagtattgactatcagcaaatgcctcaatattgtccgctggcccgtggaggaactcagttgttttcctcgccttcgatctctgcgcatttgggattgctccaaatttgaggggaagggctcgtcatctgaggaagacggaatccttcctctgctccccgcatccctcgaggaaatctggattaacaacacaagtttggtggcgctgccttcaaacctcggagatctgaccaagcttagggaactcactgtgcagcattgcgatgcactgaaagcgttgccagatgggatggatgatctcacttcccttgagtggttgcatattgaacactgtccagggatagagaaatttccgcagggtctcctgcagcggctcccagccctcaaacgcctatccatatggggctgccctgacctgcagaggcgttgcagagaaggtggggagtacttcggcttgatcgcttctattccccataaacacattcgagcacccgcacagccatggaagtggttccttccctcctgcggtggtggttctcaaggcaactgagattgactgcacttggagttcagttgggtttggactcatcactggatgcggtgctgcataagcattatcgtttctcggcaaaggacaatacaaaaaattagaagcctgttccattctatgccacggaagcttcttcttgtctcgctgatcaaggcacgcaaaatgcacagcagtgcaggatgatcgagcacataacaataagtcacaaggaagaagtaaattaagactaaaaggaaaatcctctcaagagattagtgcaaacaattagtctgtgtgcatatcttgatgaggggactagaatcatgttgtgatcatgcagttagatcatctcgtgtcgagaacaagagccgtgtctgaaaatacgcccaagaaagagagcatccaccggaggccacaagatgttctggaactgaattcttgaagaataccacagtgtctctttggaagaatgtgacagaagaatgatccaccaaactgtttgcaaagagatcctcccttcccggccttcaaaacatctgatgctgcattttaattccagcaagccttggaattgccggcaaatttggaatcttttgggtagtattcatgtgtaacctttgtcgcagtctccaaacccctgatcctctcaattgttgaagcaaaggtatgcctgtttcttgaagatgaaccgcgtgaggagaattgcaggaattggcaaggctaaggttccatctgcagttcaaaaagacagaggtgagagcatcgttttcttcagggagctgtacaagcgtgagaaggataataaggatgtgaacctcttggaaccaatgtattcggtcgagtttgaagctatccaaggtggccatggctgcaaagtacccccaggaaagagggacttcctcataccagtggacgagaagcatgactatgactggtacgataggattaaactcgaggacgagaagcatgactatgactggttgatgacacctccagctgagtcaacgttcacttggattgtggttcgaggcgggcaaggtcggtcggcaccatctccgtcagcggcaagcaaggcctacagcttcgacaccatgcactggcacgcgccctccgaccacaccatcaacggccagcggttccccccttgagctccacctcgtccacaaggaaagcatttgatagcatccacaaggaaaggatagcgtctgaaagacaagggaaataccctctaatttagtctagcaaatttaatgattgggcttaataagagccgggatataagactgagttggatcgtgaagaaagcacgaggaccacccataaaaatgctacgcaagaaaggaaacaaagggctc

SEQ ID NO: 6846 - DNA, 1486 bp, Setaria italica
  Peptide Sequence Number=SeqID_72820
aacaactgtttgcaaagagatcctcccttcccggccttcaaacatctgatgctgcattttaattccagcaagccttggaattgccggcaaatttggaatcttttgggtagtattcatgtaacctttgtcacagtctccaaacccctgatcctctcaatttgttgaagcaaaggtgcgcctgtttcttcaagatgaaccgcgtgaggaaaattgcaggaattggcaaggctaaggttccatctgcagttcaaaaagacaaagatgagagcatcgttttcttcagggagctgtacaagcgtgagaaggataaggatgtgaacctcttggaaccaatgtattcagtcgagtttgaagctatccaaggtggccatggctgcaaagttcccccaggaaagagagacttcctcataccagtggacgagaagcatgactatgactggttgatgacacctccagctgcaccactgtttccttcccttgagattgaagccaactcctcccaaatggtgttccaaagggtaccaatccctacccgtcaagttaaaccatcagctccaaggctcttagccaagcctgaggcaactaaagcatcggcacgaccagcatcacccacctccaactcttcgtcgagaaaaaccttcatcaaaggcgctccagccatctccaaagagaagaagcaacctcacactgcaggccagagatcagaccacaaggttccagtgaatggacatcagaaggccgctgctgcagctgttccagcaggtaccagaaccagtggcgcgccgaagaaacactcggagaggtgctatgcaacccaaaccggtggcacaagcgcaaccaagggagtgacagaccaagaaacccctttcaaggcaccgaagaatctgatcacaacaacccggtcgatattccggcgccgaactccatcggcggagaatgctcggagcaaagatcctgggtccggtgcagatgtcaagaaggagaacggcaaggcgaggaggcagtcgtatccgccgccggcgataagaggcatgacggagctgcagttacaggacaggcgggatgcgctgccgccgagagggaagagtgtggctgggagcggcggcgagctcgccaccggcaacggtggccgtgcagggagggcatcactgatgaagggcacgggaagaactgatgggagagcatggatatgatatgagcttcgaagccaggcgacgaagggagcatatacttctacagccatttccggaatctgaaactcatatggcgcccttgtattgccaactttgcaaaaacaaaattagataaatctaatgccaaatccttcagttgttgctacagtatgcacacaattttccatgccaaaagttgctggctacgggcaaacaattccagatcgctcctagaactgtggcttgcacatggtacggaatcaaacatgcttcaaagaagagtaactaaaaaaaacatgcttcaaaagaaattt

SEQ ID NO: 6847 - DNA, 2840 bp, Setaria italica
  Peptide Sequence Number=SeqID_72821
ggctatcttcatgaagaggggacgatggacttgacacaaaaaggggaatatgtcttcaacgagttggcttggaggtcctttttccaacatgtgatattagtaagggggccctatgtgccttattttagatatgcctcaaaacaagagataaatggatgtaaaatgcacgacttgatgcatgaccttgcaaaagatgttgcaaatgaatgtgcaaatgcggaagagttaattcagcaaaatctgcctgtaaatgacgtccgtcacttgcatatttcgagagatgatcaattgaacaaaatcagccagttactcggaggcactatgtatcttcgcactttgttgacgccagaatcatcatacaaggatctggtgaagtcaaaactgatgtcatcaagagcattttagtattcgttgtggagatacttcaatcgtccatatggagctcacacgcacagcacatttgcggtatcttgatctctctcgctcaaagattgttagcttgccaaactcaatctgcatgttgtataacttactgtctttgaggcttaatggctgctcccagctacaatatttacctgagggtatgagaactatgaggaagctctgccatatttatctcttggggtgttgtaaattggaacgaatgcccccaaaacttagtgtactgcacaaccttcgcacactaacaacatttgttgtgggcacaaaagatggatgtggaatcgaggagctcgaagacctacgacagattggcggcatgttggaactgtataatttgcgggaagtaaagtgtgggtcgaaggccaatctccatgggaaacataatctaaatgaattgtcgttgtattgggatcatttttctggtaaacatgacaagtctacaattggtgaggccgctaatcatgaacaagtattggaatctcttgtacctcatgataagctaaaaattttggaggtgcgtagttatggtggcgtcacaatctcgcaatggatgagaaaccctcaaatgttccggtgcttgagagaacttattatgtccggatgcccatggtgcaaggacctgccaatagtatggttgtcatcctctcttgagcatttgtgtttacggggcatggaaaggttgaccacgttgtgtaagaacatcgacttggaagctgaagctgacaatacctctctgcaaatattccccaagctaaagaggatggaattaattgctttgcctgagttggacagatgggcagaaaatagtgctggagagattcttagctcggtgatgttttcccagcttgaaaacctagaaattgtgggttgtgataagcttgcaagtctcccaaggttaccggttctcacatatctaaatctatctggtcgcgaaggaaataattccacaggagctcttatttcgatgcgcatgcctttgggctctttgccatctcttatccacttgaaaatatcatttttgctggtagacgtggtgatgcctccagacgatcaggaaagcccgagtcaaagacctttgaacacactacggtctttggagcttgggggtgatgcctccttcataacgatatttaataaatccaaattgcaacttgggcttagggactggttggtctctgtggaagaattgaatatcgggtcattggatattgtccgctggcccgtggaggaactccgttgttttcctcgccttcgatctctgaacatttatgattgctccaaacttgaggggaagggctcgtcatctgaggaagacggaatccttcctctgctccccaagtttcccgcatccctcgagaaaatcgggttttaccgcaacacaagtttggtggcgctgccttcaaacctcggagatctggtcaagctgaggatactctccgtgaggagttgcgatgcactgaaagcgttgccagatgggatggatggtctcacttcccttgagctgttgattattgcagagtgtccagggatagagaaatttccgcagggtctcctgcagcggctcccagccctcaaaggcctatacatatggagctgccctgacctgcagaggcgttgcagagaaggtggggagtactttgacttgatcgcttctattcccgataaaatcattgcagcacccgcacaggcacagccacgaaagtggttccttccctcgtgcggtggtggttctcaaggcaactgagtatgtcatcagattgactgcacttggagtttggactgatcactggacgcggtgctccacattaaccaattcgtgtctcctcgctggttttgtgctgcataagcattatcgtttccggatgacgagcctctacctttttctcggcaaagaacaatacaaaaaattagaagcctgttccattctgtgccacggaagcttcttcttgtctcgctgatcaaggcacgtgaaatgcacagcagtgcaggatgatcgagcacatgaagaaaacaccgggatgaagaaaactcggaacatcgtgatacctcaaattctgctcaacgtttcgaaaggaaagtaggaagtatatatgggacgcactgctgagcggtggcatgcgggcctgtgtgcatatcttgatgaggggactagaatcatgttgtgatcatgcagttagatcatctcgtgtcgagaacaagagtcgtgtctgaaaaatacgcccaagaaagagagcatccaccggaggttgggtctcaggcaaatagctgaagatatcggacgatttatttgttgtttgcgaatgatgtccagaagattttatagtatctgtttgaccctgtaatcagagagtttttcaccttgccgtggaatgggttatgggccaaattttgactaaact

SEQ ID NO: 6848 - DNA, 3499 bp, Setaria italica
  Peptide Sequence Number=SeqID_72822
ttttagaggctattcctcttgttagatctgtaattgagttggctacaaatagtagatgtgatctgcctaacacgatcgagctgctgcgaggaaaactgcaggaagctattgcccgcaaaaggttcctactcattctcgacgatgtgtggaacgaagaccaaaacaagtgggaggatgacttgaggccgctactctgttcttcaattggtggatcaggaagcaagatagttgtcacaagtagaagccgacaagtggtgtcaataatgggcacccttccacctcatgaactagtgtgtttgagtgaagatgattcatgggaattgttctcaaagaaagcatttagtaaaggagtgcaagagcaagcagagtttgtcaaaattggcagatgtatcagcaagaagtgcaagggactgcctcttgcactgaagacaatgggtggattgatgagttcgaaatatcaaatccaggaatgggaggtcattgcagattgcaatattagtgataccgatagaggtaaagatgaggtattgcccatactaaaattgagctacaagcacttgtcccctgagatgaagcaatgctttgccttctgttcagttttccccaaggactatgagatggagaaggacatgttgattcaactatggatggcaaacggttatgttcatgaagaggagacgatggacttgacacaaaaaggggaacgtatcttcaacgagttggtttggaggtcctttttccaacatgtgatattagagagggagatcgatcctcctaattattttgattatccctcaaaacaagagataaatggatgtaaaatgcacgacttgatgcatgaccttgcaaaagatgttgcaagtgaatgtgcaaatgcggaagagttaattcagcaaaacctgcctgtaaatgacgtccgtcacttgtatatttcgggaaaactgaagtatcaattgaacaaaatcagccagttactgggaggcactatgtatcttcgcactttgttgatgccagaatcatcatacaaggatctgttgaagtcaaaactgatgtcatcaagagcattgtgtttttattgtggagatacttcaatcgtccatatggagctcacacgcacagcacatttgcggtatcttgatctctctggctcaaagattgttaacttgccaaactcaatctgcatgttgtataacttactgtctttgaggcttaatggctgctcccaactacaatatttacctgagggtacgagaactatgaggaagctctgccatatttatctcttggggtgtcatagcttggaacgaatgcccccaaaacttagtgtactacacaaccttcgcacactaacaacatttgttgtgggcacaaaagatggatgtggaatcgaggagctcgaagacctacgacagattggcaacaggttggaactgtataatttgcgggaagtaaagtgtgggtcgaaggccaatctccatgagaaacataatctaaatgaattgttgttgtgttgggatcatcgtgatggtaaatatgacgagtctacaattggtgagtattggaatcatgaacgagtattggaatctcttgtacctcatgataagctaaaaattttggaggtgcataattatagtggccttacaatctcgcaatggatgagaaaccctcgtatgttccggtgcttgagagaactcattatgtccggatgcccatggtgtgtggacctgccaatagtatggttgtcatcctctcttgagcatctgtctttacagcgcatgaaaagcttgaccacgttgtgcaagaacatcgacgtggaaggtgaggcagacaatacctctctgcaaatattccttaagctaaagaggatggaattaattgctttgcctgagttggacagatgggcagaaaatagtgctggagagattcttagctcggtgacgtttccctggcttaaaaaactagaaattgagaattgcgataagcttgcaagtctcccaaggttaccggttctcacatatctcaaactatctggtcgcgaagggaataattctataggagctcttatttcgatgcctttgggctctttgccatctcttatccacttaaaaatatcatttttgctggtagacgtggtgatgccttcagacggtgaggaaagccagagtcaaagacctttggacacactacgatatttgaagcttgagggtgacgacgccttcataacgatatttaataaatccaaattgcaacttgggcttagggactgcttggtctctgtgaaagtattggatatcaggtgttgccccaatattgtccgctggcccgtggaggaactccgttgttttcctcgccttcggtttctgaacatacggggctgccctgagctgcaggaaatcagtttggatggtctcacttcccttgagtacttggctattggagagtgtccagggataaagaaatttccgcagggtctcctgcagcggctcccagccctcaaattcctatacatatggtgctgccctgacctgcagaggcgttgcagagaaggtggggagtactttgacttgatcgcttctattcccgataaagacattgaatttgaagcacctgcacagccacaaccacgaaagtggttccttccctcccgcggtggtggttctcaaggcaactgagtatgtcatcagattgactgcacttggactgatcactggatgcggcaaaggacaatacaaaaaattagaagcctgttccattctgtgccacggaagctgcttcttgtctcgctgatcaaggcacgcaaaagtgcacagcacatgacaatacgtcacaaggaagaagtaaattaagactaaaaggaaaatcctctcaagagattagtgcaactgggatgaagaaagcacggaacatcgtggtacctcaaattctgctcaacgcactgctgagtggtggcatgtcggcctgtgtgcatatcttgatgaggggactagaatcatgttgtgatcatgcagttagatcatctcgtgtcgagaacaagagccatgtctgaaaatacgaccaagaaagagagcatccaccggagcaggccacaagatgctctggaactgaattcttgaagaataccacagggtctctttggaagaatgtgacagaagaatgatccaaacaactgtttgcaaagagatcctcccttcccggccttcaaaacatctgatgctgcattgtgcgcctgtttcttcaagatgaaccgcgtgaggaaaattgcaggaattggcaaggctaaggttccatctgcagttcaaaaagacaaagatgagagcatcgttttcttcagggagctgtacaagcgtgagaaggataaggatgtgaacctcttggaaccaatgtattcagtcgagtttgaagctatccaaggtggccatggctgcaaagttccccaggaagagagacttcctcataccagtggacgagaagcatgactatgactgttgatgacactcca

SEQ ID NO: 6849 - DNA, 4371 bp, Setaria italica
  Peptide Sequence Number=SeqID_72823
aagacttaggaattagaataggttagaacaaggctgacgaccaaaaaataatcagcgtgcattattgcacctaccaacaagtctcttccttctttccatcacctgttgcctcttctcagatctccctgtggttgagcctgcgaggaagtgcaaggaagccctgcgagcaaggaaacatggcagagtcgctgctgctccccgtggtgcgcggcgtcgtcggcaaggcggctgacgctctcgtgcagagcatcactcgcatgtggggcgtcgacaacgaccgcctcaagctcgagcgccacctggtgtacgtgcagtccttgctggccgacgccgaggcgaagagcgagaccaaccacgccgtccggacgtggatgaaggagctcaaagccgccgcgtaccaggccgacgacgtcctcgacgacttccagtacgaggcgctgcgccgtgaggccctaagcggccagtccatggcaagcaaggtactgagcaacttcacctcaaagaatcgtcttgtattccgtcataaagcgagcagagacctgaagaacgtgctcgaaaagattgacgagctcgtgaccgagatgacaaagtttggcctggtggcgcttgcggaggcgccgctgcaagctcttcctcggcagacgcactcagcactggatgaatctagggagatatttggtagagaagatgacaaagatggggtggtggaactattgctggaccagcaagatcggcaggatgtacaagtgctgcccatccttggaatgggaggtgtgggcaagaccacgctagccaagatggtgtacaacaacgacaaaattcagaagcactttgaattgaggatgtggcactgcgtgtcagaaaattttgaagctattcctcttgttagatctgtaattgagttggctacaaatagcagatgtgatctgcctgacacgatcgagctgctgcgaggaaaactgcaggaagctattggccgcaaaaggttcctactcattctcgacgacgtgtggaacgaagaccaaaacaagtgggaggatgacttgaagccgctactctgttcctcaattggtggatcaggaagcacgatagttgtcacaagtagaagccgacaagtggcgtcaataatgcacacccttccacctcatgaattagtgtgtttgagtgaagatgattcatgggaattgttctcaaagaaagcatttagtaaaggagtgcaagagcaagcagagtttgtcaaaattggcagatgtatcagcaagaagtgcaagggactgcctcttgcactgaagacaatgggtggattgatgagttcaaaacaacaaatccaggaatgggaggccattgcagattgcaatattagtgataccaatagaggtaaagatgaggtattgcccatactaaaactgagctacaagcacttgtcccctgagatgaagcaatgctttgccttctgttcagttttccccaaggactatgagatggagaaggacatgttgattcaactatggatggcaaacggttatcttcatgaagaggggacgatggacttgacacaaaaaggggaatatgtcttcaacgagttggcttggaggtcatttttccaagatgtgatattagtgacgaagcactattggtcttattctagacatccctcaaaacaagagataaatggatgtaaaatgcacgacttgatgcatgaccttgcaaaagatgttgcaaatgaatgtgcaaatgcggaagagttaattcaacaaaacctgcctgtaaatgacgtccgtcacttgcatatttcgggacatgatcaattgaacaaaatcagcaagttactcggaggcactatgtatcttcgcactttgttgacaccagaatcatcgtacaaggatctgatgaagtcaaaactgatgtcattaagagcattgcgtatttgttgtggagatacttcaatcgtccatatgaagctcatcacacgcacagcacatttgcggtatcttgatctctctcgctcaaagattgttagcttgccaaactcaatctgcatgttgtacaacttactgtctttgaggcttaatgactgctcccaactacaatatttacctgagggtatgagaactatgaggaagctctgccatatttatctcttgaggtgtcatagattggaacgaatgcccccaaaacttagtgtactacacaaccttcgcacactaacaagatttgttgtgggcacaaaagatggatgtggaatcgaggagctcgaagacctacgacaaattggcaacaggttggaattgtataatttgcgggaagtaaagtgtgggtcgaaggccaatctccatgagaaacataatctaaatgaactgttgttgtgttgggctcatttttatcatggatatgacaagtttattggtgaggccactaatcatgaacaagtattggaatctcttgtacctcatgataagctaaaatttttggaggtgcatagttacggtggcctcacaatctcgcaatggatgagaaaccctcaaatgttccggtgcttgagagaacttattatgaccttctgcccatggtgtaaggacctgccaatagtatggttgtcatcctctcttgagcttttgtctttacggcacatggaaagcttgaccacgttgtgcaagaacattgacgtggaagctgaaccagataatacctctttgcagatattccccaagctaaagtggatggaattatcgtttttgcctgagttggacagatgggtagaaaatagtgctggagagattcttagctcagtgatgtttccccagctggaaaaactagaaattgcgaattgctgtaagcttgcaagtctcccaaggttaccggttctcacatatctccatctatctcgtaacgaatggagtacaggagctcttatttcgatgcctttgggctctttgccatctcttatcaagttagacatatcatttttgctggtagacgtggtgatgcctccagacgatcaggaaagctcgagtcaaagacctttgaacacactacgatctttggagcttgagggtgacgacgccttcataaggatatttaataaatccaaattgcaacttgggcttagggactggttggtctctgtggaagaattgaatatcaggtcattggatattgtccgctggcccgtggaggaactccgttgttttcctcgccttcgttctctgctcattaataattgcttcaaacttgaggggaagggctcgtcatctgaggaagacggaatccttcctctgctccccaagtttcccgcatccctcgaggaaatcgtgattaactacagcacaagattggtggcgctgccttcaaacctcggagatctggtcaagctgaggagactctccgtgaagagttgcgatgcactgaaagcgttgccagatgggatggatggtctcacttcccttgaggagttgagtattatagactgtccagggatagagaaatttccgcagggtctcctgcagcggctcccagccctcaaacgcctgaaaatatatggctgccctgacctggagaggcgttgcagagaaggtggggagtactttgacttgatcgcttctattcccgataaatacattgaagcacccgaggtaacatccgcacagccacgaaactgagtatgtcatcagattgactgcacttgggtttgatcactggatgcggtgctccataagcattatcgtttctcggcaaaggacaatacaaaaaattacaagcctgttccattctgtgccacggaagcttcttcttgtctcgctgatcaaggcacgcaaaatgcacagcagtgcaggatgatcgagcacatgacaataagtcacaaggaagaagtaaataaagactaaaaggaaaatcctctcaagagattagtgcaactgggatgaagaaagcatggaacatcgtgatacttcaaattctgctcaacgtgtcgaaaggaaagtaggaagtatatatggatgtgaaactgggatgaagaaagcacggaatcatgttgtgatcatgcagttagatcatctcgtgtcgagaacaagagccgtgtctgaaactacgcccaagaaagggagcgtccaccggaggttgggtctcaggcaaataggtgaagatatcggacgatttatttgttgtttgcaaatgatgtccgatccagaactctgagattttatagtatctgtttgaccatgtaatcagagagttttcaccttgctgtggaatgtttgagagcgccggccggaaatggttatggacctaaattttgctactagagaactaaggaagtttgttgttttgtgtgcaagtgattactagaaaaaaaaaaaacaaaaaaaactaaaa

SEQ ID NO: 6850 - DNA, 282 bp, Setaria italica
  Peptide Sequence Number=SeqID_72824
taaaggaaactgcaaactgcctctgatgcaccatccacgagctgcaacctaaagcaagaacaaagctgcggtcttgcagagcaggagcccaagaacacacttgcaagacacagggggatggagctaggggacgaggcgtcgtcagtgaacatggagagaagcccagagcagcagcttaccagcgagcacgacgacgacggcagcgcgacgtggctgaacctcacgctggggccagcgagtcgccggagccggcaacggcgccgccgccgagcctccccgggt

SEQ ID NO: 6851 - DNA, 424 bp, Setaria italica
  Peptide Sequence Number=SeqID_72825
gtcatgaagggctacctcaacaaccccaaggccaacgaggaggccttcaggggcggctggttcctgacgggcgacgtcggcgtcgtgcacgaggacgggtacatcgagatcaaggacaggtccaaggacgtgatcattagcgggggagaaaacatttgcagtaaggaggtggaggaggtgctgttccggcacccggccgtggcggacgcggcggtggtcgccatgccgcacccgcgctggggcgagacgccgtgcgccttcgtcgtggccagggacaaggccgcccgcgtctctgaggacgatgtgctcgcgttctgcagcaagcgcatggcgcgcttcatggtgcctaagaaggtggtggtcatggaagccctacccagaaatggactcggaaaggtcgagaaggtcaagctccgggaggtgg

SEQ ID NO: 6852 - DNA, 1221 bp, Setaria italica
  Peptide Sequence Number=SeqID_72826
gcaggatttgatcacaaggttggtgttcgaccttactgccacgccgatcttcggtgtcgacccgggttgcctgtccatcagcatgccgtctatccatgttgcaaccgccatggacacgttcatggaggtcggcttattccggcacaccatgccggcttgtttctggaaggtgatgagacggctaaacatcggtccagagaggaagctggccatggcgcaaacagtgatgcatgctttcatcagggagatgactgagaagtcgaaagccagtacccatcagtgggcagagacgatgtcctactacgtaatgtactcatcgttcacatgatcgccgggcgggacacggttggtaccacgctaccgtgggtattctacaacctcgccaggaacccccgggtggtctcttgcatccgcaaggaactggcacccatcgcatcactcaaggccactgctctcgcctccaatagcatcagcagtatggtcgtctttgatccaaaggagactgaacccctagtctaccttcaggcagccttattggagtcgctcaggttgtacccaccaggcccgatcgagcgcaaggtggtgctagccgacgatgtgctcccaagtggtcaccagttgtggaactttgatatggaggtgttggaagggcagagcatcgagccaaagctgtcgtgcattcttcaattgaagaacgggctcatgatgatggttaagcagagagagtaatcaatgtgacatggaataagctaggtgcaatgcaactacagatcgactcagtcctggcatatatggtttgaacaaaatagttaaatccaaacttataatgaagtaaatggaggcgtaacatgtattttcgtcattaaataaagtctacggacgccgtcgtttggccatctgaaagctgggaccatacccaactacagactctttgatttcagtaccgatagtttgtactactccctctttctaaataagtgatgttttcagattatcttaagcttatttgaaactttgatggcatattaattgtttttctatgtgtaaaaggtttggataaatttatacgagtatatttatgtttaatagtaacttcatcaaaatcatccgttcactttatgaatattttgtaacaaaaactagccatcacagttatgtttttgaggtaatttcaatatcaaaaacttcatttatgagaccggaggaactatatacaaatac

SEQ ID NO: 6853 - DNA, 1925 bp, Setaria italica
  misc_feature (1905)..(1925): n is a, c, g, or t
  Peptide Sequence Number=SeqID_72827
ttaactttactacatctactcgcagtcgtaggctcgtagcttatagacaaatgacattgcaagcaatggcgttgccctacttgcaagaactagtcatctccacacttctcgttgtatcattgtgcatgtacattaagttctggaggctgagaaacccgttgtaccccatggactggccggttgtgggcatgctcccttccctcgttgccaatctccacaacttccacgacgaactcactgtcgtccttgccaccaacgggtgtaacttcaaggcgcgagggccggtagcaagtggcatgcggttcttcgtcaccgctgaaccggcaaacgtccggcacatcttcacctccaaccatgcaaactaccccaagggcgaggattttgctgaaatcttcgacatctttagcggcaccatcttcaccattgatggtgaggccggccgccagcatagagccatgttccagaacatcttcagcaatccacggttacttgccttgatggcaagttgctgccgtgacaaggtggtgaacggactcctcccgttcttgacccgcatggggagcaccaggacaacgttcgacatgcaggatttgatcacaaggttggtgttcgaccttactgccacgccgatcttcggtgtcgacccgggttgcctgtccatcagcatgccgtctatccatgttgcaaccgccatggacacgttcatggaggtcggcttattccggcacaccatgccggcttgtttctggaaggtgatgagacggctaaacatcggtccagagaggaagctggccatggcgcaaacagtgatgcatgctttcatcagggagatgactgagaagtcgaaagccaggtgcgccgatctccttgatgatgtgttggccatggacattatttctgctaacccatcagtgggcagagacgatgtcctactacgtaatgtactcatcgttcacatgatcgccgggcgggacacggttggtaccacgctaccgtgggtattctacaacctcgccaggaacccccgtgtggtctcttgcatccgcaaggaactggcacccatcgcatcactcaaggccactgctctcgcctccaatagcatcagcagtatggtcgtctttgatccaaaggagactgaacacctagtctaccttcaggcagccttattggagtcgctcaggttgtacccaccaggcccgatcgagcgcaaggtggtgctagccgacgatgtgctcccaagtggtcaccagttgtgctccggtgaaaccatcctgatctccatctatgccatgggtagaatggaatccctgtggggcaaggattgccatgtgtaccgtccggagaggtggctgtccgaggacggtgctaaactgcgttacgtgccgtccaataaattcatggcgtttaacacagggccgaggatgtgccttggcaaggacatagcaattgcgcagatgaagaccatcgttgccgcggtggtgtggaactttgatatggaggtgttggaagggcagagcatcgagccaaagctgtcgtgcattcttcaattgaagaacgggctcatgatgatggttaagcagagagagtaatcaatgtgacatggaataagctaggtgcaatgcaactacagatcgactcagtcctagcatatatggtttgaacaaaatagttaaatccaaacttataatgaagtaaatggaggcgtaacatgtattttcgtcattaaataaagtctacggacgccgtcgtctggccatctgaaagctgggatcatacccaactacagactctttgatttcagtactgatagtttgtactactccctctttctaaataagtgatgttttcagattatcttaagcttatttaaaagctttgatggaacactaaaaaagagaactagannnnnnnnnnnnnnnnnnnnn

SEQ ID NO: 6854 - DNA, 254 bp, Setaria italica
  Peptide Sequence Number=SeqID_72828
cggccccgcgctccccggggccggcctggcgccgcagctgcttgacgcgctactccacgccgcgcagcggttctccgccgccccggccccgcgccagctgctcacgcagatctgcctggccctctccgcgctcgcgctccgcgccgagggcggcgtcgacgaccttttcgcgcggatgccactcctgccggcgcccgccgtgctggagctgctcacggtgctcccggaggaggcagcgcaggaccaggggccgg

SEQ ID NO: 6855 - DNA, 518 bp, Setaria italica
  Peptide Sequence Number=SeqID_72829
tccccttcttaagttgtaaggtcttccatggatttcactctgctttagctttactgttccatgaaatcactttgcttacaagtaaatcaacgactatactaggctctaggctctagctaaccacaccactaacacctgaattagccccaaaagacaaacatccgcagtcatcaatccagacatgacttacagcaggcaactatactacaaagctgaaatactactaatctaatacttcctccgtttcgtcccaaattataggtcgttttggtatcctaagttcatatattttgatatacacctagacatagagtacattctagatgtatagcaaaagctatgaacttagaaaaatcaaaatatctataatttagaatgaatggagtaccatcatctaaagcgttcgatctctcatataggttagcatcacctcctgctgctgctgctgctgctaaacactagcacaacgacttagtaccggacacatggtgaggaggcggcctcgggaacgagaagct

SEQ ID NO: 6856 - DNA, 373 bp, Setaria italica
  Peptide Sequence Number=SeqID_72830
ttgactttagacaattctgctgaaccactgagggctgagctacatcaactttggaacctgcaacactctgctgaccaaaattgatgtagctcagccctcagtggtttagcagaatgcaaagcaaattgtcagtcagcaagcaccatctggtgcccaggatacaaggaaagggccatctataccatttaatatgttaattccgatactgcaagcacatcttgacagagacaaagatatgcagcttcaaactgtatgggcaaaacttaggcgtaatgaagtccacaaagatgatttacttaagagtcatcaggaatattgttgggatcaaatgctcaagcaggcagccattaaagtttttcttgtgcctgggctt

SEQ ID NO: 6857 - DNA, 1285 bp, Setaria italica
  Peptide Sequence Number=SeqID_72831
tgataaacccccataaatacctctgacacaaagggaacaaatgctataccaaatcaaccacctagaatgaactcagcaatttcattgcaaacaaagaacaaacagcatcaacccacacaattccagcaggcctcacagcaaatatatggagcaagtaatcccggtgcccaggtttaccctcagtcaatcactggttctcttagaccaccaaatccagttccggaaacacagccatccatgcatgctcatggaatgcctcctgcaaaagttgcccctcctcctactcatccaatgatgcagcacaatgcagttgcatggcaaatgcatcaaaacaaggaattgaaaaccaatactccccctccaaacgctaatgcgaagcaaaattctgagtctgctggcaaagcccgcacggttggcgcaggaaattcttcagctaaaggaaagcaggcaccccctaactcatctacaccgaatgctagtggaggtgcaaagagtaacaagaaatcgggtgggcagaagaaatcatcggaagcagcaggctctacgcagccttcaagtaaaaagcagaagacatccggagccttccaggaacaaagcattgatcaacttaatgatgtcactgctgttagtggtgttaatattagggaggaggaagaacagctactctctgccccaaaggaagagagccttgcctcacaagaagcacgaagaattgcacaggaagaagaagaaaaacttttcctacggaagggcccactcctgaagaaacttacagaaatcgctcggaaatgcaatctgaagaatgttaatcttgacgttgaacattgtttatcaatgtgtgtggaggagcgactgcgaagattcataagtactctcatacgagtctcaaaacagagaatcgacactgaaaagactgggcatcgactagttattacttcagatgttggccgtcaaattttgcaaatgaaccagaaagctaaggaagagtgggataaaaaacaagcagaagaagctgacaagaacaagaagcagaatgaggctgatggcaatggcactgcagaattggaaaaagaaaaagaggaaagtcgcccaaagaatgcgaagcccaacaaggaagaagacgataagatgagaacgaatgcggcgaacgttgctgctcggcaagcagttggaggaagtgatatgctctcaaagtggcagctgatggctgaacaagccaggcagaagcgagaaggccttgatgtggctgctgcttcgcagccaggtagaggaccagtccaggggg

SEQ ID NO: 6858 - DNA, 2233 bp, Setaria italica
  Peptide Sequence Number=SeqID_72832
agacggacaaccccctcccccaaggacggaaccagccggcgccacccaacaccccccagtccgccgtcccactccgccccggtaccccgtcggcgaggccccagctcgtcggattcgcctcatctcgccggagccgcccccgtctcgctggcgtagcgcctcgctctacgccatctcgagggggtcctcacaccgccggagcccccgcaccgtggaatctgctcccctcgccgccggaccgcacgtcctcgctggtcggctggcgctctccgcgccgccggatctttgagttactttgggccaggatagcattgccatgtcagaagctacagatggtcagctgcaagcaacagagcaggaagtaagcgtccatgcaagtcagcaagcagggcaacagaatgtgaattcaacagatcaattctccaaaccagaaccggtaactgaaggttcaaaaaatgaacaacctgtcgaagtagagcaacagaatccacagctacaccaatcacagccagaaagccgactgcaacaggctgaaacaaatagcttccagttagctgagaaagaagcagggtattttggtcagcagagtgttgcaggttccaaagttgatgtagctcagccctcagtggttcagcagaatgcaaagcaaattgtcagtcagcaagcaccatctggtgcccaggatacaaggaaagggccatctataccatttaatatgttaattccgatactgcaagcacatcttgacagagacaaagatatgcagcttcaaactgtatgggcaaaacttaggcgtaatgaagtccacaaagatgatttcttaagagtcatcaggaatattgttggggatcaaatgctcaagcaggcagcccataaagtttttctacagatgcaagcccaggcacaaagaaataaccaggcaaatccaagtcagcattctttattctctcaagcgtcgacacagcagatgccttccagtggttcagcacagttacatgatcagaaagtccgtccacctggaccatccaaccagggtcagaaaaaccaggtgtcgtcttcacctcaggctttcgcaccaccatcaggaactcatccgcaaactagcgtacagtatcttcctcatgataaccccaaccaaaatcctgacacaaagggaacaaatgctataccaaatcaaccacctagaatgaactcagcaatttcattgcaaacaaagaacaaacagcatcaacccacacaattccagcaggcctcacagcaaatatatggagcaagtaatcccggtgcccaggtttaccctcagtcaatcactggttctcttagaccaccaaatccagttccggaaacacagccatccatgatgggcatcgactagttattacttcagatgttggccgtcaaattttgcaaatgaaccagaaagctaaggaagagtgggataaaaaacaagcagaagaagctgacaagaacaagaagcagaatgaggctgatggcaatggcactgcagaattggaaaaagaaaaagaggaaagtcgcccaaagaatgcgaagcccaacaaggaagaagacgataagatgagaacgaatgcggcgaacgttgctgctcggcaagcagttggaggaagtgatatgctctcaaagtggcagctgatggctgaacaagccaggcagaagcgagaaggccttgatgtggctgctgcttcgcagccaggtagaggaccaggtcccaggccattatccaaattcggaaaaggtcttggcgaaaaccaggaaggtgcaaagaggagccattcttcagcgttcggaactggcatgaaaagacctggcaggacaccatttgcaggacctcaacgaacgataactgtgaaagatgtgatctgtgccctggagagggaacctcagatgacgaaatcacggctcatctacctgctgcacgagcgattgcccggaggagattctactgcagattaggtcatagtcctattttattgtggtactagcccatgcatggtatttaacagcttagaagcataacccgttgcgccttccacacaatgtggtttagacttggagtggagtggcactgtatattggtggcaaatctgtaacacataaaggcgtcgaattgccagccacaaaggcttctgtagagaaattgcagtgtaagataagaggtgctctggcatttgctaaatctgtaaccagttgggtttagtcatatgctgtccttgtg

SEQ ID NO: 6859 - DNA, 361 bp, Setaria italica
  Peptide Sequence Number=SeqID_72833
tcgtaggtaggttgagtcgtgccaaccgtcagcgcgaaccccccgccaggcgaaccggaccagctgcaacgacatggggatgctcgcgtcgaagggaatctggatcagtcccagcgagcggtcgacctccgtgaagtcaacgtccgcgagtggcacggcggcgtcggcgacgacgagctcggcgccggcgttattgcactggacctcagggatctttgtctccgggtcccgcacgatgcgaccagcgaaggggaagaagctggagaggtaggccgggaaggcgcctcgcacggcggcgaggaccgcgtcgaggccggcggccggggcggggtagacggagacgaggaagatggggaagggg

SEQ ID NO: 6860 - DNA, 391 bp, Setaria italica
  Peptide Sequence Number=SeqID_72834
aacgcccggcccctccgcggccaagctcgcgctcgcgtcctcctcggcgtcatcgtcctcctcgccgccgacgcctccctcgccggcgccggcgcgcaccggcgcctgcgccgccagtacctgcattacgtcggcagcgggagcgtggaggccggctcgcccccgtggctctccgtgccggaccgccccaacttcaccgacgacctcctcgcgcggtggctcgcgccggggggcaccccgtgccgggacgcgcgcacggccaacatctccgtcccggtcctcgacggcgccgcggcaagggtggaggcgaccgagctccgcgcgggcgagatccacgagttcacgttctgggccctggacgacgcagggaagcggcgctgcctcggcgggg

SEQ ID NO: 6861 - DNA, 241 bp, Setaria italica
  misc_feature (156)..(156): n is a, c, g, or t
  Peptide Sequence Number=SeqID_72835
tatgcttcatcatcagttcatagttttacttgcatcgagtgaaggctctgattttgtatgagtggaccaaatagattagatcctcttacaaaccaacaatggcgccggtgattataattcgggttgcaaattctcttgttatcttgacgagcacgnggtggtccaagtgtagccagatgctgacgcttaggttgccactactaggaaggaaatgatgcttattgtgctcatcaagttgtcg

SEQ ID NO: 6862 - DNA, 307 bp, Setaria italica
  misc_feature (302)..(302): n is a, c, g, or t
  Peptide Sequence Number=SeqID_72836
cccccctcggccgatgtatgtccccatgacgtgcatcgcgtcgccggcgaccgtcgccgtgcccctgtggaagctgctgaacaggacctgccatggcggccgataccagatcttggtcaggaggatcagcgagtcgggttccggagcacggaccatctcgatgatctcgtcggagcactggcccttgagcttctcgagcaccagttccttcatggcgctcgcgtccttggtggcatctgcaccagggtgccaaagggctacgaagaaattcactagattgtcagtcatgggcagcgcccganaaacg

SEQ ID NO: 6863 - DNA, 284 bp, Setaria italica
  Peptide Sequence Number=SeqID_72837
tccccacttcacttgccgacgagcaaacggcctccgttccgggccgtcggcggcagccggagagcgacgccgagcaaccaattaaaccgtcgccagcgggcgcagtgggcccgtcgtcgggaacatggccggccagccgccgcagggcccggaggacgacttcctcgaccagttcttctccatggccggcggctcctactccgccgcggcctcagggggcggccgcgccgcgggggaccagccattctcccttgcgctcagcctagacgccgcggccgccgagg

SEQ ID NO: 6864 - DNA, 299 bp, Setaria italica
  Peptide Sequence Number=SeqID_72838
cttcgaagccttctctcccccctgacaagcctgcggcggcgctcccttccggctggctgtactgcctggccccgttcgtcccaacgaccctctcacacctccggccacctccaagaattgctctctcatattcctcctcccttccgcggactcagattgatctcttctcttgtcggagggagtcatgatggaggtgggcttgaacccgggggaccaattggattataagggcaaccaggaagacgacgacgacgccggggacatctcgtcccggcagcaaggagctcgccgccatggtc

SEQ ID NO: 6865 - DNA, 1341 bp, Setaria italica
  Peptide Sequence Number=SeqID_72839
tcggcggccgccgcgcgcgacgcgaagaagaagagggggaaccggacggcggcgaagctgaagcagagcaagctcgagacgcgccgcgagcagtggctatccgggcaaggcaaggatgggaaggagacaaaggttgcggctttgccaacaggagcaggctcaaatgctggctcaccaatcctcgcttctccgcaccctccactccctcgtcggcgcgcggacacaaggtcaaggggaagtgatccggaggacagggaggaggctgcagctgccaccctagaggtaggtggcagcgacctcgactcccccatgcacagccctgtctcagacaagtctcaaggcggtggctgtgctcagaggaaggggttctccggcaatggtggtgggcccagcctcagcagtgggagcagtgtgtggtccagctcaaggagtgtgagtgatgctgaggaggaccatacaggctgcccggaggatgagagtgaagtcttggatgattgggaagcggctgctgatgcactctatgatgatgacagtcattgccaccagagttcagttcccacaacacccccaccagctcctaccaatgcagcacctgccaatgcagcaagaccggaaccgattcggagcaaggcaagggcttgggcacctgatgatatattccgtccacagagcttacccagtatctccaagcaggccagcttcccagcaagtatcggtaactgctgggcagggatggggatgagtgctgcacagcagggtattctctctttgccgttgtcgtgccctatatgctacgaagatcttgacccaacagactcgagcttcctcccctgcccttgtgggtttcacctgtgcctcttctgccacaataggatccttgaggcagatgggcgctgcccaggttgcaggaagcaatacaacacagtgcctgcagcagaaggtggtggtggcccaagagcaacaatgattggacgagagatggcaaatatagcaccagtgcggctatcccgttcttgtagcatgggtccaagatactagactgccagggttatactagttctatgttgtagctcttctcattgcatgttaccgttggatatgctagttttttgcgtatcgtctgcttttggtataaagaaatgtgaatattggaataggtgctgaatccatatagacttgtccaaaaactatgttctttagactgttaccgttgcatgtgttgctggaggactgtttgttgcttacagtttgtgagataatatatatgctatataaggtgactgttatgtccttatctacgagtatttgagcagtaactgttgtttgctcaatgtgtaaaca

SEQ ID NO: 6866 - DNA, 759 bp, Setaria italica
  Peptide Sequence Number=SeqID_72840
tacagcatataaggagccaaagaagtccagaattcccttttcatgtcatctgtatgcaagactaaaacaagtgcaagctgccactctgactccttccttcttgagtccaactttgtttctaaataatcctgttggtctttggtaattccacctcctcgacttctgtccttcagtaactctgcatgatttcttccaagattttcagaaacctgaatgactggcatgtgaagaattgcacttgacgaactaacaagattagcatgatttgctacagcatcaagatgacttgatttgttttgaattatccgcatcaggatgttctgatgaatatctcaatttccttttttctgctcagtcgctcctgctgaatgatggcttcaacaaaggaacatgtgatttatatgaactgtttggagcaaccagttgtgattgaaaaccatcattgataggattcacgcaactgagagtgtaattgtcacccaaaggatgagctgtcttgtgaacttcggtattcaacaattttgccctcaatgaacaaaggacagcaggttttggggtgcgaaagtctagaataaatgattgacctttggacataatatttgaatgacctgaatcaagatcctcgatattatcattttttgaactgtgtaatgtcaggttacttgcagccttatcccaagtaggcagagttgaagagcagttcagtagaacctgttccttaattattagtttattatggccaaagaaactccaagcttt

SEQ ID NO: 6867 - DNA, 1149 bp, Setaria italica
  Peptide Sequence Number=SeqID_72841
ctcccaagtaatttgtaaaaaggctctctgattttatggtgactgtacttacatgcatcttctggttctcagtgcaaccaagtagcgccagaaaacaagtaccgtgcacatctcaagcatccgtcatgcatcttctggttctcttacttagttgttaacagcgacgcatccgtcaagcaaggagctcagtcactctttgtattagcacttcctttgttcctccaacctttgatttctttgcaccgaggaagctctttagatcagcgactgtcagcaaacgcagctcacctctcctatgatgatcgatcacctttgctatcaactcatcactggcgacatctggctttgattttgtccttgttgaatttaagatatccttgtcaactgcctttgccctagactttgtaacctttttcttaaggtcatcgttctgattatctctcacctttgtagcaaattcatttttgacaatttctggcattgttttctgtttagtcacagcagtcaacacattcttgtcaagatcttgctttgcctttctctttgcttctgcagtaacctcatccttggcaacaacagaattcaattttgtgtttaccacctttgcggtaagcacatctttctcaatgtctggtattgcttttgtcacttcttggatacttggtgtgtagtctttactacagcatataaggagccaaagaagtccagaattcccttttcatgtcatctgtatgcaagactaaaacaagtgcaagctgccactctgactcttgtacagaaggtgaggcagttggtggaggcaagaagcaaccttgttagtatgaattcaacattattgaagcacacattattcacagaaccaccattatttgaacgaaaaagctggcaaaattagatcgacccacatggccacatgcccgcatcacaaatgtgaacgatatggggatcaattgccttccttttctcatattagttgcaacagatgagctcttcctacctcttcctttcacaatttccagctagtttccacaatttacaaaagccttaatatttaaaatttattcaatattccaactggaatgatcatgcgtaactacaaaaaatggactagaaaggatcaaaccaagcaaacaagaaattacaattaga

SEQ ID NO: 6868 - DNA, 352 bp, Setaria italica
  Peptide Sequence Number=SeqID_72842
cgaaacagagccccatcatcctcgcattctgcatactgtacacggccattgtggccgccgtcaccgccgcctgcgccccctcggccaccagcgtgctggccttgattgccaccgcggccgccgccacgacggcctctgccccgtccgccgccgcggtcaccgccaccatcacggtcaccatctctgtctcggcgcggatgagggcagtcccttgcccagtggccctcctggccacaattgaggcaggtatcgccacagcgtccaccaccgcggccgccgccacggccccttcctcgccagccgccgcgaccgcggccaccaccgccgccttggcccgccgccgcgctgattc

SEQ ID NO: 6869 - DNA, 394 bp, Setaria italica
  Peptide Sequence Number=SeqID_72843
agtgagtttagcttttgagctgagaggtttagaaatggcagtaaagtttgtagttcctctcggtgttgtcctggcctttctcctcatcttccaggatttggcatatgctagggagctcacggaagctaatgagtctgaaggaaaaaatgtgaaacctggaggagtgcctggactcaaagataagaagcggggaggtggatataatggaggatatggcaatggtggtggttatggtggaggttatggtggtggctatgggcctaaatatagtggaggataccaccatggaggctatggtcccggatatggtggtggatatggtggccctggatatggtagtgggtacggtcaacctgggtatggaggaggctatggcggaggatacggcggtggc

SEQ ID NO: 6870 - DNA, 320 bp, Setaria italica
  Peptide Sequence Number=SeqID_72844
cccgccaccgcagaaagcgacatggcgccgccgccgctgcaccggacacgtccatcagcggaggcagcgcgcacgcggcgaggtcgtccgccatggacatggacgacggccccacgacgtccgccacctccacgcatgggcccgacgacctcttgccgccagcagccaccaacggcggctcgatgctcttcttgaacaccctgcacagcacccactcgtcctgcgcgtcgtagccaagagattaaacagcggttagatggatccacacgccactcgctggcgaggcatgattatcgatagacgacatgcacaggcagacg

SEQ ID NO: 6871 - DNA, 1347 bp, Setaria italica
  Peptide Sequence Number=SeqID_72845
tgcgaggttaccatagaatttccgcgttccaaaatagacctttccggctgtcacacaacagtactcccattacagtagcaactccaaaccaaatcgatctagtagactacagtactatacattgctgattgctcacaacttctttcccttttgcatgacaacatccaattgcactacaatacaacaataatcccggttcccaatccagtaactaatactaattcaattcttaatgatgatccatcaagagatcgagctcagtagccccaaagggaggctgcgtgatccatgtgctgccgcgacgagatctcgccggggttcacctccgaggtgaggccggtgtcctgcgacgcgccgccgccaccgctcagccgctccctctctcccagcttgctgtaccacccgccgccctcctgcaggagctcatgcaccatgccgcccacgcccgcggcgccgtcgtactgcgccgcctgcatcatgctcgccaggaacggcgaggcggaggacgccatggcgaggtggtggtccgcggccgccgcggggccggcggaggggagcaggaagggtgggttcaggaactggccctgcagcgcgttggagaagcaggtcacgtgttgtgccggtggcggcagctcaatacccgccaccgcagaaagcgacatggcgccgccgccgctgccaccggacacgtccatcagcggaggcagcgcgcacgcggcgaggtcgtccgccatggacatggacgacggccccacgacgtccgccacctccacgcatgggcccgacgacctcttgccgccagcagccaccaacggcggctcgatgctcttcttgaacaccctgcacagcacccactcgtcctttgacgcgccagctctgatcgaggggatgaggctgctcctgttgctggtgccggcgtgcttgccgtcgaggcggtactcgtgcatgacccagccggtcttgcctcccctgggtgccctccccgtgtagaagacgagcgtcttcttcatgccgacgagggctttgcccctgaagatctcccggtccttgcccgtcgccttccagtagccggactcggtggcccggttcgtcctcagccccgtcgggtacttgcggtccttgacgcagaagaagtaccactccttctcccccatcgtcgcccgagcgggcaggtcccatggctcgcacttgttgaggtcggcctcgccgacggcgcgcggggcgaagcgggggtcggcggccttcctggtgaggtagtgcgtgatgagctcctcgtcggtggggtggaaccggaaccccggagggagctccatggtctgctgctgctgcagcagctggtggtggtgc

SEQ ID NO: 6872 - DNA, 439 bp, Setaria italica
  Peptide Sequence Number=SeqID_72846
tctctctgctgctatctggctactgctagaggatctggtgatcgatcgatgtacaagagaaagaggagaactctaaaaacagaggatctaagtctgggaaagaatttggtcagtttcctttgggtaaaaaggaggaaaaagaaagaatttaacgtctctatgaggtggctatgtgtatgtgttatgctgtatatgcaggaaagaatggggataagtacaaaagaatcaaagaatgtattgtaagaacgaatggcctaaaacatctagaaagatcgggcgacggagagcatgccggggcggcggctcatcctctgcagagcccgcacggcggcgaagcccagcgagcggcgagcggcgaaccgcagcacctccattacccgaaggaaaaagaaccgaaaaaaagcagagggagaaatcaagatgatgatctaacaacgca

SEQ ID NO: 6873 - DNA, 602 bp, Setaria italica
  misc_feature (565)..(602): n is a, c, g, or t
  Peptide Sequence Number=SeqID_72847
ctccccccacgaagcagcgagcatgtcgccggtcaccgcgctcctggcgggcacggccgtgccggccgccccggtgccggcgaggccctcccgcccgaccgtaggcttcccctcgctcctcggcggcgggcgcgcggcgctggcggtggagtgctcgtcgcggccgcagaagaaggggaccaagcaccacatgaagacgcggcccaagaagacgcagccgtgggacatcaagcgccgccccacgcagtacccgccgctgccgcagctcccgccggactggacgctcgtcgcctccagcgccaccgtcgacgcggagcaggcgccggcccccgtcctcgaggtggccgcagcagccgcccccgccgctgcggactgaggcggtgatattgccggtgcctcccctgtattttgttcccttttaactcaccgtacgtggtttcctttgagattatgatcaattgctgccctcgtttgtgattagaaatgtggaacctcgaatgctagtccaatccaaggctgttactgctttcaattcagtgcctttttcttgatgtcaaaaaaaaannnnnnnnnnnnnnnnnnnnnnnnnnnnnnnnnnnnnn

SEQ ID NO: 6874 - DNA, 698 bp, Setaria italica
  Peptide Sequence Number=SeqID_72848
tggatgaaacaccaactagttccgggcaatctgaagctagttcaagtgaacctagttggtggcccccagactttttggagaaaatagagtctgcttccatatcgaggaaacaggatgttttgggtaatctaaggacctcatcctggaaggcttctcaattactgtggtcccaaggatcttactcagggttaatcccgaatggtttctactcaatcatcccggataaaaagttgaaggagactttcccaaacattccgtcactagatgacctgcaagctcttgaagcggatgggcttaaggctgacataattattgtagacaccgagagggataagaaggttttcatgttgaagcagcttagtgctgcacttgtgaaagggttaaactctagcccagcattggtgataaagaaaatagcaggtttggtttttgactgcttcaagagacaaaatgttgattctagtccagcaagaggctcgactgaagatacccatttctttggaaataaaggaccacaacttctagggcagataagacatgggtcatgccgaccccgagctattctatttaaagttcttgcagatgctgttggccttgagagtaaacttgtagtgggtctacctgatgatggtgctgttggatttgtggactcttacaaacatatgtctgtggtagtttcactgaactctatggagctg

SEQ ID NO: 6875 - DNA, 1349 bp, Setaria italica
  Peptide Sequence Number=SeqID_72849
ggcctcccagtacccgctcctcctcctccgcgcgcggagcgccgcggccgagcacggccgccgccggatcctccgcccgcccgctccgcagtccgccgcttccgctctcgtgctgcggctagcggagcggagatccgtccggacctgaactggggtttctgctcgctgttgatatgagctaaattggtcagtggtcctattgaatatggttcccataggttgggtttaaggagcttcactgtctgagaaatggatgaaacaccaactagttccgggcaatctgaagctagttcaagtgaacctagttggtggcccccagactttttggagaaaatagagtctgcttccatatcgaggaaacaggatgttttgggtaatctaaggacctcatcctggaaggcttctcaattactgtgcccaagtatagatcttccccgagctattctatttaaagttcttgcagatgctgttggccttgagagtaaacttgtagtgggtctacctgatgatggtgctgttggatttgtggactcttacaaacatatgtctgtggtagtttcactgaactctatggagctgctagttgatcttatgcgatttccaggccagttgattcctttttcagctaaggctatctttatatcacatatctctgctgcgggtgaaagcgactcagctgaaaatgattcgtgtgattctcctcttgagcctaacagccctctttatggattgtctgataaagttgaagctgaaggaattgaatcttcatcaaatctatctggacgctcattgcgtaatatgatgttgagatcaagaacattttcagagggaaaattaagcacgtcatgcagtgaaccaaatatagcaaatgccttttggaggcgcagccaaaggaaaggagttgctgaagaatcccgtggtgctagttcaagtccggagcatccattaatgagagcaaggggaagatctatacttggcggtgagaagcaaccatttcaagaatacacagaaagtggatctgcatcaagatcagatggtcttagtggcacttcaacatctaatgctcgaagaataagacgaagaagcattagcatcacacctgagattggagatgacattgtgagggcagttcgggctatgaatgaaacactaaagcaaaatcgcctccaaagggatcatgttgaaggttcatgctcatatgttacggaggaccaaaacaatgcaaatgactgcccaaatgatgatgatgcgtctcgaagagtcggtgctactgacaatggctcaagaaaccgaactggttctactcagaaggccatgtcattaccttcgtcgccacttgaatatagggg

SEQ ID NO: 6876 - DNA, 937 bp, Setaria italica
  Peptide Sequence Number=SeqID_72850
tactagtagaaaaggttacaattaccggaataaagactacaaggggaccaatccattctgggtgccagcagaggagttatcagtcataggactatcaatcatcactcgagatagaccgaagtcacatatcttgacagtccaatgcttgttcaccaggcagtttgcacttttgagatccctgtgaactatcttcatgcggtgtatgcacatcaatcccctgcatatatctcgaataattttcaacctcctacgccaactgagcttctttttctgaccactcatatggatgagatagtacagtgatcccatctccatatattcagtaaccattgacaggtgtggaggcgtaatgcatgcaccaagaaacaatataacattcgggtgtcgtagccgactcaggatgtatatctcattgcaaaaatcttccatattttcagttgttagatcttgttctagaaacactttgatggcaacatcggttccgttccatataccacggaaaacctctccaaagaatcctattccaacccgtgtgccaatggttatctcggagaaatctatgttccattcctcaaaaggcaataacggcttattaagaaatggagagctctggaatactttgttccatgccagtgccatcttctctttactcataaaatcgtcattcttttcagtaacttgacccctatattcatgtggcgacgaaggtaatgacatggccttctgagtagaaccagttcggtttcttgagccattgtcagtagcaccgactcttcgagacgcatcatcatcatttgggcagtcatttgcattgttttggtcctccgtaacatatgagcatgaaccttcaacatgatccctttggaggcgattttgctttagtgtttcattcatagcccgaactgccctcacaatgtcatctccaattcttctaggt

SEQ ID NO: 6877 - DNA, 1020 bp, Setaria italica
  misc_feature (41)..(41): n is a, c, g, or t
  misc_feature (994)..(994): n is a, c, g, or t
  Peptide Sequence Number=SeqID_72851
cctatcccctgtgtgccttgcatatcccctgttgcgtgtcnctagttttttttttttttttgaacaggtacggcataacagcaaccaggcttgtccccgcgacacgcgaggctttttcttggccagacatgttcttatataaccggggaaacattttttacattttgggagaaaggatcgccgtcataaagcaggaatataagacttcagtatgagtaacctcgccggcccgcagagtcgactggctaatttttacaggttttatacaagaaaacgtgtccacctctgcaggaatcgggtggcgtgtgagcaaagcaacttcagcgggacagcttccacttcagctgacagcgtattcgcagtccagcaagcgggtgaggatctcctggcagctcggccgattatcaggctctgcccagcaatctgcaattaacctgccgagaggtccttcaggaatctcgagacgtgatccttcattagctaccgcgtaaactacttgaactggagagatgccctcccacgggcgactcaatgtgcacagctcccacatgataacaccaaggctaaatatatcacatttctctgtgaaaggttcattccggataagctcaggggccatccattctggggtgccagcagaggagttatcagtcataggactatcaatcatcactcgagatagaccgaagtcacatatcttgacagtccaatgcttgttcaccaggcagtttgcacttttgagatccctgtgaactatcttcatgcggtgtatgcacatcaatcccctgcatatatctcgaataattttcaacctcctacgccaactgagcttctttttctgaccactcatatggatgagatagtacagtgatcccatctccatatattcagtaaccattgacaggtgtggaggcgtaatgcatgcaccaagaaactataacacattcgacaaaaaaaggaatatatattggttagaatgcaaccttacaaaacntatgacagtttttggatctagttcag

SEQ ID NO: 6878 - DNA, 284 bp, Setaria italica
  Peptide Sequence Number=SeqID_72852
tcctagctctcttgcaatatcttctctatctcagtctctccgagtagtacatacacagacatacacgctccgagagaggcagatacttgcaaactaaagcacagagctagcatgatcccaagagcgccaagcctcttccacctcgaggagggggtgggcgcctcgacctcgacgccaatggcggcctcatccgccggcgagctcgtagggctccgcctcatcatacagccgtcgccgaggaaacaacagctgccgacggtcctgaggaggtcagcggtgacggg

SEQ ID NO: 6879 - DNA, 460 bp, Setaria italica
  misc_feature (409)..(409): n is a, c, g, or t
  Peptide Sequence Number=SeqID_72853
tggagcatagacccagtccacccgcacgcacgcgtcctcctccatcgggatctccccgcctccagcgagcgaaatgcccgcgccgccgcccccatcggccgccgttccccgccgccgctggcagagccgcctcagccccacgctcgtgcgtgatcgctgctacacgcgctccttccactccgcgggactccgcccggcggccgtcccactccctgacggcgccgttgtgcacctatggctcccgcccaccgccgccactggggccaaccccctgcacccggtcctcctcttacacggattcggcgcgactgccacctggcagtgggcccccttctccgcccgctcctcgccgccggcctggccccctagtcccgaacctcatcttcttcggcgcctccgcctcccccgnagccgaccgctccccggcctacccaaagggacccgaccctaggaccaatcc

SEQ ID NO: 6880 - DNA, 163 bp, Setaria italica
  Peptide Sequence Number=SeqID_72854
tttttttttgtcacgatatagcttggcgattggatccatttgatcaaatatagttaccaagaaaactgacagtaccatctcaattcatcaaactcatgagatgagcaaagcaagattgtatctcttgtcagaatggcgtccatttacagcggtcaggcggcca

SEQ ID NO: 6881 - DNA, 199 bp, Setaria italica
  Peptide Sequence Number=SeqID_72855
aaacccctgaggcaaagcagaagaggccgccgcgccgagaatctcggcgtcagcgtcccgccctctgcgaggcggatcgtggacaaggctgcgcgcgcttacgccgtgctgaggatgtcagggtgcacgccgtactccttggcgaagacgaaggggacaatgccctgcggcagcgcggcctgcaagcgtggcgtcgtcg

SEQ ID NO: 6882 - DNA, 701 bp, Setaria italica
  Peptide Sequence Number=SeqID_72856
gcagggatgtagtagacgagcgtgatcgggcagcgcgatgagcatgccaaaaatgactgcggtgctgagaatgtcagggtgcacgttgtactcctttgcgaagacgaaggggacaatgccctggggcagcgctgcctgctcgttccgccattttgcaaagcaagaaaacacaagcagagcacggtgagcaaacaagaaaaaaaggcgaagcttttgtgctggcctcaaaaggccgcggcgttagagaaagagagggggaccaggaaagaaacagcacagcgatgatgcctggctgctggccgacgcgcgcgggcggcagcaaccagcaaaagactttccccgctgtgcatcagtgtgtgtatgatatctatccgtccctcttcccccttttccccccacccaaagtacctggacgatggcgacgtgcagaagcgtgccgcggaggcccacggcgaaggacgcggccgccatcacggccggcccgggtcaggaagcgcacggccatggcgaacgtcgccaccttgttgccgcacgcgatgatccgcggctgcagcgccatgaacagcccgagactgaacatggccatcccgagccccgcgtccgacaggatggagatggatttcaggacgatggccggcatctcgaagttccacctgaagcagacgagcgtaccagtattgtaggccgatgaggctggagtt

SEQ ID NO: 6883 - DNA, 358 bp, Setaria italica
  Peptide Sequence Number=SeqID_72857
ggcacggcgaagagcgccacgaagcggttgatcccggagcactggtccggggtgaagatgcgccaccaccggacggagccgtacgccaggatcatggcgacgtagagcggcaccatggccgtcatgacgtggtagaagtccgtgcccgtgatcatcttgccggcgcgttcgccgccgccgccgccacgccttgcagagagacgcttgcgatcgagctgcacagaaccccggtgtgcgtgcggacggggaggcgcttggtggtggtgcggtgggagagtgtgtgtgatgagtagatgtggattgtggaggcctggcgccgccgtggagtggaggcaggcaggcgggggagccaatgagg

SEQ ID NO: 6884 - DNA, 775 bp, Setaria italica
  misc_feature (1)..(8): n is a, c, g, or t
  Peptide Sequence Number=SeqID_72858
nnnnnnnnttttttttttctttagccgttattgaacaagagctctagcattccatcaaagtgacatatgcatccattttacaatgcaagatcagcccaaccatccatggaaaacccttcccatcacaagcccccttcaacccagatcaaccccgtaacctgatcaaccggatgctttccaaattgtcaccctaaagccttgcacgtgttgttcttggcgccctccttcaacccaacccttgtcctaaacatttttttttgtggcctctaatctctacagctaagaatactcctacaaattaagcatgtcccctgcacgcacgcgcagtcgctgcagcatcccttgtcccctcctctgtctcctactccatccacccggcatcgctgagctgtgacttcctgcaacgacaccacccttgtcttgctttttcacagccccagcaggatgtagtacaccagcgtgatgggcagcgcgatgagcatgccgaagatgactgccgtgctgaggatgtcagggtgcacgccgtactccttggcgaagacgaaggggacaatgccctgcggcagcgcggcctggacgatggcgacgtggaggagcgtgccgcggaggccgacggcgaaggaggcggcggccatgacggccgggccggtcaggaaccgcacggccatggcgaacgttgccaccttgttcccgcacgcgatgatccgcggctgcagcgccatgaacagcccgaggctgaacatggccatgccgagcccggcgtcggagaggatca

SEQ ID NO: 6885 - DNA, 563 bp, Setaria italica
  Peptide Sequence Number=SeqID_72859
agcgtggagagggagaagagcgtgatgctccagtcgaggccgaggaggcggcggaccggggagatgcgggaggaggcgatggcgaggagggcgaggacggcgagcttctggagcgtgtcggcggcgaggaagcggaggttcatggcgaaggggttgttggtggagatgaagtggaaggagaggagcgggacggcgaagagcgcgacgaagcggttgatgccggagcactggtccggggtgaagatgcgccaccagcggacggagccgtaggcgagcgtcatggcgacgtagagcggcaccaccgccgtgaggacgtggtagagatcgagggcggtgatcatggctgccggctttgctttgccgccttgctgggatggaacacgggtagaaacgaaacgagctgttgcggcgagcaccagtgcgggaggtctgtgggctgtggctacctagaacatggctggagagcggagagaggaagaaggtgaatggacagagaaagaagaagagcacagcaggtaaatgggaggaagaagaacaggggaggggagacacagcaggtggcg

SEQ ID NO: 6886 - DNA, 2617 bp, Setaria italica
  Peptide Sequence Number=SeqID_72860
tgggtctttggtaggtcgttcgttccttcgttagttttgtaggggtcgtcggtcgttggtcgtccggttgtcggtaattgtccgtaaggtcgttcggtcggtcgtgaaaactgacataccatctcaattcatcaaactcatgagatgagtgagcaaagcaagattgatctcttgtcagaatggcgtccattttacagcggtcaggcggccaaccagaatccccaaaacaacccgttgagagacctcacctcaccgaaaccccacaactcgtgacctgctgaaactggatgatctcctgttcccttcaagctttgtacttgtacctgcttttggtgccttttgcctcaccattgtcgtcctagctagctaacgtcttgtccaccttcccctttccatcctcccaatcccccatacctacttctagaaaaaagaaagaagaagaaaagaaagaaagaaagaaacaagtcactcattttgcaagcgccaagccaagcagtgtcgttgtagctagctctgtcctccttttgctcctcccctgatcttcggtggtggtagcctttttacagcaatggcggcgtggcactcacagcccaagcaggatgtagtagacgagcgtgatcggcagcgcgatgagcatgccaaaaatgactgcggtgctgagaatgtcagggtgcacgttgtactcctttgcgaagacgaaggggacaatgccctggggcagcgctgcctggacgatggcgacgtgcagaagcgtgccgcggaggcccacggcgaaggacgcggccgccatcacggccggcccggtcaggaagcgcacggccatggcgaacgtcgccaccttgttgccgcacgcgatgatccgcggctgcagcgccatgaacagcccgagactgaacatggccatcccgagccccgcgtccgacaggatggagatggatttcaggacgatggccggcatctcgaagttccacctgaagcagacgagcgaccagatgaggccgatgaggctggagtaggtgttggggttgcggatgagcttgcgccacaccatgatcaggatcagccgggtcatcacgctcgtgggcggcatcgccgtcggcgccgccaccgcgttggggtcgccgccgcccgccaccgcggccttctcgtcccctgcctcggcgtccctgtccatggcgcccctgttcccgaagctgaactcgtcgcgctccacgtagtcgtcccgctccttcgctccatccattttacggggggacttggcggccgcggcgtcgttgtagtccggcgcgccgccgccgaagacgtcggagaccggcgaggcgctggagctccagacgaacatgtggaggtcctcgcccttggcctggccgttggtggcggccttcttggcgcccttgggcgccgcggccaccgccgggttgggcgcggggtagtggccggccccgggagccgcattcacgacggggagagggtacttgggcttggaggcgtcgtcctcgtagtttgaggggcgcggcgtggcgccggtgcggatgccgaaggcgtcggcggcgccgaagttggagctgcggccgaccatggagtagaagtcgttgtggttgaagctggagccccgcggcgtggggttgcgcgacgactggagcgagtagatctcggcgttggtgaggttgctggggcgcggcgtggtgctggagaagcccatggagcggcgcgagtagatgtcggagcgggaggcgttggagcggcgcacggtgacgtgtatcttgccgtcctccttgacctctgcctcggtctcgatggcgtccctccggccgtcgagcgagacgacgtccgggtcgacgacgatggaggcgatggcccccgcggtgtccgggaactgctcggtgatgagcatccgcgcgccgcggtactcgaacatgaagagcatgagcgtgtaccagatgatgcactggagcacgacgatctgcaccatgaggctgccggagaagtcgccatacatgcccttgagcagcgggatgcccatgacgagcgtgttgggcagcgtggagagggagaagagcgtgatggtccactcgaggctgcccccggcggctgaggtggctccatgcggtgagcatggcgagcaccatgagcttctgcagcgtgtcggcggcgatgaagcgcaggttcatggtgtaggggttgttggtggagatgaagtggaaggacagcaacggcacggcgaagagcgccacgaagcggttgatcccggaacactggtccggcgagaagatgcgccaccaccgcaccgacccgtacgccaggatcatcgccacgtacagcggcaccatggccgtcatcacgtggtagaagtccgcccccgtaatcatcttcgccgcctctctcctcctctttcaagctccctctctccctcccaagctcagctcagctgatgagctgaacaccgctctctagtctctactctccccggcgaccaccactccgactcttcacagctgggctgagctgagctgagctagtgagcagtctaattcactcagctagtgaggagggactggactgagcagctggtggaggaagaggaggaggagcagtgagccgtggtggttgtgcgtgg

SEQ ID NO: 6887 - DNA, 933 bp, Setaria italica
  Peptide Sequence Number=SeqID_72861
gtgctgtcttgcctgctgcaactttttccataagagcctgttcatctaaaagaagcctcatctcaacccattgccaatggaacttgcaggctgaagagtatcaagtagttgcataagcctctctgagagctttaactcattatctttgggatcacaaggttctgaagcaccatccccctgagtagtcattggtgtgttgcaatcaacgagggcatccagaaaaagccgggcacggagaggtacaaacggcaatatttttgaattcctgtcagggctatgactttcgagcattgctgcaaactctgaatcaccaacatcagacgccagaagattatacagctgatgtgtgttacggaagcagatctctcgaaaaggctgatgtctggtgatatcatttattgcgtttgacagagactgataaagctgtggatcttcacgattaaaaatatatcgcctccaaagaaccatggcaaaaattgagtaggctggaggaaagatcaaacttaaaggaagagtctgctgcaaccttgagagtgcaagaatgtacgattcaccaagaatgtctgcaataagcccatcgtagacagttctgcagttccccaatagaatcctaaaccagtgtgccgaaacttctgtggaattctccatcctgaaagttccagcagcacgggatacaccgtttgtactcgttttcaaacctcttagcagctgcagaatgtccaaaccatctttatttttagagcagcaaccatccgctctaggctaacagctccatgaacaacagcccccacaacaagagcagaaacagcagcagctacttttgcagtcctcccaacaaatccttttcccgagttgctgaggtcacttgtatgatttccatatgcatcatgggtctcaggagaaggttgaaactgattgcgctgcatctttgcg

SEQ ID NO: 6888 - DNA, 955 bp, Setaria italica
  Peptide Sequence Number=SeqID_72862
tttggctacaagtcatatgtcttctcaagctcaaagttcagcagccctatccctcatagactctgtggatcccactttcccaaatttgagagcagaaagggaacgctccaccaaaccaattgaacataaccaccatcctagcactccaattacacaaggcaacaactagctagagcatcatctagctagttctctctcccaggcctatgaatgggcgagaaagggagggaaagagagagaaatacatacacatgtgcagcagctatatactacagaaaaacaagggctaatacagctaactcaatcagccatctagcttagggaaaaagagagagtcgcgcagcaatatgcatgcatcatgcattcatgcaaccactgatggtaaaggtccatgccatgctatgagtatgtaattaccttcttcctcattcagatagacctacataaaagtgaaaaattgacaggcggaaaagtgcgtgtgtgtatataacagctacctacatgtgtagctagctacaaaagatacacgacatggttccacaattcacgaacatatatgcataccaatcatcttacccaacaacgagtactgcactagcttatatgtatgtgatctccatgcttcaattctctctatatatgttacaattaattacctcaatctccctctccaatctcccatgtgttcccaacctatacacctactaataaccttaccaactaaacatatgtaccaacaataatctctctcctcaacaatctcctatatcttaatcatgcatcgatctcatgtgtgacatgaacaagagatatgcgatgatctagatacaaacagcggcagcaggggcagcagaagcatatgatcggcggtgcaagaacaagaattaattaaccatgcggtattaattaattactggttcgatcattggccggagaagaggtcgacgaggttctg

SEQ ID NO: 6889 - DNA, 289 bp, Setaria italica
  Peptide Sequence Number=SeqID_72863
gcgcgacgatgatgagccaccaggtgacgttcccgacgatggcggcgccgaggaggccgtggccgaggcgcgtgacgaagacgtagttgagcgcgacgtgggcggcgagcccggcgccggagatgagggtgacaacccacacccggctctgcgactggaagaacttctgcagcgggaagttggcggcgtaggcgaagagctgcgggaccacccagcggcagtaggtcccggcgacggcggcgatgtcgtcgggctgccggagcgcgcggaggatggggcccgtgaagag

SEQ ID NO: 6890 - DNA, 250 bp, Setaria italica
  Peptide Sequence Number=SeqID_72864
cctgaagttcagctcgtcataatccttctctgcatcgcgcattgcctttgtttgcctaaatccaacgaatataaaaggagatgtcaaactcatgtctgcataaagccttacaggttaaagcaacaatgttcaaacataattacataaataccatgccacatagtaatttcacattggagtctgcagattactttattcagaaacattcattgttatggtattaaaataaccaagagactactgaaagtgg

SEQ ID NO: 6891 - DNA, 1072 bp, Setaria italica
  misc_feature (1)..(77): n is a, c, g, or t
  Peptide Sequence Number=SeqID_72865
nnnnnnnnnnnnnnnnnnnnnnnnnnnnnnnnnnnnnnnnnnnnnnnnnnnnnnnnnnnnnnnnnnnnnnnnnnnnntttttttaaagtatacattactgtcaattggcatatgtacaatacacgctgaaacgtccacagccaaccatattgttcaaaatccgatgcacaaagtcatcagaattgatgctccatatagtgcaaaagaggagtgcagagcaccctgaagattagtctatgtcatatgaatcatctagagacaagaatttattctttttatctcccaagcagacggcgagctcgagtgtttgctccctttaccctgaagttcagctcgtcataatccttctctgcatcgcgcattgcctttgtttgcctctcaatctcagagcccatgtcaacggccatccctttcagctcggtcagtatgtcgcttagatcagaaagagcgtcatcctgctttgccttctccatctcaactttctcaaatgctgatgtaggttcagaactaaattcgggcgcgttcaatcgaggcggatgatccgccagccctaatttctgcctttgctccaaatgactgccctttcttatgaaggaatcatctctacttagcataggacccctgattgtgccgttcttctttggcttccacttcttggaaaatagacccccaagatcacccaatagcttctcactcctggagaggtcctggtcgatgtcgacggccatcatgtgcgtgcggtggatctgctgcccctgctggtggacggtgacgagggtcttggacgcggtatccctcatcccctcggctatcctgacgcatccctgagcccgccgcgtggtctcctcggccttgtgcgccgcgtagccctccagctcctgcaccgactggccctccaggccgccggcgtctcggaagtcgtttcggtagtggctattcctcggcgccgccgaggaggagaagagcccgccatgtcttggccgccggcgccggcgccgaagagggagtcccgctgttcgggtcgggggcggcacgggaggaggcccgcgccggccgctgctgctgctgcttg

SEQ ID NO: 6892 - DNA, 515 bp, Setaria italica
  Peptide Sequence Number=SeqID_72866
agggacactgatgagttaaccttgtgctcatgcatgtgacctgtagatcaatattttctcgcgtagactaaaaatgtagttcaaattgtgccacatgctgcgtgcagtcccttctccaccaaacaacacaatacatgtcacgtactttgggtaaccaaacataaaacatgcctaaatggctgcatcatgctactgaacgaaggtaccgaaacgtttgcgtcgcttgatttggataagtgacgcgacagatggtcccgagatccagacccgtgaggatatgcatccgacctgtgcccatgctgtgctgcccagttccctgtttgaccgtctctgctcaaccagaggcttcagcgtctcgtcctctgaggctctgctaaacccagacgcactcttcgtgcacgtaagctgagtcatcacgcccatccgcaaaagcgacaacgaaaacatcgcagcgcagatgccaaaacttaaagacttgaataggtagtactaaactagacaagaaccttaagaca

SEQ ID NO: 6893 - DNA, 262 bp, Setaria italica
  Peptide Sequence Number=SeqID_72867
atcaaatattttgctctcagcacaaacaaaagctcggggtatttccatctgaagtgaaaaaatgcacattgctcaaatacaaagaactaaaaaactatctggggacatttcattaggaaaataggcatgctaaaactgaatagcttccaaaagtgctttgtattcagaattagaatgattttaactcgtgtgaagaagaaatttaatagagattgaagctgaatgaccaagaccaatgtacttcaggaatccacctataagg

SEQ ID NO: 6894 - DNA, 121 bp, Setaria italica
  Peptide Sequence Number=SeqID_72868
ccccaggagtgtgctttttccctcgaacgaggtgaaacagatacagacacctctattcatcctcaatgcagcgtatgattattggcaggtaaggaacattctggtgccaggggttgctgat

SEQ ID NO: 6895 - DNA, 2551 bp, Setaria italica
  Peptide Sequence Number=SeqID_72869
aggaaacgagcagggagaagaggaagaggagggtgcccatgaggaagaagatacggccgagcaggatggtgcaactggcactgtggatccttctaaattttttgcttcttcggagggagcatcattccatgcaaattcgttccttgagctcaacttgtcccgcccactagtccgagcttgcgaagcacttggctaccagaaaccaactccgattcaggctgcttgcatacctttggcattaactggaagggacatatgtggtagtgctataacaggatctggaaagacagctgctttctctttacctgtgctggaacgtctacttttccgaccaaagcgtgtacctgcaattagggtgcttattcttactcctaccagagagttggctgctcaggtccatagtatgatcgagaagttggcccagtttactgatattagatgttgtctcattgttggaggactttcatctaagattcaagaggtagctctaaggtcaatgcctgacatcgttgtagcaactcctgggcgtataatagatcatgtacgcaattctctctctgttgggcttgaagatctagctgttgtgatccttgacgaggctgaccgtttgctagaactgggtttcagtgctgaaatacaagaactgattcgcatgtgtcctaaaaggaggcagactatgcttttttctgctacaatgacagaagaaattgatgaacttgtaaaactttcactaaacaagcctgtccgtcttgaagctgatccttctctgaaacggcctgcaacgttgactgaagagtttgtaagaatacgacgagcacgcgaatcaaatcaagaagctgttctacttgcactctgtttgaagactttcaagcaaagtgttatcatctttagtgggacaaagctatctgcacacaggctaaaaataatatttggtctcaatggcatgaaagctgctgaacttcatggcaaccttacacaggcccagcgacttgaggctttggaacttttcaaaaaacaagaagtggacttcctgattgcaactgatgttgctgctcgtgggattgacattgttggtgttcggaccgtaataaattttgcttgcccacgagatgtgaaaacatatcttcatcgtgttggccgcacagcacgggcaggcagagaaggatatgctgtgacatttgtaacagatgatgatagatccctcttgaaagcaattgcaaagaaagctggttcacagttgaaaagccgcatcgttgcagagaaacctgtggctgattgtgcaaaactgattgagcaactagaagaccaaatttctaccatcattcgagaagaaagggaggaaatgttagtgaggaaagctgaaatggaacttgcaaaggtagaaaatatgatggctcataaggacgatatatactcacggccaaagaaaacctggtttactactgaaagagaaaagaagcttttggccaaggcagctaaagattgtttggaccaaggtaagaccacctctggagttattagtgcaaaacaagctgaagagctccgtctgaaggagaaaaggagaagagagaatgagaagaatttacctaggaagaagcgccgaagattagaggcacagcgggagatgttagaaggtgatgatgaagatgatgaggaagcaaaggaaaataataaaggagggaagaaggcaaagaaaggccaatctgtagtggatgtggcttaccgtaaggccaaatcaatgaaggcgaccagtagacgcggtcctggtgcgggcaaagggaagaatgagaagaattcaagacaacattctgagaaggccccgactaggcaggaggaaatgcatgatctgttccagaacgatatgagtgaatggaaacagggacgcgccttgaagaaaaacaacgattttgcccgcaagaaatccaagaatgctttcaagagtaaagcaaggtacaagcgccgaaagtagaagcctggctatctttgaaagcgtttgcagcactggggatgttgtatcatttttgactgactggtcctgagaaaacaccaggattcagattatgtgccttttaccttgttggttgtaaaattattttgccatagcatgtagttgacccacatcattttctttatgtttaatgtcccggcttgttcggtggaagatgatttggaggggatttgaagggattaaatcccctaccccccaaaatttgcatggggaggggattaaccgaaacctatccccgctttcaacatctttgtattaccaccaccgatctcttagttcttatgccgaactcttctgttgcctgttatttatctgtaagtcttatcacttcctcggtatgttcctgctcctaggtgtattattgtaagtttgcagtcactattccattgcaagttttttgttcggtaatgctaagattctgaggaatcttaaaaaaatcggatgtctagacatatgtttcaatagttaaacattgatgtggcaactattgtttccgtatgtttcacaatgaattgtttgtcatgaactataaaaaaaaaaaaa

SEQ ID NO: 6896 - DNA, 279 bp, Setaria italica
  Peptide Sequence Number=SeqID_72870
tggaagaaggaaccatggcaaccagccatgtcacaaagcaacagaaccacggcgctactatcctaacactacttgctttacatggcatgcaaaaactccatggatgctagctaggacaccacgggcatcatcgaggcatcaaccgacagccgtccgatcctcgcatcggacggaccgaaaacttttcctaacagatggctgacaagctagaaaagagcaaaatgactgctactccactactgcagcaaagcaaccacctttccatctatccatcgcatc

SEQ ID NO: 6897 - DNA, 270 bp, Setaria italica
  Peptide Sequence Number=SeqID_72871
tttttggtatgaaatccgctgaaattgctaatctcggtcgaattatggtactcacaaaaaggttccgtcctactacaaaattcaaattgctattgatacatgaattgcctgggcaccactttgaacactggattcgatccaagcatcagaagaaggcaaacgcggccaccttcatggagcagtggcgctgccatcgccaccagcggatcctgattgcctcagctcaaactcctgcacgagctcgtcgtccacgttctcggcaggctccca

SEQ ID NO: 6898 - DNA, 468 bp, Setaria italica
  Peptide Sequence Number=SeqID_72872
accgaggaagtatagcaggagctattagtgcttgcagctgctcgctaatcttgatattttcaacagaaacctcctcaaattgaagaaagatgttgcgcttagacaggataacaaattttgcagagaccatcagtgttgcaccttcttggtcctctagcaagttctcaatgctccagcgtacaacattcctcacaactccaccctctgactgatctttgcactcgaatttctggtaaatttgccccacctgcaggagcgggagcctctcggccgcctcaaacagcacgagcacgtccgacgccgacgtgtagcatagcctccaggtgccgtcgagcgccgcgagatcaagcggcgccccttccccggcgccgagctcctccacgcccacgatggcctcctcgatggcggcacgctggtcgggccccgccgcgaacccgcgccgcgtttcctgaaccaagcgcagcagct

SEQ ID NO: 6899 - DNA, 304 bp, Setaria italica
  Peptide Sequence Number=SeqID_72873
caaatccttttccatcagagccggcagcggggagggtggcggccgcggtttcggcgtgagcatcggccatggcgggcacgacacgtcgatcggcatcggcggtgggttcggaggcggagctggcaccacccgtggcggcggcgcgagcgttggcggcggagccggcgctggtgtcggcatcgacgtaggacgtggcggggtcgatgttgggatcggcgcgggtggaggcggcgcggtcagcgccggcggtgtccacgccggaggcggcggtggaggcggtgtcggtgtccacataggccatggg

SEQ ID NO: 6900 - DNA, 223 bp, Setaria italica
  Peptide Sequence Number=SeqID_72874
tgttagatgagaaatctgaagaacaaccgtgcgcacttttccgcgacgtctgatgctgaatctctaacagatcttggagaccaataaatgagcaatcggacagttagtctttagtaacatttttaccattttgacacacatgtttgacacagaatatatctaggtctctcacctttgatagtgttagcttgccctgtacttgcttgtgcatcttctttgtcta

SEQ ID NO: 6901 - DNA, 281 bp, Setaria italica
  Peptide Sequence Number=SeqID_72875
gccagatctgacatcccacccaagctcgccttcgctgccgcgcttcctagatcccgatctccccatgactcctcccatccgctgacgccaccaccgcaaccgccaccgccgccgccgcgatggcgtcgcgcccgcccctccgcaccacctccgtcgcctccgtctcctcctccaccgactcccccaccttcgccgggcctcccggcggcgtcccgcagtccatcaccgcgctcctcaacaacccgcttccctccgccgccgcctcatcctactcctggcta

SEQ ID NO: 6902 - DNA, 197 bp, Setaria italica
  Peptide Sequence Number=SeqID_72876
gcaggacgcggtgcgcacgtgcgtgctcgcccagagctggcgccaccactggcggtccgcgcccgccgtgcgcttcgccggctgcaccggctgggccggcggagcctacaccttcggccccttcgtcgacggccttctgagcgcccgccgcggcggcgcgcccctggactcctgcgacttcgacctcgacgtcaacc

SEQ ID NO: 6903 - DNA, 260 bp, Setaria italica
  Peptide Sequence Number=SeqID_72877
caaccatgcatcaatctccatgtactctaacaaaattatgtgaaattgaggatgctatgattcctctacagcaactttccataagcctaaaatttccatgtatcaacatttgtgaattatgactgtctatgcatccataatatgaactgtagtttggaaaactttatcaagaaaatgtagttcaagatttagaattagcagagcggtgcacttgaaaacaaaaagaggggaaaagaactcgaagaaaaaaaaaagaaaga

SEQ ID NO: 6904 - DNA, 303 bp, Setaria italica
  Peptide Sequence Number=SeqID_72878
ctctcgacctttcctccccctttctacagtacacaagggcggcgcaagggcgattccgatcccggcgtcgatctcgccggctcctcatcatgtacggcgaccgacctagtgccggaggtggagaggagccgcgggatcgatggccggtgtacataccctcttcttatctagttaggttagggttaggtttcctcgcttcgtcgacggcgaggcagaggttagtttatcccggtggctttgacctccggctaccggtgattttgtccctctagatcatctccggcgactgcggcggtggcgacg

SEQ ID NO: 6905 - DNA, 1131 bp, Setaria italica
  Peptide Sequence Number=SeqID_72879
aactgcttcagagcaaagaagaaaaaagaagtgagtgtgagagaaaagagataacccatagacaatggctcttatagctgatgaactcagggccaaggctgaggtctactatggtgatgacatctgccaacagtgtgcccagctcttgctcaaggaagcaggcctccccaatggtctgcttccattgaaggacctaatcgagtgtggttatgtgcaggaaactggatatgtatggctcaagcaaaagaagagggttgaccatgtcttccagagtctaggaaggctggtctcttatggcacagagatcaccggctatgcagagaaaggcaggatcaagaaggtaaaagggataaagaccagggagctcatggtgtgggtcccagtggaggagattgcccttgatgaacccgcaactgggaagcttatctgcaagagcattgcagggattaccaggaccttccctgcatcagctttccatatcccagagaaggagaatcagaagaagaactttgctgcaccaaaaccagtggtcctaatggagggagctccacaagttgttaaaaacaactgatccttctgcttcaactgagatttggattcgtgatcatcgtcaactcttagcccgacatatattaataatgattgaactagtgcattactgtctgcttatgaactgcgaaggtgataacccagagttcttatatacttctgttgtatgaatgccctggtgtgtattgtcctgtaaggcaaccacccaacttcctttcatgtactatatggatctatattactaatatgaagcatgttgtgaacttctatgatatgcttgatttcttttttctcttttctgagaagataccaccaccgaatgcctttttcgtgcattctataccaatatattgctaacattattttctgagaaaaaatatattactaatatatttccaagaaaatgcccctacaggatgccttttatttttcttttctctcttattttcacatgacaaggcacgtgaagtatgaaggatcaagaaatctagtctgtaaaatgggaacaatatttgcatgacttgtaattatgcttcaggcaaattttattgtctctttcacaagtggaagatgaaactttta

SEQ ID NO: 6906 - DNA, 425 bp, Setaria italica
  Peptide Sequence Number=SeqID_72880
aagatgaggccgtggagcgccgacccgagcacgtccaggacgaagccgagcgcgtactggcgcgccgtgacgccggggggcctgtccgacccggagtccagagcgacgatcacgacgccggccgtgatcacgacgacggcgttgatggaggaaaggttcagcctgttcttggcgatggcgcgggcgaagagcgcggagaaggcgagcgacgacgcggcgacgagcgaggccgtggacgccgggaggtacgcgtacgcccacgcgtacatgaggttgtcggcggcgctgaggaagccgaggagcacgtaccaggagcacagcgccagcgacagaggcgtcggtgacgccttgctgaggaggtagagcgggagcaggagcagcgcgggcaggggccagcccgcaacggccgcccacgacaggatcca

SEQ ID NO: 6907 - DNA, 231 bp, Setaria italica
  Peptide Sequence Number=SeqID_72881
gaggaaacaaacggcttattaccggaaacttaggatcgaccggatcttatcattcgatcaaccaacattacaagtgcacgactcattgagaatcctatgtgatagccaaggcacaatacaactagaacatgatgggatctgcacagcagccggcagagatccccatgagcccatccatggcctgcccgggcatgtcctcgagcagccagtcctcaagcagcgagaaggtag

SEQ ID NO: 6908 - DNA, 722 bp, Setaria italica
  Peptide Sequence Number=SeqID_72882
tactttgtcttttctagagacttccatacctgaacagaatgaaggttttgctacacaagtttcaacttctcaaccaactgttagatctggccagaactttgactccggatatgctatgaagattgatgtgattgcatctattgatgattcagtggataatttgcttgaaggcacttcactgtgcttaagtgagccaaaggagactacaacggtacaaggaccaaacaccaccccacatgacagtgtccccactcattctggcccctcaaatgcatcagatgattttgattcatggtttgattccctataggggagaaaaaggttggtgctgtgaggaagtgatgcctgacttgagggattcttctctgtgacgcaaaggtcctttgtgccattattcactcaattcttgaatctaactggtaaacgtgttcagggagctgtatttcaaagttctctcttctttttttttttatggaggtccaccagagaactatctctgtgttaggttttctatgggaaggtgatgaagtggatagagcattgtataaaagctaaaggtcatctgtgctggttcatcgtgtggttcatattgattcagttggctggctgctgtgaaatctgaatgggatatgcacctccttgaactaagcatgttttgctgttgtaccattatctgcgaactgtttcagaaacaaactaatgcaaacagttcgcagttcgta

SEQ ID NO: 6909 - DNA, 264 bp, Setaria italica
  Peptide Sequence Number=SeqID_72883
ggctgctgctgcggggttgccgcgacggtggcgccggcgaagagcgcctcgacggggttgggcgcgggggcggcggtggcgcagcccttgcgcgcgagcgcggtgaggcggttcatgaggcaggcgaggtcgacggcggaggactcggactggaacaccgactgtgggaggaggaagtagacagtgccgggctggagcgtgtcgtcggggcggaacggaccgcgccccggctgcagcaggtgcgccgacgagcacagcacgtag

SEQ ID NO: 6910 - DNA, 388 bp, Setaria italica
  Peptide Sequence Number=SeqID_72884
tacttcattccttagtcttatactttctgacttcatatcaagcaaattttggatccaaaggttcagctaatatgcaaccttctctatccatgccacaagagtggaccaacttttggataaacgttagcgaatctagatcttcatcagcctttgagaaaagtcttgagagtctcaaagagtttggtgacatgacttccagtgggggatcctcccatgatagggatcgtgaaaaggatccaataaggggagacctcgacaaagcttgtggggatgaagctatgaaattttcagatgagtacagtagcctcctattgttattatcacagataaatggtccatctagtacagatacagggcttggttggtcctgagggtcaccaaagattcc

SEQ ID NO: 6911 - DNA, 835 bp, Setaria italica
  Peptide Sequence Number=SeqID_72885
cttttgcaatctcaacttcagatttactgaaggagtcatctccgatataaaattcaggatattcacatgagagcatgctttcttcatcttgcttgtctttgagcctcatcctcatctgccaagtgatctcctttgctaatcttcttgagcatgctgtttcatcaactgtcatcatactttcatcttcactatcttctgcagatgataatggagatcctacaatcccaggatcatgagaattcgcgagtcctggctttagcactacaatttttgttggctcagacaaacttgagtttgctggggaaacatctaagctctggtggcgcctgtatctgttacgttcactttcatctccatctaaaaagagttgtctccccacaagaacactgccttttctcttcgttggttctgatggcttcagtatggttatttgctttacttcagaaggtggtgcagcaggttggaactcatagcggttgcttgataacagtggatttggctcatcaaggaactccaagaatagttctctatttgagcttaaaaactgcagtgcatcttggaactcctttgaatgaagaagcttctcatccgtggctagacgcttcgcttcagcaaacttttcgcaaacaagtgacattctcttctcacaacaaggttcaattccttggtacttgctctggctgctattgattcttgaaggttggtcactaaaaccattccatgtgtgctgatggcgcagtcctgccttttggttttgatggcatttgcttccttcttcagcttgatattccggtagttctcttcaaattcgctagacttgtaaccggtagtctaa

SEQ ID NO: 6912 - DNA, 1224 bp, Setaria italica
  Peptide Sequence Number=SeqID_72886
aaaaaagtacttagaagaagtactacaaaagaagtttaggtagaacaatgacttccagtgggggatcctcccatgatagggatcgtgaaaaggatccaataaggggagacctcgacaaagcttgtggggatgaagctatgaaattttcagatgagtacagtagcctcctattgttattatcacagataaatggtccatctagtacagatacagggcttggttggtcctgagggtcaccaaagattcctggggcgccaagacttgacatagaagaaatatccttggctgggatgttagctgtattattagtatgacaagaactagtcaccagcccttgcatgatgttcttctcatccgtgtcaagacaagtattttgtttcccataattgtgtagcacaagatggttccagtcttccttcacatcaccattagtcacagcaccttcatgcttgagtctatcgctggcagacggatctaccttctcccgagttgatttcttatttttcgagaacaggctagaaactttttcccgaaatgatgatgacttcctgattctttccttttgagctgcatgagtgccagaggctactccatttgactcaatgcctccataagacaaagaaactggaagagatcgagaccttggcaaacatgagaaaggttcttcagcttccagctcagatgcttggctctccactgtttcaccctcaatttcttcctggtccttgacttttgaaattgtgagcatgtcacctagtgtgcccatacttctacgaccttccatttcttcctcactactgactgttgatgataccatagaccatctctccaaaatcttcttcttgccttccctaactaccgatggttcccgtctatgggatgtctgactagagcatgatgcagagtaaggacttccacttctactcagaaaatcccaagaacggccagacgtcggagtgccaaactccaaatcctcgcttgtttcaccagacatttcttttgcaatctcaacttcagatttactgaaggagtcatctccgatataaaattcaggatattcacatgagagcatgctttcttcatcttgcttgtctttgagcctcatcctcatctgccaagtgatctcctttgctaatcttcttgagcatgctgtttcatcaactgtctcatgatcctgggattgtaggatctccattatcatctgcagaagatagtgaagatgaa

SEQ ID NO: 6913 - DNA, 266 bp, Setaria italica
  misc_feature (261)..(261): n is a, c, g, or t
  Peptide Sequence Number=SeqID_72887
ttctgcatatacaaaccaccaaatcattatgtggacgattggaaagagacatagaattataagtagcaacaatacctaaacagtgaccaccaacaataacggacagaacgaatgctgtgtgaagtgatattcacattttattcctctcctacaaaaggtaattaagaactctggtttgaatcatcaactaaccatatctaaaactatgtagaatgctgtgtgaagtcagattcacatttttcattcctctcctacaaaagntaatt

SEQ ID NO: 6914 - DNA, 717 bp, Setaria italica
  Peptide Sequence Number=SeqID_72888
atttactattattggttcctcgttgcatggtattttcttctatattggttttgctcattcatcaccattgtatgccatttttgcaggagtttgaacctttgattcaaaagccttactcaattgtctatttacactctgcagcatccctgcaaccacaacctgatttaggattcatgaaacgcttacagcaaatactaggccggaagcatcaaagaaatcttcatgctatatatgtactccacccaacactgggattgagaacggctaatttggcgatgcaacttttgttgacggagaggtctggaagaaaactgtatacatcgacagacttgtgcagctgttcagatatgtaccacgtgaacaactaacgatccccgaatttgtctttcagcatgaccttgaagtgaatggtggaaagggcataattgtagatccaagaacaaagcatgtctaccagaggccatctggttgatctgccatgggcttgctaatgagcggttcacaccttcgcataccactctgtacaacctatctgtcctctgtagagtacaccgagctctagagaaacttaagagacatatagatacatcccttatttgtttatacagaataattgacatacataattacgcctccctaaaggaaaaggaatagcacagagcaataatgtcaactcaactagatacaaaatggacagttctagaagggaatacttct

SEQ ID NO: 6915 - DNA, 1190 bp, Setaria italica
  Peptide Sequence Number=SeqID_72889
atgcacgcatattctaatttgtatgtgatatttcttattatagcgaatcctattgataagatttttaaattttaattaaactttggggggacaaaaagcttgatggcgcatcatgatgcttttgcgagttggacaactcaatagtgaacgttgttgctgacaactgattagtgcatttctctattggtttgtaacggggcagcaccgcccgagtatcctgaaggtaaactagaaatttcgatgcattcatgcagatatattaaaaattgccgatatccagaaggtaaactacaaattttgatgtatgtatatatttccaatatctggaaggttaaactaaattttaatatatgtatattgaaattgctgatgctgtttctttgtccatgagttggcctggactttcctttgttaaggatatgctggctgctgtgccggaaactagttttataccctccttcaatcctaaggaattggtatgtgataccattgttgcttttcaatgataggtttcttaaggtatcaaatttgtatggaagttataaaagaccaacaagatatgataggtatatgtgcaattaagtggtgggatgggcctaaaaatgagaactcaaaccaaggctttattgaaaacagggattgtgcaagtatcatattgtgaaaccattatcatgcactctgttaataattctgttaatttctcatcaaaatccatggtatttactattattggttcctcgttgcatggtattttcttcatattggttttgctcattcatcaccattgtatgccatttttgcaggagtttgaacctttgattcaaaagccttactcaattgtctatttacactctgcagcatccctgcaaccacaacctgatttaggattcatgaaacgcttacagcaaatactaggccggaagcatcaaagaaatcttcatgctatatatgtactccacccaacactgggattgagaacggctattttggcgatgcaactttttgttgacggagaggtctggaagaaaactgtatacatcgacagacttgtgcagctgttcagatatgtaccacgtgaacaactaacgatccccgattttgtctttcagtaagcaatctatactttttatctcttttagaagtctgctggttaaactggacttcatctcaaataatcaatcccgcaggcc

SEQ ID NO: 6916 - DNA, 540 bp, Setaria italica
  Peptide Sequence Number=SeqID_72890
tttatggttgttgttggtgcttcactttcttcttcgctgcttggatcttgaacgatttgttctatatgtgtaaagcttgatggcgcatcatgatgcttttgcgagttggacaactcaatagtgaacgttgttgctgacaactgattagtgcatttctctattggtttgtaacggggcagcaccgcccgagtatcctgaaggtaaactagaaatttcgatgcattcatgcagatatattaaaattgccgatatccagaaggtaaactacaaattttgatgtatgtatatatttccaatatctggaaggtaaactaaaattttaatatatgtatattgaaattgctgatgctgtttctttgtccatgagttggcctggactttcctttgttaaggatatgctggctgctgtgccggaaactagttttataccctccttcaatcctaaggaattggagtttgaacctttgattcaaaagccttactcaattgtctatttacactctgcagcatccctgcaaccacaacctgatttaggattca

SEQ ID NO: 6917 - DNA, 1874 bp, Setaria italica
  Peptide Sequence Number=SeqID_72891
gccgcggggcccggggccgcggcgcgtcgcggttcccagtcgatcacgagatcaactcgaagatctacctctggaggggccacccgtggaacctagaggtcgatgccgttgtcaactccaccaacgagaacttggacgaggctcatagtagccctgggcttcacgctgctgcaggaccaggactcgccgaggagtgcgctacattgggtggctgccgcactgggatggctaagatgaccaatgcttatgatctgcctgccaggaaggtcatccacactgtgggccctaaatatgctgtaaagtatcacacagctgcagagaacgcgcttagccactgctacagatcttgtttggaactgctcattgagaacggccttgacagcattgcaactggttgcatatacacggaagccaagaattaccctcgtgaaccagctgctcatgtggcaattagaaccgtgagacgttttctggagaagcaaaaggacaaaataagagctattgtcttttgtacaacatcatcatctgacacagagatatataagagattgcttccactgtatttccctcgggataagcatgaagaagagatagccgcattgaaacttccagctgatgttggggatgagaatggtgagacagtaatagatgaaaggaaaataagaataaaacctttgcctgctggggcagcaaatagcaaaacaccaattcctacacttgcggatatccctcttcccgattctggattgacacgtagaaggaactctttcaagttggactcatatttggatcctgcctttatgtcaataattaaagatcctgatctccgacacaaggagcaatgggaaaaatctgctcaggcaaacaagggaattaactttgctaacttgctcgggtttggtgatcttggcagccctccattatctgctgctgaagaatattcgcttcattcacgataccttgctaaagcaaattctatgaatctttcagatattgctgaaatgaaaataatttaccgtggaggagttgatagtgaagggcgcccagttatggttgttgttggtgctcactttcttcttcgctgcttggatcttgaacgatttgttctatatgtagtaaaggagtttgaacctttgattcaaaagccttactcaattgtctatttacactctgcagcatccctgcaaccacaacctgatttaggattcatgaaacgcttacagcaaatactaggccggaagcatcaaagaaatcttcatgctatatatgtactccacccaacactgggattgagaacggctattttggcgatgcaactttttgttgacggagaggtctggaagaaaactgtatacatcgacagacttgtgcagctgttcagatatgtaccacgtgaacaactaacgatccccgattttgtctttcagcatgaccttgaagtgaatggtggaaagggcataattgtagatccaagaacaaagcatgtctaccagaggccatctggttgatctgccatgggcttgctaatgagcggttcacaccttcgcataccactctgtacaacctatctgtcctctgtagaagtattcccttctagaactgtccattttgtatctagttgagttgacattattgctctgtgctattccttttcctttagggaggcgtaattatgtatgtcaattattctgtataaacaaataagggatgtatctatatgtctcttaagtttctctagagctcggtgtactctttgggtactaaataatgtatgcaaacttatctaattcttgtccttatggattctctttagttgcattgctttacctttgtgatactaatagatctcaatccatcattgtttcatattatct

SEQ ID NO: 6918 - DNA, 244 bp, Setaria italica
  Peptide Sequence Number=SeqID_72892
ctgcacaagtgcatccaccagctaccaaaattgaatctgtcagcccatgtccaaccctttacccgtacagttttgggttttgagctgaccattactcctgatttccagtgggatgataaaatacatggatatgtggagcccttctgggttatagttgaggacaatgatggcgagtacattcttcaccatgaatattttttgcttaagaaacaatatgttgatgaagatcatacattgaacttca

SEQ ID NO: 6919 - DNA, 432 bp, Setaria italica
  Peptide Sequence Number=SeqID_72893
agcaacctatgggcagaaaggagaatttcccgctgatcagctgccaggtcccaacaacattgtgccttgaaaaatgggcttgcagtagagcattggccttcacatgtggatcaccattacttgggcttctcaatagagaatctctggtggcgaacaagcctctcaatgaaatcttcctcacctggacgacctggaagttctgcatattctgatgcagatgctagaatctctaggagtcctttcatcttagtcttctgggtcagcatagaactgaaacgttcaatagttgtgtggctatagaggaggacatgtacctgaagcctcttaaccttggccttattgcttcatactactatattagctacacaactattgaacgttgcagtagagcattggccttcacatgtggatcaccatacttgggcttctcaa

SEQ ID NO: 6920 - DNA, 1246 bp, Setaria italica
  Peptide Sequence Number=SeqID_72894
gccaagcaactactaggtctaaatgtagaccatatcagaactaagagaaaggccttccagtttcagcctagaaatgtatgcttgcagcagaacattgatctttgcactgggttcctccaagctctctttcacaggaatcgggacgcgatccaaaagcttcgcaagttccatttttctcatcttgcctgacaccaacatacttgaattcttcactcagcgaaaacagtcgacacagctcaatatcacccattgtaggcttcaggtactcattgtatgttgagatagtcccatgactaatatagtaataactggcaatccttcccaggtcagtaacttgaaagtatcctgtcttcctgtcatactttatcaaattgttcctatccagtagatttgcagcagaatgtatcaagtcagctctccttccatcaagtgttttatcactctcaaagatgtctgctggcaaaccatacaatgctggattgcggagcatccgaatatagaggtaagtgtagccaagccacgagcatgcctcccgagcattctgaatagtccccagaacaatctctgcattcaattgatcagctaattgggatacaaactgactctcaataggtagctgctgattcataagagacaggtaaaactgcaattcactgtggccagtcaagattattccctctccatgtgtatcatactgaggccttcctgcacgaccaagcatctgcataacatccagcggacttagttctgtccaagcacctttttccgggttgtaaatctgggtaccctttataataacagtatgtgcaggcaaattgacaccccatgcaagggtggcagtcgacacaagaacctgtatgtgcttatcagcaaaaagttcctcaacgagttcacggtcaacccttgccatcccagcatgatgaatagcaaacccatacgggaggaggtctttaagatcattgtttttgacaagttctgcatgagtgccaaggatctcttggcttgcactctcgttcttcaggaagcggctaactgtgtcgttagccaaagctgtatctctgattgctttggcagttttcgccgtctccttccttgagtgtacaaatataagcacttgatgcttaccagcagcagccataaccttctcataacaaatctcattcatcaactggaacctctgtagtggtttcctcacagtgatcccaatgtattgctgagcaagagggcaaggccggtaactgttgtc

SEQ ID NO: 6921 - DNA, 315 bp, Setaria italica
  Peptide Sequence Number=SeqID_72895
acatcatctaccagactaccacgcctcccgccgccattgccggcggcgaggacaacaccccacccccccctcctccctccatggctgctccgccctacggcgggggcacagacgactcgcccgaggactactccgccgcggccaccgtcgtccgcttcgacccgccgctccccctcctccgcgctcccgtcccctccgccgcccccggcgagccccacgtcctcgccttccgcgacgccgccagctggagagccgcctgggacgccgccgaagccagcctcgtctcgcagtgcgaggctggtgcacggtcagggt

SEQ ID NO: 6922 - DNA, 807 bp, Setaria italica
  Peptide Sequence Number=SeqID_72896
cccacttcaatcctagacgccacccatccctacacacacgccgcacgcgcctcccgcacaaggaaagaacgaagaagccatggcgccgaggacgtcggagaaaacgatgacaccggcggcggcggccacgggtctcgcgctcggcggcggcggcggagccggcggcccgcactacaggggcgtcaggaagcgcccgtggggccggtacgcggcggagatccgcgacccggcaaagaagagccgcgtgtggctcggcacgttcgacacggccgaggaggccgcgcgggcctacgacgccgccgcgcgcgagtaccgcggcgccaaggcgaagaccaacttccccttcccgtcgtcgtcgtccatgcccccggtcgccaccgtggcggcggccgccaccggcggcagccggagcggcgacagcagcaccgtcgagtccttcggcggcgacgtgcaggcgcccatgcaggccatgccgctcccgccgtcgctcgagctggacctgttccaccgcgccgcggccgcgggcacgcacgccggcgccagcgtgcgcttcccgttcaacagctaccccgtgacgcacccctactatttcttcggccaggccgcggcggccgcggccgcgggttgccacatgcagctcaagctggcgccgactgtgaccgtggcggccgtggcgccgagcgactcctccgactcctcgtcggtcgtggatctgtcgccgtcgccgcccgccgccgtggcggcgaagaaggcctccgcgttcgatctcgacctgaactgcccgccgccggccgaggcggaggccta

SEQ ID NO: 6923 - DNA, 530 bp, Setaria italica
  Peptide Sequence Number=SeqID_72897
tggtttgtcctactatgttccagtatgctaagtcttggtcggccgactgtgaccgtggcggccgtggcgccgagcgactcctccgactcctcgtcggtcgtggatctgtcgccgtcgccgcccgccgccgtggcggcgaagaaggcctccgcgttcgatctcgacctgaactgcccgccgccggccgaggcggaggcctagtcgccggagtttagctgatgactggcagtagtttcttctcttttctttcttcgcctttttcccccgtagaagaaaaattcgctgtatgtttacgcttaggccctcttgcgaggacatttttgtaaatagtttttttcgccggggacctagctttagctgatgataaaagcttgtattgtcacccaagacaggtcctgccggcgttgtcatggaccggattatattatgtattttgatagtcatgagaaacggctcggaaaatcccaaaaaattcgaaccacctatttctctgttctatcagaaactgaagtgagatctactacgaaaaa

SEQ ID NO: 6924 - DNA, 529 bp, Setaria italica
  Peptide Sequence Number=SeqID_72898
tttttttttaggttattgggttattacggttcttattgcactaccaagacaattggaaagcaaagtccagcgaagtcgatctgtgagctgaaccttcccattagcacagcaccagatcgaaactccagattattctgttgtataacctctccaatcatcaacatcaaaataataacgagccccaaataatataaaaacgatggcaattaggtgcgcgcaggcaggttttctagttaacttcctaaatggtacatgtaaaagtggagacttgatgcaggttcagtctacatcttggcttcctttgcgtcctggtactcagcttcaggagtctggtctccactgctggtgccaccactgcctgcgctgccaccgcctccttgctgcatgtgctctccaatcttcgacactgccttgtttgcagcttccagcttctgcttgatcttgtccagatcgtcctcggccatagccgccctcagatcagagacagcagactcgatctccttggtgacttcagcagggaccttgtcct

SEQ ID NO: 6925 - DNA, 477 bp, Setaria italica
  Peptide Sequence Number=SeqID_72899
aaaaatagcagtgatcaggggttgtcatggatttcctcaaatagagtagacatgtgggtcacaaattcgatcatgtttgagtttatctagtccaaaacaaataaaaagaaaatcaagtaattcagctccttttctagtacaagtagtgtcacaatatagttagcgtcttagcgatgtccaaaaacaatgttactatatatctatgaaatatcaaatcatatttagattggaacaagaacatttcgagtgtgaataattgcatggtttcataagttagtttgatgcaccattagtattcatgcacaaattgacaaaactgaaggaaccaaatgtcacatggtttcaacaagatgtacttttagtattcatgcacaaactgacaaaattgaaggaaccaatgtcaacgccccccaaaaaaagtaaccaaatgtcacatggtttcaacaaaatactgcctctgttaccaaaatgtaagac

SEQ ID NO: 6926 - DNA, 1176 bp, Setaria italica
  Peptide Sequence Number=SeqID_72900
cgcgccgcggcgccggcgaagagctagggtcggcgaatccttctccctctccggtggtgattttgttttccggtgggcgggtaggagtggacggccggagatgatggacgaggcgccggccgatctgcgggagctcgtgcgcctgccggatgttctggtggtatgctcatctacgggatggacaaatgaaaagcacatgctctatcttcaattattggaagaaacatttgtgagccaactacatgacggtgaacgcagtttcaaggggttgttcaatctctctccaagatactgtagacaagtgaaatcatctaagcaaatcgttgaatatgccaaacctgatcagggatgtcatgggatagttgatgctgacagagtcaagtcctgcatgaaggttgagcttatggactcaccttcttgttgtggaaatcagcaagatggaaaaatccattctacggatgataatgcatcaaccacggaaccagtagaagaagccatttcccaagcaaggacaacgagctctggacaatcttccacatgctatgttggcaagtacagacattccccttctaggagtgcagatttttacaagagaactactcgtgcatttactcagaggggtcggatcagaattttgatgaggagaccaaagggactggagaatcaagaagaggatgcagccaaaagcgattgaaatcttacaatgttatgagggatgatgaggtgcagaaagcaggcctcattgcatgtgacaaacacgaagataaatataatggctcattgaaggtggatgctggatcactggatgcagaaactggatcgcctacatgaaaaaccatggatcgaagggataatccaatgtccacggagtgttctctggagctaactaacaaactcacctagttgtaactgatagaatcaccatgatctctagatcagagaggaaaagcgaaagtagggcatgtttggaagataaactagcttacccttcatgctggtttgggaagtcaaaatagtttgttcaatgtaccacttatgtttgatttagagacgattttaaaggttttgttgtgtttctgagtggctatgatacggaaatttcttgcctatccttgtattgtatttggtctctgtaagcctgtatatagagtgtctttgattttctaacaaaaaaaa

SEQ ID NO: 6927 - DNA, 2105 bp, Setaria italica
  Peptide Sequence Number=SeqID_72901
cgctggcatgagaatggaagaaccttgaagaatgattgtttctcaacattacgcacatcaaacttatcatttcaggttgaagtccatttcagaggctatctcatttttcccagctcaagtagcccaacagtcatcgtccttctgttgcaaccttgctgggtagctctttattactttgggcgacatcaagtacttctgcaacattgttgctctgttcctcacttttcttggttgtatcaagctgtgcgccacttatcaattgtgtttgctttttaatttctgcaggtttctcagctttcggcaatgggtgatcaaatgacgtagtaagtggttttccccttctgtcctgcattactttctgccgattctcgtagaagtcaaaatcgtccaatattgatgttttacatgagaagtttttgaaaatgttcagcatctctgtaccttgtggaaatttgacctcttgtgtgtccctgctatttgtcacaggtttgttctcattattctccaaaattatgtgacgaaattgtggattaggcacgtccttgataatgtgccattttactgaaaagaaaccattccacttgtcctgttgccagaagttcatgttcctgttaaaatctactggaccaaccatctcagccacaccacagaactgaccacttgcattaacagagaagaaaaggaaaacaggacatttggttcctttttctgccatcctttcctgtgcaagtctataggcattgtcaagccttttatttccattaggagtacttgcccagacactgtacttgatactcttgtgaatatcatcttcactgtaagatttaattacaaagaatagagcttgctcatacttcgtaacaaaatctggaagattatatgcatttttgcttatcgtgacaggtgaaagtatggtctcgttagcatctccagcacttgacaatccaacaacatcacctcgagggcttaaactgtgttttgagttatcagtgtggctattctcattagatatgtcagaatcaccatgtccatttagcttacttctcgtcttaagcttctcattgttgatccagcttctaccattttctttcacattaatgcctttgttttgataaacactgctttttccttggttattactatgcgtcacaaacttgctagatggaagatatccttttgttgtggaagcaccagatgccttatttgcaccctttgataatgggatgctattagcagcatttggtaaagtttctagagctgatgatgatcctttgatagtttctggagcagattttgcactgcgggcagctttggaggaaggaacaccatgcttattagaagaatattttggtcttgcagcataatttgtttgatgcacaccaactggatgtccctgaaccccatccagaagaacaaaagaagggtcccatgagtacgcagggactagttcaggtccataagcaattggttgagcaaaaatgccaggtgtgctaggatcttgcattggaattgcagtggagtaatatggctctttgctgacatattgaccatctgcactagtaatgcctccaggaacaaccggactatacgaagcatatccactttcataccccgggagataacacaaatatgagccattatcaccttgaaccaccgctgggtgcatctctaggccattatatccaacaaagtagccattctcatcccatcctccatatgagccaggatagtaatatccgtagtaatacatcccttggtccccaatagaagcttcttggttcatttcactttccttcacagtactagctgcgtcgcccgaggaaatgcaagatactgcatcagaagaacttgcgtctttcttagcaggcaagttgacattgcttgccttcgtgctagcatcaatcttcaagctgtccattgcttcttcaataggcttctggcccagctcgcccttgggctccatgaggccacaccagagctcgccgcagaagaacccggggctgctacgcgtgtcctccagctcgaccgagaagggagccggggggggtgccgccggtaccctagcctgctccggccgccgcgcggaggccggcagccaacgaggg

SEQ ID NO: 6928 - DNA, 826 bp, Setaria italica
  misc_feature (798)..(826): n is a, c, g, or t
  Peptide Sequence Number=SeqID_72902
tacttacttagtacttctattgggtattgggtctaaccttttctaagtcctttgggtttgggaaaccttggtcgtggaactggagatagcaactatggcttgccttctggcaattatgtgagaagcaattcaactggtaccattggcgagccattttctgcatcagccaatgcatatgaatcgaacaatccaggtgcatatggcagcagctctatttatggtgactcaacctggaggttcacgtcatctgaggtcgagatgcctccttttaggtcatgaccttggaaatgttgatccggatatcaaatcagacgtatcagcaagttacatgggcaactatactgttaacaacaatcagccaagcagaggtatcacttcctagggagagtattactactatattcatatatgacttggaatagatgaaacacccattctctcaggcatccaggtgcatgggcgtgaatcggtgtttgtcagattaatatacaggttagttttgtctagctaaccagcggtgtggtttacgaacaccaacatgctagaggaggcgcggatacagaaacattttgtgaaggttttctctttttggggtcatgttttagtttaaatttccgtacggcgtggttaggccttttcgtttttgatgaatgagatgtgcagtggtgattattgcggcacatatttagaagtcggtcgtgttccaacataagctggaaaaaggtgtctgtctgtatacggatgaacatgtataccaaccaaagggatgctgtattatgttgcccatttgttaaactnnnnnnnnnnnnnnnnnnnnnnnnnnnnn

SEQ ID NO: 6929 - DNA, 2115 bp, Setaria italica
  Peptide Sequence Number=SeqID_72903
cactcagatttcatcctcggcctcgtctccaagccaagtaacctcacccccagcctcccatgctcgcctcgagatcttagcaggcagcgccggagagcgccgacgagccccccgatccctcctcgccgccgccgccgaccgaccgggggaggaggaggggaggggaggacggacgcgatggaggccgactccgggaagctcttcgtcggcggcatctcctgggagacggatgaggaccgcctccgcgagtacttcggccgcttcggggaggtcaccgaggccgtcatcatgcgggaccgcaacaccggccgcgcccgcggcttcggcttcgtcgtctttgccgactcggccgtggcggagcgcgtcaccacggacaagcacatgatcgacggccgcatggtggaagccaagaaggctgttcccagggacgaccagagtatcgcgagcaagaacaatggcagcagcatagggtcacctggaccagggcgtactagaaagatctttgttggaggcctggcttcaaacgttaccgaggttgagttcagaaggtactttgagcaattcggtgtgataaccgatgtggtcgtgatgtacgaccacaacacgcagaggcctaggggatttggtttcatcacctatgactcagaagacgctgtggataaggctctgcacaagaacttccatgagctgaatggtaaaatggttgaggtcaagagggctgtcccaaaggagcagtctcctggacccattgcacgttcacctgcaggagggcagaactatgctatgagcagagttcataacattctgaatggcttcaaccatggttacaacccgaacccaattggtggttatggcatgagggtggacggaaggtatggcctccttacaggtgcacggaatgggttctcttcgtttggtccaggttttggaatgggcatgaacatggaaggtgggatgagcggaacttttggtgcaaactcaggtttcatcaacagttccaatgggaggcaaatgggttcgtactacaatggaagttcgaacagattgggtagtcctattgggtaccttggcctcaatgatgattcaggatcaatgttgagttcaatgtctaggaatgtttggggtaatgggagtctaaactacccgagcaatcctacaaacatgaatgcttttgcttcacctggaaatggaggtcaagtcggtattactggtgacaattggggaggtctcccttctgctcatgcgatgggcaacatttcaagccttgggtcagggaaccttggccgtggagctggagataataactttggtttgccttctggcagctatgggaggagcaactcaactggtacaattggtgaacctttctctgcatcaggcaatgcatatgaatcgaacaatccaggtgcatatggcagcagctctatttatggtggctcagcctggaggtttgcatcatctgaggtcgagatgccttcttttggccatgatcttggaaatattgatccaaatatcaaatcagacgtatcagcaagttacatgggcaactatactgttaacaacaatcagccaagcagaggtatcacttcctagggagagtattattatattcatatatgacttgggataggtgaaacacccactactatatcaggctttcaggtgcatgactgtgaattggtgatgtcagattaatatacaggttagttgcttgtttctaggtaaccagaggtgtggtttacgaacaccaaaaatgctagaggagcggatacaaacattttgtgaagctttcagattttagtttaatttctacgtgtattaggtctttgttttttgaatgagatgtgcagtgttgattgcggcacatacttagaagtgttccaacataagctggaattctgtcatacggaaggataaacttgtataccaaaggaatgctgtattatctttgcccatttatggctacattagctcgcttgtttttattctctttaaccattccatttgtatactagaaatttgcttggcttaatattcaactattggggcgcaaagccatcttgaccggtaataaggacaccaaacaaacttaaaagaaactaaacgaaacttaaa

SEQ ID NO: 6930 - DNA, 504 bp, Setaria italica
  Peptide Sequence Number=SeqID_72904
ttttttttttttcccttcagcaccggtgcgtgtagcatcgttcccgacgccgacctccctcgccgccggcgacacgggaatcgccgcgtccttccatcgagcaccttctcttgtggggaggtgtcacgcatggagcggaaatccgggatcgatttctcctgctgttggtaagtaagcaaaccctagcttgcttggccgttccattccagtccgtgaatggaagttcgtttcgtggggcggccgcacccgttcgcatcgaaccccaatccgtgcatcctcttcctcgatcgcttgccgccgtcgctcgggaccgcgccgcccgcaagctcgccggtgcccaagtctcgtcggagcagctggagcccaccaggctctcccgcgccgctccgtccgcgctgttccggtcgcccctcacttgcggagccgatttagggctccacctgggtaaggagaccgcgtcgactcctacgatgaaccctaatgatttaaccaacttcgtaaatc

SEQ ID NO: 6931 - DNA, 494 bp, Setaria italica
  Peptide Sequence Number=SeqID_72905
cagcttatgagataagcctgctgcccagataagcgaggtccagagaagcggaaacaaacagggccatgtttagtctgcttctggatgtcctcagtaaaggtttgccataattagggctagccttttgccctcaactttattaaaagcagaagcagagggttttgataagctttagtttgaagtttggattattttgctgtatatattagaattcacctgcaattattgtttgttctagccttagcccatgttcataatacagtactctctactttagtagcattgtacctcactacaatacctgacactccttaacctgctatttacaaattaggttgagctgctccgattcaatcaataaagaagggcgaaaggctacgtgagctcttgctgctgctagaaatactttcgccaggatcatggcaagccttgccgattcttttctagcggatcttgatgaactgtcagacaatgaaggctatcctgaagaagac

SEQ ID NO: 6932 - DNA, 513 bp, Setaria italica
  Peptide Sequence Number=SeqID_72906
caagtatataacggatccaatgatgggatcagaacttcaggttgcaagtgttgcatgtgggggcacggaatggaaatgattaaaaattattgcatctcgattgaaccaaatttccaaatggctttcagacattcacagagtacagtctctagatattctgattccaaaaaagcagcttaacaagtgatgaatgcaattgggtgcaaacagagtaacagtatttatattgacgcactgaaaagttgctgacatgcaaactattgtatttgctattcatggttgaaagacctgatggacaggtaaaaaaatcatagcctcatggagttttatgattactgaaaccagaagcaatgaacccatttggaaattccatacataacacaagtttcagggaagtgttactgtatgccatggcatagggggcacttaaatagagatggacacaaatataaaaaagctcatgaatccatttctccaactttgcagcctgacttgacttctgccctctatcag

SEQ ID NO: 6933 - DNA, 297 bp, Setaria italica
  Peptide Sequence Number=SeqID_72907
cgatcatctcgctcgcccactcatctcgtagccagccttatcgtcagagccgggcaggagcggcgaaagctaaggcgcagcagcgagcgggtacaacagcgggcacagcgcgccgcggggccgtcacgactcgcgcgcgagagagcgagcgagagagggcgatggaggacgacgacgacttcaccttccccaccgtagtcgccgccgcgcctgcgccggcgccgacggaagggcagctcggcgggccgcggccggtggcgcagctgctccatcatcagctccccggttcccgacctc

SEQ ID NO: 6934 - DNA, 413 bp, Setaria italica
  misc_feature (393)..(393): n is a, c, g, or t
  Peptide Sequence Number=SeqID_72908
attttgtttcctgcgataagaaaagaatcttgatgagaaagcgtgcgaataatagcatggaatagagctagcgacatatcttaggaattatagaccaattccaagtacagctcaccacacgggagtctgtgaacctatgagagtatacactattattacaacagaatttcaggagcgaggctgcgataacattttaatatcggaggggtcgcatcacacatcaaccatattctggtggcatgttgcaacatttcgagaaaggtaacgtcggccccccgtacagccaacccattcgtatgctagcaattaggcactccccgaaagatcaaagggacccctttatttcctgattcatcaaaggacaaagttgggagtgggaataaaaaaaaaggngaagccttttaaggaacaaa

SEQ ID NO: 6935 - DNA, 273 bp, Setaria italica
  Peptide Sequence Number=SeqID_72909
ggcggcagaaatgaacgaaggtgctcgtggggaggccagcgcacgccttccctggggcacggcgcgagcggcgccggctgcgcgaggaacgtcgggtaccggtgcccgggcatcagcaccgtcaggtccggcgcggccgccacggggtcctcgtccaccttgggcgagtggccgaccttgtccggcgacgcgtcgtgctggtggtgcaggcgagcggggggcagacccatgcggcggcggccgccgcggccctcgccgctgtcgtcgtcggag

SEQ ID NO: 6936 - DNA, 349 bp, Setaria italica
  misc_feature (259)..(259): n is a, c, g, or t
  misc_feature (293)..(293): n is a, c, g, or t
  Peptide Sequence Number=SeqID_72910
taactacaagtactaagacgaactacttacagcgtcctctgcagtaaatacaatttggcccacagcagccccaggtgaagctggtaagcctgtagcgattacttgatccttgtatgctgatgggttctcaaactgaggatggagaagctggtccaggtggcctggctctaccatcttaatcgcttgacggcgctcaacaagaccctcattaaccatgtccacagcaatctttaccgccccttggcctgtacgttttccngatctgcactgtaacatccagagcctattttccngaacggtaattcaatgtccatcatttcttgagtggctctccagtatcttgcagttc

SEQ ID NO: 6937 - DNA, 503 bp, Setaria italica
  Peptide Sequence Number=SeqID_72911
cgcccccggctccgatctgctaagtcctcccgccggatcgggttacgggtcgcctccccccgaccccgatccaccaccgctcgccgccggccgccaccgccgagtgggtgatcgtgtacgcggtaaaatgctggagccagtagcaatggaagtgccgattgctggcccagtgagcaatgcggtggtgcctgcgcctgcggttcacaatcctcgtgcgcgcaagctgcggtctgcggtttggcaggacttcacaaaggagcgccgtgccgatggaaactgcgtcgctgtctgtaaccactgcaagaagcagctcacggcgactagccggtcaggcaccacgcacctccgcaaccacctcgccatctgcatgactacctccacacgacgtgctggtaagcgccggaagcttgtcgtgcgccgtattcaccacaacaaatcctctgctgatgggcgatctggtgagggccatgcctcgggcgaggacaatgataatgagggcacgc

SEQ ID NO: 6938 - DNA, 263 bp, Setaria italica
  Peptide Sequence Number=SeqID_72912
acgccgccgcccctggccgccgcgcggcgtggcatccgtggccggggaggtcctccaccggcgcctcgccgcctcgcctatgaaagatgaacctgtgatttccacaaatggcggaaatgaggaaacggtcactgacagcctcaatgttgccagaggattgtctcaccctgggctttcatcaagtttatccaataaggcatcagtggtcccaactcctttgcttcctaacgaaccatctgatctccggttcaatcgtcttcgac

SEQ ID NO: 6939 - DNA, 391 bp, Setaria italica
  Peptide Sequence Number=SeqID_72913
tcctggagctttccgaatcccggtggaatggggccggagagggagttgttgtagagctcgatctggatggcgctggtgaggccggtaatctccggcggtatggggccggtgagcgcgttggtggagaggtcgaggtcggtgaggttggtgaggcggccgagcgagggcgggatggcgccgacgaggttgcatccggcgagccagagcacgcgcagcgcggagaggtcgccgagccggggcggcagggggccaggggcgaaggggttgtaggagaggttgagctcccggagcgtggcgacggcgccgaggaagcctgggacttcgccaccgagcaggttgtagacgagggagagcgactggagcttggcgaagcgggcgaaggagtccggga

SEQ ID NO: 6940 - DNA, 154 bp, Setaria italica
  Peptide Sequence Number=SeqID_72914
aaagccatactatgttgatctcattgaaatatggttgcgaaggataatccaacgccacttcaaaggaaagccatactatgttgatctcattgatttgttcaatgaggttgaattcaagactgcttcagggcagttgttggatcttttcaccctc

SEQ ID NO: 6941 - DNA, 494 bp, Setaria italica
  Peptide Sequence Number=SeqID_72915
cctcgctgccttgcctctgcctgccagcagtgtccgcccgcgctcgtgccgtgcgtgccgcgccgtcccctcctcggccgcaccccgtctcctaataaagccgcgtcccacgttgtcttggtttccccttccacccctcaccacctgcgcagcgcagcggcatcacagtcggctctcctctgctctcctcaatcgctctcggggggccctgcttcgctgggagaggaggaggaggcaatggcggcgggtgggaatggcgcggccggcggcggcggcaccgacaccaaggcggcgttcgcgcagatctacaacacgctcaaggaggagctgctcgccgaccccgccttcgagttcaccgccgagtcgcaccagtggatcgaccgcatgattgactacactgtactcggaggcaagtgcaaccgtgggctctctgtggttgacagctacaagcactaaaaggtgctgatgttctgggcgaggaggaaatgttccat

SEQ ID NO: 6942 - DNA, 367 bp, Setaria italica
  Peptide Sequence Number=SeqID_72916
gaccaacgccatcccgtgcggcagcggcacacgcacagcagcttctcgtcctcctcctcctctaggctccctctccaattctgtccacagtattccggccccctccccgtctcctccgcccgcgcgacgtgacgcgaggaagagctccgagcctccgaccccgagggcccaatggcgacggcgggggcggtggtggccaacggctccggcggccccgacaccagggccgcgttcaaggagatatacagcaagctcaaggaggagatgctcgaggaccccgccttcgagttcaccgacgagtcgctccagtggatcgaccgcatggttgattacaatgtgctcggaggaaagtgcaaccgtgggctct

SEQ ID NO: 6943 - DNA, 405 bp, Setaria italica
  Peptide Sequence Number=SeqID_72917
tttggtagttagagttgtatgataagctatgggaaaaaaaacaaagggaggggtgttatcggtgggaggctggctgaccctcacgtggcgcacgtcccgtccacgtcggacggccgggtagtagcattaccgtatttgttaaggtgggaacttgaattactattctcacttttcagcttcaagcttatttcctggtgcttgatgatataatggacaactcccagacacgacgtggccagccttgctggttcagggtgcctcaggtcagatgagaatcaattattctttttcctgtatgaaattatctggctacgttgttgttgtgatggctgtatcaaggctttacttgagaaggatttgactttacttgagaaggatttgatgttggcaccgattgttgaagaa

SEQ ID NO: 6944 - DNA, 624 bp, Setaria italica
  Peptide Sequence Number=SeqID_72918
tgaaatgggaacgtactttcaagttcagggtcaccatagcaggaactagatcggaactgatattgaagattacaaatgctcctggctagttgtgcaagctctcgagcgtgctgatgagagccaaaagcgcattctatttgaaaattatggcaagaaagatccagcctgtgtggcaaaagtgaagaatctctacatagaacttaacctagaggctgtattccaggagtacgaaagcgagagctacaagaagctgatcgcggatattgaagcccagccgagcatcgccgttcagaacgtactgaagtccttcttgcacaagatctacaagaggcagaagtagggccctcttggatagggagccgttgctccattgcatgcttgactgataactggagttcctgatctgtgatgtggcgcttctagctcaaaaattcgatgtagtatgttgcaccttgctgctccggataataacgaggcaaggtgctatttcggtttgatggaccgcatgcaccgcataatacattggttgtcttgtcatttggatcctgtctaagtatttgctctcctctctcctttttttctcaaaaaaagaccaaacggacaacaacaagggaagtaaggaga

SEQ ID NO: 6945 - DNA, 1557 bp, Setaria italica
  Peptide Sequence Number=SeqID_72919
tttactttaccgttaactttacttaagttgtttgttagttagttgtaacgttgtcttgtattgtaggtacctaaaagtaaaattccttattttgtaaggtaagtaaggtaaggtaaggtaaggtactttggtcggtcgggttgggtaatgggaacgtcggtccggacggcgccggcggcaccgacaccaaggcggcgttcgaggagatatacaacacgctcaaggaggagctgctcgccgaccccgccttcgagttcaccgccgagtcgcaccagtggatcgaccgcatgattgactacactgtactcggaggcaagtgcaaccgtgggctctctgtggttgacagctacaagctgttgaagggtgctgatgttctgggcgaggaggaaatgttccatgcttgcacccttggctggtgcattgaatggcttcaagctttctttctggtgcttgatgatatcatggatggctcccacactcgtcgtggccagccttgctggttcagggtgcctcaggttggcttcattgctgtcaatgatgggattatccttcgcaaccatatctgcaggatcctcaagcgtcactttaagggaaaaccttactacgctgatctcgttgatttattcaatgaggttgagttcaagactgcttcaggtcagctgttggaccttatcacaacccatgagggagaaaaagatcttacaaaatataacataacagttcaccggcgtattgttcaatacaagacagcctactattcattttatctgccggttgcatgtgcactgctgctctctggtgagaatttggaaaactatggtactgtagagaacattcttgttgaaatgggaacgtactttcaagttcaggatgactatctagactgctatggtgaccctgaattcattggcaagatcggaactgatattgaagattacaagtgctcctggctagttgtccaagctctcgaacgtgctgatgaggaccaaaagcgcatcctatttgaaaattatgggaagtctgatccagcatgtgttgctaaggtgaaggacttgtacaaagagcttaatctggaggaggtcttccatgagtacgagaaggagagctacaacaagctgatcgccgacatcgaggcccagccgagcaaggcggttcagactgttctgaagtccttcctgcacaagatctacaagagggacaagtagagcccagctacgcttgtggagaagctgctccaccaacgctcacgtcagtttctacttactagacttgacgcggacggacgagtaacatgtactgtgttgtttgtgtttcgttttcgtgttgtaccgtactcctggtctattatatgtcataaagcatagtgctatttagggtgtgtattgtgttaaccagcttgtgtcgctagcatgtattcctgtccctgttgtgtgcttgtgttcatcctgccggaattgctccattgcatgcttgactggcttggttgtaaaactttggtattaacttcggttgtattgttaaagtaactatttctttgttttgttaaatttgggttta

SEQ ID NO: 6946 - DNA, 507 bp, Setaria italica
  Peptide Sequence Number=SeqID_72920
ttctaaggtatcagacgaaggtgaagaatgcaggaaggtgccctctctcgtcttatttctctgaatgaacctgagatgccagtccttctgttaggtacaatggctgcagtcgtatcaggtgttatctttccaatattaggtctgctgatctctggttccatcaaatcgttctatgagccacctcatcaactacggaaagattcacggttctggacattgatgtatgtagcatcaggagttgtttcatttatttgtctgccagtggaatatttccttttcggagtggctggtgggaaattggttgagcgcattcgttctttatctttcaaaagcattgttcatcaagagatcagctggtttgataagccctcgaatgctagtggaaccatcggtgcaaggctgtctgtcgatgcctcaaatatacgacgtcttgtaggcgattcgttggcattgcattggtgaagcactgttactgttcttgctggtattttattattgcaatggctg

SEQ ID NO: 6947 - DNA, 457 bp, Setaria italica
  Peptide Sequence Number=SeqID_72921
tcaatgtccagaaccgtgaatctttccgtagttgatgaggtggctcatagaacgatttgatggaaccagagatcagcagacctaatattggaaagataacacccttgatacgactgcagccattgtacctaacagaaggactggcatctcaggttcattcagagaaataagacgagagaggggcaccttcctgcattcttcaccttcgtctgataccttagaaagtagttcagcatgtgtgctataccggacaatcatgctggcagtagtgattaagtgcatgctggtactcccaaatgaagcacctccacttattgatctcttgagagatgcactatgtatatatttgctggacttgacacttctgacagctgaagtagacctttgataacctgcatcacatgcatctggttctccagttatatcctgcagttggatagctggaagtatgcaacag

SEQ ID NO: 6948 - DNA, 1196 bp, Setaria italica
  Peptide Sequence Number=SeqID_72922
aggttagtctctaaatatttctgcactaacacatttgcatttttccagaattatgatgaaacctgcatgtcattattccttcatgtctagtggaaccatcggtgcaaggctgtctgtcgatgcctcaaatatacgacgtcttgtaggcgattcgttggcattgatggttcgaagcactgttactgttcttgctggatttattattgcaatggctgcaaattggaggcttgcccttgttgccactatagtgcttcctttggggggtctccagggatttcttcagataaagtttttggagggattcagtgcagacgccaaggcaatgtatgaagaagcaactcaagtggcgaatgatgctgtcagcattattcgaactgttgcttctttctgtgctgaggctaaggtaatgaagacctactatcgaaaatgcaaagctccagtgcaacaggggatccgtcaaggcattgtcagtggctcgggttttggtgtatcgttcttcatcctgtactgtacatatgccctttgtttctatgtcggagcaaagtttatgcttgatggcaaggccacattcactgaagtattcgagtgttctttgctctgctcatggcaaccataggcgtttcacagacaagtgctctaggttccgattctgccaaggccaaggaatcagcatcatcaatatttgcacttattgatcgtaaatcgaagattgacccaaacagcgacaacggcatggtcttggctgacgtcgctgctgaactcgaactccgtcacgtatgcttctcatgtccatcccgccctgaaatgcaaatacttgacctgaacttgagaataccatccgggaagacggttgcccttgtcggggagagcggctgtggcaaatccaccatcatcgcgctccggggagacggttaccctggggctacggcaccttcgccatcgagaggggcgcccagctctccggtgggcagaggcagcgcgtggccatcgcgagggccgtgctccgggacccgaggatcctgctgctggacgaggcgacgagcgcgctggacgcggagtcggagcgcgccgtgccgggcggcggccggcaggacggccgtcgtggtggcgcaccggctgcccacgatcatgggcgccgacgtgatcgccgtgctgagggacggcggggtcgtcgccctgggcacgcacgagcagct

SEQ ID NO: 6949 - DNA, 392 bp, Setaria italica
  Peptide Sequence Number=SeqID_72923
gggggatttgctgttggttgtcggcggcggcgcgtccggttccggtggtggcatggtcatgccgcctctgcctccctgcttcatggtcttgatctggtcctcgagcctggcgatctcttcctccaccagcagcagctcggcgagcagctccttggccttggcggggatgaaggccgggatgctcaggacggcggaccgcgccgagctgggctgcagagcacgctccaggatctggtgcaccgtctgctcgtcggagagctgcttctgcaggtcggcgacctcctgctccagagcctgccgccggcggtgctgcgtcatggcgctgccccgagtccgctgcgacacaggcggagggcggtggtcggcgacggcgacggcgacagactcttgag

SEQ ID NO: 6950 - DNA, 1605 bp, Setaria italica
  Peptide Sequence Number=SeqID_72924
cactaaccattacttaatgtttaattctttcctttttttagcatgtgttttcgcttcgaagtcttacacccaaaactgcagcaaagggggcaaaaaaaatgatcttacaaaatggccgcaaacgtactagtcgcaaaccagtagcgccctgctggttttgaagtacacagcacatgcagacacgtaacggtccataaattagaaagccaacctccgaggacagacttctaaaaggcaagtctctcaccatatctatcaacatggcaaacaacaatccatgcttctcgtctgtcaatttgcgtattcaaattcaaggttcagattcagaagcagccacagtgggtgctgatgattgcggcttccctctgcccatggcgaatccacgcgtgccatccggcatgcgaggacctggaggctgtttgttagctgctgagggttgctgcggctgtgactgttgctcattcttgacttggtggccagatggtggggttccaaccggatgggcaccgttacggttgttaccatgttgactgctattttggtgctgctgctgctgattttggtgctgttgattgttgttatattggtggtaaccacgccctcggcctctgccaccacgcccacggcctctgccacgtcctcttcccatatctccagtgccatcctcagtcatgtgttctccagctgcatctgatagttgaggtgcctcttctaattgtttatcatttcgttgatcagatgtcgagacattctcctcttcaccatacccatcagcttcatgaccaccctttttccctttacctccctttatcatgcaagtactcaacaatcgtactctgagcccacttctccagttcctctcatcattaagttctacaatcgctctggaagcatcttccatagtatcatactcaacaaaagcatgaagtttgttggcaaaaaacatatctagcttggcagatctgttagtagctggaccggtgccgtttggagtctgagggtagcaagtccgaattgtcctcacactgccagcagctgaaaagagcctcatcagattctggtaacaatggtcatctggaagattttctgcgacgacaattcgggcctggagttcttctaaatctgattctgtgaatggctgctggcgttttactcttgtcccatcatcactaacgacaagttttgatgaagtccgaagagcagaagcaagcatggaattactttgaaccaaagccttgattttcttaaagccaccaacaactgatattggcacatatccttcagggtccttcgaaataaacctcatcaaatgttcagtagttgctaggtttatatcactgaaataatactccacctgcttcctgatcttgtgcaccgggtcgtcgaagcccacgtccctcgccggcgactcggcgtcgacctcctgctccgcccctgcggcggcgccggggggaccgccgaacctggcaccaccaccagcaaccgccgccgcgtagtactcgaacggcggcggcggggcggcggccccgcgacgaagaacgccgcgggggaggcggtgggaacaggcgcactaccgcctgcggcggcggcggctgtgggggcgcc

SEQ ID NO: 6951 - DNA, 266 bp, Setaria italica
  Peptide Sequence Number=SeqID_72925
ctcgcatttcgtcgagcaagctgtgatgccgccgtctcctctcctcgcccctgccaccgcgctcccggcggcccgcctcgccagggtggtggccgcttcctccggcagcggaggagcgacgcagaggggacccccgcgacggggccggcgcgggaagcccggcttctcgcggcagtcggccatcaagaagagcttccaccaggagcaggtggtgttctccacccctgtccccgccgaccccaccgtcgccgtcatcggcggcggcg

SEQ ID NO: 6952 - DNA, 463 bp, Setaria italica
  Peptide Sequence Number=SeqID_72926
tttttttttttagggttatagacaaaccatagatagatgcattcaaagttggatcaaaaactcatggggtggttaggctcatagtaacctaactaactactaatgcttagctgacaagcactttgacaagtctattaggttctacagatatgaaaaacagacacaggagaatgtcgccgccagcttcacaaacttgagatgatctatttcttcttatcagtgtgagtaccagccgacctcatcttcctgaggacattcgccatctcctctctcttcttctttgccctcttgtgggttccgagctttctcttggcaaccttcagagcacgcttgtccttaccaaccttcagaagctcagtgatacgcttctcataaggagcaaacccagcaacctctctgatcaggcccctggccatgtcgtcaccaagcgcgagctgccgccgcgcccgtccctgcggtggga

SEQ ID NO: 6953 - DNA, 451 bp, Setaria italica
  Peptide Sequence Number=SeqID_72927
ctgtgcaagctgatgattttgaggacatgggtgatgatgatgagggatgatcttatcccttatggtggtcccgatgtcataatcatgctccatttgaccctgcagctcatcagcagtttcttcatcaatgtcctcctcatcatcagggacctctgggggattgaaaaagttgaagaaactctcacacacttcagttttagtaataggcttcgcattctttgaacctttctttggtttcttttttagaatcagatgctaaaggagttccggatttttggcttactgctatgaaaacgaatgaaatcttgtctgaggagatacaagagcgtgatgaagccgctttgaagtatctaaaagatatcaattggtctagaattgaggatcctaagggtttcaagctggagtttttctttgatacaaatcctttcttcaagaactccatcctaattaa

SEQ ID NO: 6954 - DNA, 872 bp, Setaria italica
  misc_feature (1)..(37): n is a, c, g, or t
  Peptide Sequence Number=SeqID_72928
nnnnnnnnnnnnnnnnnnnnnnnnnnnnnnnnnnnnnacttttcaagagcgtagacacccttataggaagtgcaaaaataattacacaatcatataataccatccaattgcatacaactgaaacataagacgctaacagagaagtcccaaaccattaaccctccaccaaagcagcacagagtgctccagacaacagcctaaccacctaataacatcacccgctcacagaaacgaccgaaaaagctccttggcagttcaatggaaaatactgcatcaccaaacaccatcgcaaacatatggataatggggccccaggatagcctactgctgcttgcactccggtggttgttcagcatttccttgtgtcactttctgcgttaccttttgtttgcggcccgagcccgacttccttgctggtttgctttcttcctcctcatcctcctcatcctcttcctcttcctcatcttcatcttcatcatcatcctcgtcctcattgtcatcctcatcatcatcacccatgtcctcaaaatcatcagcttgcacagcctcaccggtaaaccaggaaacagcatgagggatgatcttatcccttatggtggtcccgatgtcataatcatgctccatttgaccctgcagctcatcagcagtttcttcatcaatgtcctcctcatcatcagggacctctgggggattgaaaaagttgaagaaactctcacacacttcagttttagtaataggcttcgcattctctgaaccttcttttggtatcctgggaaaaaccttacacagaagattctaaaaaagaaaccaaagaaaggttcaaagaatggcgaagacctattactaaaactctcacacacttcagtttttag

SEQ ID NO: 6955 - DNA, 554 bp, Setaria italica
  Peptide Sequence Number=SeqID_72929
ccatagatagatgcattcaaagttggatcaaaaactcatggggtggcacggcacataactaacaacacaatgcttagcttgacaagcactttgacaagtctattaggttctacagatatgaaaaacagacacaggagaatgtcgccgccagcttcacaaacttgagatgatctatttcttcttatcagtgtgagtaccagccgacctcatcttcctgaggacattcgccatctcctctctcttcttctttgccctcttgtgggttccgagctttctcttggcaaccttcagagcacgcttgtccttaccaaccttcagaagctcagtgatacgcttctcataaggagcaaacccagcaacctctctgatcaggcccctgaccatggtcaccctctttgttgctttccccttgcggtgggacgggcgcggcggcagctcgcgcttggtgacgacatggcccttgttgatgcccacgaagaggccggacttcggctgcggcggcgccatgaaggaaccaaaccctttaccttaacctagaaagacgaaaccgtaca

SEQ ID NO: 6956 - DNA, 2585 bp, Setaria italica
  Peptide Sequence Number=SeqID_72930
ccgacgccgccaagctgcagccaccagccacggaggccgcggcgccggcgaatccaacgcccgctccggcggcgacgggaccggggctgcacatgaacgtgttcagggacctggcatcgccggaggcatcggtgagagaggctgcggccgaggcactggtgtccgagcttcgggaagtgcagaaggcgtacgagaagggtgcgaggaagggggagagggaagctgccgatggggacgcgtcctcgcagatggaggccgagaaggacgatggactggataactgcgcgccttcagtgcggtacgccatccggcgtcttattcgcggtatctcttcttctagagagtatgcaaggcaagggtttgcattgggtcttgctgttgtgctcgaatcaattcgtgcaatcagggttgaagcagttatgaagttgatccctaatttattggaatattcttcctcgatgaagggaccggaagctaaggacaacgttttggggcgcctgtttggatttggagcaattgtgaggtctggtcgggtttcgcgacagtggacacgtgacaaaagctcgcctattgtcaaggattttgtgaatgaggttgttgaactcagtaccaagaaacgatatttaacagagcctgcagttgcagtgattctggatttagtcaggaagctgcctgatgaagctatattatctgaggttcttgaagctcctggtgttcaagattggttccacagagctgctaatattggagatccagatgcactctttctagctttgaaattgcaggagagaactagtgtccagaaggagatatttgggaagcttctcccatatccattcagccctgagaactttttgcagaacaacatcttaaatccattgctgcatgtttcaaggaatctgccttttgtcttcctcgtattcatagtttgtggcttgtcatcatggagatgcttgttcgagaggcatctcagcatgatattaacaccacttctagcaagaagcacaaaaagaataagaaagccagttcctctgaggataccaaaaagaatctgcaaaatttctgtgaggttgtaattgaaggatctttgctgctctcatctcatgacaggaagcatttagcattcaatatacttctgaacctcctcccaaaattgtctcctcctgctattcaagtagttctgtccagcaaagttgttcttggtttgatggatattttatcaaatgaatcgtcttggttgtacaatgctggcaaacattttctgaaagagttagtgggtgtagtaagcgatgacaatgatcggcgtgctgctgtcattattaatttgcagaagtatagtggtggaagatttgactccatgacgaaaacaaaaattgttaaggagttgattggcaaattccaaagtgttgaagattgtttgtgtcttgtgcaaaatttgatggcgctattcgtggatgaagagtctgtcacagatgaaccatctgatcaaagtcagacaactgatgaggcttcagaaattggcccaactgaagagcagggccctcttgggcaagggaatgttgatcttcttaagagttgggtggtgaatacaatttcatgtgttctaaaaaatctgaagcttacatctaaaggaaattcagattctgaaatggtcaagtgcattgaagaaaaatttcaagtgcagactgaagtattgaaattcctcgcagtccaaggtcttttctcagcatctttaggaactgaagttacatcatttgagttgcaagagaagttcaaatggccgaagaatcctatatccacatcactacgtaatgaatgcatagagcaacttcaattcttgctggaagatgcacaaaaggatgaagctttacatgttgctagtgaggtcaagtccaacgacttaggctactacttcatgcattttattaacaccgtatgcaacatcccctcagtttccctcttcaggaccttgagtggcaatgatgataatgcattcaagaaattgctggctatagagtcaatgcttttccatgaggaaaggaaagcaggccccggattggactctactaagatgcatgtgatgcgttatctccttattcagctgctgctacaagttcttctccatcccgatgagtattgggaggccgctgttgatgtgactatatgttgcaagaaatcctttcctgccattgctcagggtgacaactccagtggacaggaatctggtgaacaaggttcacaggaatctgatgaggatgggtcagagcaatctggtaaggatgggccggaggattccaatgaggaagtgtcactagagtttatggatgttcttgtccagactttcctctctattttgcctcatgcatctggaccggtgtgttttaccattgaacaggttttccgcgtgttctgtgatgatattacagaaactggtctccttgatatgttgagagttgtgaagatcgatttgaaaggtcgtggtcaaactgatagcgatgatgaagatgatggtcgtgttgatattgaagatgatgatgaaaccgtaatggaagatgcaggtagggttggtagaaaattgatgatgc

SEQ ID NO: 6957 - DNA, 1761 bp, Setaria italica
  misc_feature (1)..(56): n is a, c, g, or t
  Peptide Sequence Number=SeqID_72931
nnnnnnnnnnnnnnnnnnnnnnnnnnnnnnnnnnnnnnnnnnnnnnnnnnnnnnnnttttttttttttttttttttagttacaaaccatagatagatgcattcaaagttggatcaaaaactcatggggtggttcggcacataactaacaacacaatgcttagctgacaagcactttgacaagtctattaggttctacagatatgaaaaacagacacaggagaatgtcgccgccagcttcacaaacttgagatgatctatttcttcttatcagtgtgagtaccagccgaccttcatcctcctcatcctcttcctcttcctcatcttcatcttcatcatcatcctcgtcctcattgtcatcctcatcatcatcacccatgtcctcaaaatcatcagcttgcacagcctcaccggtaaaccaggaaacagcatgagggatgatcttatcccttatggtggtcccgatgtcataatcatgctccatttgaccctgcagctcatcagcagtttcttcatcaatgtcctcctcatcatcagggacctctgggggattgaaaaagttgaagaaactctcacacacttcagttttagtaataggcttcgcattctttgaacctttctttggtttcttttttagaatcttctgtgtaaggtttttcccaggataccactcaatttcagttccaatagctttctccaaaatcggatcatcttcatcaaccatgtggtaggtctttgttaggatggagttcttgaagaaaggatttgtatcaaagaaaaactccagcttgaaacccttaggatcctcaattctagaccacttgatatcttttagatacttcaaagcggcttcatcacgctcttgtatctcctcagacaagatttcattcgttttcatagcagtaagccaaaaatccggaactcctttagcatctgattcttttccctcggcagcattttcgctggttggttcatcactgacaccttctacctccactactccatttacaatttcatacctctttgtgtacaaaggttcatacagcttctggtactttgcttccagtgcagctcgttcttcaaaaaacttcgcctcaatgtcatcatgttggccctggatctctctcaaaaactcgacgcgctttctaacattgggcgagagcgtctctagcacatcggcgtgctgacctgccaagctctgcagcttgtcctttaaggcattgacgaggccggcgcggtcctcggcgctgagagctgcggcggcggcggggagggaggcgttaaggtcggccaggtcgaaggtatccttctcgccgcccatcgctggttcttcggcgaggctcggatcgcgctcgattcggagttcgccgccgctgcgccgccgaagagagagaaagagaggacgcgaagctgcgcggcgagaggagagagagaagggatgccactaaaaccctgttccgagctttctcttggcaaccttcagagcacgcttgtccttaccaaccttcagaagctcagtgatacgcttctcataaggagcaaacccagcaacctctctgatcaggcccctgaccatggtcaccctctttgttgctttccccttgcggtgggacgggcgcggcggcagctcgcgcttggtgacgacatggcccttgttgaatagacccaacgaaagaaggaccggaacttacggactagacggacggacgaccaatagaaggaaccaaaccctttaccttaacctagaaagacgaaaccgtaca

SEQ ID NO: 6958 - DNA, 740 bp, Setaria italica
  Peptide Sequence Number=SeqID_72932
ttctctgttgctgtgactatcttggtgggcgtggccaagccgcgacatggggcatgaagcttgatgctgaggttacgtttttttttttaggaaataagatggcaactcaaacatagcaggcataagaaatcacagcacaactaggtagacaaaccatagatagatgcattcaaagttggatcaaaaactcatggggtggttcggcacataactaacaacacaatgcttagctgacaagcactttgacaagtctattaggttctacagatatgaaaaacagacacaggagaatgtcgccgccagcttcacaaacttgagatgatctatttcttcttatcagtgtgagtaccagccgacctcatcttcctgaggacattcgccatctcctctctcttcttctttgccctcttgtgggttccgagctttctcttggcaaccttcagagcacgcttgtccttaccaaccttcagaagctcagtgatacgcttctcataaggagcaaacccagcaacctctctgatcaggcccctgaccatggtcaccctctttgttgctttccccttgcggtgggacgggcgcggcggcagctcgcgcttggtgacgacatggcccttgttgatgcccacgaagaggccggacttcggctgcggcggcgccatgaggaccaaccctttccttacctgaagcgaaccgtctgcggcggtgagatcagcttcagcggaagcagaggtgcgagggtt
